United States Patent Application Publication US 2005/0228172 A9 - sequence listing, part 151

SEQ ID NO: 694856 - DNA, 652 bp, Homo sapiens
aaattatgttctttttcttggcgaattttatttttacataaaatgaaaggcaaaggaattagaactatttttccaaaataaaactccttctgcccttgaacatggctttttgaaaaaaagaaaacaaattaacaaatcaaaattaagcctaatgttacacatttacatctgtatggtgtacccacatataatttcatgaattttgttaagtttgcacactttcaaataacagtgaatagttacgtgcttattaaaaggtcattatttatacacatttaacttttcagttctttttgttttcttttatgacactttcatatatgcacattgcatcctaaccacaccagactttcaagagcctttgcctttgtttttcagatyttaaactaaatcttatctaacaccaccccatccaggaccattttgttttgtttttttgctactctttctgttgttaatgccttttcttctcatttgttgctaatcacagatacacggactttgtgaaactaaatgttattcatcattcatcatttatgatacttgctcataaaactacttctccaacatccttggattagcatagccccatttgtaataaaatctagtaacagctgctattttcttcagtagcatattttgcagtataaag

SEQ ID NO: 694857 - DNA, 609 bp, Homo sapiens
gagtaaaatgtttagagtagagaagtttcagcattacatatgtgtcaacggtgtacatctcatgatcatccttgtataatattttttcttctttaggttatatgataacacttacttgaattgcaaacgaatgcttaaataaaactgatgttgaacttttcttctttttaactgacaaaggtgaacttttctacagtgtgtcaatatctacaactctgaaactgcttacactgaaggcaaaaraaagccactttgagctatgaatgatgaccacctgcaaagaaatgataagactgcaacttttctttcttttcttggcagtattccccttgctgtgttctgacttatgccaagtaattggaatcagtcaaacagataacaagctaatttcccttttttctttcctctcaactcaatacactcatattcttcacaagaaaatgtaacaatgtgtctgtcacttaaaatgaaccaccagatggatctataaaaatagtaaaaggaaaatttggaatacatttcaggatgacacaggttaatatatccataaaactttgtattttctaaaaaaaaattggaattagttaattagttttaatgaaaagatca

SEQ ID NO: 694858 - DNA, 1617 bp, Homo sapiens
gactctgcacataagagactttgagactttggccaatttaataaacacgtccaaccttagtgttctcatgtataaaataggagtaagcatattgacccatagaagactctggtgtttttctttttgtttgtttgtttgttttgcataatatcccttcccaccttctttttcttcctaaggaaactgacatttttcagatacctaccccacatctaaatagctatgtatgtaaaataaacctcaggagactctcagagataggtctaattaaaacccatttccttttccaatgattgtattaggaatagacatatgttcatatgtcccaattcctaagamcctgtgggccttgataaattttattcaacactttgccgaagagtgtgatgattgtcctaaaagcttcattgggtaagtaagggtatggagatcgtttgcctaaataccacctagcctcgttctccattctcctcctcccaattcagtttttcatcttataaatactaagaactaatgctcctttttaatatcaatgattttctcaattgcttagtttatgatgacttcattaagtgaaggaagcatatctgatttcagtttctagtggctccgcccacatggagtgaaggggaaggctgtgagtggaataagtattagtaagaatggagggtttggtgagaaggttatagttggttttgtgttttcatagattttattgaaaatttagaaaataactccacaagaattatattttcctcattactccaacaaattttatatatgtgcacacacacacacacacacacacacacacacacaccagacatggtggctcatgcctgtgatcccagcactttgtgaggctgaggtaaaggatcctttgaggccaagagttcaagaccagcatggacagcatagtaagactgcatctttaaaaaaaaattagccagatgtgttgatacatgcctgtatacctcgctactcaggaggctgaggcaagaggatctcctgagctcagtagttcaaggctgcagtgagctataatcctatcactgctctccaaccttggtgacagagggagaccctgtctcaacgtatttgtgtgtgcatatatgtgtttgtgtatatattattttggccctgtatcctacaaaataataactgaatattttctatgaaggacacatctatctccactgtattctcattagagctccctcatatggatacataatgattgaaacaatggaaaaatcagctctctctagctcctaggactgtcctctgaccatgggccatggtaccaaggaattcagtttgtctcaccacattacaaagtgatcacattctgttcttcatcttaatctttgaaattctctctaaatgtacccctgtacaaatgttctgggcaaactgatgttctcattatcttccaaatacactatctggtctttcctaacctggctcctccctatagcatattgcctcttactgtcccctctattcaccccacatttatgataactcttcttggtaaagctggttgctgagtaggatatcaacaaaatcttggaggtaaaaattttgtcccaagccctgctaccaaagatctgaagt

SEQ ID NO: 694859 - DNA, 1617 bp, Homo sapiens
gactctgcacataagagactttgagactttggccaatttaataaacacgtccaaccttagtgttctcatgtataaaataggagtaagcatattgacccatagaagactctggtgtttttctttttgtttgtttgtttgttttgcataatatcccttcccaccttctttttcttcctaaggaaactgacatttttcagatacctaccccacatctaaatagctatgtatgtaaaataaacctcaggagactctcagagataggtctaattaaaacccatttccttttccaatgattgtattaggaatagacatatgttcatatgtcccaattcctaagaacctgtgggccttgataaattttattcaacactttgccgaagagtgtgatgattgtcctaaaagcttcattgggtaagtaagggkatggagatcgtttgcctaaataccacctagcctcgttctccattctcctcctcccaattcagtttttcatcttataaatactaagaactaatgctcctttttaatatcaatgattttctcaattgcttagtttatgatgacttcattaagtgaaggaagcatatctgatttcagtttctagtggctccgcccacatggagtgaaggggaaggctgtgagtggaataagtattagtaagaatggagggtttggtgagaaggttatagttggttttgtgttttcatagattttattgaaaatttagaaaataactccacaagaattatattttcctcattactccaacaaattttatatatgtgcacacacacacacacacacacacacacacacacaccagacatggtggctcatgcctgtgatcccagcactttgtgaggctgaggtaaaggatcctttgaggccaagagttcaagaccagcatggacagcatagtaagactgcatctttaaaaaaaaattagccagatgtgttgatacatgcctgtatacctcgctactcaggaggctgaggcaagaggatctcctgagctcagtagttcaaggctgcagtgagctataatcctatcactgctctccaaccttggtgacagagggagaccctgtctcaacgtatttgtgtgtgcatatatgtgtttgtgtatatattattttggccctgtatcctacaaaataataactgaatattttctatgaaggacacatctatctccactgtattctcattagagctccctcatatggatacataatgattgaaacaatggaaaaatcagctctctctagctcctaggactgtcctctgaccatgggccatggtaccaaggaattcagtttgtctcaccacattacaaagtgatcacattctgttcttcatcttaatctttgaaattctctctaaatgtacccctgtacaaatgttctgggcaaactgatgttctcattatcttccaaatacactatctggtctttcctaacctggctcctccctatagcatattgcctcttactgtcccctctattcaccccacatttatgataactcttcttggtaaagctggttgctgagtaggatatcaacaaaatcttggaggtaaaaattttgtcccaagccctgctaccaaagatctgaagt

SEQ ID NO: 694860 - DNA, 847 bp, Homo sapiens
gagggaatacatgaaggaggggaaaatgaggaakttttttttttttaaggtgggaagagggagaggatcagggaaaatagctattgggcactaggcttcatacctaggtgacaaaatactgtgtataacaaatcctcatgacacaagtttacctatgtaacaaaccagcacatgtacgcctgaacttaaaataaaagtaaaaaaaaaaaaattaaaacaaaaacaaattaaatgaaacagattgatgagtcctggactggggaagggaggccacagcatgcaggcaaaaaggagtctctgtggctttggttttccagtttccatgaagcccccaatacctgctcacacggggccactgctaaccccctgctggccagtgtttccctgagagttgtccaaggaccacatcagaatcagccagcgtacttgttaaaaataaagattcctagggacttccacctaggattctgttaaatgaaaatgtctatggagagtagccatagacctacgtatttaaaaaacccacaccccaggtaattctgatacacactcaagtttaagaacagcagctggagtccaggagttctcaactccagctacaaaacagaatcaccagggaagcattgtaaaaatgctcatgcctagactctgtgcagccccatttaatcagaatatttaggggtggagatctgcataggtgttaagcctagaagagaatatggggtgcagctcaaaatgatacttgcatattctaccctattgcaagatcagcagggactaagtttacttcggacaggaatctttcctttactgaatgaatagaaataaattctgggctgaaatcttt

SEQ ID NO: 694861 - DNA, 747 bp, Homo sapiens
tgcacaagccatgatctctaagaccctttccttttcctcagcagtgctgttttcatttgcattctgtgaagtgagtatccagtccctctactcacagacttctgctttgtccccaggaaacaaattccatcacagtctatgctagtgtgacacttccagagagctgacaccagagaccaacaaagggactttctgaaggaaaatggaaaaaccaaaatgaacactgaacttggccacaggccccaagtttcctctggcagacatgctgcacgtctgtacccttctcagatcaactccctggtgatgtttcttccacatacatctgtgaaatgaacaaggaagtgaggcttcccaagaatttagcttgctgtgcagtggctgcaggcgcagaacagagcgttacttgataacagcgttccatctttgtgttgtagcagatgaaatggacagtaatgtgagttcagactttgggcatcttgctcttggctggaactggataataaaaatcagactgaaagccaggacatctgagtacctatctcacacactggaccaccagtcacaaagtctggaaaagtttacattttggctatctttactttgttctgggagctgatcatgataacctgcagacctgatcaagcctctgtgcctcagtttctctctcaggataaagagtgaatagaggcygaagggtgaatttcttattatacataaaacactctgatattattgtataaaggaagc

SEQ ID NO: 694862 - DNA, 600 bp, Homo sapiens
cagagaatttaaagaagtgtgaccactctttttgcaccatcagcccccatccacccttgcacatccagctgcctttggatttaccatctagtacttaccatctagtatactttataatttaaatatttgtttttgtttattttctcacctctccactagaatgtaatctccatggagacaaagatttttgtctgttttgtctactattgtgaacattcttgaacagcacctggcacatagtaagcatcccatgaatatttactgagtgaatggacatatctccatcccttctcttggaggttttctgtctagaatgttaaagctcagttccttttggtagggagtctgggcttactcagtggcctaaggactcaccaggagctgttcttcccttgcctggaacgcttgtttaagttccattgattttatagattgaaataattagtttatgtaacaagattttatctayggctatttatgctgcttacaagaagaaagtcaaggctaaggcagagtggtagcctgtctaggcattaaaggagtgccccaaaacagagccaatctgcaaagacaagcacagaaatttatttatttgtttgt

SEQ ID NO: 694863 - DNA, 600 bp, Homo sapiens
cagagaatttaaagaagtgtgaccactctttttgcaccatcagcccccatccacccttgcacatccagctgcctttggatttaccatctagtacttaccatctagtatactttataatttaaatatttgtttttgtttattttctcacctctccactagaatgtaatctccatggagacaaagatttttgtctgttttgtctactattgtgaacattcttgaacagcacctggcacatagtaagcatcccatgaatatttactgagtgaatggacatatctccatcccttctcttggaggttttctgtctagaatgttaaagctcagttccttttggtagggagtctgggcttactcagtggcctaaggactcaccaggagctgttcttcccttgcctggaacgcttgtttaagttccattgattttatagattgaaataattagtttatgtaacaagattttatctatggctatttatsctgcttacaagaagaaagtcaaggctaaggcagagtggtagcctgtctaggcattaaaggagtgccccaaaacagagccaatctgcaaagacaagcacagaaatttatttatttgtttgt

SEQ ID NO: 694864 - DNA, 608 bp, Homo sapiens
aaaacattcatttctaaccttgctttttcaactagtgacccccactcttctaactctctcagttcccacacttagccatcaagataatcagattgtattgttagagctaagagggagatagctactatctagtaaatttcctctgttttggctgaagaaactgaggcaaacataactttctatatacagctggtgtcagtggccttgctgcaaccctgcactatatgaagttgtcctctgctagcccaggaactctcatggtggcattccacttgaaaatcctctctggggacacatgrcacttcagatcatctttccctctccctataatgaaagcctgctctcagctgcttataatccagaaagagcagaatggctaatccatgttaaaatgttaaagactgataaaagcttaatgtgttttctttcccagtgggataagaattcatttttaataggaaaaacatatcttcatcctcaaattcccaaaatgttgatgcgtatagccctgctgagtgcaatgttaaaataagtgcaatggtggggttgggaagggagaacaagagttccaaggtcaaagaagtttagaaaatacctattttgttaaa

SEQ ID NO: 694865 - DNA, 674 bp, Homo sapiens
ttaaagtaacaaaaaaaagtgacccattaagtatgtattttgaatatactgcactagaataccagttcccaaagttgagcccggattcctgctcacaatctcctgtaagcctttttcaaattattcactggacctcataggtggtggtagcagagaataattcaatcccttaccctgacctgtagtataataaggtattcagtataagagtaaaataaagttcttcaaaactgctggggggtttggaatgaagaatttctttaattccaggataaaagtaaaagtcaaggtaaaaaaactaaatttttaaaacagttactcaaaaagctaaaactttgaaatgatagttattatactataattcctttccttctctcagctaaattttcactagtaatctttactgtatgtgggcttctaaattcaatgtcaggactaggactagcaattagtcttgtcttttaatccagtctattaactcttgcacttgattccctctaggaacaagagcaactttatcataaagtcataattcctgatatatgtggaaagtgatgctgttgaagtaccatcaataaagcagatgtttcacagtggttgtgattaatttgtgctgatcttgawactaccttgctcttgtaaccaacatttacatttgcaagctggtagaattt

SEQ ID NO: 694866 - DNA, 659 bp, Homo sapiens
agttactctgtgtctgaagtttctctaagtctcaattttttgatctgcaaaggtatctgggggtaataacaatatttacttcttaatagagtttaatgtgaatatcaaagaaatactctgtacaaaagacttagcacaatakgtggaatatagaaggtatattaactaataaaataatattaaaactgtaggtcttctcattgatgctacttttgtaatagttagaattattctaaaaattgctaccaaaaattacgtcaagtaaatatttatggcaacccattaaggaagaatataaatggaaaatgtgcaaaataaaaaaaaattacttgatccttttgtgtgtaccattcatattgttcaagactcgtacttttaaaatagagtcatataagacaaatattatatagtgtggaacctaagttctttagaaaatgaaaagggaactccacctaatatgtagatattcaggaaataaatcatgtaggtagaaaacacctcctatattttcttttggttatacatttttaaataaatgttataaatttatttcataaatttttggtagataagtcagaaattttttcctttacctttccaaaataaagaatctttctgctttaatttcacagccttttgacagaccacttacctattcc

SEQ ID NO: 694867 - DNA, 659 bp, Homo sapiens
agttactctgtgtctgaagtttctctaagtctcaattttttgatctgcaaaggtatctgggggtaataacaatatttacttcttaatagagtttaatgtgaatatcaaagaaatactctgtacaaaagacttagcacaatatgtggaatatagaaggtatattaactaataaaataatattaaaactgtaggtcttctcattgatgctacttttgtaatagttagaattattctaaaaattgctaccaaaaattacrtcaagtaaatatttatggcaacccattaaggaagaatataaatggaaaatgtgcaaaataaaaaaaaattacttgatccttttgtgtgtaccattcatattgttcaagactcgtacttttaaaatagagtcatataagacaaatattatatagtgtggaacctaagttctttagaaaatgaaaagggaactccacctaatatgtagatattcaggaaataaatcatgtaggtagaaaacacctcctatattttcttttggttatacatttttaaataaatgttataaatttatttcataaatttttggtagataagtcagaaattttttcctttacctttccaaaataaagaatctttctgctttaatttcacagccttttgacagaccacttacctattcc

SEQ ID NO: 694868 - DNA, 659 bp, Homo sapiens
agttactctgtgtctgaagtttctctaagtctcaattttttgatctgcaaaggtatctgggggtaataacaatatttacttcttaatagagtttaatgtgaatatcaaagaaatactctgtacaaaagacttagcacaatatgtggaatatagaaggtatattaactaataaaataatattaaaactgtaggtcttctcattgatgctacttttgtaatagttagaattattctaaaaattgctaccaaaaattacgtcaagtaaatatttatggcaacccattaaggaagaatataaatggaaaatgtgcaaaataaaaaaaaattacttgatccttttgtgtgtaccattcatattgttcaagactcgtacttttaaaatagagtcatataagacaaatattatatagtgtggaayctaagttctttagaaaatgaaaagggaactccacctaatatgtagatattcaggaaataaatcatgtaggtagaaaacacctcctatattttcttttggttatacatttttaaataaatgttataaatttatttcataaatttttggtagataagtcagaaattttttcctttacctttccaaaataaagaatctttctgctttaatttcacagccttttgacagaccacttacctattcc

SEQ ID NO: 694869 - DNA, 624 bp, Homo sapiens
aaggatacacaaaataatagtaatgactgcaaaggaaaattatttactaataaaataacatttttaatgtcaaaaagctaaaatactttgcaatcttgatttttgcaccagccttttccacttaataactttatgaaaatacatattttaaaaaacaagaaccagatttttgaattataacaaaatgtttattcttygttaaagataatataattttatattattttaaaaatcaagacaaaaaagacatatgtaggctatacatattattaatattacataatttatatgattaaactatatattaaataataaaagaattaggtcagaatagaaattatccttcacaaagtgaataactgaaaatatcatgagctatagtttgacattcaagctataatatcatttactatttctgtctgatagtttaatcatgttcattcatgagccatttttaactatttaaaatatcagtatggtgaatattgacaaatccctctttaaagttttgcaaggaggtcataaagtctagagtaaaataaattaacttagtgaatggtcatttatattgtaatatatgattcattcagtatgttatctcattagaaaatgcatagtttgatg

SEQ ID NO: 694870 - DNA, 979 bp, Homo sapiens
aattaaggtctggtctgtcttgtcctcccgtaaattctgttttcttaaatacatggcccatgcttgtttaatgaaagctgagatatactgagaatgatttaggggaatgagaaaatggctttttggaggaggtgacatttaaagtaaactttgacaaagtataaggtcttgctttgatgaccagtatctattttcttttttgacaattatactcagtttctttgaaaagaaatgtcttttctattgtgggctgtcttgaggaagctgtcaatcaatatactctttttttgccctgagtctctttcccagtatctgaccctgacatcaaagaatacaaggaagcaaaacacacgtgcagcttatttattcctgaggcagggcctatgtgagtctgtagactaagttccttacagggatgctgtttgacatgtcctgtctgagtcagactatgtagctgtttctttgattttgtgatctacccatcatccttacacattgacatttttgcttcaatcargcaggtagaattgttttagtttattgttaatagtagtcaaacaacacaagttggtgcaataattaacataccaaaaagttttgcttttttatatttacgtaactattatatttcatggaaaatttcacagtttgctgagcattagaacatagaggggggaaacaaactcacaaacctagttcccctgccaaccaaattgtagatagctgagttccaggtagtcttcatacaaatttgccatggaatgttagacaattcactgagccatttgaaaagttagtttataaaagttaccatcctgcacttatctaatattatatcaatcaactgatcattaccatgattctagctatattctttatattgtgaagttttcattgattttgacagtgtttttggtgtgctattatggaatacagtcatgtgaagcctggcttcacgtgtgcaaatctatgccctgta

SEQ ID NO: 694871 - DNA, 2235 bp, Homo sapiens
taatgccattcatgaggactacactgtcatgatctaatgacctcctaataccatcacattgtggggttaagagtttaacacaggaattctgggaagacacaggcattcagtctataacagaggtcatttgttgtctgttcactgcaatatcacartaacatccacttatcccttgccttacaggtcctatggaactcccagcttctctctctttctgcgccatattggtgaccttacatttctgtgaggtcctatctactttgattacctactcactgccttccttgtccaccagtcaaaagctatacctgggtctgcatttctcggccctctcttctcttcctcctttacctaaatcattcctctctctccgatcttcttacatcaagtgcacctgctttttcccagtgaactgcttttttttccattgcacctctttaaatattgtacattcacttatacagtcttagagtttggaaaacatgtgagaaacactttcaaataactttggcctctttggaaaaagaaaatgaaaagaatgctaaatgaaaacaatgaatgttttaaggcagtattcatccaccgctgaaatggaagttagacagagattagctttctggtctaaatctcagcttttgtccggctggctggtgctattcatttcctgtttgccccacaccagtgcactccagttaccagaacggcaagaggggatgtgttccagaaacagagggggaaatagtaaaacaaatgtgtgctccaattacttatttttatttcttggattctaatacatcaagtatattaaacaatcagatagattggagatgaaattcaataaatgtatcacaaaaatatgcctgctgctttgcattttcactaatataaaaattagtaatttctaaataactgttgaacaatttttacctcttccaactttgttctttcagtttagcacatgacttcaactatcttaaacacagctaaacattacagaaacaatgtttaaattttttagaaaagttaattttgccctgcaaataaaaatatattgtagatgactaaatctaatttaattgtttgaagtctcatcttatttaatcaaaatcaggtaccaaattcctacaagagtggagtttgtcccataatctggatggatggatgtattctaaatttgttcacaagggtatctgagaagatataaatagatcagtgggttaaaaaaaataaccatcattgtctggaaaattgctaaaaatacattcaacaaaacaatgggcaatagcccagtagtttattcttagaagaacggcacatttattttttgtgtaggacataaatgaagggctcaagtaacttccagcttttttaagaagttattgaggaatcaaaataccatagagtagtagttaataagtccatctgtgctccaaacctggccaggtcactttatgtgacgctatttagtttctttgtgtatcagttttctcatttttaaaatggttaataaaatgaatttatcatatagcttgtaagagtaaaggagctaatacaagtaatgtgcttagaacagtaaattccatgtaaaagtcagctgttaatagtctaaccagcattaagaatcatctgcagaaaaaaaaaatgggtcagtgttactgagccttctgtaaataaaggaagtgtcactaaatgaaaacctcaacttgtctgtgtggactgcgcagcattaaaatccttaaaagtgactacggctcctttgttctatagttagaattgcacgtaagtcaagacttctctacatgtgtgtctcacctatggctctgtttctcgtatattacattgtatatttgtcagtcataatagaccaggtattttttcaggacctctccttgacaccttgtcttttagtatttgcatccccaggatctagcactgagtgtggcccctaaaaattgttcaggaaatacttggagaatctcctaagatcacttgcgtcaccagagtctctgtttggcttctagcaatggtttcttccattctactgagcatttagacctccttgaccttttctagaggctcttgagagctgggatttttaagattgaatacataatcatccaatgaaaatgttgttttatttttcttttattttgagatttgcactttttaaaaaatgcagttctgaagagactatagagaacataaagaaaaataactactctaccagcttgtttt

SEQ ID NO: 694872 - DNA, 1304 bp, Homo sapiens
cattaagattttattcacagtgtggtgggtgtggtactcaaggcctttaatgggattttaataatccaaacctaattcagtctccagatgactgtgcaatataatggagataatgctgctttacttttccttactcagaaggtggttgtgaaggtctgctcagggtagccagcgtgcctttcccaacacccttctttctgttttgctggttctgctttctctcattctctaaacatggctttggtccttgattctttgctctttgaactgtacaattgttccttgrgggtcagtcagctgtcttgtggttcagttattcctgtgtggatgactctacctgcagcccagccctttattttaagtttcaggtcccatttatctttttgtcacacatttctaatctccctacaaatcagtatttttaaaaaccagagtcatcccaaaccaactgaccctctagattgccttacttcttgcagatttagtcttaccgtcttccagatactacagctgcctttgggcttttcatcatcccttatccttagccaccaagtcctgctgagcttcttttgtaatacttctctcctgcctcctccactgcacacttgtaccactgagacagtctcttaattctgcccagcacctccagccccatctacacccctctagtttgtcctccagcatgttgttttaggactgttgctagcctaattatttgaaatgaaatttcagttcttaacttggcatccaaacctttcgtccattgcatttctagctttaccttctaatttctagctttaccttctaattcacttaaatgagatacaatttaattaaaccatgtattccttgcagcttctgtgctgttttccacatctgtctctttccccatgttggcagggtaaattttagaggtgtaatgaaatttgcaggtggaagttatggggatatagattgtctttagcttaatgtaaggatgacctttccaacagaattgctaatgatggggtgggtatcatggaagaagtctacctgtcatctcccaggtcatctactgtcatctcccctttaaagacctcatcttccatatctgcacatttggcttctcctctcttttgaagctgcttgtttccatgtcccatgatgctaaacttggggactcctcccacctctcagattgtattttctctggttctttctttcactcctttagtgaatttgctttttcttttcttcttttcctgtgctctttcttgaaaaatttcactgctcttagacttagtgtttaccttttgagaaaaatt

SEQ ID NO: 694873 - DNA, 441 bp, Homo sapiens
aatggtctgaaataattacacttagatgtttaatataacccactggtggtgttttggaaaacgttgagtggttggtagggagggtcagcatttaaatgaccttgaaaccagcagtttttcatgcgtttgcatgcatcagaaggcagatttttttkttgttgttttttttaaaaaggttttgggtatttcagaactgtaaggatatggaacataggttgggcagagtgttgtttcttttctttttaaagaaaatcttgttaaaaaaatttggaaatatatggaatgcatgcttttttaaaaaagtatcctttataggttcaaaaatgctttaaaaaaatagagatggggtcttgctaccttgttgaccaggctggtcttgaacttgtggcctcaagccatcctcccacttcaacctcccaaagtgctgggattacaggtgtg

SEQ ID NO: 694874 - DNA, 1090 bp, Homo sapiens
tgtatatttgggaatcctcagtgtacaggcagttgatgaatgaacatccagaaagactagaagcatggtatgcagggaaccttggagcatacacatatttaaaaattgggtggaggagaaaagccagtgaaggagactaagaaagacgattatagagagaagaaccagagctgttattggagccaaggcctctttcttcaaggactgagaaggggagagtttgtactttggagtttgcacagatcacagacatgaaaaaggaaagatgatgatgagtggaaaatgggaggtcaggactctcctcccatcctgatgtggcaagaggcttttctcatggttctggatggaactttggccctgttgcagatgctcacatgcaacgttctgttctaatcactgttctgctggcagaggaggctggagtgatgagtgagcatgggctcagcttgcgtggatgctatgagccgtaggtcctactcaagagagtcagtctagtaacaaattattttcctctccttcttttgccatcccatttagtttgcaggatggttggtgtttgtgtgggctgagattcctcagagggaaccaaagccctgagaaacatgtgtagcagctgttgatttgggtctccacagtgagatccgggtctaatacagtgagtccaaccactttatctgagttwggaaataactatgagtacatagttaagctgttttcaaaaaacacagaggattctgtactgctagtgccattgagggggcttttgctgccatttattttcaacttatttttttgaggtggagtctcactctgtcgcccaggttggagtataatggcgtgatctcagctcacagcaacctctgcctcccaggttcaagcaatcctcctgcctcagcctcctgagtagctgggattacaggtgcccgccaccaggcctggctaatttttgtatttttaatagagatggggtttcaccatgttggccagacggtcttgaactcctgacctcaggtcatctgcccgcctcagccttccaaagtgctgggattacaggcatgagccgccacacccggccttgctgccattttta

SEQ ID NO: 694875 - DNA, 536 bp, Homo sapiens
ctaggctcaagccatcctcttaccccagcctcctgagcagctgggattacaggcatgcgccaccatgcccccagctaattttttaatttttcatagagacagaaaggtcctctaggttgcccaggctggtctccaagtgcggggctcaagcgatcctcttgacttggcctcccaaagtgctgggattataggagtgagccactgtgcctggcgaaaccttcattttaaaaacatacccaaatctttctgagcactcagcctttcagtcctctgttggccttgcccactatccttttgaggtggggcacagtgttttcctttcccttctcagcctcttccctgacagctgtctgcagatgcccttccctgccctgttcatttttcttcccggtgcccatccccaggagactgcgctggcraagcccaggagtgacagtgtagtcaggtcagttcttctttgtcttgttggctgctaccttcttcagattcattgctcccctgtttctgtgtttttccaatgcttactgatgtgtttt

SEQ ID NO: 694876 - DNA, 593 bp, Homo sapiens
ttgtttctattttaattaacagctcaaattgcgtttccttgagatttgccagagtattttccctaaaagaataagctaaatattttgtactatattattctaaatatttccttaaatgtatataatacaatccaaaattatcatgcttacttagtacctttattcttctactagattgcaaattcactgaagaaagagcrtctatcttattcactatgatattcctcatatatcaatgtatacctggtataactaataagtgaataaacaaagtaaaagataagaatctaaatattaaacagcattcaaaaataattaaaattatttatgcattaatatcagggaccagttataaggtactcactgtgatcagtttaatgtgtgcaaatttacccttagtaggatctctttgactaaaaatgtcaatcactttctacacttccagcaatggttaagctttgaaacaaaaaaattgatcccagaaaatccttcattgtaaaaggtagatttcatacttcaaatgatttttaacttttacttaatgtcattcccctatatagatttacagttgatattatcaaaagtaaatttga

SEQ ID NO: 694877 - DNA, 1851 bp, Homo sapiens
aataggtaaagactgttgtgctcagaacaccagaaatctattcgaactaggtgaaaatttgctagtgaaggtatttgtgaaaatagaaatgcagcttatgtaaaacctattcacttacatatgcccacaaatacagaaacatctgaatgctcagttttaacctattcctcagtaggttaaagtgctctgggcttacttgtctcttcctcttgacttggagagaagagaagcctttgcttttactcggcatgaaggaacctcaggatagtcacatctcaactcttagatgcctgagagctttgtaatgcaaatcaggctgctccttttttcttaccagcaacttaatttgggacaggattgattgactagaaagtttgctaatcagtttgaaacaaaactaggctgggggccaatggaagtttgccagaacctcccttccgaagacaaggtcgacagctggtctcactttggaaatgcttttgcccattatcttatcatttggtccattttatatggtccacatctcaaattacaatgtttattttgaaggcactccagagaaaagaaagaaaaaaagacaccacacatgacttagagaacagattttataatactttgaaaatgaggtacctcgttgtaaatttaaaatccgcctcctgattgttttagagttgataagtatattgacggttgtgaatgactgtgagctgtggcttttgggtgtagcggatgtgacaacytttgttggtgaagcaaagaaaacaagtttgatttgaccatgagaacatatgaattcctgaactgttaaaaataataactcttgtttgtgtcattctccaaagttttaaaataaaattagatcattgtgcccaaaccaaaaagttctgaagtcattgaagtgacggaatcataggatgcactgcaggggctgaaattccaaaccttgtagggacaggaaggtaacgtgaatgtatgaatcggactaaatgtggatagcagggaagagtgggttctatggaaaactagaaagaatatgcttctaaggatgttcaaatttggatttagaaaacaaataccaagcctgcaaaacaagagacctggaataaattatcagctttgaaaaaatcagagtttgaaaaaatatattaattcttatttcagagacatccatgtaatttagtgtctttcacaaggcagacaaaaagagcttaggagagagagacaaaggaaaatagaaacaaacaaaaggtgttaagcttctaaaaaacaggcactgtgttgggctttgaacatatagaatagcatgaattctcaccatgactacctgcagtagccagtattattcccacttcatggatgaaagattcaatcttagagagtttacgtaacttataacagcagaaaagcaagattttaattacaaatcctatgttctcttctctatactaaatgtatgaactcaagcaagttatttatcctctttattcttcatgttttaatgggcataataatggtttattcactagaatattttaagaattaaaaaagttaataattgtaaaaattctcacagaattttttttatgtttgttgaatatgaaagtatgataattacttttgttgagcaactatcagcatagcagatgtttaaactgtttctgcagagggatttgggcaagacaccttttattcttatacctgggttttattgtgaagttatatccagttaagcttgcaagaatttggagtgcagcctgcagttgtatgatggctgaggaatacaggaacattgtggttactgtaaacatgagagtaataactgcaaactaaggaataacagtatatcaatca

SEQ ID NO: 694878 - DNA, 3601 bp, Homo sapiens
tgagcaaagcttcctcttctcagctcctacagtttggctgatgctgctcaagagtcccccacagtcctggcatctggtttacttctgggaggcatctgccctgctgaaagacaggaggcggcggaaagaacagatagaacaggatccccggggctctgattcttaagggaaagcaacatgaccttggctggtggatcggctaacaagaggcttaaatagaggccctgttgctccctacaagaagtttggacacactgtgatgaggcatttgaaagaaaaccttccgagtacagtgggaatctgtatcataaacaaaagaagcctttggtatgccctgtgtgccccctgcacagtgcactcagtacataactacagactgttctgcaaaaaaatgaaacaactggaatttttaatatcatgtctgagatttcctgtgagaacatggtgtacacgttctactaagttcaaggtgcgattttcccctaattgttttcaatagttccttccactgttagcatctttcagaaaaatatcagcacattgctttccctagagggaatagaagagaataaaatcccatgatttaatctttaaaaagttgagaaacaaaagtcaaaaacatccaaatttaatgctgccttttctagcttatgcatgttacgttaatatctaaatgatgtccagaagtatttacttgtgtcatatttacagaactggctgacagactttaagaaacttgttttggcttttgttattaatgttctcaggaacacttgacatgaaagttctggttttctataaaacagagttttgacatttttggagaaacttaaaataggtctactaggttctggtgaattcagaatattcagaggacataaagcatgactgatgaggagcataggattttgtgcctcagagcacttaccattgattaaaggcctttaggttggattctgacctggagatagtgtccactgacttcacggcagtctctcttctgcaaataggggtactgcttttcctcatccttatggaaatgatatagtgggatgtgaaaacatgtggtttcccccttgaagttctaaacattccaaaagtgtcatttactcactagatccttamtagatcttccttctaatatggattttttaaaaaaaatttagatcactcttgctttcatgatttgagaaggtgttacttagagaaataaggcaaaaggaaaactttaagattgacatttgtctagggtgcctccaacatttctagaacattagatagattatcactcgatctcttgttttgaaagcaaattggtttctagaagacccactttgatgatgagacctgtggaggttttcatcacagatgtttatttacatggagaagaacccctgaacatggtgaccagatgaaaggcagctcagggctgagctctcgggactcagctctgccatcagccaccagccacattttcctctgtgtttatgaaaatgatgcacccttacactcaatgctacagttcttgagtcagcattgtgcaagttgattatccaaattggtccattcttgtcatacccaactaaatcagagaagaggggtctgagtaaaaggcactcagggtacataacgtcactctagaaatgctgttgtctgcaagtcccgtggctgaaactgcctgttgtaaccagagaccactttcatctgtagcaggtgagataacaactgcaaatcaaggactagttttgcccaccacagtcacccaccaatcagaccttaccagcccccaaaactttgctaatatcaaagaactttctcacaggaccacaaaggaacagtcctctttttccaccttcggaccaccctgtctgcctctatattgtgaattgcaattctttcttcctaaatattaaatttagagattcagctctacatttttaatttgctttagagaaggtcaagcagacacttgccaaaccctgtggtttctttgtcactgtgtggctgggttcgttcctcttcattttgtcctcactcacagcttcctttgtctgaagcttccttctcactgacccgcttacctcaggtggcttctcttctgttgtatcttaagaggtagctgctgcaagtctttcttaattcactggggaataatggcagcctctccaggccttctgtgtcaagacctcagtcctggtttgctgcaaagctcctcacccagccttgccagatagtcttgttttgctttcttcttctagtcttcaaatcccactctgattttgagattcttttgttaaagcccagcagcaaggatggtggagcgtgcattgggtgtttgggtggcaggacagctggtttctagtcttgggttggaaaataccaagtgatttggctttggggaaatgactcccctttttggtgtgagggattatttctagtaaattgtaatgaagagatttcatatcagtcaacagaagtggttctgagcatgatcactaagtgggagcgggagtcacaggtcctcaaggcttatctcctccagggcagttttatctctgccccaggaaggaagtacgtggtaatatatttcctgttctggctgctggttggaagttgtgagggtgattgccaaatgaattctctatatgtaatccagatatcaactggcatttcctgctcctgtgatctagataagagaggcctagcaagcaggccacttgccgtagatgccgagtttatggtccgcatcacttttttatgtaggctgaacctggcccacatgacgtctgcccagatataaaattccacctcttccttgatttccacctaaaatgtcactcacctgaggcaaggatccatggagatttgaaggagacatgtgagagtacgcttcagaaaggcacgtgctcctagtaaatgttaaatactgagattcttaaatgtttcctcatgcccaagtctgtatgttctacatccttgagagggaacctaataaaaggagttatttttcttgacaaatggagtttataaaaaggactttgagatctttcaaaatatgatctaatataagaatcatttatttttggaaacacatttgtttattcattcacagttacattcattcattctaggcttttttggtttggcctctacagaagaaattataaaactggttcagtactgccccccatcagatacactaattccccaaataacagaagccaatgatttctgcatgtgaattgtccagcttttaaagtcagccatttggccatctgtggccatttggtgatgtgttacttgtgtatggactgccagtgttactagtgtggtctcgatggaaggtagctcttcaaggaagtagtaaaagccaaactgcacaaagcaaatcctgtagctgacaacaatgtgcccaggcttttccagatttgctctagttattccaataagcactattcaaacttataaacagatgaaaggagaaaagaaaggagcctttaaagacaaaaagagggcttctttctgccagtgaaacatttctcaggtaagatcacatcatctgcaatatggcttgcaaatgtgtgtttaagataatttttgg

SEQ ID NO: 694879 - DNA, 3601 bp, Homo sapiens
tgagcaaagcttcctcttctcagctcctacagtttggctgatgctgctcaagagtcccccacagtcctggcatctggtttacttctgggaggcatctgccctgctgaaagacaggaggcggcggaaagaacagatagaacaggatccccggggctctgattcttaagggaaagcaacatgaccttggctggtggatcggctaacaagaggcttaaatagaggccctgttgctccctacaagaagtttggacacactgtgatgaggcatttgaaagaaaaccttccgagtacagtgggaatctgtatcataaacaaaagaagcctttggtatgccctgtgtgccccctgcacagtgcactcagtacataactacagactgttctgcaaaaaaatgaaacaactggaatttttaatatcatgtctgagatttcctgtgagaacatggtgtacacgttctactaagttcaaggtgcgattttcccctaattgttttcaatagttccttccactgttagcatctttcagaaaaatatcagcacattgctttccctagagggaatagaagagaataaaatcccatgatttaatctttaaaaagttgagaaacaaaagtcaaaaacatccaaatttaatgctgccttttctagcttatgcatgttacgttaatatctaaatgatgtccagaagtatttacttgtgtcatatttacagaactggctgacagactttaagaaacttgttttggcttttgttattaatgttctcaggaacacttgacatgaaagttctggttttctataaaacagagttttgacatttttggagaaacttaaaataggtctactaggttctggtgaattcagaatattcagaggacataaagcatgactgatgaggagcataggattttgtgcctcagagcacttaccattgattaaaggcctttaggttggattctgacctggagatagtgtccactgacttcacggcagtctctcttctgcaaataggggtactgcttttcctcatccttatggaaatgatatagtgggatgtgaaaacatgtggtttcccccttgaagttctaaacattccaaaagtgtcatttactcactagatccttaatagatcttccttctaatatggattttttaaaaaaaatttagatcactcttgctttcatgatttgagaaggtgttacttagagaaataaggcaaaaggaaaactttaagattgacatttgtctagggtgcctccaacatttctagaacattagatagattatcactcgatctcttgttttgaaagcaaattggtttctagaagacccactttgatgatgagacctgtggaggttttcatcacagatgtttatttacatggagaagaacccctgaacatggtgaccagatgaaaggcagctcagggctgagctctcgggactcagctctgccatcagccaccagccacattttcctctgwgtttatgaaaatgatgcacccttacactcaatgctacagttcttgagtcagcattgtgcaagttgattatccaaattggtccattcttgtcatacccaactaaatcagagaagaggggtctgagtaaaaggcactcagggtacataacgtcactctagaaatgctgttgtctgcaagtcccgtggctgaaactgcctgttgtaaccagagaccactttcatctgtagcaggtgagataacaactgcaaatcaaggactagttttgcccaccacagtcacccaccaatcagaccttaccagcccccaaaactttgctaatatcaaagaactttctcacaggaccacaaaggaacagtcctctttttccaccttcggaccaccctgtctgcctctatattgtgaattgcaattctttcttcctaaatattaaatttagagattcagctctacatttttaatttgctttagagaaggtcaagcagacacttgccaaaccctgtggtttctttgtcactgtgtggctgggttcgttcctcttcattttgtcctcactcacagcttcctttgtctgaagcttccttctcactgacccgcttacctcaggtggcttctcttctgttgtatcttaagaggtagctgctgcaagtctttcttaattcactggggaataatggcagcctctccaggccttctgtgtcaagacctcagtcctggtttgctgcaaagctcctcacccagccttgccagatagtcttgttttgctttcttcttctagtcttcaaatcccactctgattttgagattcttttgttaaagcccagcagcaaggatggtggagcgtgcattgggtgtttgggtggcaggacagctggtttctagtcttgggttggaaaataccaagtgatttggctttggggaaatgactcccctttttggtgtgagggattatttctagtaaattgtaatgaagagatttcatatcagtcaacagaagtggttctgagcatgatcactaagtgggagcgggagtcacaggtcctcaaggcttatctcctccagggcagttttatctctgccccaggaaggaagtacgtggtaatatatttcctgttctggctgctggttggaagttgtgagggtgattgccaaatgaattctctatatgtaatccagatatcaactggcatttcctgctcctgtgatctagataagagaggcctagcaagcaggccacttgccgtagatgccgagtttatggtccgcatcacttttttatgtaggctgaacctggcccacatgacgtctgcccagatataaaattccacctcttccttgatttccacctaaaatgtcactcacctgaggcaaggatccatggagatttgaaggagacatgtgagagtacgcttcagaaaggcacgtgctcctagtaaatgttaaatactgagattcttaaatgtttcctcatgcccaagtctgtatgttctacatccttgagagggaacctaataaaaggagttatttttcttgacaaatggagtttataaaaaggactttgagatctttcaaaatatgatctaatataagaatcatttatttttggaaacacatttgtttattcattcacagttacattcattcattctaggcttttttggtttggcctctacagaagaaattataaaactggttcagtactgccccccatcagatacactaattccccaaataacagaagccaatgatttctgcatgtgaattgtccagcttttaaagtcagccatttggccatctgtggccatttggtgatgtgttacttgtgtatggactgccagtgttactagtgtggtctcgatggaaggtagctcttcaaggaagtagtaaaagccaaactgcacaaagcaaatcctgtagctgacaacaatgtgcccaggcttttccagatttgctctagttattccaataagcactattcaaacttataaacagatgaaaggagaaaagaaaggagcctttaaagacaaaaagagggcttctttctgccagtgaaacatttctcaggtaagatcacatcatctgcaatatggcttgcaaatgtgtgtttaagataatttttgg

SEQ ID NO: 694880 - DNA, 1634 bp, Homo sapiens
tttcctttgagcttgacccttcctgttgaagtccagctgacattttggtgagtgtttctctgtggactgattcaccccgtagataactaggcaggaggcctggacagagcttgggaaggctctgcctgcagtgggtgtgcaatgggaggaaggttttccccatgagcctcttcacttagggtccatttgaacgggacgtttatctcccagcccatcttcagggggaatctgccgttggtgagtggaaacaaagggcaggagttggggtctcaccactgtattgtccataccaccaccatctctggagccaaattcccaatctgcttaaggcttcgtctcatattgcacgtcccccacacactgatcttccaggtctgtgaagcattgaaacacttttccatttcagggctgtttgtgctgtttcctcagcttcaatttttccccttcctgaagtttcagggaagccctctccgtttagacctgaccatcagagaggcatttcctgcccctctccgtcagtcccatttttgtttttacatagygcgttcatcagtttttatttattatttgtctattcagcactttttttttctgtttgtcctgttttacttttccattagaatataagcaatgagaggacagggctgggtcaggcttgtttgctattatatttgcaatacttatcttgtaggcaattaatgaatgtaaataaattaccttcaatgctatgaattataatagttgcatttgcttcttcacacaagtgtcccacgattaccataagcttgtatgtgtgtttaggttctttttttcatagcatttcccataagatgattatctgagtcaatgcattgcttagggttcaccggagaaacatgtgtgtgtgtgcgcatgtgtgtacatgtctgtgtaggagggtgagacagacagagatttcattgaaggaattagttcacatgattatggagactgcaggaccagaatctgtaggatagaccagcaggctgcagacccaggaaagggcccacgttgcacttctgaaggccgccggctggcagcattccctcaggattgcgggaggtcagtttttgttctattcaggccttcaactgattggatgaggcccacccacattacagaaagcaatcagctttactcaaagtcccctgactgaagtattaatcatattccaacacaccctcacagaaatggaatatataacaatatgtgactagaacagtgtttgaccacctatctgggtgcgatggcctgggcaagtggtcacataaagtgagccagaatagacaacctgaaactttaataccaacaagcttgtcctgaggccaggacacatcttcatccaggtggggtgaggggcttgccatgttcccacaagacctgtgattttcagcaatccttaagtctctgaggttcagatgccttgtatatataacaggcagattagtctaaatccagagattgcaaactgtagcccccaggccagatccagcccctcctgcttatatgtggcaacacaggctgagaatggtttttatggatgaacatttgggattaatttggttctagggaactaactttgaacttccaataagcaaaatgttatctcctcctca

SEQ ID NO: 694881 - DNA, 1634 bp, Homo sapiens
tttcctttgagcttgacccttcctgttgaagtccagctgacattttggtgagtgtttctctgtggactgattcaccccgtagataactaggcaggaggcctggacagagcttgggaaggctctgcctgcagtgggtgtgcaatgggaggaaggttttccccatgagcctcttcacttagggtccatttgaacgggacgtttatctcccagcccatcttcagggggaatctgccgttggtgagtggaaacaaagggcaggagttggggtctcaccactgtattgtccataccaccaccatctctggagccaaattcccaatctgcttaaggcttcgtctcatattgcacgtcccccacacactgatcttccaggtctgtgaagcattgaaacacttttccatttcagggctgtttgtgctgtttcctcagcttcaatttttccccttcctgaagtttcagggaagccctctccgtttagacctgaccatcagagaggcatttcctgcccctctccgtcagtcccatttttgtttttacatagtgcgttcatcagtttttatttattatttgtctattcagcactttttttttctgtttgtcctgttttacttttccattagaatataagcaatgagaggacagggctgggtcaggcttgtttgctattatatttgcaatacttatcttgtaggcaattaatgaatgtaaataaattaccttcaatgctatgaattataatagttgcatttgcttcttcacacaagtgtcccacgattaccataagcttgtatgtgtgtttaggttctttttttcatagcatttcccataagatgattatctgagtcaatgcattgcttagggttcaccggagaaacatgtgtgtgtgtgcgcatgtgtgtacatgtctgtgtaggagggtgagacagacagagatttcattgaaggaattagttcacatgattatggagactgcaggaccagaatctgtaggatagaccagcaggctgcagacccaggaaagggcccacgttgcacttctgaaggccgccggctggcagcattccctcaggattgcgggaggtcastttttgttctattcaggccttcaactgattggatgaggcccacccacattacagaaagcaatcagctttactcaaagtcccctgactgaagtattaatcatattccaacacaccctcacagaaatggaatatataacaatatgtgactagaacagtgtttgaccacctatctgggtgcgatggcctgggcaagtggtcacataaagtgagccagaatagacaacctgaaactttaataccaacaagcttgtcctgaggccaggacacatcttcatccaggtggggtgaggggcttgccatgttcccacaagacctgtgattttcagcaatccttaagtctctgaggttcagatgccttgtatatataacaggcagattagtctaaatccagagattgcaaactgtagcccccaggccagatccagcccctcctgcttatatgtggcaacacaggctgagaatggtttttatggatgaacatttgggattaatttggttctagggaactaactttgaacttccaataagcaaaatgttatctcctcctca

SEQ ID NO: 694882 - DNA, 1634 bp, Homo sapiens
tttcctttgagcttgacccttcctgttgaagtccagctgacattttggtgagtgtttctctgtggactgattcaccccgtagataactaggcaggaggcctggacagagcttgggaaggctctgcctgcagtgggtgtgcaatgggaggaaggttttccccatgagcctcttcacttagggtccatttgaacgggacgtttatctcccagcccatcttcagggggaatctgccgttggtgagtggaaacaaagggcaggagttggggtctcaccactgtattgtccataccaccaccatctctggagccaaattcccaatctgcttaaggcttcgtctcatattgcacgtcccccacacactgatcttccaggtctgtgaagcattgaaacacttttccatttcagggctgtttgtgctgtttcctcagcttcaatttttccccttcctgaagtttcagggaagccctctccgtttagacctgaccatcagagaggcatttcctgcccctctccgtcagtcccatttttgtttttacatagtgcgttcatcagtttttatttattatttgtctattcagcactttttttttctgtttgtcctgttttacttttccattagaatataagcaatgagaggacagggctgggtcaggcttgtttgctattatatttgcaatacttatcttgtaggcaattaatgaatgtaaataaattaccttcaatgctatgaattataatagttgcatttgcttcttcacacaagtgtcccacgattaccataagcttgtatgtgtgtttaggttctttttttcatagcatttcccataagatgattatctgagtcaatgcattgcttagggttcaccggagaaacatgtgtgtgtgtgcgcatgtgtgtacatgtctgtgtaggagggtgagacagacagagatttcattgaaggaattagttcacatgattatggagactgcaggaccagaatctgtaggatagaccagcaggctgcagacccaggaaagggcccacgttgcacttctgaaggccgccggctggcagcattccctcaggattgcgggaggtcagtttttgttctattcaggccttcaactgattggatgaggcccacccacattacagaaagcaatcagctttactcaaagtcccctgactgaagtattaatcatattccaacacaccctcacagaaatggaatatataacaatatgtgactagaacagtgtttgaccacctatctgggtgcgatggcctgggcaagtggtcacataaagtgagccagaatagacaacctgaaactttaataccaacargcttgtcctgaggccaggacacatcttcatccaggtggggtgaggggcttgccatgttcccacaagacctgtgattttcagcaatccttaagtctctgaggttcagatgccttgtatatataacaggcagattagtctaaatccagagattgcaaactgtagcccccaggccagatccagcccctcctgcttatatgtggcaacacaggctgagaatggtttttatggatgaacatttgggattaatttggttctagggaactaactttgaacttccaataagcaaaatgttatctcctcctca

SEQ ID NO: 694883 - DNA, 1634 bp, Homo sapiens
tttcctttgagcttgacccttcctgttgaagtccagctgacattttggtgagtgtttctctgtggactgattcaccccgtagataactaggcaggaggcctggacagagcttgggaaggctctgcctgcagtgggtgtgcaatgggaggaaggttttccccatgagcctcttcacttagggtccatttgaacgggacgtttatctcccagcccatcttcagggggaatctgccgttggtgagtggaaacaaagggcaggagttggggtctcaccactgtattgtccataccaccaccatctctggagccaaattcccaatctgcttaaggcttcgtctcatattgcacgtcccccacacactgatcttccaggtctgtgaagcattgaaacacttttccatttcagggctgtttgtgctgtttcctcagcttcaatttttccccttcctgaagtttcagggaagccctctccgtttagacctgaccatcagagaggcatttcctgcccctctccgtcagtcccatttttgtttttacatagtgcgttcatcagtttttatttattatttgtctattcagcactttttttttctgtttgtcctgttttacttttccattagaatataagcaatgagaggacagggctgggtcaggcttgtttgctattatatttgcaatacttatcttgtaggcaattaatgaatgtaaataaattaccttcaatgctatgaattataatagttgcatttgcttcttcacacaagtgtcccacgattaccataagcttgtatgtgtgtttaggttctttttttcatagcatttcccataagatgattatctgagtcaatgcattgcttagggttcaccggagaaacatgtgtgtgtgtgcgcatgtgtgtacatgtctgtgtaggagggtgagacagacagagatttcattgaaggaattagttcacatgattatggagactgcaggaccagaatctgtaggatagaccagcaggctgcagacccaggaaagggcccacgttgcacttctgaaggccgccggctggcagcattccctcaggattgcgggaggtcagtttttgttctattcaggccttcaactgattggatgaggcccacccacattacagaaagcaatcagctttactcaaagtcccctgactgaagtattaatcatattccaacacaccctcacagaaatggaatatataacaatatgtgactagaacagtgtttgaccacctatctgggtgcgatggcctgggcaagtggtcacataaagtgagccagaatagacaacctgaaactttaataccaacaagcttgtcctgaggccaggacacatcttcatccaggtggggtgaggggcttgccatgttcccacaagacctgtgattttcagcaatccttaagtctctgaggttcagatgccttgtatatataacaggcagattagtctaaatccagagattgcaaactgtagcccccaggccagatccagcccctcctgcttatatgtggcaacacaggctgagaatggtttttatggatgaacatttgggattaatttgkttctagggaactaactttgaacttccaataagcaaaatgttatctcctcctca

SEQ ID NO: 694884 - DNA, 1249 bp, Homo sapiens
gctgccctggtggctctgattttgtcctgtgcacaaacagctggggggggggggtggggaccaggactgtgggggtgctacacacagagccagacaagcccattctgcagctctctcctctaagggctccccccacctccctagcttacaggggctccttctcctgatcctttggccagaaggaaggggtttcttttaaagtccttgccctgaggcaccacacagatgtggctctataactrgtgccacctaaagggaaacatgacaagaagagagagagaaggagggagagggagaaggaggaagatagagggaaaggaagttggggagggagagtagggagagaaaggggagagaagagaaagggaggagggaaaagaagtggggagggaaaaagagagggacagaagaggtggggaaagaggggcaagaggaaggagacaggaaaagcggagcagaggagggaggaagaggggcgggagagacggggattgagagaacacacagaatttcttccccccatgctttgaagacaggatccttttttcttctggccacagacactggatttctcctgggatttagctgcttgtgccaccacagctggcgctccactggggagagccaaaaaacaaaaaaactaacccctcaaaggaagcacttcctttatatggactgaatcgtgtcccccttgagactcacaaaatgaagccccagccccagtatctgagagtgtgactgtatttggaaacagcagctttaaagacgtgattgaggtaacatgaggccatcaggggccgcaatctggcctgtgccctgataggaagaggagactggaacaggacacacatactgcaggaggcacagagcgaagacgccacctgcaagccagggccagaagccttggaagaagcacctgcacacctgaatcttggactccagttttcaacaccgtgagagagtaaatttccattgccagccagtctgtggccatctgcaatgactctagcacgttaatatacccatctaagggttgcctccccgagtttttattctcttcccagtctgtctgcttttgtggatgtctggagctcttgagcagttgctttctgattttgcccagagctttcagttgcaatcagcgagaaagaagctgcaggaacttgtttcatcttgaccattcatacatattgaactgatgtgtttgttacattctaccgtctcttgagtgtaatcaaataaaagagca

SEQ ID NO: 694885 - DNA, 1460 bp, Homo sapiens
cactgccactgactgcactcctaaccctggattttgcattctcactctgtgggttacaagaggcaaacagcaacgtagatccatcgctatcatcggatataattcaaataagacacttgctgtggatggctgatcataacaataacatgatctgggggcatcagaagtcctgcttgactcttattttctaacatttttrcaggctgctggctgacctccaccccacttcaggaacaacaggatagactacagctgggccgatccataaactcaccagtagcccaggagatggcctgacatgaaaagttctgcacaagcaggagcaaaatgagccaatagctccacttgcattctgttggtatcctgcatgttattttcacagagcaatacaagtttctgctgtactgcacgcacatattactcactttctttgctgccatgatgcttaagtatttcaactgcatttttaactaatatatctttcaaaacttagcctaaaaattgcatgatctccagttgtagcttcagaagtctgttgaaaagtttgtctaagacagtaggctttaaacattgaaataactccttggtccactagctggacgattaaagttgtatttgttagtaaaaagcagctttttaacattttcatggaggtatccaaatgaataaaggtgacttggacacttatccaacagtgatggtgctttagaagttaaattatgtgagtttatgactggaggacaagtagtttacacaactacacaccttgatatctgtctaaactaaattcatacagatgcacaggtacacagcgacaaataaccagcacactttcacagagagagcatgattgctcactgatcatcatgcttgtccattaaatacttactaatttttgtactaaaaaccagcatcaaaatttttactgaatgaaattacacgtagttaatacactgtggaaagtgaaatttgcactgtgtccatgaaggaattatacatgttatctaatcaaagcacagtaacaaaaattcctgcatataagaaccacgaaaagccaggactgcttatatactgctgtaagatttttatattacttgggagatgatataatagtacttaagaataaactgtgataagttaacaatatatatggtaaacgcttgagcaataactttaaacaaaaatacatagtgcaactattgagccaatagttgcaataaaatgtaatactgatatggtttggctgtgtccctaaccaaatctcatattgaattgtagttcccataatccccacgtgtcctgggagggacctggcagaaggtaatgatacttattgagcatctactatatcaggtgcagccagtgtagctcttgaacgagacagagaaaattatcatacctctaccagggtcatatttgatcttcatttatctaccatttataacattttatttgtcttt

SEQ ID NO: 694886 - DNA, 1460 bp, Homo sapiens
cactgccactgactgcactcctaaccctggattttgcattctcactctgtgggttacaagaggcaaacagcaacgtagatccatcgctatcatcggatataattcaaataagacacttgctgtggatggctgatcataacaataacatgatctgggggcatcagaagtcctgcttgactcttattttctaacatttttgcaggctgctggctgacctccaccccacttcaggaayaacaggatagactacagctgggccgatccataaactcaccagtagcccaggagatggcctgacatgaaaagttctgcacaagcaggagcaaaatgagccaatagctccacttgcattctgttggtatcctgcatgttattttcacagagcaatacaagtttctgctgtactgcacgcacatattactcactttctttgctgccatgatgcttaagtatttcaactgcatttttaactaatatatctttcaaaacttagcctaaaaattgcatgatctccagttgtagcttcagaagtctgttgaaaagtttgtctaagacagtaggctttaaacattgaaataactccttggtccactagctggacgattaaagttgtatttgttagtaaaaagcagctttttaacattttcatggaggtatccaaatgaataaaggtgacttggacacttatccaacagtgatggtgctttagaagttaaattatgtgagtttatgactggaggacaagtagtttacacaactacacaccttgatatctgtctaaactaaattcatacagatgcacaggtacacagcgacaaataaccagcacactttcacagagagagcatgattgctcactgatcatcatgcttgtccattaaatacttactaatttttgtactaaaaaccagcatcaaaatttttactgaatgaaattacacgtagttaatacactgtggaaagtgaaatttgcactgtgtccatgaaggaattatacatgttatctaatcaaagcacagtaacaaaaattcctgcatataagaaccacgaaaagccaggactgcttatatactgctgtaagatttttatattacttgggagatgatataatagtacttaagaataaactgtgataagttaacaatatatatggtaaacgcttgagcaataactttaaacaaaaatacatagtgcaactattgagccaatagttgcaataaaatgtaatactgatatggtttggctgtgtccctaaccaaatctcatattgaattgtagttcccataatccccacgtgtcctgggagggacctggcagaaggtaatgatacttattgagcatctactatatcaggtgcagccagtgtagctcttgaacgagacagagaaaattatcatacctctaccagggtcatatttgatcttcatttatctaccatttataacattttatttgtcttt

SEQ ID NO: 694887 - DNA, 1460 bp, Homo sapiens
cactgccactgactgcactcctaaccctggattttgcattctcactctgtgggttacaagaggcaaacagcaacgtagatccatcgctatcatcggatataattcaaataagacacttgctgtggatggctgatcataacaataacatgatctgggggcatcagaagtcctgcttgactcttattttctaacatttttgcaggctgctggctgacctccaccccacttcaggaacaacaggatagactacagctgggccgatccataaactcaccagtagcccaggagatggcctgacatgaaaagttctgcacaagcaggagcaaaatgagccaatagctccacttgcattctgttggtatcctgcatgttattttcacagagcaatacaagwttctgctgtactgcacgcacatattactcactttctttgctgccatgatgcttaagtatttcaactgcatttttaactaatatatctttcaaaacttagcctaaaaattgcatgatctccagttgtagcttcagaagtctgttgaaaagtttgtctaagacagtaggctttaaacattgaaataactccttggtccactagctggacgattaaagttgtatttgttagtaaaaagcagctttttaacattttcatggaggtatccaaatgaataaaggtgacttggacacttatccaacagtgatggtgctttagaagttaaattatgtgagtttatgactggaggacaagtagtttacacaactacacaccttgatatctgtctaaactaaattcatacagatgcacaggtacacagcgacaaataaccagcacactttcacagagagagcatgattgctcactgatcatcatgcttgtccattaaatacttactaatttttgtactaaaaaccagcatcaaaatttttactgaatgaaattacacgtagttaatacactgtggaaagtgaaatttgcactgtgtccatgaaggaattatacatgttatctaatcaaagcacagtaacaaaaattcctgcatataagaaccacgaaaagccaggactgcttatatactgctgtaagatttttatattacttgggagatgatataatagtacttaagaataaactgtgataagttaacaatatatatggtaaacgcttgagcaataactttaaacaaaaatacatagtgcaactattgagccaatagttgcaataaaatgtaatactgatatggtttggctgtgtccctaaccaaatctcatattgaattgtagttcccataatccccacgtgtcctgggagggacctggcagaaggtaatgatacttattgagcatctactatatcaggtgcagccagtgtagctcttgaacgagacagagaaaattatcatacctctaccagggtcatatttgatcttcatttatctaccatttataacattttatttgtcttt

SEQ ID NO: 694888 - DNA, 1460 bp, Homo sapiens
cactgccactgactgcactcctaaccctggattttgcattctcactctgtgggttacaagaggcaaacagcaacgtagatccatcgctatcatcggatataattcaaataagacacttgctgtggatggctgatcataacaataacatgatctgggggcatcagaagtcctgcttgactcttattttctaacatttttgcaggctgctggctgacctccaccccacttcaggaacaacaggatagactacagctgggccgatccataaactcaccagtagcccaggagatggcctgacatgaaaagttctgcacaagcaggagcaaaatgagccaatagctccacttgcattctgttggtatcctgcatgttattttcacagagcaatacaagtttctgctgtactgcacgcacatattactcactttctttgctgccatgatgcttaagtatttcaactgcatttttaastaatatatctttcaaaacttagcctaaaaattgcatgatctccagttgtagcttcagaagtctgttgaaaagtttgtctaagacagtaggctttaaacattgaaataactccttggtccactagctggacgattaaagttgtatttgttagtaaaaagcagctttttaacattttcatggaggtatccaaatgaataaaggtgacttggacacttatccaacagtgatggtgctttagaagttaaattatgtgagtttatgactggaggacaagtagtttacacaactacacaccttgatatctgtctaaactaaattcatacagatgcacaggtacacagcgacaaataaccagcacactttcacagagagagcatgattgctcactgatcatcatgcttgtccattaaatacttactaatttttgtactaaaaaccagcatcaaaatttttactgaatgaaattacacgtagttaatacactgtggaaagtgaaatttgcactgtgtccatgaaggaattatacatgttatctaatcaaagcacagtaacaaaaattcctgcatataagaaccacgaaaagccaggactgcttatatactgctgtaagatttttatattacttgggagatgatataatagtacttaagaataaactgtgataagttaacaatatatatggtaaacgcttgagcaataactttaaacaaaaatacatagtgcaactattgagccaatagttgcaataaaatgtaatactgatatggtttggctgtgtccctaaccaaatctcatattgaattgtagttcccataatccccacgtgtcctgggagggacctggcagaaggtaatgatacttattgagcatctactatatcaggtgcagccagtgtagctcttgaacgagacagagaaaattatcatacctctaccagggtcatatttgatcttcatttatctaccatttataacattttatttgtcttt

SEQ ID NO: 694889 - DNA, 1460 bp, Homo sapiens
cactgccactgactgcactcctaaccctggattttgcattctcactctgtgggttacaagaggcaaacagcaacgtagatccatcgctatcatcggatataattcaaataagacacttgctgtggatggctgatcataacaataacatgatctgggggcatcagaagtcctgcttgactcttattttctaacatttttgcaggctgctggctgacctccaccccacttcaggaacaacaggatagactacagctgggccgatccataaactcaccagtagcccaggagatggcctgacatgaaaagttctgcacaagcaggagcaaaatgagccaatagctccacttgcattctgttggtatcctgcatgttattttcacagagcaatacaagtttctgctgtactgcacgcacatattactcactttctttgctgccatgatgcttaagtatttcaactgcatttttaactaatatatctttcaaaacttagcctaaaaattgcatgatctccagttgtagcttcagaagtctgttgaaaagtttgtctaagacagtaggctttaaacattgaaataactccttggtccactagctggacgattaaagttgtatttgttagtaaaaagcagctttttaacattttcatggaggtatccaaatgaataaaggtgacttggacacttatccaacagtgatggtgctttagaagttaaattatgtgagtttatgactggaggacaagtagtttacacaactacacaccttgatatctgtctaaactaaattcatacagatgcacaggtacacagcgacaaataaccagcacactttcacagagagagcatgattgctcactgatcatcatgcttgtccattaaatacttactaatttttgtactaaaaaccagcatcaaaatttttactgaatgaaattacacgtagttaatacactgtggaaagtgaaatttgcactgtgtccatgaaggaattatacatgttatctaatcaaagcacagtaacaaaaattcctgcatataagaaccacgaaaagccaggactgcttatatactgctgtaagatttttatattacttgggagatgatataatagtacttaagaataaactgtgataagttaacaatatatatggtaaacgcttgagcaataactttaaacaaaaatacatagtgcaactattgagccaatagttgcaataaaatgtaatactgatatggtttggctgtgtccctaaccaaatctcatmttgaattgtagttcccataatccccacgtgtcctgggagggacctggcagaaggtaatgatacttattgagcatctactatatcaggtgcagccagtgtagctcttgaacgagacagagaaaattatcatacctctaccagggtcatatttgatcttcatttatctaccatttataacattttatttgtcttt

SEQ ID NO: 694890 - DNA, 357 bp, Homo sapiens
atgagttaagacttttggaaacttctgaaaaggcttgtttgtattttactctgtgagaaggacatgagattcaggggtgtcagggtcagagtaatatggtttggtggtgttttcctacaaaagatcatgggaaattgtattcctgaatgttggaggtggggcctggtgggagctgattgaatcatggatgggagggggttgcgggtagaaggaaaaagaagtgggtagggtggggaggagtaggttggcagtaaactgtgagagggtggtgggtrgtaggatgtgggagtagcctcctgcagaggcagagcctcatggaaaacctctactagggcggtgcacctgtggctttgcagg

SEQ ID NO: 694891 - DNA, 766 bp, Homo sapiens
accaacagcttgcaccctcagtgtggaaagctacaagtgctcaacactagcccagcccatgagggcagctgtgggggaaagaccctgcaaagccacaggtgcagagctacccaaggccttgggagcccagccatcacacccctgtgttctggatgtgggatttggattgaaaagtgatgattggagctgtacaatggaatgactggcctgctgggtttttgacttgcatcagatctgtaagtctcatctgtattttgtgcttctttctggcaaagttttttcttttggctgggaattcatacccaatgcctgtacaatcatggtaccttgaaagtaattaacttactttgtatttcagaggctcagaggcagaagggactgcagccttgtgtcagataagactttgggctttggatattcagtaaaggctggaatgacttaagattttgggggactgtagagaaggcatcattgtattttgcagtgtgtcaaagatatgagatttgggggaactagkgtcagaataatatgatttggttctgtgtccctaccgatactcacgtggaattgtaatggggaatatgaaagttgggacctggtggaaggtgatttaatcatggtgaagcatgggtgttggaggtacgggtgtggggagaatggtggagattattttgggggtggggtcgaaagatgaggatggggatggatcctttacaaatggttaaacactatctccttaatgctgtctgcatgatagtgagttctc

SEQ ID NO: 694892 - DNA, 1757 bp, Homo sapiens
ctttcttcttaaagctcttcggtcagtgaataaagctgtgtgacaaaattcatctccttttctcattagcatcacttatgtaatttggcggggtgcagtggctcccgcctgtaatcccagcactctgagaggctgaggtgggtggatcacctgtggtcaggagtttgagaccagcctggccaacatggtgaaaccccctctctgctaaaaatacaaaattagccaggcatagtggcatacacctgtagtcccagctacctgggaggctgaagcaggagaatcacttgaacctaggaggcagaggctgcagtgagatgagattgtgccactgcactccagcctaggcaataagagcaaaactccatctaaaaaaaaaaagatattcagtttttccctatccagattcttcatcagaataatttttaaagttacacagtacaggaatacattatttttttaatatagatagggtcttgctatgttgtccaggctagactcgaactcttgggctcatgtgatcctcccgctttggcctcccaaagtgctgggattacaggcgtgagccaccatgccacattcttttttataaaaaaatacaaagaagagcatgtcattttaatactctgttaaacagtaaatgtgatactattctttatcagcctactcaataactacgaatgaaacctatatacattatccacccactgaacgaaaaaagagacatccataaaatttaaataggtgttgctcaacatgtctgtcacacttgagctactttaccttgtatgaaagaccaactcaaaaatcctcaaagacaacctttattttatttgattaattggtcatgggtaaaatgtataagtaacttattaaaaaggggcaatatactttataagaaaaattaccacagtaattcccaagaagaatgtgacaataagctctttgacgataatatatgtgcatcatctggtttctgttccaaagccttagtcagctcctacaaaaacaaacatgttgagtgtcagtaaaagttttttaaaagccatcaaataaattctaattaaaacatcatttttaaacaaataacttatgatcagaaactacttggaggaaagataacagggatgtaatcttggagtttttcctcgtaagaggatctccccggtttctcgcggtcctgctaaaacgctgtcaacctaacgctccaccagagaggcccgttggcttctcgggaggcgaccgagggagctcaggaggcggggaggcttttacaagaagcgaaaggacggcctcaggggtggccgggaacagcctggaatcagctggaggacatcagcaggactgaggaaagggccaccaccagcgtgaggaaagsggggagagggcagaacgcggcgaatggccgcgctcgagggctggcggggtcccagcgagcagcggctgggaaacaatggcgcgagcgtgacgtgggccggaggcgccgccgcggcgcggaggaaggggctgccgtgggactgtagagtctgtagagtcttttggaatttatgtgattacaatcttgcagtctgtgaatagagatggtttaactttcctgtaatctttataccttttagttttgttgctggctagtatgtccactattgaatagaaatagtgataatggacttccttgtcttggttgtaaaatcaagaggaaagcattcaatatcaagtgctttttctacctttattgaaatgttcatatgtatttttaataa

SEQ ID NO: 694893 - DNA, 2929 bp, Homo sapiens
  misc_feature 1377, 1378, 1379, 1380, 1381, 1382, 1383, 1384, 1385, 1386,1387, 1388, 1389, 1390, 1391, 1392, 1393, 1394, 1395, 1396,1397, 1398, 1399, 1400, 1401, 1402, 1403, 1404, 1405, 1406,1407, 1408, 1409, 1410, 1411, 1412, 1413, 1414, 1415: n = A,T,C or G
  misc_feature 1416, 1417, 1418, 1419, 1420, 1421, 1422, 1423, 1424, 1425,1426, 1427, 1428, 1429, 1430, 1431, 1432, 1433, 1434, 1435,1436, 1437, 1438, 1439, 1440, 1441, 1442, 1443, 1444, 1445,1446, 1447, 1448, 1449, 1450, 1451, 1452, 1453, 1454: n = A,T,C or G
  misc_feature 1455, 1456, 1457, 1458, 1459, 1460, 1461, 1462, 1463, 1464,1465, 1466, 1467, 1468, 1469, 1470, 1471, 1472, 1473, 1474,1475, 1476: n = A,T,C or G
cccccagtattgcagtcgatattaattctggaattctgggaatgtttctggagggctccagaaatgaagrcagtttgctcactgtttcatctagcttgagagaaacattggtttaagctgaggggacctgaacagctgcctgtattttcctatgtatgtgggtttccatgaagtccaaacattaacaaagaagggagaggcgccatataataagcatctcattgacgcacttgactttcattaggtctgtgacacctagccaggtgctcgtttatggggctgtttgagactaattgctgaggctttgtgccagtgcatgcgattatgaggaagtttcagaactacgtgcagtgtggaggtgacgggctgtggcgctccaggagggggatgcatggagctgcactctgagcagacataatggagtgcccgcaacgtaaaatggtgtctttaattggatactttgctgttaaaagcagcttggaatcatggtcacagatgccacttatctgttttcacgggacagagagtgaagacagaatgaaagtaagctggaattggtaagggggccattaggaatttctctccagtatccaccgtgtatcctttgggtggtcacagcgtggctgtgctgggggccacactgaagccccaggtgatgctggccacaaagtccaggggctttctgagaagttgaaacttgaaggagaatcaaaaccccaaattgggttttctcatgaaatcatcgggtcatttctggggctgcagattagcagggcctgatgttgaacaaatgatgattttttcaggtagcaagtttctatccttcgaagtttctagaatgaaaatctgaagaatttatggaactcattgaggcttgggtttatgtgctcagattggaatctggtaatacgtaaggatcagcagttctgtctcagagaggcctgataataagagggagtggcaaagcttggaaggacaggcagaacactgccgctaaccctctataactgaagacatgggaaaacttagctagtccctgcgacttactgggcaaagagaggagtcagtaatttgttgggtgttccgaatgaagtctgttttgtgttttcctgttaacaaattcttcccaggtggaagggaagattcaataaacatctgtcccgatagagctgtaaagtgaaggagggaaatggggagaaagagaaagcaactgcttcattatcacgtttgctgatgagcagaaggagggtagaaatgccaatcagagtttgcgattgtgcaagtttttcgagaagcttgcgtcacaaagcaataagaagaaatgagttccaggaagcaatgggggtgacggtgggtgcggagggaggggcggcgtannnnnnnnnnnnnnnnnnnnnnnnnnnnnnnnnnnnnnnnnnnnnnnnnnnnnnnnnnnnnnnnnnnnnnnnnnnnnnnnnnnnnnnnnnnnnnnnnnnnacgcggtaggggagtgtaaaaagtcttttgaagatctcgtgggaaggcacctgcaaggatccatgcctgtgtgccgaggacagccaccaggcgagctccaaatgaaccccaggattatttttagctatcatgatagaaatgaggtgctattttaagcactgatggcacgtgtacctataacattatgtacaggtgaggcactgtagataaaaataactttagagaagaatagccacgtgaaaggcacgatctaaatagggacatcttttcagcgcacactagaacagtgttctcgaagccagggcctcccctgtcaccaatccacagccacgccggcccctctactccaatctgtaggagggaaaagacatttcctgtcttgcttctgccttctctggattaaattctccctagcacactctgttcacaagctattctttaagctgcagaatattgtttcaaagaggggaccagcctttcctttactttcactgacattttattttcttgattctgaaggtctccacccccattcatgttatttttaaaaacattaaaaatgttatttttaaaaaccaccatgccacttttctcccccacatctttatccaaagcctggagtggacgggcctggtgagtccagagtctgtctgcactttgatgaggggtggggcgcgtgagtcaagaacatttgtggaggcagcaggcaaggccaaaggtccaggacaccaagacgaaaaatcaaggattttgctatatctaccatcaagaattattattgccacacagatgtgcaggaatgatagtggcatatgtgatagctttcatcctatcaaggctgctgaggaaaagtggaaagaaataaatgtgcttacttttctacccaaagaactctagcactgtccaaaatcacacctacacatttcaacacaacttacttcaaactttaaaattgttacgaaacaactaacttcttgccttctaagttttaagaaacttcaagaaattcaatcagttcttttttttaagagaacaaaattttctttttgtctttgatagtcttaaattttatgatgatgtgaaaaggtgtaagtctgtttttattcaatgcggcacacacagaatctggggatggggaccagggatctgttttatacacacaccctccttgtaaggctgatacagctcagatgtgaggatggtgagggcttcggattaattttgcaacttcagccaccgcatgaagtcaggcattgtggtgtcctagggggttgtctagatgtttggatcagtagttcccaaagtgtgggccctggaaacttgcgagatgttgccagctcttgggccttattccagacccccccaaagcagaaatgctggagtgggacccccacaccctggttttaaccatccctccctctgatgcacgctcctgtttgagaaccacgattct

SEQ ID NO: 694894 - DNA, 2929 bp, Homo sapiens
  misc_feature 1377, 1378, 1379, 1380, 1381, 1382, 1383, 1384, 1385, 1386,1387, 1388, 1389, 1390, 1391, 1392, 1393, 1394, 1395, 1396,1397, 1398, 1399, 1400, 1401, 1402, 1403, 1404, 1405, 1406,1407, 1408, 1409, 1410, 1411, 1412, 1413, 1414, 1415: n = A,T,C or G
  misc_feature 1416, 1417, 1418, 1419, 1420, 1421, 1422, 1423, 1424, 1425,1426, 1427, 1428, 1429, 1430, 1431, 1432, 1433, 1434, 1435,1436, 1437, 1438, 1439, 1440, 1441, 1442, 1443, 1444, 1445,1446, 1447, 1448, 1449, 1450, 1451, 1452, 1453, 1454: n = A,T,C or G
  misc_feature 1455, 1456, 1457, 1458, 1459, 1460, 1461, 1462, 1463, 1464,1465, 1466, 1467, 1468, 1469, 1470, 1471, 1472, 1473, 1474,1475, 1476: n = A,T,C or G
cccccagtattgcagtcgatattaattctggaattctgggaatgtttctggagggctccagaaatgaagacagtttgctcactgtttcatctagcttgagagaaacattggtttaagctgaggggacctgaacagctgcctgtattttcctatgtatgtgggtttccatgaagtccaaacattaacaaagaagggagaggcgccatataataagcatctcattgacgcacttgactttcattaggtctgtgacacctagccaggtgctcgtttatggggctgtttgagactaattgctgaggctttgtgccagtgcatgcgattatgaggaagtttcagaactacgtgcagtgtggaggtgacgggctgtggcgctccaggagggggatgcatggagctgcactctgagcagacataatggagtgcccgcaacgtaaaatggtgtctwtaattggatactttgctgttaaaagcagcttggaatcatggtcacagatgccacttatctgttttcacgggacagagagtgaagacagaatgaaagtaagctggaattggtaagggggccattaggaatttctctccagtatccaccgtgtatcctttgggtggtcacagcgtggctgtgctgggggccacactgaagccccaggtgatgctggccacaaagtccaggggctttctgagaagttgaaacttgaaggagaatcaaaaccccaaattgggttttctcatgaaatcatcgggtcatttctggggctgcagattagcagggcctgatgttgaacaaatgatgattttttcaggtagcaagtttctatccttcgaagtttctagaatgaaaatctgaagaatttatggaactcattgaggcttgggtttatgtgctcagattggaatctggtaatacgtaaggatcagcagttctgtctcagagaggcctgataataagagggagtggcaaagcttggaaggacaggcagaacactgccgctaaccctctataactgaagacatgggaaaacttagctagtccctgcgacttactgggcaaagagaggagtcagtaatttgttgggtgttccgaatgaagtctgttttgtgttttcctgttaacaaattcttcccaggtggaagggaagattcaataaacatctgtcccgatagagctgtaaagtgaaggagggaaatggggagaaagagaaagcaactgcttcattatcacgtttgctgatgagcagaaggagggtagaaatgccaatcagagtttgcgattgtgcaagtttttcgagaagcttgcgtcacaaagcaataagaagaaatgagttccaggaagcaatgggggtgacggtgggtgcggagggaggggcggcgtannnnnnnnnnnnnnnnnnnnnnnnnnnnnnnnnnnnnnnnnnnnnnnnnnnnnnnnnnnnnnnnnnnnnnnnnnnnnnnnnnnnnnnnnnnnnnnnnnnnacgcggtaggggagtgtaaaaagtcttttgaagatctcgtgggaaggcacctgcaaggatccatgcctgtgtgccgaggacagccaccaggcgagctccaaatgaaccccaggattatttttagctatcatgatagaaatgaggtgctattttaagcactgatggcacgtgtacctataacattatgtacaggtgaggcactgtagataaaaataactttagagaagaatagccacgtgaaaggcacgatctaaatagggacatcttttcagcgcacactagaacagtgttctcgaagccagggcctcccctgtcaccaatccacagccacgccggcccctctactccaatctgtaggagggaaaagacatttcctgtcttgcttctgccttctctggattaaattctccctagcacactctgttcacaagctattctttaagctgcagaatattgtttcaaagaggggaccagcctttcctttactttcactgacattttattttcttgattctgaaggtctccacccccattcatgttatttttaaaaacattaaaaatgttatttttaaaaaccaccatgccacttttctcccccacatctttatccaaagcctggagtggacgggcctggtgagtccagagtctgtctgcactttgatgaggggtggggcgcgtgagtcaagaacatttgtggaggcagcaggcaaggccaaaggtccaggacaccaagacgaaaaatcaaggattttgctatatctaccatcaagaattattattgccacacagatgtgcaggaatgatagtggcatatgtgatagctttcatcctatcaaggctgctgaggaaaagtggaaagaaataaatgtgcttacttttctacccaaagaactctagcactgtccaaaatcacacctacacatttcaacacaacttacttcaaactttaaaattgttacgaaacaactaacttcttgccttctaagttttaagaaacttcaagaaattcaatcagttcttttttttaagagaacaaaattttctttttgtctttgatagtcttaaattttatgatgatgtgaaaaggtgtaagtctgtttttattcaatgcggcacacacagaatctggggatggggaccagggatctgttttatacacacaccctccttgtaaggctgatacagctcagatgtgaggatggtgagggcttcggattaattttgcaacttcagccaccgcatgaagtcaggcattgtggtgtcctagggggttgtctagatgtttggatcagtagttcccaaagtgtgggccctggaaacttgcgagatgttgccagctcttgggccttattccagacccccccaaagcagaaatgctggagtgggacccccacaccctggttttaaccatccctccctctgatgcacgctcctgtttgagaaccacgattct

SEQ ID NO: 694895 - DNA, 1051 bp, Homo sapiens
atgtcaaacatttttttttaattgtacttctctactttctggtactttcaagatgtgccatactcatacccatacaccatcttatatatctcctgcctcagtcctggaatcattcatttcatcacagagccctcgttcctcttattgacaaatggtattagaaaccaagatctgggtgcggggtgtgtttgttgccactggggtgttgcaaggcaggcatttttattatcccattttacagatgaggaatgggacatctcaaatgacagtgctagtgaaggaagagggtggggcggttgtggtcagtgtgtggagtaggggtcttgtttctgggtagcttccttttcattcctcttcagtgtgcagagtttttctctctcactgatacttttacaaggtagtttatattcctgggcattgaatcattcatctaagggcaaggtataagaaagtttgtattaatattctgactggagaaattatttattgaccatatcattctttttgttttttgcagctttgccagcaggcatagaaatgaaatattatgtattaaagaatattgtatattgttggtagcaataagaatagatgcagaattctctgcaagattgttagtaaagatagaatgctgtaggagtgtttaatgaattgaatgctctcccactcttctttcaayccacacagcaattgctgtgaggacctgcctaatttgccaaaactagatccattgcccaatttttacaattttagtcttgattgaacacataaatattatgttgagtagagaaatgtatgctttcctcaaggaattctaagggaaaaacttaaattcagtcacatactgctgttatccctttgtattaattaatcaatttgtgcttttaagaaatgggagcttggtagcttttatgggttgtcgtagtcaaggaccaagatatttgtataatcctgattcattacattttagcgaaatatcaaaaatcagtcaaaccattacaaaagcagagtgtacacacacacacagaaacatgcacgcacacatgttaaa

SEQ ID NO: 694896 - DNA, 616 bp, Homo sapiens
agtggtaaaaaccatttacaacatatatgacagtgaaaatatttttcatgaagaaacctcttaaataaagtaaggcagcagctgcccaatataaagatgggaaaatatttgaactgggatttcacaagagaatgcataaatgggccgggtgtggtggctcatgcctgtaatcccagcactttgggaggccaaggcaggtgaatcacctgaggtaaggagttcaagaccagcctggccaacatggcgaaaacccatctctactaaaaaaaaaatacaaaaaattcgccaggcatggtggtgggtgcctctaatcccagctacttgggaggctgaggcaggaaaattgcttgaacctgggaggcagaggttgcagtgagctgagatcccgtcattgcactaaagcctgggtgacagagcgagactctgtctcaaaaaacaaaaacaaaacaaaacaaaaaaagtgaatgcgtaaatgaccagtaaacagatgagttgatgtttaatgtcactggtagtccaagaaatayaaattaaaacagtgcctttttttttttttggctttcagcttgggtaagattaaaaagatggccatatggaagaaactgtaataactaca

SEQ ID NO: 694897 - DNA, 1537 bp, Homo sapiens
tgtccaacatgtgtaactcactaatgttcacaacccacttgtagcgaaactaagaaccttaaaatgaccttgaagctatagcagtrgtgagcatcagatatattcagacactttatgagtcgattagcaacagagacttcttcccttagaaaatagaagtagttgggaagcaatgacatttgcataaaggcacttccttttgccaccttttggattttttttttttttgtagaattatggtttaatcttactgctgttattaaactgctttaagcttctttccaagtatcacagccaaattgaaggatttatttccttgcttgcactttgaaacatagctgtcaaacaaagtaagcaaaggcaagtgatagagatacagcccctttgcattttcagtttatttgcatttgttcatgacttctaagacactttaaatttccaaaggagtttgctttctttaaactctgtcatatgtacattgttacctgaatgagtctgtgagagatcaaagtacctgtcagcttagtaaatagaagagattttttttctctctgagctggttataaagggagattccattggcttatttatgttgagaacttaacatagttaggaaaacagtgggtggttaaagtttgaaaagtgtcagggaagaggtgggtggtttctgtagagtatcaaatatttgaagtatattaaagctgaaataagtgaaaatctgttagattacttggagtttctcctaatttcctatgttttagagagactttttccccctcaagtgcatttgcatatatagaaacaaaatgtggcttccacaaatgatgttgcctatctctcttaaagtaatatttaaatgaataatacagactcgttaatattgtcaattattttataggatacttgaagctgaagaagacacaaatatcagtggcctaactaatttgtacctatggaattactattttggtgaaaaatattttcactccacgtgttcattgtgtgtgcatgcctgccctctctcggcagtggtccagctgattgctgctgttactgttaagggctcttagtgtatcaaaaataagttcttgagcatgacagaatgatgcgtatactcattttttaaattggaaacaaatgttctgtattaactatatagtgagtacaatcaaatacataaaccattagatgggcaactaagctggtaagccatggagaatttactattttgttggatatttgttagagcatgaagttggaattgagaatgtattttctcctgaaatatagttgatgattatgtatctgtctgtgaggtgtggttaattccacaaagcttatttcttctacagtatcccccaaattagaatatggtactgccattatgtgataaccctgtatatgacagtgtatctattggaaaatgttttgagttttcgtatgaatttttaggggcattgctgtagctctgacagtataaatatggatttgaaagttataagccatacacaacttgatatttcagaggctaggagtt

SEQ ID NO: 694898 - DNA, 1537 bp, Homo sapiens
tgtccaacatgtgtaactcactaatgttcacaacccacttgtagcgaaactaagaaccttaaaatgaccttgaagctatagcagtagtgagcatcagatatattcagacactttatgagtcgattagcaacagagacttcttcccttagaaaatagaagtagttgggaagcaatgacatttgcataaaggcacttccttttgccaccttttggattttttttttttttgtagaattatggtttaatcttactgctgttattaaactgctttaagcttctttccaagtatcacagccaaattgaaggatttatttccttgcttgcactttgaaacatagctgtcaaacaaagtaagcaaaggcaagtgatagagatacagcccctttgcattttcagtttatttgcatttgttcatgacttctaagacactttaaatttccaaaggagtttgctttctttaaactctgtcatatgtacattgttacctgaatgagtctgtgagagatcaaagtacctgtcagcttagtaaatagaagagattttttttctctctgagctggttataaagggagattccattggcttatttatgttgagaacttaacatagttaggaaaacagtgggtggttaaagtttgaaaagtgtcagggaagaggtgggtggtttctgtagagtatcaaatatttgaagtatattaaagctgaaataagtgaaaatctgttagattacttggagtttctcctaatttcctatgttttagagagactttttccccctcaagtgcatttgcatatatagaaacaaaatgtggcttccacaaatgatgttgcctatctctcttaaagtaatatttaaatgaataatacagactcgttaatattgtcaattattttataggatacttgaagctgaagaagacacaaatatcagtggcctaactaatttgtacctatggaattactattttggtgaaaaatattttcactccaygtgttcattgtgtgtgcatgcctgccctctctcggcagtggtccagctgattgctgctgttactgttaagggctcttagtgtatcaaaaataagttcttgagcatgacagaatgatgcgtatactcattttttaaattggaaacaaatgttctgtattaactatatagtgagtacaatcaaatacataaaccattagatgggcaactaagctggtaagccatggagaatttactattttgttggatatttgttagagcatgaagttggaattgagaatgtattttctcctgaaatatagttgatgattatgtatctgtctgtgaggtgtggttaattccacaaagcttatttcttctacagtatcccccaaattagaatatggtactgccattatgtgataaccctgtatatgacagtgtatctattggaaaatgttttgagttttcgtatgaatttttaggggcattgctgtagctctgacagtataaatatggatttgaaagttataagccatacacaacttgatatttcagaggctaggagtt

SEQ ID NO: 694899 - DNA, 596 bp, Homo sapiens
ttttttgctcagcatgtttcacttaaaaataaaacggtgttaaagatgtgtgtgtatatatgtatacacacacacacatttatatgtgtatatatgaaaagtaattaagaaaatgtctatgtaaatgcatgatgtttccttactattatcctaccataaaagacatttcaggaaagaaatagaatagtcacaaagtataggacaaaacagattataagaatacaaaggagtcaaaattaaatgtagtataaattaattattttattagtttaaaatgaatcttgtcaattaaactattatcttagcgattaagagatttcataccatatagccaataaaactagatgtatggttctgctgggaattaagtaattgggtatgtttttatgcctcattattaatgacctcatatgctattttaggccagtgcctacttactaatttgaataattctgtttttatgayagcctcagtactatatacttctagtataatatatagtacttactatatattaagcctctggaattatttcccactggaatcatttaaatttatagaaaattattaaagatgtaaaattattagcatgctaa

SEQ ID NO: 694900 - DNA, 624 bp, Homo sapiens
taattcaatcaatatacaaatcaatatactaatacaattctgatccatttactaatacctaattcggttgaggggtggggtgctgtaggttggcatcttgctaagccagggtttctccacttcagcgcgattgacastttgggctggatgattctttgttgtgggggctgtcctgtgttttgtaagatgtttagcagcatccttggcctctacccaatagatgccgatagcaccctctcctcaattgtgacaaccaaaaatgtctgcagatattgccaaatgtcctgtgggtgagcaaaatcaccccatttgagaaacactgtgctaagtgtttttcaataaccctgtctatgaaataaattttggataggtcatagagattgaagggtctatttaatcatagttagactccaagattataatatataaatcattactagagaagaagttgccagacatagtggttcatgcctgtaatcccagcactttaggaggccgaggtaagaagatccctgggcaacctaatgaaaccctgtctctacaaaaaataaaaaattagctgagtgcggtggcacgtgcttgtagtcccatctacttaggaggctgaggtgggaggatcatgtg

SEQ ID NO: 694901 - DNA, 624 bp, Homo sapiens
taattcaatcaatatacaaatcaatatactaatacaattctgatccatttactaatacctaattcggttgaggggtggggtgctgtaggttggcatcttgctaagccagggtttctccacttcagcgcgattgacagtttgggctggatgattctttgttgtgggggctgtcctgtgttttgtaagatgtttagcagcatccttggcctctacccaatagatgccgatagcaccctctcctcaattgtgacaaccaaaaatgtctgcagatattgccaaatgtcctgtgggtgagcaaaatcaccccatttgagaaacactgtgctaagtgtttttcaataaccctgtctatgaaataaattttggataggtcatagagattgaarggtctatttaatcatagttagactccaagattataatatataaatcattactagagaagaagttgccagacatagtggttcatgcctgtaatcccagcactttaggaggccgaggtaagaagatccctgggcaacctaatgaaaccctgtctctacaaaaaataaaaaattagctgagtgcggtggcacgtgcttgtagtcccatctacttaggaggctgaggtgggaggatcatgtg

SEQ ID NO: 694902 - DNA, 689 bp, Homo sapiens
gatgtgtgccaccatgccagcttttttttttttttttwaaaagaccgggtcttgccttgttgcccaagctggtctcaaactcctgccctcaagcaatctgccaacctcagcctcccaaatagctaggattataggcatgaaccatcgtgcctaacatagagacccttttttgtaatatgcaacttcaacacactacatgtagtaggaaatcatgctcttggtgttcaataatacattaaaacttacagaaaacacattatcaggatgtgcaaataggacaaagcacaagtttgccaataaattgagttcttacatctaaacaattcttaggtattccctgcactagtgacattacctccatcttccaggcaatgttccaaatttcctcaggctacctgccgaatgtatttaacgattttaaaacttaacattctagcaatgctagcaatatccctaatactttcaaggcatagcttatgaagtaatacacttacacataagatgttgtttggagctaatgttaagggacccaccaatcagattcctatggtttgagggatatatggtagctatatggtctgtaaggctggttatatttaagaaattacctcttgtgctcagttaaacatggaacgttgggcatatggttatctgtgctccctcctgaaaccccattaaaaccccatgaa

SEQ ID NO: 694903 - DNA, 689 bp, Homo sapiens
gatgtgtgccaccatgccagcttttttttttttttttaaaaagaccgggtcttgccttgttgcccaagctggtctcaaactcctgccctcaagcaatctgccaacctcagcctcccaaatagctaggattataggcatgaaccatcgtgcctaacatagagacccttttttgtaatatgcaacttcaacacactacatgtagtaggaaatcatgctcttggtgttcaataatacattaaaacttacagaaaacacattatcaggatgtgcaaataggacaaagcacaagtttgccaataaattgagttcttacatctaaacaattcytaggtattccctgcactagtgacattacctccatcttccaggcaatgttccaaatttcctcaggctacctgccgaatgtatttaacgattttaaaacttaacattctagcaatgctagcaatatccctaatactttcaaggcatagcttatgaagtaatacacttacacataagatgttgtttggagctaatgttaagggacccaccaatcagattcctatggtttgagggatatatggtagctatatggtctgtaaggctggttatatttaagaaattacctcttgtgctcagttaaacatggaacgttgggcatatggttatctgtgctccctcctgaaaccccattaaaaccccatgaa

SEQ ID NO: 694904 - DNA, 645 bp, Homo sapiens
gagggacatgtcatggagtttccttctgtatcaaaacttcagggcagttctgagagcaggggtcattgttcaatgacccaacgttcattgttcaacatgaacttcaatgttcccagtgtttatcaaaggtaagtgccactttgtggatgaagccatcacgaccaacaaatgcatcatctagaggatggggcaagacagacgtttaaacagtcagctgtctggctgaggatggcagacccagcagtcagattgctatastttgagagacatgccatgagttttcctttctgtaccaagactctagcacagttctgagaggggtatcactaatgcccctctttctttctcacctcctagggtgtaagacaggtcacctcagcagatgctggcttgtttgttgctcttccatcatctccacaaaattgatgtcccattccaggagctacaactccagctattatccaaccattccctgctcacacccagaccttctgtagatcaggtgaaagggataggacactaagatttaacaggtttgagtccccaaggcctcctttttggcttagggaaaataagctcataaataacctgaggaagaatctatggagaaacagtcttagaagggggtcagagctgataaagtca

SEQ ID NO: 694905 - DNA, 645 bp, Homo sapiens
gagggacatgtcatggagtttccttctgtatcaaaacttcagggcagttctgagagcaggggtcattgttcaatgacccaacgttcattgttcaacatgaacttcaatgttcccagtgtttatcaaaggtaagtgccactttgtggatgaagccatcacgaccaacaaatgcatcatctagaggatggggcaagacagacgtttaaacagtcagctgtctggctgaggatggcagacccagcagtcagattgctatagtttgagrgacatgccatgagttttcctttctgtaccaagactctagcacagttctgagaggggtatcactaatgcccctctttctttctcacctcctagggtgtaagacaggtcacctcagcagatgctggcttgtttgttgctcttccatcatctccacaaaattgatgtcccattccaggagctacaactccagctattatccaaccattccctgctcacacccagaccttctgtagatcaggtgaaagggataggacactaagatttaacaggtttgagtccccaaggcctcctttttggcttagggaaaataagctcataaataacctgaggaagaatctatggagaaacagtcttagaagggggtcagagctgataaagtca

SEQ ID NO: 694906 - DNA, 645 bp, Homo sapiens
gagggacatgtcatggagtttccttctgtatcaaaacttcagggcagttctgagagcaggggtcattgttcaatgacccaacgttcattgttcaacatgaacttcaatgttcccagtgtttatcaaaggtaagtgccactttgtggatgaagccatcacgaccaacaaatgcatcatctagaggatggggcaagacagacgtttaaacagtcagctgtctggctgaggatggcagacccagcagtcagattgctatagtttgagagacatgccatgrgttttcctttctgtaccaagactctagcacagttctgagaggggtatcactaatgcccctctttctttctcacctcctagggtgtaagacaggtcacctcagcagatgctggcttgtttgttgctcttccatcatctccacaaaattgatgtcccattccaggagctacaactccagctattatccaaccattccctgctcacacccagaccttctgtagatcaggtgaaagggataggacactaagatttaacaggtttgagtccccaaggcctcctttttggcttagggaaaataagctcataaataacctgaggaagaatctatggagaaacagtcttagaagggggtcagagctgataaagtca

SEQ ID NO: 694907 - DNA, 645 bp, Homo sapiens
gagggacatgtcatggagtttccttctgtatcaaaacttcagggcagttctgagagcaggggtcattgttcaatgacccaacgttcattgttcaacatgaacttcaatgttcccagtgtttatcaaaggtaagtgccactttgtggatgaagccatcacgaccaacaaatgcatcatctagaggatggggcaagacagacgtttaaacagtcagctgtctggctgaggatggcagacccagcagtcagattgctatagtttgagagacatgccatgarttttcctttctgtaccaagactctagcacagttctgagaggggtatcactaatgcccctctttctttctcacctcctagggtgtaagacaggtcacctcagcagatgctggcttgtttgttgctcttccatcatctccacaaaattgatgtcccattccaggagctacaactccagctattatccaaccattccctgctcacacccagaccttctgtagatcaggtgaaagggataggacactaagatttaacaggtttgagtccccaaggcctcctttttggcttagggaaaataagctcataaataacctgaggaagaatctatggagaaacagtcttagaagggggtcagagctgataaagtca

SEQ ID NO: 694908 - DNA, 645 bp, Homo sapiens
gagggacatgtcatggagtttccttctgtatcaaaacttcagggcagttctgagagcaggggtcattgttcaatgacccaacgttcattgttcaacatgaacttcaatgttcccagtgtttatcaaaggtaagtgccactttgtggatgaagccatcacgaccaacaaatgcatcatctagaggatggggcaagacagacgtttaaacagtcagctgtctggctgaggatggcagacccagcagtcagattgctatagtttgagagacatgccatgagttttcctttctgtacyaagactctagcacagttctgagaggggtatcactaatgcccctctttctttctcacctcctagggtgtaagacaggtcacctcagcagatgctggcttgtttgttgctcttccatcatctccacaaaattgatgtcccattccaggagctacaactccagctattatccaaccattccctgctcacacccagaccttctgtagatcaggtgaaagggataggacactaagatttaacaggtttgagtccccaaggcctcctttttggcttagggaaaataagctcataaataacctgaggaagaatctatggagaaacagtcttagaagggggtcagagctgataaagtca

SEQ ID NO: 694909 - DNA, 645 bp, Homo sapiens
gagggacatgtcatggagtttccttctgtatcaaaacttcagggcagttctgagagcaggggtcattgttcaatgacccaacgttcattgttcaacatgaacttcaatgttcccagtgtttatcaaaggtaagtgccactttgtggatgaagccatcacgaccaacaaatgcatcatctagaggatggggcaagacagacgtttaaacagtcagctgtctggctgaggatggcagacccagcagtcagattgctatagtttgagagacatgccatgagttttcctttctgtaccaagactctagcacagttctgagaggggtatcactaatgcccctctttctttctcacctcctagggtgtaagacaggtcacctcagcagatgctggcttgtttgttgctcttccatcatctccacaaaattgatgtcccattccaggagctacaactccagctattatccaaccattccctgctcacacccagaccttctgtagatcaggtgaaagrgataggacactaagatttaacaggtttgagtccccaaggcctcctttttggcttagggaaaataagctcataaataacctgaggaagaatctatggagaaacagtcttagaagggggtcagagctgataaagtca

SEQ ID NO: 694910 - DNA, 717 bp, Homo sapiens
gacttcctggctctgttatcaataacatgccaggaggacataaagtttgccttgttccaggtctttctgatatcttacagcacagggcatcacatggggaccaagcagagcaagcccaaatcccacggtgcctgcctcccttcagagccagccatctgcctctcactaggagagggagtgaccgcgtgcgtcccacgccccttcccacatctcccagtgaggaacctggtaaattttttcaagtgctgccttctttcccaactaaccattacacaggaatgtttctgggttttggcaactagcagatagtcagatttcattttcctgtaactccagttttttccaaacattcattacactggacatttgtaaagcataccttccccaaggtaaagcttcctatgttcccaaagatgagcatttgctgctgggctggtctggtgccttctgccaaatatcagcagagggctgtcagctcgccattagacacacatcctgattctcccagcacagtgtcaggtcagacccaggcgtccatacccacgycaacacgatggcttagaggtagaataaagcatgcaatcactcgggggtacatgggttgttcttacctgtccgcatcaatgagtcatttctaactgtaccaaactgaaaattcacatcaaaggacttgagaatggcacaaatagggtttaacactacaggcaagtaccaatt

SEQ ID NO: 694911 - DNA, 647 bp, Homo sapiens
tcaccatgttggacaggatggtctcaatctcttgacctcgtgatctgcctgcctcagcctcccaaagtgctgggattacaggcatgagccatcacgcccggcccatattctcattttctataatgtcatctaccagtgaagccttctctyactcccctatattaaataacagctgtcctatgccttccctagccccattactctggtatagtttcctctattcatcactatgaatgatgttcagtaggttaggtgaattagtacatttttgaattaatattttcaacttacacatttactggaatgtaacctcatgctcagttgaggaacatctgtgtttacattattgtctgtgtgcccatccaagactgtcagttccacataggcagaaactttgtgttattcactgttatatcccaatgcttagaacattagctggcaaaaagtaggtgctcaatgaatatttattcagtgagtgaaagaaagaaaattttccctccctctggacagaggtgatatttcaggaaataaaaaatacagcagagctgcgttacagacacacatgtatattttatttgtacaaatctgcccaacaggctcaagaaagtatgttatctaaaggtaagagtgagatgggagaatctcct

SEQ ID NO: 694912 - DNA, 583 bp, Homo sapiens
tgtttaaaagtgtatagctctttctttcttttcttctctctctctctctctctctctcctcttttctccattcttttgctcgtggccttgcatccatatccccsctccactggacactgtcccttcaaacagctggttcacattctctggttctggcttcctcctgggtacttattcatttttaaaccaaatctagtttccctatcagctcccccttttgtcttgaaaagggaaaagaaagcaacttctttaccctaaaaagaagcaagtcctttgagccaaggcaccaaatcatttttcttctgggaaagcagtcttcataaaaccacaagattctttttattaaaaattctctctctcctgctgtcatgtgaagagatatttgcttccccttcatccttcctccataattgttagtttcctggggctttccaagccatggtttctgtccagcctgtggaactgtgagtcaattaaacctattttatttatacattacccagtctcaggtagttctttatagcagtgtgagaacagactaatacactgacctcagctttctcctagaatgcggggttaccca

SEQ ID NO: 694913 - DNA, 623 bp, Homo sapiens
ctttccactgtattcacagactcccacagagctagactcatccataagtagttgccaaaatctatgcttctgcaggagaataatgatattctccttggccatcttgctgattcactctattattatgtatttaattgctcaaattattccagctctggctattaggagctcctttaggttggctagagtatttttcaaagtccttagacttctctttaagattatgaaatattagacatataattaacaatatacataatatttataatataaaaaacagtatgatgaaagtaagtgtacctaactcctcaatattttaaccttagtaattgagtgaagatacaggaaaatgagagaaaagaaatgaaaagaaaaatcagtagttttgtttcagatatgttaagtttgagttgcttattagataccagttagggtgctaaagagagggttggacatataagtctggagctcagggtggtggtaaaggctagtcgataaaacctgagggggtttaggctgacatctatgtttcagaaaraagaaaaatatcatgcacaatcccaccactcaaagataaattctgttaactaacatttttaagtagctccctccaacgcatgttt

SEQ ID NO: 694914 - DNA, 606 bp, Homo sapiens
ggatctatgcaggaaagtaaaccaaatctttttctaaagaccatgggaagatctaagtgatttctgaaaactattgtctttattgctattgaaatcattaagtgtaatgaaccatgttaatgtaacgttgaatttgagatgctaacaggataaattgaagtgatgggaagttttayattttcaattctgagctctctttcctttaatatggcatatttttattttatggaataatatatagagtgaaagctttgcacaggatgaaaaactttgagctatcttagactttattctaactctgccactcattatttatggtcacatgaaatctcaatggatgacctgttttattaatgaattagcctcaataaggtgtaaagaattaagtcaatggcttagattttgccagttatctggattttgttgttgttgtcacatggacccagtatattggtcatacacattttagtctgtttcttagaatttactgaactaaacagcattatattcagagtaattttgcccagtacctaaacaaaaataatcaaagtctgttggatctggaaaggatcttagaaagcaaattgtcacctcccttttgtacca

SEQ ID NO: 694915 - DNA, 606 bp, Homo sapiens
ggatctatgcaggaaagtaaaccaaatctttttctaaagaccatgggaagatctaagtgatttctgaaaactattgtctttattgctattgaaatcattaagtgtaatgaaccatgttaatgtaacgttgaatttgagatgctaacaggataaattgaagtgatgggaagttttacattttcaattctgagctctctttcctttaatatggcatatttttattttatggaataatatatagagtgaaagctttgcacaggatgaaaaactttgagctatcttagactttattctaactctgccactcattatttatggtcacatgaaatctcaatggatgacctgttttattaatgaattagcctcaataaggtrtaaagaattaagtcaatggcttagattttgccagttatctggattttgttgttgttgtcacatggacccagtatattggtcatacacattttagtctgtttcttagaatttactgaactaaacagcattatattcagagtaattttgcccagtacctaaacaaaaataatcaaagtctgttggatctggaaaggatcttagaaagcaaattgtcacctcccttttgtacca

SEQ ID NO: 694916 - DNA, 345 bp, Homo sapiens
ccagcaagtgggaggatggagcgggttggggggaaggtgtaggaggagcagcgggtgatgacaagatctgggtgtggctgtgggtgtgagtggctgggtttgccagagcctgcgggggtttaggaagtgaagggggcattccaggacacccgatgggggggcccacattcgaggcctcagctaaggccagccaaaacagtgtccagtgtgtccaaagacagatagtgcccccaccctggggcatgggagcaaaggaagaggacgggagagtgatgcgtgggaargggtgggcccacagaggaagggaggagaaagagaggaagggccaggggacaggcacaaggg

SEQ ID NO: 694917 - DNA, 1039 bp, Homo sapiens
tgcagatgtaattaaggtaacgtgagcttgtattgatctaggatgaatccgaatccaatgaaggatatccttacaggaagacaggcattagacataggcacacagcagagaatactgggtgaagacaggcagatgtgggggtgatggatctccaagacaaagaacaccaaggattgccagcaaccagcagaagttaggagagagacatggagcaggttctcccttacagcctccagtaggaaccaaccctgccaacaccttgattttgaacttctggcctccactactgtgaaagaatcaattcctattgtgtcgagccatccagtttgtggtaacttgttacagcagccacaggaaacgaatacggataacacattttcattgtgaataagaatagaaatggaagtacaaacattgtaacctgacatacacagtgcttcctccttccccagccccctccctagcctcatttcctactctgctctcctgggcaccctctactccagccgtgtggacctgttcaccattccaagggcatgctttgccatctcataattctgtgcctttacctaggttgtttcctctgcacttatttttcttcctttctttctttctctctctctttttttttttttttttttttttgatagggtttcactcaggctggagtgtagtggtgcagtctcagctcactgcaacctctgcctcctgggctcaagcaattctcctgcgtcagcctcctgagtaactgggactacaggcacacaccactgcgcctggctaatttttgtwttttttttttttttttttttagagacagggtttcaccatgttgcccaggctggtctcaaactcctgagctcaagtgatctgcccaccttgacctcccaaagtgcaggaattagaggtgtgaaccactggacccaggctgcacttgtctttcaagtcttagtttaacagctaactcctctagaatccttctctggccctctcaggaataacgatgagctcccttgagtgaagtcctacagactgttcc

SEQ ID NO: 694918 - DNA, 621 bp, Homo sapiens
tcacctcctgttaaaaaaaaaaatctttaatggcttctcattgctcttagggaaaatcatctaagtttctgctgagatctgagcacaatcatgacccagcctggtgtaagctctgattcttttgcttaccgttaaatctcccagaacccagcacagtgtctggatcatgaattgtatgtgttgttattattcattcattcactgtctactaygaacctactttgtgctaggcgttgaggatggaggggggctaaacaatcttggagactccctcagtcaagtgtgcacgtcgcatcccaagagtggagacttctggaatgatgagtaaggagctcagtggactttatccccagcacaaccacaacttctctggtgagaattattttaaaaaatcatcagaatttcaaaaacaaatttgcaccaaattaagtagggaagaaagagtttattcaaggccattgcaatagaggagcgaggccaggactcagtcagagctgaactttgctgaaacaaaaggcaggaaggacttcaagtgctggagtgtgaaggagatcatgggccatctgtgtttgtcaattgattttactcaagaaaagtaaacattttcaccttatgacagga

SEQ ID NO: 694919 - DNA, 537 bp, Homo sapiens
tttgtgtgattatttatttaatatcagactagctccaagacagtaaactctgtaagggcagaggccatatctgttttgctcactattgtatccacagggtctgacacatggagagaataattgacagtgccaaatataacagaaaggctgaattgtgtgttggttgaatgaatggaagtaatgaagaattgaattgcggcaactgcagtgaaaccgtctctactaaaagtacaaaagttagcccrgcatggtaggtatgaggtctgtgaaggcataagatctggtgacttgggactgggcgcagtgcttcacacctgtaatcccaacactttgggaggctgaggcaggtggatcacctgaggtcaggagttcgagaccagcctggccaacatagtggcaggtgcctgtaatcccagctactcgggaggctgaggcaggagaatcgcttgaacccgggaggtggaggttgcagtgaaccaagatcgtgccactgcactccagcctgggttatggagtgagaaactgtctcaaaaaaaa

SEQ ID NO: 694920 - DNA, 537 bp, Homo sapiens
tttgtgtgattatttatttaatatcagactagctccaagacagtaaactctgtaagggcagaggccatatctgttttgctcactattgtatccacagggtctgacacatggagagaataattgacagtgccaaatataacagaaaggctgaattgtgtgttggttgaatgaatggaagtaatgaagaattgaattgcggcaactgcagtgaaaccgtctctactaaaagtacaaaagttagcccggcatggtaggtatgaggtctgtgaaggcataagatctggtgacttgggactgggcgcagtgcttcacacctgtaatcccaacactttgggaggctgaggcaggtggatcacctgaggtcaggagttcgagaccagcctggccaacatagtggcaggtgcctgtaatcccagctactcgggaggctgagrcaggagaatcgcttgaacccgggaggtggaggttgcagtgaaccaagatcgtgccactgcactccagcctgggttatggagtgagaaactgtctcaaaaaaaa

SEQ ID NO: 694921 - DNA, 2431 bp, Homo sapiens
ttttctcttcacctgtttctaatctgctattaaacctgtctattatgttttaatttgggtaattgggtttttcatttcaaaaagcttctttgtttcagatccccaaggtcacattttatggtctctgtttcctactaacttcactgatatgcaaagtatttaataactggtatggcacaggtaataatgagacagaatggataccatctagaaacaaccactataactgtattaatttgtaccactgtgtatcaacccacatacatatattttgaacatacattgtatttctttagactttgaaaacataggtgttttataaccagtttttcataattctagtatctgcatcttgagggtctgcttctgctatctcgtttctgctgtttatggtaccttgtttccgagtgtgctttgttatttttgtaacgtgtacaactcatggttcttgaaaaattatttatggaaatatttcgaaggctgacataaggtgctttcccccagagaagatttacatttgcttctgtagatgcttgggagctatctaaactaaattctcagctttaggtcttttagcttcctgtataatgtagtttgggtcagtgaatacatgagtctcctagtattacacctcatggattgtttccctccaccccattgtgctgccttctattcagtactaaggtaactttatttgcagttttccagggatgtgggtaggagtgggtttacttttggcttgtccctagtctaggagtgtgatcccttggaacttgatgtcttttcccctgacctagtgatgtccctcaaaactgaagttaacatttgcttacatttgcaaatgcttaccagataaaagcgactttacttttctgtttacctctctgagacctcagttttccttagattttgccttggtaattcttttgctatttgtcagttgctcttttgttctttctggaaaaaaattaatatatcatccaatatttttggttgttttcagcaggagggttggtctgacatatctaacttactctrtttccagaagtataactcactgttgcattagcattctagaagagcacttctgcaaatatttttcttagattcatatattttcattgtgagtatccctcagccattttgactaccttaatgatattagtaaaatatggtaagtccttccttgtagattttattaaaatgacccagtgtttttctttccaggccaaagaggcagtggcagaagctgaacgacatgaccctaggaacgttttcactcaattttatatattcaagattgcagtcatagagggcaactctgaaagaggtataaattttatttgtcacttatatttgactattaacacaaagaataaataatcctcttcaaccacagtgggaaaaaaacattgtttttaagacaatagaattgaatatatgttctgtctttcctatgtaaaggtgatacaacaatgcaaaaagaaaccgtggaaggttatataaaagtaaaagaacagtggttacctattgagggaataggaactgggcaaacgcgggacaagaattaggggaaagtcttatcactatgtacttttttatacttttatttaaaccaacctattcaaaaattaaatttaaaaagctgtgtgtgggtgagattatactaaaaacccatatcagttaagaattgtcttcaaaaaatgaaagttggggtaccttttgattgttttcacttatttgggaggtgattggtgagagatttggccttgagatggagtttctctccacagagtagacagtcttggaatttcacacatgaccctcatcccattaatgttgaggcctttccattaagttaagcatagtttcctagctggtgtgtctgcatgggcacatatatgttgaattggttatagatatgcctttgctcagatattaatgccttcagccctcaggtagctgaattaatcctgaaggagtctgagctccagactggttgccatttgtttggcagaagttaagaaacttaaattaatggatccaaacaaaatgtatacgaatccaattaagcaactgtttttggacacctactacgtacaaaggactctgttattcactccttaagaaaaaagatcatttattttacattaaaaaagaaatgttccagaatagtaaagtatacctgtataataattaaggaatagtaaattagaggttaatattgctgtcatgttcatcatcaaagttttcattagagacttttaggcatttgttttacttgatatactgtgtttaagggtaaaataacttgaagcttttttgccagtaaaaatggcaaaaatattagtaattttcctgttaaatcttttgttttaacattattttttaaaaattattttactttttaaatacaacatcagatcaaccc

SEQ ID NO: 694922 - DNA, 601 bp, Homo sapiens
tgctgtaagaacacagtgaaccgagtgactacattgaattattttatttaaatttaaatctaacgcaattgattggtgtcctatctttaaacacccctggcaccatataatcctggtgcttttttttttttagccaacaactgacttgttcaaaatcctcagttttgcatgtgtatataaataaaagaataagcaactayttccagtattttacaatcctaatgaataatacacactttctaattataaggctcaaaaagctaaccaaaatgtaaagcacttttgctttttggctggttcatatcaaactggtatcaagggaagaacactcaattggctcttgatgacttcacaggaatttctgggcgggtgatagttgcaccaatcatgattaaacagagccccatgtgaggcagttatactacgcaaattaaatacacccactgtgtgactaattttggacttgagcacagattgatgaccacatttaaatgattgctattagtgagcagtacataagttttttgccggcttgcttgactttatagcttttcacaaacatgacagtgatttatgtaattcataatattataaaaccttc

SEQ ID NO: 694923 - DNA, 2067 bp, Homo sapiens
tttttcaatgaatgtttcctaacttggaaaaacattatgggttgttatgaagctgtttttatctgggtcagtgagtagtttagtgaagcagaaaatatcctccagaatggagtgaggattcacctaactccagatggtcaatatagctagcatttttatattcagcactgccatatttctttaaatgaagtgctatacaggtgcctcaattatttaacatatcatggtttaaataatgttatattttggaggtgggagacaaggaaatgaaagtgacattgtttcagtataggagcactatatccaaataaaactgtataatgaaccagactctacttcttcggtagaaaaaaacrtctgtaagttttccagaatttcctcctatatgaacttaaatcactaaaagattcaaggttcattgataagaatatatagtttttttttcaaaaattctatttcaagtgtttacttttatttttccaaactttaaaatgattttatttgtgtcaatttgtctgactcaccctgccttctgtgttatgaagacattggaaactgttttccaaaagcctagtttctttgtgagggtagcacacatgataccctttcataaaataataaaacctagaagaataatcatattgtccttgtcccttcttagaacgtacatttttaaaacaattatccagttatcagggtgaactgttactagtaattatagtcacttccccaccaaaattaacattgatcctgggcaaatagccaagatataaatactgccaagtccagaatgatctttttttggttcattttgataagactcaattcctgactataatagttatgtgaatagtaaagaaatcctgatcttacacagtgttgattactgaaacagattctgggtttcattctaatggcttcaaatggcatactctctcaaggaggtcatgccttcttgctagaattccagcttggtttatagaaaacttgctagtttgtgtaaagattaaaaattcaaaatccaaaaatagcctacatattttctggggtttactcataaattctacagattctgttaggaagatctctctgttagcatattattaacaagataaattatttgtagaaactaatcttttaatttttagagcatttggctatggcatatttttgactcacttgaaatattaaagtttataattctgtatgttcatgatgccgtttcatttactatgtcttttaataggtctttgcatcagaaaattttgtcacagtaatgctgcatttgaaaatacatcacaactctatgatttaaaacaacaatcattttattttttcttatttgtttgttgactcactgaatgggtcttcaagctacgggtttgtctagttatgctccatgtgcctctcaactgccttggcacaaaggggcagctgggtcatattcttttcatgccagtggaaggatttcaagaagaatgaaccacactggcacactctcactcccaaccacattctgttggccaaagtggaccacaggccaagcccaaaattaaaaggatggaaaaaatgcattctatcattaaaatcacatggcagataaagcgtcaaacttttttttttattttttatttttatttccgagacagagtctcgctctgttgcctaggctggagtgcagtggcacgatcttggctcactgcaacctctgccttccaggttcaagcaattctcctgcctcagcctccctagtagctgggattacaggcatgcaccaccacacttggctaattttttagaatttttagtagagacagggtttcaccatgttggccaggctggtcttgaactcctgaactcaggcgatccgcctgcttggcctcccaaagtgctgggattacaggcgtgagccaccgtgtctggccttcatcaagcattttgaacaaagatattgtcttccagtcttcatacttggtaatataagatcttccatactgccttaaaaataccaaattttaactgttgaattaaataaaacagatctgtaatacaaacagctgaacagca

SEQ ID NO: 694924 - DNA, 2067 bp, Homo sapiens
tttttcaatgaatgtttcctaacttggaaaaacattatgggttgttatgaagctgtttttatctgggtcagtgagtagtttagtgaagcagaaaatatcctccagaatggagtgaggattcacctaactccagatggtcaatatagctagcatttttatattcagcactgccatatttctttaaatgaagtgctatacaggtgcctcaattatttaacatatcatggtttaaataatgttatattttggaggtgggagacaaggaaatgaaagtgacattgtttcagtataggagcactatatccaaataaaactgtataatgaaccagactctacttcttcggtagaaaaaaacatctgtaagttttccagaatttcctcctatatgaacttaaatcactaaaagattcaaggttcattgataagaatatatagtttttttttcaaaaattctatttcaagtgtttacttttatttttccaaactttaaaatgattttatttgtgtcaatttgtctgactcaccctgccttctgtgttatgaagacattggaaactgttttccaaaagcctagtttctttgtgagggtagcacacatgataccctttcataaaataataaaacctagaagaataatcatattgtccttgtcccttcttagaacgtacatttttaaaacaattatccagttatcagggtgaactgttactagtaattatagtcacttccccaccaaaattaacattgatcctgggcaaatagccaagatataaatactgccaagtccagaatgatctttttttggttcattttgataagactcaattcctgactataatagttatgtgaatagtaaagaaatcctgatcttacacagtgttgattactgaaacagattctgggtttcattctaatggcttcaaatggcatactctctcaaggaggtcatgccttcttgctagaattccagcttggtttatagaaaacttgctagtttgtgtaaagattaaaaattcaaaatccaaaaatagcctacatattttctggggtttactcataaattctacagattctgttaggaagatctctctgttagcatattattaacaagataaattatttgtagaaactaatcttttaatttttagagcatttggctatggcatatttttgactcacttgaaatattaaagtttataattctgtatgttcatgatgccgtttcatttactatgtcttttaataggtctttgcatcagaaaattttgtcacartaatgctgcatttgaaaatacatcacaactctatgatttaaaacaacaatcattttattttttcttatttgtttgttgactcactgaatgggtcttcaagctacgggtttgtctagttatgctccatgtgcctctcaactgccttggcacaaaggggcagctgggtcatattcttttcatgccagtggaaggatttcaagaagaatgaaccacactggcacactctcactcccaaccacattctgttggccaaagtggaccacaggccaagcccaaaattaaaaggatggaaaaaatgcattctatcattaaaatcacatggcagataaagcgtcaaacttttttttttattttttatttttatttccgagacagagtctcgctctgttgcctaggctggagtgcagtggcacgatcttggctcactgcaacctctgccttccaggttcaagcaattctcctgcctcagcctccctagtagctgggattacaggcatgcaccaccacacttggctaattttttagaatttttagtagagacagggtttcaccatgttggccaggctggtcttgaactcctgaactcaggcgatccgcctgcttggcctcccaaagtgctgggattacaggcgtgagccaccgtgtctggccttcatcaagcattttgaacaaagatattgtcttccagtcttcatacttggtaatataagatcttccatactgccttaaaaataccaaattttaactgttgaattaaataaaacagatctgtaatacaaacagctgaacagca

SEQ ID NO: 694925 - DNA, 607 bp, Homo sapiens
ggcttcattaagaattcctctacatttaatataacttgggtaagagacagagacccgtgcaatgtttctaaacagcatctgaagtagtgatttcccagcttaactgtatcaccttataactaaacccatctctatmgcataattattcctttatgtaacaacatgtgttcagtgcatttgataatcagtcactgtcttggctgctggaaatcaatagcatagtcatccttcttcaaagagctttcagtctatttataaagattttcttatgtcaaacagataagcattatttaaatgcttatagtaggcatagtctcattgttatatagataaaagataatacaacatcattttatgtgaaaagaatatcagaaatttgcacaaaaaataagtgtgccacacagttaatttctaaaagcaccattttttgtgaattttgtgatgtttattgttttgtgagctttttaaaatccctaatccatcatggtttattttctcattctaaataaacattcacttctgtacataattttgtattcttgttcttaaagtattcattgaaactctagaaacttgtgaccccacacagcctcagtccagctctggt

SEQ ID NO: 694926 - DNA, 607 bp, Homo sapiens
ggcttcattaagaattcctctacatttaatataacttgggtaagagacagagacccgtgcaatgtttctaaacagcatctgaagtagtgatttcccagcttaactgtatcaccttataactaaacccatctctatagcataattattcctttatgtaacaacatgtgttcagtgcatttgataatcagtcactgtcttggctgctggaaatcaatagcatagtcatccttcttcaaagagctttcagtctatttataaagattttcttatgtcaaacagataagcattatttaaatgcttatagtaggcatagtctcattgttatatagataaaagataatacaacatcattttatgtgaaaagaatatcagaaatttgcacaaaaaataartgtgccacacagttaatttctaaaagcaccattttttgtgaattttgtgatgtttattgttttgtgagctttttaaaatccctaatccatcatggtttattttctcattctaaataaacattcacttctgtacataattttgtattcttgttcttaaagtattcattgaaactctagaaacttgtgaccccacacagcctcagtccagctctggt

SEQ ID NO: 694927 - DNA, 636 bp, Homo sapiens
ctccagcagagtgacatttagcttatctgatgggctaatccttcattgtcattgaatgtgttcatcaggctgcgacctcttatatctttgtgttccctgtctccagtaatatgaatgctacttcatagtaagtactcaataaacgtctgaatgaatgaatagatactacatttttaaagtgatgtgttgatttttattcacaaggagtgatgcaaacagtgtggactttgggcactgtagggctttgctggctgtggaagtaggttttgactctgctgacccagcataatcatagtgagctcgaatgtttaaaaatagaaggggtatgaagaactactacacracacacgaataagaagagacaacccaatagcagaacaaacaacagtagcagcaacaacaaaaaatagatgtgtgatatgcctaggcaggctataaaataggaagcagagaggatcaattagcattaaagatattccacctatcaggaatatgacatttaaaacaatgatgtatcataaacttataatcatcagatttgcaaaaattaaaaagtctgacaaagtattggggaagatgtggagaaacagaaattttggtaaactgcagataggactataagttggtataactcct

SEQ ID NO: 694928 - DNA, 636 bp, Homo sapiens
ctccagcagagtgacatttagcttatctgatgggctaatccttcattgtcattgaatgtgttcatcaggctgcgacctcttatatctttgtgttccctgtctccagtaatatgaatgctacttcatagtaagtactcaataaacgtctgaatgaatgaatagatactacatttttaaagtgatgtgttgatttttattcacaaggagtgatgcaaacagtgtggactttgggcactgtagggctttgctggctgtggaagtaggttttgactctgctgacccagcataatcatagtgagctcgaatgtttaaaaatagaaggggtatgaagaactactacacgacacacgaataagaagagacaacccaatagcagaacaaacaacagtagcagcaacaacaaaaaatagatgtgtgatatgcctaggcaggctataaaataggaagcagagaggatcaattagcattaaagatattccacctrtcaggaatatgacatttaaaacaatgatgtatcataaacttataatcatcagatttgcaaaaattaaaaagtctgacaaagtattggggaagatgtggagaaacagaaattttggtaaactgcagataggactataagttggtataactcct

SEQ ID NO: 694929 - DNA, 637 bp, Homo sapiens
ctcaagctgtgtgtctgtggacctctttgggtaggatgtgttctccagttttccacagaactgctgctgcctacagcgttctaccctgactgttcatgcccatatgttctgtagctgagccggtagacatttattgttctgccagtaaatgaatgttttggttgaaaagtatgttgcactaggtgtgatatttggtacacaatagatggtcattaaatatttccctttttctctattaggctgctgmtgatgtagtgaagagaaagtttaaatccaaatgatttcagccctgaactagaaagttctgtctcagtgggctgtatgatctcagaaaatcacttaattcctccattgctcagtgtttttctagggacactagagaatttggactagctgattctcagggtttcttccagtactgaacttgcctgaaaagtgatacataaccacacgcaaacttccatggggtgtttgaataaaaacttatatcctaaaaataaaataatgaagtatggattgtaagaacaattaggttaattacaaagtggcttaaaattaatgttcaggctgggcacagtggctcacgcctgtaatcccagcactttgggaggcttaggtgggcggatcacttgaggcc

SEQ ID NO: 694930 - DNA, 637 bp, Homo sapiens
tggggaggtctcagctcagaacaaggtggggcagcccctcacccatctgtcttctgtccaggacagatccctggcagaccctccctctcggtgcagttgtggcccacagtggcctcaggagagaacgtgaccctgctgtgtcaatcacaagagtggatgcacactttccttctgaccaaggagggggcagcccatcccctgctgtgtctgagatcaaagtacggagctcataagtaccaggctgaattccccatgagtcctgtgacctcagcccacacggggacctacaggtgctacggctcactcagctccgacccctacctgctgtctcaccccagtggccccgtggagctcgtggtctcaggtgagggcgctgaccctgtcctctctgagctcaaaggctcagctcaggccctgcccccagcagagctctggacactaaggaaagaggggagtgaagggagagggtccgcaggggagggtccagcycatgggaagatggaaatagacagggacctcccacccctggctcccacccctgaagtctcagtagagtaaagtgcagggagggctgggaggagacggggggtgaacctcaaaggagttgagattagactgagggtggaagacggaggcc

SEQ ID NO: 694931 - DNA, 1622 bp, Homo sapiens
tgtgtttcctagaagaactttagaatcaccttgtcacattttataaatcatcctttgagaatcttggtttgagtgtaataaatctcctaactgatttggtagaactgataattttacagtatgggggattctcagccagaaacgatttgtttctcattgattcaggtattttatagtttttcaagaatgtatgattgttttatttatatatgccataaacatttcttattagtttttaggagtcttatgggcttatgaaatttgtaaaggaggactttttttctatttattttttactacaaaatattaatttctgtatggcattcttattaatcacccatctccctgaattctattacagttttatttagtaagttatttgtcttggtattctaggtatataatcctttcagttgaaaacatagaattttctcttttgttttcaaaatcatagctttgctttatttttcttaacttactctattatatgaaacctctgtgcaatgccacacagtagcagtgattacagaattatcttatgcctgactttgtcatattttctaacccctacaaactgaaccaatattcaagaatcttagttctagttccatctcagttgccgctctttgttagtttcagtgtatttataaaataaggaaattgaattctctgagctcttattttccttccagttcatgtattatgtgatttaacagataggcatgacaacaaagattagcttttaaatgtgaaaatgggaacaaaatagggcctaatttatttataataaaatggaatctatttgataaccaggttacaatttacctacaagatttgaaaagttaagaaaacccaccagttggagatgtaaatcccaagagaggtcttcacccttcttgaaagctcatatgccagagaaactaatgatttgatcaagagagttttttcccccccagtattcagttgtgctaaattggctaaaaatggtgcataattgtacaccacaagtatccatacccaacctgccttactttctttgacttttcccttgtaaaatcttataatggacagagaagagaaattggagagaatttgaatgttgtgctagcaaaacataagatattgcaagactcagttcaagtttaaacttcattccctttcttctgaaagtcagccataattctctagccaaattgtctgaaaaaggatcctaaggggtgtcagagaaaatgaagcagatcagagagttatggggcctccatccactcaggagaaagctaaggggccttgcaggagacagtgatggattcaagccataggaaaaagcatacatcaagggcctctacctcatccctatctttggaggatgtgtataatttatagagtgtttaaattagacaaatggcccaatcgatttagaataagggacaggaaacacatgtttattttgcattaaactgaacttcaccagggtagaaatgcttatgatctcctgagttatggtgcttgggttctccatgaamgtgtgcctaattactgggattgcttctttgcacaaaggcgatccattatggaacatgctgtctccataaagaacagggaataagctaagcagctcaggc

SEQ ID NO: 694932 - DNA, 1066 bp, Homo sapiens
tgtaacaaatctgcaagttctgcacatgtaccccagaacttcaagtatcattaaaaaaagaaaaaaaagtaattagatagaaccataccattaaaaaaaaaaaggctgatagaatctcaacctattcatttagcaatgttgttcattacccatgtagctggaccagtctgagcctaggggtagggcggtttgaggtcaggccagtgttcaaatactagccctacataaacaatggtcttggtccactatttaggtaatacagcaaatatttctttctcatgattccggaagccaggaagtccaagatcaaggtgctggcagattcagtgtctgaagaggacctactttccggttcctagatggtaccttcttaccatgtcctcacatggaggaaaaatcgagagtgttctctggggtatctaatgtaagggytctaagcgcattcatgaggattgtgcctttattaacctaatcacctcccagagtcctcacctctaaataccatccccttgggggttaggatttcaacgtatcggccaccatggtggctcacgcctgtaatcccagcactttgggaggccaaggtgggcagatcacctgatgttgggagttctagactagcctgtccaacgtggtgaaaccccatctctactaaaaatacaaaaattagctcaggagtggtggtgggcacctgtaatcccagctactcgggaggctgaagcaggagaatctcttgaacctgggaggcagaggttgcagtgagcagagatcgcaccactgctctccagcctgggtgacaagagcaaaaccctctatcaaaaaaaaaggcgggggggagatttcaacatatgaactttaaacattcagaccataacaagaatgaaagctagtccaagcatcatgtgctgaaatctggcataacccttcttcccctgtcctggtacatacacagcgattggtgccattggtttttaaccatgcttgccagaacctggggagagggagacacagatacaggatgaggtacatttgctttagatccagttgagaaatgcttagtttcact

SEQ ID NO: 694933 - DNA, 1066 bp, Homo sapiens
tgtaacaaatctgcaagttctgcacatgtaccccagaacttcaagtatcattaaaaaaagaaaaaaaagtaattagatagaaccataccattaaaaaaaaaaaggctgatagaatctcaacctattcatttagcaatgttgttcattacccatgtagctggaccagtctgagcctaggggtagggcggtttgaggtcaggccagtgttcaaatactagccctacataaacaatggtcttggtccactatttaggtaatacagcaaatatttctttctcatgattccggaagccaggaagtccaagatcaaggtgctggcagattcagtgtctgaagaggacctactttccggttcctagatggtaccttcttaccatgtcctcacatggaggaaaaatcgagagtgttctctggggtatctaatgtaagggctctaagcgcattcatgaggattgtgcctttattaacctaatcacctcccagagtcctcacctctaaataccatccccttgggggttaggatttcaacgtatcggccaccatggtggctcacgcctgtaatcccagcactttgggaggccaaggtgggcagatcacctgatgttgggagttctagactagcctgtccaacgtggtgaaaccccatctctactaaaaatacaaaaattagctcaggagtggtggtgggcacctgtaatcccagctactcgggaggctgaagcaggagaatckcttgaacctgggaggcagaggttgcagtgagcagagatcgcaccactgctctccagcctgggtgacaagagcaaaaccctctatcaaaaaaaaaggcgggggggagatttcaacatatgaactttaaacattcagaccataacaagaatgaaagctagtccaagcatcatgtgctgaaatctggcataacccttcttcccctgtcctggtacatacacagcgattggtgccattggtttttaaccatgcttgccagaacctggggagagggagacacagatacaggatgaggtacatttgctttagatccagttgagaaatgcttagtttcact

SEQ ID NO: 694934 - DNA, 642 bp, Homo sapiens
tgcatgacccctcagaaccgtctgcatgaccgtctgtaaggcccacaaggggaattatgggaattcaaggaagacccccatgggaggcaaggggaggtggctttctgcagatgggggcctggggataggctaagggaaccacctgggacaggcagtcccctgcccctttccaaagagccttgtctttcaagctagatgtctggcagggggaaaaaaggaattttaggaagcagggaagagaaggcttttggaaggccagggtccttcaggtggaagaagagcctgtgctctttgtaaacagagaaccctattccctctggttaggtattttcctccccccctcctgggagacctgcactgtgctttgaggaaacctgtcagtacaggactcagccttttggtggacaaaaccagaatggatcccyaggtctggtctctaaagaccttttgaagtaagtgggacaaaaatgtcaccaaagtgcccattgcttccttctaatgtctttgaaatgcttctcaaatctccttctttggcctttaaggcagacagccctgccagtcactcagtctgcctatgcctcagttgccttctcttacaacaaatccactaatcctccccccccattgtatgttgtgggagcg

SEQ ID NO: 694935 - DNA, 1012 bp, Homo sapiens
tggagctcaccttggggcactcctccagaccatagggccatgagcccacccagcccttgccagccaaggcatttcttgacatgcagttgggtcagccatgtgaagcagaagggagagcttgatgaataggattctgtcttcaagaaggcgtttccatgtgtccacagtggctgaaagctgattactatggatgcaacggctcagcactcatttcttaatatagttccctcaagaaatagccatttaatccaccaagtattttatctcttttagggatattttcttaattgcagaagaatctaaaaatacaattggcatacttggtatgtcctgtgccttgtttagaaagaccgggagaaagaatgcaattaaactgtcaaaatgtaattgttgctcatatttaattgaaagtggcttattcccatttactgttcatggttttagagttacaagcaaagaaagttgccaggataactggtagttacaaaatgaagactggaggctctgagtgcatggtagcagctgagaagctgctactctcaaattagtttgcttgaataacacgatatgctcctcaatttcctagatacctgaagcacagaattagccagtttggggcacaatgggccattttgatttaaaaaatacacactgaactggatagtaactccatatccccccagaacaagtgtgtgygtgtgtgcgtgtgtgtgtatgtgtatgggtttctgctgtttgtgtggctctctgcctctttataatttaaggatctatctaaacagaatgaacactctcaggcagttctttctaagtgaaaagtcacccatccacactgaatggttatctaagtgccatttattctggaaatgagtactaaacactgatttggtacattggggaaggttccctggagccagagacagatgcaacacggtgtttctcctcaagcagctcagacacaagtcagggagacaagcaaacagattgttttaactgcatgtcataagtcctg

SEQ ID NO: 694936 - DNA, 2053 bp, Homo sapiens
ttctttaaaaactaagacacagcacacacattagtctaggctacatagggtcaagatcatcaatatcactgttttccacctccccatcttgtcctactggcaggtcttcaaggacagtatcatacatggaattgtcatcttctgtaacaatgccttcttctgaaataccctttgaaggatctgctcaagactgttttacagttaactttgtttaaataaataagtggcaggaggacactctaaaataataatgaaatatatagtatagtaaataagtaaattggtaacatagtcatttaggcaatagtaatttttcagctccattaaaatcttatggtaccaccattttatatgttgttcagtgttgactgaaacatgcagcacattactgtatgttattttattaatagtagtattggtgaatggaggcgctctgtggtgatttattaagaaaaattgtgttttctctggaaaacagttgcctttaatctgggaaattcctaggtggggaacaatcatgtttacaagacttggaaagggagaagaaaacagatcagcaaataattttaatcaaagccttggtggaaaggttcctacatgttgcaataaacccaaagaggcttagagaagttttaatcaacttgaacagacaaatagtgaatgagccacatgcaggaggtagttcacctgaataagatgcattaaatacaccccggaatgtgtggagggctccactgtgtttgtataatagctacgatggaagagagagaagttcttaatgcggaagtattcttagccttctttcttcttattatctaaatgtaatttatttattgcctgctaaacttctctcttttccccctatatgcaaataatcctaacttggaggatgtacaagtttggccccataggtaaaaagagaaaactctttctcctcctcctcttcagttttttctttctttttctttttcggcatccttttcctgaatagtttctattaatttattctgtggggccaaacaagacagataattgcacagggatcagagacaagagtaagagctgaaacaatgaggatggagtccacacaggaacagagccaggactgatgtaataaagctcaaatagagaaaatcagacataatgtaggagggctttctgtggagcgaggagggtgccaatgctggagtgagagtgacctagatcagagtttcaaagcatgtgcagcatgagggaataaccatgtatgaggtaagagcaatggtagctgcccagcccaactgtggtgaaggggacacttccataaagaagamtgtagcagtggccatgtgagattaaatacagaatatttgatcaaataagtgaatatattaaggatcgtagaaaccaggtttttcactgtcagagaaggattatgcataattaattggacaggaagaaaactataatgaaatatacagtttttaatattgaaatttgaggtgtctgtacctgcttatgattttcagtagataagatgactgtgtgttcatgacatcagatgatagtatagcctatattatattatattatattatattatattatattatattatattatattatatttttcctacatcagttccctaaaaggcccaaggacagtgacagtttgacagcttaaaataaatggacacatctatcttggtttctaaataccattctccactaaaaggaactcatgctccaggaaaaatggctgattccagggtttcagcatgtaaattattagataagcttagactgtttttttgagctagaaaatgagtaagttctcaaagaatgatgggaacgtgaacacaaaatcaagcttgaaggaatttgcactggcacaagcatgaatgcaaaaacacctaagtaatgttgaataaagtatgacaccatgagcccaagctctaatgaataaattaattaattgaaaatttggtgagttataatgtagttctagagttttaagcacttttaaaaataaaatatgtatttacataggaggaaagtctatcttatcaaag

SEQ ID NO: 694937 - DNA, 1028 bp, Homo sapiens
tacaacaaaaatgccaaagcaattgaatgggaaaaggatgatgttttaagcaaatggtgctggaacaatatattcacaaagatatggaaaaaaattggcattaaagaatgagagctttgtttccagtaatcccatggaaaaaaattaaactttgaccttctctcacctgatattacacattttaaattttagaaggcagcataactttataacatgggattggcagagatttcttagaagggctcaaaaaataataagagcaaaagaaaaacaacagtaaaacrgatttgataataatttaaaacttttctttatcaaatgagatcataaaatgcataaaaaagtgaaaggattaatgaaaatatttataagtaatatatttgacaaaagactcaaatctgaaatgagtctttttcagaaattttttgctttaaccaacctacacttacaaaagtactcataattggcatagtcatctgtattaaaaataactattttgtattggcaaggaggaaacatttttccactattattcttacagttttattgtgaggaaataaaaatctgtttctttacttgtcttagttttgtttattctacataatttaatagactatatagtaagctgtatgaagactgcacatataaatggtgcttctcccaaaatgatatattttctttctgtttataattataaagtatactttgtgatagataatgatatgtatcatgtaatactgtactgaaaatgaaaaacaggatgattttatggttactcaccatgaatgtacacagccgaaagcacactgtgcctgaagaatatttgaggcattgaagtaaaattaattgctggatgatagggatgcttcagtgacagagtcatcaacttacctcttttctaatgaggctcctgagtagctaatagaaggcactaggacattcatacttgttgatgggttagcaggcatagtgttcttcagaacgacattaagttttgactgtatcttttgcttcttctttgctttata

SEQ ID NO: 694938 - DNA, 1247 bp, Homo sapiens
gggctaaaagtactccttaggacagacttgcgcactagctaaacccaggaaacaaggtgaagtacttctattcctggaagtttcctgaaatccgatctctgctttaaactataaccaaagacccatggaaaataaacactcagctttgttaacagaattaaatcaagctaccaactagaattgtgactggaactgtagtattgccaatataatctaaaagcaccattttaaaaattgctttaaaagatctgattctgaattgggacttggaaagaatggcaaaactattaaagaggaggaaaaattagaaacagagaaaatgatttcatatcctgacaaagctgacaactctttggaagtattctgacctgaaatacataatctcaatctgtttgtgggaaaatattagacagactccaaatagaacatattcttcaagtatatcagcataatagaggcagggatggctgtgaactttcccagattaaaataaacacagaagacataayaattgaatgcaagagctcgtgtactagagggaagcaaacaccatgaagaacattattaagtcagagagcaaaactgaaatatgaatgccatattaaataaaaattttgtattacttttaaatttagtaaaattgggatcattaagttatcattgttttaagccattaagttttgagtggtttgttaagcaatcatatttaacttatcttcttggttctccttatatcagttattagttcacccatcacttcacctcttacataaaattgactttgccactaaacttacagtagtcacatatttactaataatgacaaacttcatgtatttttcaatttatgttcaattccagtgagttattcagcaaagatttatcaagaacctcctatatgccaggcatttttcaaagttcttgggttgctgtagagaaaaaaagacaatgccttggctgtcttgggcaatgggcaaggctattattaaaataccatgcatgactccattggagaaaaactccaacgaaaataagattgtggagtagttagtgttatatgtctcactgaaagtcagagaatgtacaataaagaattcattataaatatatctctgggggaaaaattagataattgagggttaaaatgattgtagtcagagtgaaaataataaggttccaatgttttcttccttttatttgttttcacagaagagaatagtatttgaattgtgtaaacaatatttaca

SEQ ID NO: 694939 - DNA, 1247 bp, Homo sapiens
gggctaaaagtactccttaggacagacttgcgcactagctaaacccaggaaacaaggtgaagtacttctattcctggaagtttcctgaaatccgatctctgctttaaactataaccaaagacccatggaaaataaacactcagctttgttaacagaattaaatcaagctaccaactagaattgtgactggaactgtagtattgccaatataatctaaaagcaccattttaaaaattgctttaaaagatctgattctgaattgggacttggaaagaatggcaaaactattaaagaggaggaaaaattagaaacagagaaaatgatttcatatcctgacaaagctgacaactctttggaagtattctgacctgaaatacataatctcaatctgtttgtgggaaaatattagacagactccaaatagaacatattcttcaagtatatcagcataatagaggcagggatggctgtgaactttcccagattaaaataaacacagaagacataataattgaatgcaagagctcgtgtactagagggaagcaaacaccatgaagaacattattaagtcagagagcaaaactgaaatatgaatgccatattaaataaaaattttgtatyacttttaaatttagtaaaattgggatcattaagttatcattgttttaagccattaagttttgagtggtttgttaagcaatcatatttaacttatcttcttggttctccttatatcagttattagttcacccatcacttcacctcttacataaaattgactttgccactaaacttacagtagtcacatatttactaataatgacaaacttcatgtatttttcaatttatgttcaattccagtgagttattcagcaaagatttatcaagaacctcctatatgccaggcatttttcaaagttcttgggttgctgtagagaaaaaaagacaatgccttggctgtcttgggcaatgggcaaggctattattaaaataccatgcatgactccattggagaaaaactccaacgaaaataagattgtggagtagttagtgttatatgtctcactgaaagtcagagaatgtacaataaagaattcattataaatatatctctgggggaaaaattagataattgagggttaaaatgattgtagtcagagtgaaaataataaggttccaatgttttcttccttttatttgttttcacagaagagaatagtatttgaattgtgtaaacaatatttaca

SEQ ID NO: 694940 - DNA, 1247 bp, Homo sapiens
gggctaaaagtactccttaggacagacttgcgcactagctaaacccaggaaacaaggtgaagtacttctattcctggaagtttcctgaaatccgatctctgctttaaactataaccaaagacccatggaaaataaacactcagctttgttaacagaattaaatcaagctaccaactagaattgtgactggaactgtagtattgccaatataatctaaaagcaccattttaaaaattgctttaaaagatctgattctgaattgggacttggaaagaatggcaaaactattaaagaggaggaaaaattagaaacagagaaaatgatttcatatcctgacaaagctgacaactctttggaagtattctgacctgaaatacataatctcaatctgtttgtgggaaaatattagacagactccaaatagaacatattcttcaagtatatcagcataatagaggcagggatggctgtgaactttcccagattaaaataaacacagaagacataataattgaatgcaagagctcgtgtactagagggaagcaaacaccatgaagaacattattaagtcagagagcaaaactgaaatatgaatgccatattaaataaaaattttgtattacttttaaatttagtaaaattgggatcattaagttatcattgttttaagccattaagttttgagtggtttgttaagcaatcatatttaacttatcttcttggttcyccttatatcagttattagttcacccatcacttcacctcttacataaaattgactttgccactaaacttacagtagtcacatatttactaataatgacaaacttcatgtatttttcaatttatgttcaattccagtgagttattcagcaaagatttatcaagaacctcctatatgccaggcatttttcaaagttcttgggttgctgtagagaaaaaaagacaatgccttggctgtcttgggcaatgggcaaggctattattaaaataccatgcatgactccattggagaaaaactccaacgaaaataagattgtggagtagttagtgttatatgtctcactgaaagtcagagaatgtacaataaagaattcattataaatatatctctgggggaaaaattagataattgagggttaaaatgattgtagtcagagtgaaaataataaggttccaatgttttcttccttttatttgttttcacagaagagaatagtatttgaattgtgtaaacaatatttaca

SEQ ID NO: 694941 - DNA, 893 bp, Homo sapiens
cttctgtaactcaattacyttacgcttcgcaagtattaaatcaaaagatactggctccttttttcctgcttggaagatttttttccagttaaatgtgttacaacccaccaagtcaaatataaaacatcctcttttattaatcagtctatacagtgtagtgagtaagcacatagattggtgtcataaaagtcttgagttcagacttttatgaactacttaactgttttgtaactttaggccagttattttgccttcctaagcatcagtttcattatatcaaatagacatgatacttaaacttaactccagttctttgtgatattaaatataaagcagcctttacaatagacaggtcagagtaagcatgtattggcttttaatcacagaaatagcaattcatctcacatttaaaagaccagaccagcagctcagaagaagatagcttaaggatattttatctagttatatttatctacatgaaaagttataaacatcacatatccacttaaagaagagattatcataagaggttgaagtaatttcattggaagtacctaaggtttatagacaattggaatttggaatgggtaaggattggtaaggactggggactccatattttctacacttttattagagaaagtgataactagttgtcattattattagtaataaatgttttcctacaatatgttgtattgacaaaagtacttaagctagatttatttgtacttttccttgactcatgataatagaatctgttcaagtcttacacaaaatttgaacccccaaatttacacttcacttccaccttatcaataggaggtgcaagtttactatggtcaagaatttgctgaaaaaaaaaaaaagcagctccaagatggagagaaaac

SEQ ID NO: 694942 - DNA, 667 bp, Homo sapiens
cacaggcagtgtggagcctgatgaagcacaggcaggcgcgatgtggacagcagcacggacgtccggccgcccaagtgtcccctcgcctttcaaccgcaaatcccactgtcaatgctgcagacagacacggttcactccataagatcacccgtgaaatgggagcgcctgaccacatgcctggaaatgtgaaaggataattctcaccactgtgagcggctcctagcactgttcatgggaaccatttgcctgtaaacacagacgttagaacacatccttcttggcatatggcagggtatcaatcagcaaatcagtcaaaatacagaattctaaggataaatgaataagatcatggaggcttgctgtattcatcttttggggctgacaaaatgccatcacctggggcaggatgtgttaaacaacrtgtttattctctcattatctggaggctggaagtccaagatcaaggtgccaataggttggtttcccctgaggcctctcctcctggcttgcagacagcaaaggtgctgtgtcctcgcctggccttaccctctgtgcatgcatccctggtgccactccctcttattataaggatgccagtcccattgcattagggccccacccttaggacctcatttaacctctgttaccttcttaaagggcccaattc

SEQ ID NO: 694943 - DNA, 660 bp, Homo sapiens
cttgggcactagaataaggttagattttacctttgaaatttacggtttctttagatattacaataacaataattggttatcktctttacctggaaatgcttccccctttgattagtctgttttgcactgctataaaggaatactgaggctgggtatttacaaagcagtttatttgtctcatagttctacagactgtacacgaagcaacggtgtcagcatctgcttccagtggggcctcaggaagctttcaatcatggcagaaggccaaggggcagcggggtctcacgtggcaagagagggaggaggaggtgccagcctctttaaacaatcagctcttgcatgaactcttagagccagaactcactcactacctggaagacggcatggagacaataatgagggatccacccccatgacccaaactcctcccactaggcccacctccagcactggtggtcacagttcaacgtgagatttggaggggacaaacatccaaaccgtatcacccctcaacccctcaactacacctggtttgctccttgttttctagattttgactgaaatgtccccttcccggcaaagccgtgtggaccacccgggctaaagcagccacctggtgctggcctgtgtggcccaattccagttctccagggtgctcat

SEQ ID NO: 694944 - DNA, 628 bp, Homo sapiens
ggctatatgcaggggagtgttgagacctcaccccacctgttcagagtggagttgagcagtgagtgggtaasgggccgatgaaggctggtcagggtgtccttgtacacaggggctgggctctgaccaggtggtgtgaaagccaataactgtcatgtactcgaaatgtcagcctcggccgagcccacctaaggtgctcagacatttccaaagcattttctgtgggctgcaccggaccggcttcaagtctccacaaccccgaccacactggggcagagatatcttccagtgcaatctgaggcctgagacagaaagtggcttcttgagctcacagatggctaagattggagccaggactctccagcccagatattttaactctccctccaccctgcccagcagtccccacagtctcagaacttctcaccatccacagatatgcaaaagcaccttccaaaaccaaccccggggaagatctgactctggatttggcgaaacaaccttgagatgttgggaagttcagggtttctccacctcggcactattggcgcttggggctggatgattctctgttgcagggggcttttctgctacccactagatgccagtggcacaccccttcccccgagct

SEQ ID NO: 694945 - DNA, 628 bp, Homo sapiens
ggctatatgcaggggagtgttgagacctcaccccacctgttcagagtggagttgagcagtgagtgggtaacgggccgatgaaggctggtcagggtgtccttgtacacaggggctgggctctgaccaggtggtgtgaaagccaataactgtcatgtactcgaaatgtcagcctcggccgagcccacctaaggtgctcagacatttccaaagcattttctgtgggctgcaccggaccggcttcaagtctccacaaccccgaccacactggggcagagatatmttccagtgcaatctgaggcctgagacagaaagtggcttcttgagctcacagatggctaagattggagccaggactctccagcccagatattttaactctccctccaccctgcccagcagtccccacagtctcagaacttctcaccatccacagatatgcaaaagcaccttccaaaaccaaccccggggaagatctgactctggatttggcgaaacaaccttgagatgttgggaagttcagggtttctccacctcggcactattggcgcttggggctggatgattctctgttgcagggggcttttctgctacccactagatgccagtggcacaccccttcccccgagct

SEQ ID NO: 694946 - DNA, 628 bp, Homo sapiens
ggctatatgcaggggagtgttgagacctcaccccacctgttcagagtggagttgagcagtgagtgggtaacgggccgatgaaggctggtcagggtgtccttgtacacaggggctgggctctgaccaggtggtgtgaaagccaataactgtcatgtactcgaaatgtcagcctcggccgagcccacctaaggtgctcagacatttccaaagcattttctgtgggctgcaccggaccggcttcaagtctccacaaccccgaccacactggggcagagatatcttccagtgcaatctgaggcctgaracagaaagtggcttcttgagctcacagatggctaagattggagccaggactctccagcccagatattttaactctccctccaccctgcccagcagtccccacagtctcagaacttctcaccatccacagatatgcaaaagcaccttccaaaaccaaccccggggaagatctgactctggatttggcgaaacaaccttgagatgttgggaagttcagggtttctccacctcggcactattggcgcttggggctggatgattctctgttgcagggggcttttctgctacccactagatgccagtggcacaccccttcccccgagct

SEQ ID NO: 694947 - DNA, 628 bp, Homo sapiens
ggctatatgcaggggagtgttgagacctcaccccacctgttcagagtggagttgagcagtgagtgggtaacgggccgatgaaggctggtcagggtgtccttgtacacaggggctgggctctgaccaggtggtgtgaaagccaataactgtcatgtactcgaaatgtcagcctcggccgagcccacctaaggtgctcagacatttccaaagcattttctgtgggctgcaccggaccggcttcaagtctccacaaccccgaccacactggggcagagatatcttccagtgcaatctgaggcctgagacagaaagtggcttcttgagctcacagatggctaagattggagccaggactctccagcccagatattttaactctccctccaccctgcccagcagtccccacagtctcagaacttctcaccatccacagatatgcaaaagcaccttccaaaaccaaccccggggaagatctgactctggatttggcgaaacaaccttgagatgttgggaagttcagggtttctccacctcggcactaytggcgcttggggctggatgattctctgttgcagggggcttttctgctacccactagatgccagtggcacaccccttcccccgagct

SEQ ID NO: 694948 - DNA, 1214 bp, Homo sapiens
gccgagagaaacagggagactgtgacgatccacagggtgcggtatcatgtttgtattccacatagtcagtatgattcaaagatccaaaagtttkacccagcatgttggacaggcacatacacaacatacatgcatgcacacgcgtatatttctagtaattatccacaggaagtagtgagtccacaatgccaagaatttctccttttcagtggctatttgtgatgagaagcaatgtgcattccactgcattctagcatcagattatgggaggggaatgtggtcatcgaaggcatgtcctctttcctataaagatttcattcaaatagagttctgcatctgatagtaaaaacaaacaaacaaacaaacaaacaaaaaaacagaggacaatttcttcgccaatgaaaatggccccctatgaaggcataggagcctatttcaaataaggattaggaaaaattcaacaagggaaatgatgctttgagtatgttaacttgcaaaaggaagaaccctatttcctcttttctaagaggaagacaactacttttgctttgatcagagtgccgcttgagtggccagaactgacaaggttggcagaagcgatgagctgagaattaagggcagcgtctgggcctgtgggaggtgccatatgtgggctcacatccactgaaccttgatctcctttgcacacctccatgtaatttataaatcagcagtattcactctgccaagaggaagtctacaaaaaagagatgtgcttggcgctcctggaaatgcttttactttggggaaaaagcagagtgtacactttgaatggaaataagcaggctgaagccacagaggccatttatatgcagcaccgggatgcagacaggagagcggagccctccttaaaggcgcagatcgctgagaaggctcatctctctccatgcttaagaggcctgactaggcttgggtcttgtttgataaccagggcataacatttaaacatacttacaaaaattcttccataaaatcaattcataaaaacttctaactctgaagcaaagtgttaaaataggtactgggttacccgcaaggattgttgtcagaataaaatgaaaggacctaaaaagttagcataccagttgaagccattcttactaagacatgcattgtatgcttgaatagatagaattcagagctaaaatctaaactttggccgtctgaacactgcc

SEQ ID NO: 694949 - DNA, 1214 bp, Homo sapiens
gccgagagaaacagggagactgtgacgatccacagggtgcggtatcatgtttgtattccacatagtcagtatgattcaaagatccaaaagtttgacccagcatgttggacaggcacatacacaacatacatgcatgcacacgcgtatatttctagtaattatccacaggaagtagtgagtccacaatgccaagaatttctccttttcagtggctatttgtgatgagaagcaatgtgcattccactgcattctagcatcagattatgggaggggaatgtggtcatcgaaggcatgtcctctttcctataaagatttcattcaaatagagttctgcatctgatagtaaaaacaaacaaacaaacaaacaaacaaaaaaacagaggacaatttcttcgccaatgaaaatggccccctatgaaggcataggagcctatttcaaataaggattaggaaaaattcaacaagggaaatgatgctttgagtatgttaacttgcaaaaggaagaaccctatttcctcttttctaagaggaagacaactacttttgctttgatcagagtgccrcttgagtggccagaactgacaaggttggcagaagcgatgagctgagaattaagggcagcgtctgggcctgtgggaggtgccatatgtgggctcacatccactgaaccttgatctcctttgcacacctccatgtaatttataaatcagcagtattcactctgccaagaggaagtctacaaaaaagagatgtgcttggcgctcctggaaatgcttttactttggggaaaaagcagagtgtacactttgaatggaaataagcaggctgaagccacagaggccatttatatgcagcaccgggatgcagacaggagagcggagccctccttaaaggcgcagatcgctgagaaggctcatctctctccatgcttaagaggcctgactaggcttgggtcttgtttgataaccagggcataacatttaaacatacttacaaaaattcttccataaaatcaattcataaaaacttctaactctgaagcaaagtgttaaaataggtactgggttacccgcaaggattgttgtcagaataaaatgaaaggacctaaaaagttagcataccagttgaagccattcttactaagacatgcattgtatgcttgaatagatagaattcagagctaaaatctaaactttggccgtctgaacactgcc

SEQ ID NO: 694950 - DNA, 655 bp, Homo sapiens
tctccatggccgggcgcggtggctcacgcctgtaatcccagcactttgggaggccgagacgggcggatcatgaggtcaggagatcaagaccatcctggctaacatggtgaagccccgtctctactaaaaatacaaaaaaaattagccgggcgtggtggcgggcgcctgtagtcccagctactcaggaggatgaggcaggagaatggcatgaacctgggaggcggaggttgcagtgagccgaggtctcgccactacactccagcctgggtgacagagcgagagactctgtctcaaaaaataaaattaaaaaataaataaataaatwaattaattaattaattaaaaaagcctcccctgaatctcccagctctaggtgcccagagcacttagacaggcttctcatttctctgacaagtcccgcacaggtttatttacttctctgactcttctactaagtggtaagctccttgggagcaacaactgagtcccatcagctctggatcctcaaaacctggcatgcagtgcctatgaaaatgttctttaaaatgttcttggaggggccaggcacggtggctcacgcttgtaatcccagcactttgggaggccgaggtagacagatcacttgaggtcaggagttcgagaccagcctggccaa

SEQ ID NO: 694951 - DNA, 655 bp, Homo sapiens
tctccatggccgggcgcggtggctcacgcctgtaatcccagcactttgggaggccgagacgggcggatcatgaggtcaggagatcaagaccatcctggctaacatggtgaagccccgtctctactaaaaatacaaaaaaaattagccgggcgtggtggcgggcgcctgtagtcccagctactcaggaggatgaggcaggagaatggcatgaacctgggaggcggaggttgcagtgagccgaggtctcgccactacactccagcctgggtgacagagcgagagactctgtctcaaaaaataaaattaaaaaataaataaataaattaatwaattaattaattaaaaaagcctcccctgaatctcccagctctaggtgcccagagcacttagacaggcttctcatttctctgacaagtcccgcacaggtttatttacttctctgactcttctactaagtggtaagctccttgggagcaacaactgagtcccatcagctctggatcctcaaaacctggcatgcagtgcctatgaaaatgttctttaaaatgttcttggaggggccaggcacggtggctcacgcttgtaatcccagcactttgggaggccgaggtagacagatcacttgaggtcaggagttcgagaccagcctggccaa

SEQ ID NO: 694952 - DNA, 2821 bp, Homo sapiens
tggcatattttataattacttaatttttgtctaagtcccccttctagaacgtaagctccaggaaggcaaggatttttatctgatttgttcactactttaaccctagcacctagaaaaatgcccagcatataacaaatatttgatgagtgaatgaaatggtctgggagggaggcctaccttccctagagctcaggggatacctcagcctcctctgttacttgacatagtgtatcattagcagtgacctgaagttccctaacttcaaccattcttgctacattggtccattgttttttttctttttcttttttttttttttttttggagacggagtttcacttgtcacccaggctagagtacaatggtacgatctcagctcactgcaacctccacctcctgggttcaagcaattctcctgcctcaacttcctgagtagctgggattacagtcatgtgccaccatgcctggctaagttttgtatcattagtagagacgaggtttcaccacgttgcccaggctggtctcgaactcctgacctcaggtgatccacctgccttggccttccaaagtgctggtattacaagtgtgagccactgcacctggccagtccattctttttctaatatttttcttttttctttttttttttttcaatggagccttgctctgtctcccaggatgcagtgcagcggcacaatcctggctcactgcaacctccacctcccagtttaagcaattctcctgcctcagtctcccaagtagctgggattacaggcaggtgccaccatgcccagctaatttttgtatttttagtagagatggggtttcaccatgttggtgaggctggtctcaaactcctgacctcaggtaatccgcccgctttggcctcccaaagtgctgggattacaggcatgagccaccgagccctgccagtccattcttttgtttgttttgagatggagtttcactcttgttgcccaggctggagtgcaatggcccagtcttggctcactgcaacctccgcctcccaggttcaagcaattctcctgcctcggcctcctaagcagctgagattacaggcacctgccaccacgcccagcttatttttgtatttttagtagagacagggtttcaccatgtcggtcaggctggtctgaagctcctgacctcagacaatccacctgccttggcctcccaaagtgctgggattacagggatgagctaccgtgcccagccactttttctaatattttacacagccagttaaccttggtaattatattatctgctgtttgtatttttatcagtcttgacttctttgttggactctgaggtcctcaaaaacaggggttatgactgtctagttagtgccctgttgggttccccatagctatgccaaatacccactgacctccccaagggaagatgaatgatgaaaattcaaagaccctgagactgagctaatagtttccttctctagccaccgttttttaaaattttaccttcccaagtgaacaggggtaaacctggccatcttttaactaacattaccagtaagcaatgagaggttcacttcactcctgcctagtctagcaaaagtgctaacaagcaaggaaacaatacaagttggtagaactgggatgataatgatatcaatgaaactaaataatcaacaagctatcacggaaagatctatagatgcctaacatagatttggctcttgatcaataggcgacagctcaagccacctcctccatgcaacccttccccctgttgagtccattagaaaaccctccctacatccttacccgagggcagctttgttgtctggatgttcagaaaagtggctggtggggaacttgcttgaagattaatatagctgggggagggttttgctctacagagaggcacagcattagcttcctctttggctggaactaaatcagagataactaaatcagagctcattccaacaagggacagcctttctaattagatccctgcacctggtccatgaaagcaggtgcccaggccctgccgtgaatatgttacatatcagaaagatacataagacaaaaaagaaatcataataggattaagagaaaccaagcaggagtgggataagccaaaatctaatttgtttacaagttcttactgatatacactacatgcttgcgactgtactaaatcctagggtatacatragatgtgttaagacatggtttcttagatgcttagtatctagttaggaagacaaatcagacacaggtgaaacagtgatctaacaacatgaggacataaacaatgagtctgagtctggggtgaaaataaaagccttttatctgttagttatactatgtgattaaaggtaaaaatgaatgtttcttaaaagggagaagagatcaatatgagtagcgagagaactctacctcctttcaggtagaggatatttactgaaccttaaaaacttgagaagcggctgggcacggtggctcatgcttgtaatcccagcactttgggaggccaaggcaggcagattacctgagatcaggagttcaagactagcctgaccaacctggtaaaactccgtctctactaaaaatacaaaactagccgggcgtggtggcagacgcttgtagtcccagctacttgggaggctgaggcaggataatcacttgaacccgggaggcagagattgcagcgagccgagatcacaacactgcactccagcctgggcaacaagggtgagattccttctcaaaaaaaatgaaacaacaacaaaaaaaaacttgagaagccaggctatactggtgagaccaca

SEQ ID NO: 694953 - DNA, 776 bp, Homo sapiens
actttgggaggctgaggtgggtggatcacaatgtcaggagctcgagaccagcttggccaacaaggtgaaaccccaggtctactaaaaatacaaaaaattagccgggtgtggtggtgggcatctgtaatcccagctattcaggaggckgaggcaggagaatcacttgaacctgggaggcggaggttgcagtgagccaagatcgtgccattgcactccagcctgggcaacaagagcgaaattccatctcaaaaaaaaaaaaaaaaaaaatgtgagtgggtaggaaactccatacaaagtttgcactgcaaaaacacaagggagagaagatgttgcaacaacattaagttaatttccttaaagaacttttagggtggacaagatggtgcatgcctatagtcccagctactaaggaggctaaggtgggagaatcacttgagccccagagtttgaggctgcaattgagctatgtttgcactactgcactccggcctgcatgatgcagcaagaccctgtcttaacaacaacaacataatacttttagaacttgacgattaagaagaggcctgtagaaaaataggcaaaggatttaaaaagctccagaggagcaaaaattgactaaaacatgaagagatgcttaaccttattcaaagggaaatgtaagcataatttggtaaacacttgcaatgtgctcctaagcatgtggtttgagtgtcaattggtaaacctcatataaagggcagtttgagctgacgattccactccttggtacgtatcct

SEQ ID NO: 694954 - DNA, 594 bp, Homo sapiens
ggcctggccccggggcacacagaggacccagacctgcagtccccacggaggccgcaggcccacgctcactgagactcaggggcctgcaggccatcgtgcacgaaccacacagacacccaccgagttacccgtgagcctcaccgccaactcaagggcgcaggcacacccagcacgcactgacaaacacacgcataacaaatatcacacacacacacacacacacacacacacacacgcagccccaaaccacacacatacaaaacacagagtgtggacatacacatgatcacgggacacatacacgagaacagcayacatatgactgcacattgcagatagacaccacacacagacacgtaagcctacttgccaacactctgccaccgcggggtgttttaagcccaactcagtccatcaaggtggtgactcttaggccagtgtcgggcagctggaaggggacctgcctggtctcaccagcgggcacagcagtaacctagcaactataaatacagccccccagagttcagtacctctgcctggactgaggttgccgaggctcccacactggctgcttgtttagctgagggatgcagc

SEQ ID NO: 694955 - DNA, 381 bp, Homo sapiens
taggaaaacaaaatacacatacatggattggaatgaagtacactacagtgttaacaagaggatccttagaygttaatccttagacgttaatgggtactataaacttccttcttcctcatgtgtttctgaagtctaaaataatttctactgggaaaaaattattattattattttttttttgagacagagtcttgctctgtcgcccaggctggagtgcagtggtgtgatctcggctcactgcaagctctgcctcccgggttcacgccattctccctgcctcagcctcctgagtagctgggactacaggcacccgccaccacgcccggctaattttttgtatttttagtagagacgggtttgcaccgtgttagccaggatggt

SEQ ID NO: 694956 - DNA, 381 bp, Homo sapiens
taggaaaacaaaatacacatacatggattggaatgaagtacactacagtgttaacaagaggatccttagacgttaatccttagacgttaatgggtactataaacttccttcttcctcatgtgtttctgaagtctaaaataatttctactgggaaaaaattattattattattwtttttttgagacagagtcttgctctgtcgcccaggctggagtgcagtggtgtgatctcggctcactgcaagctctgcctcccgggttcacgccattctccctgcctcagcctcctgagtagctgggactacaggcacccgccaccacgcccggctaattttttgtatttttagtagagacgggtttgcaccgtgttagccaggatggt

SEQ ID NO: 694957 - DNA, 636 bp, Homo sapiens
cacccaggaacttggaagggtccttgcaagcgaggggtgctgaggctgaagcttcattagtttcatgctaaatccgcccccgcctgggacccatcactcttccctccctttttcccttcccccttcctgcagaaattgcctgctttctttgatctctgcttcccaactcttgttgcttctggtggaggartttcttccctttccagacagaaggcagaacaggtctcagtccgaagcctctctggggctctaccctcccttccagtaaacatacggtctgtctaagctttctgctgatttgacagctaggacagcagaaagggaatagaatggattcttctaatgtgcctttaccttcttctttctacttgggtgccacagagtgacaaagtcacacatagatgtaaatgatgcactgttaactgtgaccaaagggctgatgtgagtcctaatatttcagaggaaaacagatctgagatgtcctgggaaataataaagggttacatcacatcgtgcctgggctgtgggtgtgtgagggccagggctcttctaacaggcagcaaccagggcctaacccattgctttcactacccccatgcacgttctcatttatgatattatttcgtttaacaagat

SEQ ID NO: 694958 - DNA, 636 bp, Homo sapiens
cacccaggaacttggaagggtccttgcaagcgaggggtgctgaggctgaagcttcattagtttcatgctaaatccgcccccgcctgggacccatcactcttccctccctttttcccttcccccttcctgcagaaattgcctgctttctttgatctctgcttcccaactcttgttgcttctggtggaggaatttcttccctttccagacagaaggcagaacaggtctcagtccgaagcctctctggggctctaccctcccttccagtaaacatacggtctgtctaagctttctgctgatttgacagctaggacagcagaaagggaatagaatggattcttctaatgtgcctttaccttcttctttctacttgggtgccacagagtgacaaagtcacacatagatgtaaatgatgcactgttaactgtgaccaaagggctgatgtgagtcctaatatttcagaggaaaacagatctgagatgtcctgggaaataataaagggttacatcacatcgtgcctgggctgtgggtgtgtgagggccagggctcttctaacaggcagcaaccagggcctaacccattgctttcrctacccccatgcacgttctcatttatgatattatttcgtttaacaagat

SEQ ID NO: 694959 - DNA, 636 bp, Homo sapiens
cacccaggaacttggaagggtccttgcaagcgaggggtgctgaggctgaagcttcattagtttcatgctaaatccgcccccgcctgggacccatcactcttccctccctttttcccttcccccttcctgcagaaattgcctgctttctttgatctctgcttcccaactcttgttgcttctggtggaggaatttcttccctttccagacagaaggcagaacaggtctcagtccgaagcctctctggggctctaccctcccttccagtaaacatacggtctgtctaagctttctgctgatttgacagctaggacagcagaaagggaatagaatggattcttctaatgtgcctttaccttcttctttctacttgggtgccacagagtgacaaagtcacacatagatgtaaatgatgcactgttaactgtgaccaaagggctgatgtgagtcctaatatttcagaggaaaacagatctgagatgtcctgggaaataataaagggttacatcacatcgtgcctgggctgtgggtgtgtgagggccagggctcttctaacaggcagcaaccagggcctaacccattgctttcactayccccatgcacgttctcatttatgatattatttcgtttaacaagat

SEQ ID NO: 694960 - DNA, 628 bp, Homo sapiens
tccaatgtaactagttctggtaaaaaaaaaaaagacaaagagattgcaaagtgtttccacaaaatccacgggcgtagagaaaggactgcaaggttcaactcaaaacacatgctccagagccaatcccagtattcatctatccaaatgtcacacctgtttgtcctttggcatgggaattaagactgaccaactatgatgcccaaccctagaatgagcaattgccgaggaggtgagaaggcgattcagcaggaatgtctccatgctctgaaacttgtggtctttgctttagtttctactacagaaaataccaaagacatccaaggccacyctgtcccgtcaccagaacttgctgctggccacttccaatccatctcataccatttggaattgattgtgctgtttctctatctttgtaaaaagaagtttcacttattttgtgtcgagaattacaagtgtgagagaggcatcctgtcttccaccagtactgtgtccatcccaaactggtcggtgcactgcttcacggtggccaggacactcaggagccgctggtccacggcgtccagatgaggatcagagagcactggggagatggggtcatgggccatggcagattttaaggcagacttta

SEQ ID NO: 694961 - DNA, 633 bp, Homo sapiens
cctgtgatatacacagaacttggatatcctcacataacttgaatattcattggaaattartggagttttcctgaatccattacagaactgatgttgcagtgcaaacctcactacaaactctggagagacaagtgaatcctgaaattcacagtcaaaatctgtagaaaaagaaagacctaaaatcaactacctaagcctccacctgagaaaactacagaaagagtagcaaatatatcccaaaccatgtagaagaaagaacatgtttttaaaaaggaggaagtgatgatattgtaacagcaaaacaatagagaaaatcaacaaaacaaaagctaatactttgataagttaaattaaattgataaactaaaataataataagaacgaatacacacacacacacacacacacacacacacacacacacacacacacacaattacccatatcagaaaaagaggcggggacttctgatccatagaaattacaagggttgtatggtaatactataaataattctatgcctgaacgtttgataacatagataaaaatcactggttcaatgataaaaagtaccaaaccttactcaagaaaaaaagagataatctgaatagctttatatatattaaagaaatt

SEQ ID NO: 694962 - DNA, 633 bp, Homo sapiens
cctgtgatatacacagaacttggatatcctcacataacttgaatattcattggaaattaatggagttttcctgaatccattacagaactgatgttgcagtgcaaacctcactacaaactctggagagacaagtgaatcctgaaattcacagtcaaaatctgtagaaaaagaaagacctaaaatcaactacctaagcctccacctgagaaaactacagaaagagtagcaaatatatcccaaaccatgtagaagaaagaacatgtttttaaaaaggaggaagtgatgatattgtaacagcaaaacaatagagaaaatcaacaaaacaaaagctaatactttgataagttaaattaaattgataaactaaaataataataagaaygaatacacacacacacacacacacacacacacacacacacacacacacacacaattacccatatcagaaaaagaggcggggacttctgatccatagaaattacaagggttgtatggtaatactataaataattctatgcctgaacgtttgataacatagataaaaatcactggttcaatgataaaaagtaccaaaccttactcaagaaaaaaagagataatctgaatagctttatatatattaaagaaatt

SEQ ID NO: 694963 - DNA, 593 bp, Homo sapiens
ttttattattttcttttagcaaaattattattttataaactgttttttttttttwaaatagtgttctgattctgcattgtttctttagtggtaattgttcttttttaaaatttatgggtttttttttcaatttatggttactgattttccttaaatatttaaatgttggtgaatattttgggatctctctcatgagtcagaatttgtgtaaatccctgagagtaaaacgtgcaactcaagtgataatttccaaaggaggaaatttccgaatacagtagtccactcttaagattgcaggtaatgttctagaagtgaagccaggttagttgttccattgagggaagctgccagctctttccagcaaccattagttaccaggagctctctcctccttcccagccctcagagaaatgtcttaaagcacatttattctcactatgaaaatactgaagttttttcttttgtgtgtttatttgtttttcttggtgtccttgaggtccagtattgcatcaggctctgctctgtctctctctagggctgtcattcaaatttcctgagaaatcttccagttttatttgcaaagcaaatatgaa

SEQ ID NO: 694964 - DNA, 593 bp, Homo sapiens
ttttattattttcttttagcaaaattattattttataaactgtttttttttttttaaatagtgttctgattctgcattgtttctttagtggtaattgttcttttttaaaatttatgggtttttttttcaatttatggttactgattttccttaaatatttaaatgttggtgaatattttgggatctctctcatgagtcaraatttgtgtaaatccctgagagtaaaacgtgcaactcaagtgataatttccaaaggaggaaatttccgaatacagtagtccactcttaagattgcaggtaatgttctagaagtgaagccaggttagttgttccattgagggaagctgccagctctttccagcaaccattagttaccaggagctctctcctccttcccagccctcagagaaatgtcttaaagcacatttattctcactatgaaaatactgaagttttttcttttgtgtgtttatttgtttttcttggtgtccttgaggtccagtattgcatcaggctctgctctgtctctctctagggctgtcattcaaatttcctgagaaatcttccagttttatttgcaaagcaaatatgaa

SEQ ID NO: 694965 - DNA, 577 bp, Homo sapiens
ttgcaaagttacttttcatgagatttgggtgatttcatattaggattacacaatccagtttttgtgagaaagaaacaactattcactctatattctgcaaaatgtaattattttaggaaattagtctctaggttaataatgtttacagttctaacatctgtgttttagattttgtgagaaattggtgagaagagaacatgtggagataacaagtgatcccattttaaaagtttcaagttattatatgattaaattttgcatacaagctttttaatgaatatttttatgtcagcytaacaatttttatcaatgtgttttttatacttctgaagataagtatatcttccataaagtttaaaatgtttttgcctgggcgaaagagcgagactccgtctcaaaaaaaaaaaaaaaaagttttcctagatgtattcagtaggttatttagcagtctgtttctgattttaagaaaatctgacccacccatttatcccaccaacatttgtaaaatggacttagtaattattgtttttagaaggcttacctattttaaaactctttcattaaaatgtactttgaa

SEQ ID NO: 694966 - DNA, 2342 bp, Homo sapiens
  misc_feature 340, 341, 342, 343, 344, 345, 346, 347, 348, 349, 350, 351,352, 353, 354, 355, 356, 357, 358, 359, 360, 361, 362, 363,364, 365, 366, 367, 368, 369, 370, 371, 372, 373, 374, 375,376, 377, 378, 379, 380, 381, 382, 383, 384, 385, 386: n = A,T,C or G
  misc_feature 387, 388, 389, 390, 391, 392, 393, 394, 395, 396, 397, 398,399, 400, 401, 402, 403, 404, 405, 406, 407, 408, 409, 410,411, 412, 413, 414, 415, 416, 417, 418, 419, 420, 421, 422,423, 424, 425, 426, 427, 428, 429, 430, 431, 432, 433: n = A,T,C or G
  misc_feature 434, 435, 436, 437, 438, 439: n = A,T,C or G
acatttggtattttcctgttttcatttctgctgctagtttttttttttttaggagtattttcattttctatgcctttacattttttctgactcagtctttgaatgaaagcttcctttttaatgtatactgaatgcacttagatgattattttccatttattttcacaagagatagtttttagggaaaatgatttatttctttttgtgcataaactatgctttttcaaccattatctttatacattacttgtatcataatttattaaaagtatattaatgttttgttttataatcttttcggtcatggggtaccgagctcgaattcgtatccatgtcgagnnnnnnnnnnnnnnnnnnnnnnnnnnnnnnnnnnnnnnnnnnnnnnnnnnnnnnnnnnnnnnnnnnnnnnnnnnnnnnnnnnnnnnnnnnnnnnnnnnnnttcaataagaccataatagccacacctgtctccccgcctctggtcttgctcaactttgatctaacatgaacatcataaaagtgaactgtctaatatacaacactaagcactgcattcccatgataaataattgtaaacactgtgcattaattgtaagataaagctgaaactctcctgattgaaggtcatttatgactggttctgctgcctctataggagcgaatcctaaccctttttggttttattcttttttgagaacatggtgaaagacatgaaaaatgcacattttcaatagttatctcccaggtttcttgtttcccatacatttagaagtataattttcttttataattttcggattcgttttgtttattactgctagagaagaaatgactatatcaccctttatcactataagctcctgtggggatgggggcagggcacatgctgaacattattttttggtccagaagcttcagagaggtcctattatagctgcattcaacatatatctgataaacataaattatatctataatgcatcctaataaacagaagaagtatattcttatacaatgaagcagcttgccattgacttttactttagatgcttttctgcagaaagagaaaaatagacaaatcaaaactccctttcagtacaatatattcagtcctgctgtgtagagcattaagacaaagaagggaagagaagaattagaagactaaagggaagaggatgaagcagtttgagtagtagtagttactccaggtaaacaaaaccataaatggaaagagacagcataaatatcaaataatttctccaatttatatacccattatgagatgcctataccacctgtttccattaagaaaattcctaagattttgtattcagtttggtctttccattagtgaatactgaatgcctttcatgtatcttcatttagaagtaatgcacgttcaggaaacatatcttaagaagtgtatcacggccgggcgcggtagctcacgcctgtaatcccagcactctgggaggccgaggcaggtgtatcacgaggtcaggagatcaagaccatcctggctaacgcrgcaaaaccccgtctctactaaaaatacaaaaattaggcgggcatggtggcgggcacctgtagtccctgctactcgggacgctgaggcaggagaatggcatgaacccgggaggtggagcttgcagcgagctgagatcacaccactgcactccaggctgggagacagagtgagattccatctcaaaaaaaaaaaaaaaaaaaagcatcatatgataacagaggcaaagtagaacagaaatatgccacactagagcaagagagggaccgtgaaaaaaacagattcaaacctaagccccactcttcactagctagagaaacagtgaggttacttaaattctatgagtatcattttcctcatctttaaaatataaagagtaatattttgaaggcttgtaaaaattcagtaagaacacttatctaaagggcctatcaatgcctggcatccaatgggtgctcaatggtcagttaacgttttaatagtgatcaaaaattatgaatatcagtcaaaataacaatgtaattaacaaatcatatatgaataaggctgaagaaatgtgttaaaataagtataattaattcatagaaagaaggggtcagtacaaacacaaactacagcttccaggatcatgaaggaactagacggctattaaaagtgaggattaaaagcgttgccaggaagaaagaacactataagtaaatgtgtggaagcctgagaagcttgggacattcgaagccacaggcagaattctctgaactgaggtcaaagtttaggaaaaaaggataacagactgcctgcccatggtaagggccttgaa

SEQ ID NO: 694967 - DNA, 1353 bp, Homo sapiens
gaatactatgcagccataaaaaaggatgagttcatgccctttatagggatacagatgaagctggaaaccatcattctgagcaaactrtcgcaaggacaaaaaaccaaacaccgcatgttctcactcataggtgagaattgaacaatgagaacacttggacacaggaaagggaacatcacacaccggggcctgttgtggggtgcggggagggggagggatagcattaggagatatacctaatgtaaatgactagttaatgggtgcagcacaccaacatggcacatgtatacatatgtaacaaacctgtacattgtgcacatgtaccctagaacttaaagtataataataataataaaaggatatctatgtgagaggcgaaaatgttttaaggaggagaggcgaggcatcagctgggtcgaaacaatgcaaaagcattttacaaactctaaaaccagtcaacatatatcaagaacatactaagttccagacactggtgattgaatgaatgaatgaatgagcaagaatggcctctgccctccaggagctctcagtattgtagtggaggcaggttgtgtaattcaaatgagtaggactgtgcaaatgagctggacagatgctataccaggtaggaacctggcacaaaagcacaataggagggagtgagcagtgttcctttgcctcatctaggctattacatactcctagttttaactttcccttatgctttttacctcaaatctgtattttcagcctcaacccctcccgccagctttagaaccatgtccacctgctggacctccgtacccaactgttccacagagtgtacctcacacacaatatatctgagattgagtttatcttttcctttcttctccctctctttgggaaatgcaatcagggtcacattattgttttcgagggctctaggtacttttgatttcatggccccctccttcattaaaaaatgtttaaaaatatatttataggccaggcgtggtggctcatgcctgtaatcccaacactctgggaggccgaggtgggcggatcacctgaagttgggagttcgagaccagcctgaccaacatggagaaaccctgtctctactaaaaatacaaaattagccaggcatggtggcacatgcctgtaatccctgctactcgggaggctgaggcaggagaatcacctgaacctgggaggtggtggttgtggtgagccgagattgagccattgcactccagcctgggcgacaagagtgaaactctatctcaaaaaatatatatattttatatatatatatataaaatatatatacacacatatattatttaaaaatatatgcagtaatatacttta

SEQ ID NO: 694968 - DNA, 1353 bp, Homo sapiens
gaatactatgcagccataaaaaaggatgagttcatgccctttatagggatacagatgaagctggaaaccatcattctgagcaaactgtcgcaaggacaaaaaaccaaacaccgcatgttctcactcataggtgagaattgaacaatgagaacacttggacacaggaaagggaacatcacacaccrgggcctgttgtggggtgcggggagggggagggatagcattaggagatatacctaatgtaaatgactagttaatgggtgcagcacaccaacatggcacatgtatacatatgtaacaaacctgtacattgtgcacatgtaccctagaacttaaagtataataataataataaaaggatatctatgtgagaggcgaaaatgttttaaggaggagaggcgaggcatcagctgggtcgaaacaatgcaaaagcattttacaaactctaaaaccagtcaacatatatcaagaacatactaagttccagacactggtgattgaatgaatgaatgaatgagcaagaatggcctctgccctccaggagctctcagtattgtagtggaggcaggttgtgtaattcaaatgagtaggactgtgcaaatgagctggacagatgctataccaggtaggaacctggcacaaaagcacaataggagggagtgagcagtgttcctttgcctcatctaggctattacatactcctagttttaactttcccttatgctttttacctcaaatctgtattttcagcctcaacccctcccgccagctttagaaccatgtccacctgctggacctccgtacccaactgttccacagagtgtacctcacacacaatatatctgagattgagtttatcttttcctttcttctccctctctttgggaaatgcaatcagggtcacattattgttttcgagggctctaggtacttttgatttcatggccccctccttcattaaaaaatgtttaaaaatatatttataggccaggcgtggtggctcatgcctgtaatcccaacactctgggaggccgaggtgggcggatcacctgaagttgggagttcgagaccagcctgaccaacatggagaaaccctgtctctactaaaaatacaaaattagccaggcatggtggcacatgcctgtaatccctgctactcgggaggctgaggcaggagaatcacctgaacctgggaggtggtggttgtggtgagccgagattgagccattgcactccagcctgggcgacaagagtgaaactctatctcaaaaaatatatatattttatatatatatatataaaatatatatacacacatatattatttaaaaatatatgcagtaatatacttta

SEQ ID NO: 694969 - DNA, 1353 bp, Homo sapiens
gaatactatgcagccataaaaaaggatgagttcatgccctttatagggatacagatgaagctggaaaccatcattctgagcaaactgtcgcaaggacaaaaaaccaaacaccgcatgttctcactcataggtgagaattgaacaatgagaacacttggacacaggaaagggaacatcacacaccggggcctgttgtggggtgcggggagggggagggatagcattaggagatatacctaatgtaaatgactagttaatgggtgcagcacaccaacatggcacatgtatacatatgtaacaaacctgtacattgtgcacatgtaccctagaacttaaagtataataataataataaaaggatatctatgtgagaggcgaaaatgttttaaggaggagaggcgaggcatcagctgggtcgaaacaatgcaaaagcattttacaaactctaaaaccagtcaacatatatcaagaacatactaagttccagacactggtgattgaatgaatgaatgaatgagcaagaatggcctctgccctccaggagctctcagtattgtagtggaggcaggttgtgtaattcaaatgagtaggactgtgcaaatgagctggacagatgctataccaggtaggaacctggcacaaaagcacaataggagggagtgagcagtgttcctttgcctcatctaggctattacatactcctagttttaactttcccttatgctttttacctcaaatctgtattttcagcctcaacccctcccgccagctttagaaccatgtccacctgctggacctccgtacccaactgttccacagagtgtacctcacacacaatatatctgagattgagtttatcttttcctttcttctccctctctttgggaaatgcaatcagggtcacattattgttttcgagggctctaggtacttttgatttcatggccccctccttcattaaaaaatgtttaaaaatatatttataggccaggcgtggtggctcatgcctgtaatcccaacactctgggaggccgaggtgggcggatcacctgaagttgggagttcgagaccagcctgaccaacatggagaaaccctgtctctactaaaaatacaaaattagccaggcatggtggcacatgmctgtaatccctgctactcgggaggctgaggcaggagaatcacctgaacctgggaggtggtggttgtggtgagccgagattgagccattgcactccagcctgggcgacaagagtgaaactctatctcaaaaaatatatatattttatatatatatatataaaatatatatacacacatatattatttaaaaatatatgcagtaatatacttta

SEQ ID NO: 694970 - DNA, 602 bp, Homo sapiens
aggtacaaaggtgaacaaaacagagaaattcttcactcgtggtccacattctggtggtggggacacaagctgtgaatatttagatatgtgatgtgtcaggcagtgttgaggcatacagagaaaaattaagtcagcttagaaagtgctggagctagggttgctcttttatcatggycagaaaaggcctctctgatgagttgacgtttggccagagatagatatctgggagaagagggaacagaggaccaagacccaaaccatgagcatgctcagcatttgaggaacagctcagaggccaagctggagcaagcggcagggagaacaggagatgtggaggttagaggcagctgttggaagttggaagtgggccctgccagcctccttgcaagagctttaaagaagtctgttcagagcgctgtgcccaggtagtaggggaagcaagtattttccccagggcggagtgattgctgtctgtccctaatgtatgaggctcctgggtgcctgtttgctcaatccttataatgtagggctggataaaacactagctgcattcatggagtattttccatgctcactgttagccatggacctcacgtaaagtg

SEQ ID NO: 694971 - DNA, 602 bp, Homo sapiens
aggtacaaaggtgaacaaaacagagaaattcttcactcgtggtccacattctggtggtggggacacaagctgtgaatatttagatatgtgatgtgtcaggcagtgttgaggcatacagagaaaaattaagtcagcttagaaagtgctggagctagggttgctcttttatcatggtcagaaaaggcctctctgatgagttgacrtttggccagagatagatatctgggagaagagggaacagaggaccaagacccaaaccatgagcatgctcagcatttgaggaacagctcagaggccaagctggagcaagcggcagggagaacaggagatgtggaggttagaggcagctgttggaagttggaagtgggccctgccagcctccttgcaagagctttaaagaagtctgttcagagcgctgtgcccaggtagtaggggaagcaagtattttccccagggcggagtgattgctgtctgtccctaatgtatgaggctcctgggtgcctgtttgctcaatccttataatgtagggctggataaaacactagctgcattcatggagtattttccatgctcactgttagccatggacctcacgtaaagtg

SEQ ID NO: 694972 - DNA, 1393 bp, Homo sapiens
tgttgcccactgcaaagttacatgctggatccttctgatctaagaaagagattctttgcctctctttggcatatgcatcaagataaaattcatgcagagtaagaggatccaggaaaaataatatctcattattatactgagaaaggggcagagttggagctgaaacccatatcctgttttttaactgagtccataagtaatctagaagagtgtcactataacatctttcaaataagccttacatcctcattcaactttgaggtggccatgttctacagtttataatgttctttgcattttcactgattttagctatattatctcaaggattctacatagctactatgtttttaaaaaatcaaacaacaaaaaagaattcttgtcataactctcagcaattgggcaaatcacccattttccctaagcctttcttacctcyaaatgttgctaatagtatgtatcctacccttcttctgtttaatgtggagattgaatggagttgtgaatgtgtaagcagtttatgaattgaaaagtgctagaagaaaaaaaatatcctcatgccagtagaacatgagctctatagggcaaggacttctgttttgttcactgcctaaaatggggcgtggcatgtagcaggtactcagtaacaggtgttgaatggatgacggaatgaatgactcattgaatagcataccactccaatgccagggagcccagacaccagctgtgcagagaggcataggaattatcaagtctgaggaccaagggaccctgcccatctgtcgtttcagaattccttttgagaagccaggatgacaatgccttttgcagtggtgggatctggtccctcctcaagaccttttcactagaggaaggttgttctcttagttctcaagagatgatgattgtttacatgaacatgccaagggtggagaagggctggttttgacctgagggaagtttgtagctgaaaaagtgtgttcatccttttctccagtgatttggacccactgaagtctgagttctctgctgcattgtaactaagcattgggctgggctttttcacgtggtcatctcattccatcacctgctactgtaaaacaacaggaaatcatggtacaaatccaaccatcatcatttttagctggggcccttgggccagtttcttcacctctctgaatctcttttttcctgccaaaaagtggtgataatagaacattacttcgtggggttactttgaggactagatgaggcagtccttgtttagaagtgatgccagtacgtctgtgagacttacgtgcacacatattcagcttaacctgctgggcactgtccacataagcttcctcaagccctggagcaaacctcagcctctagttgctgcaggttcttt

SEQ ID NO: 694973 - DNA, 673 bp, Homo sapiens
atgtaaggacaaggaagccttaggataaaaatactaggccagagtatagaagcaaactgctggccgagttacctgtatgaagcaacaaaggttgacaggagttagacaaatccaagaaaggtagatttgtgacccttactggaaatctatcaatattgtatacccccamcatacaatatactggggttgaaacctcttcctaatctttacattttctctgttccttctacccgttcatttatttatccatcttgatttattgagtacctgctatgtacaaagttagctgcataagagggtatggctgttcctggtcaaattctaaactgaagggcctttggggatgatcctgctaaggttaaagggacaatctcatggtgtcatgccctatataatgtgctgtaactctatctctagacgtatctggagctcaagggccaatacttgacagagacttttggtatgttctcatatttttcaagtttaagctaatttaatggtttaaataaatctacaagtttaaataaagaaaatattcatattctctctcccttaaaccaaactgatttcaaattcgaccagtctttttttattcttacccatctatacacatatgttatgtggtcttcatcagagtgagcataccattttgcattctatgttttaaagccca

SEQ ID NO: 694974 - DNA, 1103 bp, Homo sapiens
ttgtttatgtggtttaaatctatcaatatttaccatattagaaattaatgccagtaaatttaaaaaccatcatgttactatatattttacatataacataaaaacatgttacatgttttacacttaacataaattatacgtaacataattttaaaaatgaaaatatttttccagattaaaaaaaaacacaatgagaagagtggtatcattttagatttttgcaaatttctttaatacctggttaaatagaaaataattggatatgcatatctagttctgcattcaatctgttgtgacaacacaagtgatatagcttttgaaatatgctattgcatgctcatgacaatgagtatgaaaaaggcaaataatgtcttggaattataaaataatcctgacctcatagacctgctgcactcaaaaaatttcactgagtgaataaatgattcatagatttatgtaaatatttatctgcaaggatgttcatggcttaaattcattcattcaagaaatactgacagctcccagtgtgagcgacgcagaagacgggtgatttctgcatttcaactgaggtaccggggtcatctcactggggagtgtcagaaagtgggtgcaggacagtgagtgcagcgcactgagcgtgagccaaagcagggcaaggcatcgcctcacccgggaagcgcaaggggtcagggaattccctttcctagtcaaaagaaaggggtgacagccggcatctggaaaatcaggtcactcccactctaatactgcacttttccaatggtcttagcaaacagcacaccaggagattatatcccgtgcctggctcagagggtcctatgcccacggagcctcgctcattgctagcacagcagtctgagatcaaactgcaaggcggcagtgaggctgggggaggggcgcctgccattgccgaggcttgagtaggtaaacaaagcrgccaggaagctccaactgggtggagcccaccgcagctcaaggaggcctgcctgcctctgtagactccacctctgcgggcagggcatagtcaaacaaaaggcagcagaaacctctgcagacttaaatgtccctgtctgacagctttgaag

SEQ ID NO: 694975 - DNA, 1107 bp, Homo sapiens
cgaaagtatgtgaagcctttgttcagttgtgaaatacccctcaggccctgaacatsccctgctaagcctcagggtttggtcaagcagggttttaactgaaatatccttttgcttcttagacattctcttaatgtcgttctagctgcacaagaaatcaattacttcaaatcagtacagaaaaagtgatttcaatggggcatccgtaaaggaaaacaattaacttttcaatgaacaacgaacttttttttgacttgttagttgtatttgtatcaaaaaacacaatcttaatcatcatcacgggtatctactactttctatttgtgtagcattttatatagtcaacattttcacaagcattttcaattagttacaaataccttgtaaggtagaaacaaggcctcactgtttaaaacaaggaagctgaggtttcaggccagtagggccagaactcaaatcatctggttcttcatccagtgtttttcaatattccacactgccttggtgaagtctccttagtactttcccaggcatcactaaaaggagtttaaatttcttttttctggagcatgtaggaaaaggataaacagttggctttttttatttttagatcaattcaaaagactacttcttggaaacagacctacagatagacattttggacctttcctatgcatggttttcacgaagctaaatagaacacctcctcctccatcaacaccaaaaaaaaaaaaaaatgtcctgagacttcactgtttaaagatttattgatccctatgctgttacttccgtcttctgaaaacatcctgggtgaaaatctgacacaataatcaaaagaaaactttgtagtggggcctgtcaaaacataccttttttttttaagagaagactagccaaagactaaaaatatctatattgagagagagatgtgcaagccaagcaaaaataagaacagactttatgcaaaatgtgggactatacaccacagtccacagtccatctcaagctataagagattgcatttaagagcgtgagctttggaggtacatacacagtttgagctatatgacctgagacaagttactgaatatctctcagcttcagattcca

SEQ ID NO: 694976 - DNA, 1107 bp, Homo sapiens
cgaaagtatgtgaagcctttgttcagttgtgaaatacccctcaggccctgaacatcccctgctaagcctcagggtttggtcaagcagggttttaactgaaatatccttttgcttcttagacattctcttaatgtcgttctagctgcacaagaaatcaattacttcaaatcagtacagaaaaagtgatttcaatggggcatccgtaaaggaaaacaattaacttttcaatgaacaacraacttttttttgacttgttagttgtatttgtatcaaaaaacacaatcttaatcatcatcacgggtatctactactttctatttgtgtagcattttatatagtcaacattttcacaagcattttcaattagttacaaataccttgtaaggtagaaacaaggcctcactgtttaaaacaaggaagctgaggtttcaggccagtagggccagaactcaaatcatctggttcttcatccagtgtttttcaatattccacactgccttggtgaagtctccttagtactttcccaggcatcactaaaaggagtttaaatttcttttttctggagcatgtaggaaaaggataaacagttggctttttttatttttagatcaattcaaaagactacttcttggaaacagacctacagatagacattttggacctttcctatgcatggttttcacgaagctaaatagaacacctcctcctccatcaacaccaaaaaaaaaaaaaaatgtcctgagacttcactgtttaaagatttattgatccctatgctgttacttccgtcttctgaaaacatcctgggtgaaaatctgacacaataatcaaaagaaaactttgtagtggggcctgtcaaaacataccttttttttttaagagaagactagccaaagactaaaaatatctatattgagagagagatgtgcaagccaagcaaaaataagaacagactttatgcaaaatgtgggactatacaccacagtccacagtccatctcaagctataagagattgcatttaagagcgtgagctttggaggtacatacacagtttgagctatatgacctgagacaagttactgaatatctctcagcttcagattcca

SEQ ID NO: 694977 - DNA, 1107 bp, Homo sapiens
cgaaagtatgtgaagcctttgttcagttgtgaaatacccctcaggccctgaacatcccctgctaagcctcagggtttggtcaagcagggttttaactgaaatatccttttgcttcttagacattctcttaatgtcgttctagctgcacaagaaatcaattacttcaaatcagtacagaaaaagtgatttcaatggggcatccgtaaaggaaaacaattaacttttcaatgaacaacgaacttttttttgacttgttagttgtatttgtatcaaaaaacacaatcttaatcatcatcacgggtatctactactttctatttgtgtagcattttatatagtcaacattttcacaagcattttcaattagttacaaataccttgtaaggtagaaacaaggcctcactgtttaaaacaaggaagctgaggtttcaggccagtagggccagaactcaaatcatctggttcttcatccagtgtttttcaatattccacactgccttggtgaagtctccttagtactttcccaggcatcactaaaaggagtttaaatttcttttttctggagcatgtaggaaaaggataaacagttggctttttttatttttagatcaattcaaaagactacttcttggaaacagacctacagatagacattttggacctttcctatgcatggttttcacgaagctaaatagaacacctcctcctccatcaacaccaaaaaaaaaaaaaaatgtcctgagacttcactgtttaaagatttattgatccctatgctgttacttccgtcttctgaaaacatcctgggtgaaaatctgacacaataatcaaaagaaaactttgtagtggggcctgtcaaaacataccttttttttttaagagaagaytagccaaagactaaaaatatctatattgagagagagatgtgcaagccaagcaaaaataagaacagactttatgcaaaatgtgggactatacaccacagtccacagtccatctcaagctataagagattgcatttaagagcgtgagctttggaggtacatacacagtttgagctatatgacctgagacaagttactgaatatctctcagcttcagattcca

SEQ ID NO: 694978 - DNA, 612 bp, Homo sapiens
tgggggcagctccagaatttctacagaggatgtgcttcgggatagcttggcttaaaaggggagaccaggggcttgccttaaagctgcatttataaagcaaatacactgcttttatttagaccgcatgtttgcttggaaggcctttggaccaaatagtgcacttatggaggggctaatgtgccctccaacccagccctgccacctgccaagccatcccttgataactggtcaatctgcacatgggtgagtcaaggccagggctagtagaagctcmagcttaatgtcccagggaacaatgtagacacaggactagctgatgagtaattagaggggttgatgaacatcctcaggaaggggtggggcaggctgtgctgggcaggttgctttccacagtgacacccagtctggcccagcctgaggtgtacaaatgattcacatctgaagaggggtgacagaatcatgggagtagggcagtatcaggggtcatgggcaagggaggagttcaaggttgtagatacacaggacaagaggccagccaaggaagaggaataaagaggaggacataagactgggggtgatgaagagaggggtgggtataacccaggatgtcag

SEQ ID NO: 694979 - DNA, 612 bp, Homo sapiens
tgggggcagctccagaatttctacagaggatgtgcttcgggatagcttggcttaaaaggggagaccaggggcttgccttaaagctgcatttataaagcaaatacactgcttttatttagaccgcatgtttgcttggaaggcctttggaccaaatagtgcacttatggaggggctaatgtgccctccaacccagccctgccacctgccaagccatcccttgataactggtcaatctgcacatgggtgagtcaaggccagggctagtagaagctccagcttaatgtcccagggaacaatgtagacacaggactagctgatragtaattagaggggttgatgaacatcctcaggaaggggtggggcaggctgtgctgggcaggttgctttccacagtgacacccagtctggcccagcctgaggtgtacaaatgattcacatctgaagaggggtgacagaatcatgggagtagggcagtatcaggggtcatgggcaagggaggagttcaaggttgtagatacacaggacaagaggccagccaaggaagaggaataaagaggaggacataagactgggggtgatgaagagaggggtgggtataacccaggatgtcag

SEQ ID NO: 694980 - DNA, 612 bp, Homo sapiens
tgggggcagctccagaatttctacagaggatgtgcttcgggatagcttggcttaaaaggggagaccaggggcttgccttaaagctgcatttataaagcaaatacactgcttttatttagaccgcatgtttgcttggaaggcctttggaccaaatagtgcacttatggaggggctaatgtgccctccaacccagccctgccacctgccaagccatcccttgataactggtcaatctgcacatgggtgagtcaaggccagggctagtagaagctccagcttaatgtcccagggaacaatgtagacacaggactagctgatgagtaattagaggggttgatgaacatcctcaggaaggggtggggcaggctgtgctgggcaggttgctttccacagtgacacccagtctggcccagcctgaggtgtacaaatgattcacatctgargaggggtgacagaatcatgggagtagggcagtatcaggggtcatgggcaagggaggagttcaaggttgtagatacacaggacaagaggccagccaaggaagaggaataaagaggaggacataagactgggggtgatgaagagaggggtgggtataacccaggatgtcag

SEQ ID NO: 694981 - DNA, 686 bp, Homo sapiens
tgaaattctagtttttgttaggctagaaattatttttctatttgtttcaagagctacatataatgytttcagaaagaacaaagattgctccaagactgcaggctgaacttaagatgtccaaatgccctcaatcttctaccttatgaaatttaaatcaatcatttaaatcatttacagtttataagtgatatatgccaagtacttattagggtgaacacattaagaaaaccaaaaagttcactggcagagcttggagagccggatatgtaggtgatcaaatccacatgcacctgcctgtctctgaacacaagccaggtttgcccaagatcacacactcaaaccaaaggtttgagaattaaaccataccatcctcatttctatacctgtaagttatgattaaacctccattagcactggcactcaagatctctgtttcccccaggagagcccctaaaatgcttttctcaaagcagacagaagtccaaagaacaaaataaaaatgaaaagccaatatttttaaacccacacttccgaccatatcatgacaaagtcatcaatgacctcatccttgcagaccaaactccatgctcctctcctgcctttctcctcatccctgcagatgctcccagtgctcctctggcccacccaccccagagagcttgcagctggagacattcttccttacc

SEQ ID NO: 694982 - DNA, 279 bp, Homo sapiens
gggccagtgtcttccattatttctctatcttagagagagttcctattatgtccctctgattatgccccaacgctgtttattgtcatcatgtatggggctttggattacttctctttttagtttgtgggctgcaggcccacgttctgccagttctccataaggagaactgcttgttatccaagtagctatatgttgacctggatccagtggctaaatgcaatcttggattaacttccttgaggaggagtgagtacaccctatgtgtgggaagaastgtaa

SEQ ID NO: 694983 - DNA, 643 bp, Homo sapiens
tgtttacatcaggtggtttatcatcagaatttagagcatgttattatgtaccagcttgcttatgcctcaactgacctctgtgaagaaataagtattatcagatttacatgcaggaatctaggcacagggacattacattatggagacagctgttgcacagtcattaacaataaaggctctggagccaaatttccagggttttgttccggtttaatcacttagtatgctgtgtgaccttgatcaagttatctaacctctcyggatttttaactttttatccaaaaagggtagtgacactagtattgctgcaaagagcaaaggagataatcttcttaaactggttagaataacgctggtgctcttcttataatggacttgcctgtgaacagaaaacaagaagtcttatgctttaaagcacctgggcagtccttctgcagatgcagactcacaggtatcatcgtcctgtgagtgattaaggataattgcataaaagattcacttaaaaagtaattaaattctcacatcaaatcacacaagctactttatatgagacagtttaacagtctacgagtaggcaatcactcactgggtatgttattaaatgttttttaataaaaatatgtgctttattgtaaaagctaag

SEQ ID NO: 694984 - DNA, 608 bp, Homo sapiens
tagattgtgttaagggagttaaggtcaattgtgtgtattcatggttgtaagaagttcccagcctctgcttccacagatgggaaataacagaacatagattcagactcagatcgggtttacctgactgcaaaacctgtgttctgaatatccagctcacaaattattgtttaaatgacaaaagatgaaaatcatgcccagtctctgatttcarctgtaaatatgtacacctaaaaggcaaataaaagaatactgaatgagaaatgaaaactgctgtgttttgtaagttttaaacatttccttattgttgcaatttggtgttacaaaaacagagcatttaaaaacaagaggatattaaggttaagaaaaaaatgagaatcatatgagaatacttatgtattttatagtatatcttacacacccaaatcttttgctgacaccttaaactgtcagtatatttttgaaaatcaatatctcctatttgcttaggaataaatttgaaatatcccttcaaccatttgtgattggttctaaaagcaaaactataaaaacaattaaaaaaatacaaagcatgtgttacatgtccaaatattgttttgttattactaaat

SEQ ID NO: 694985 - DNA, 558 bp, Homo sapiens
ttaaagcatattaatgtaycaatatcatttatagtgtatggagtacatttgtggaatgtgttaccctggattatggctacttttatagtgaataaatcttgtaaattccaaaaatgtgcatagtggaataaccattgtcccgtctgccgatcattaacactctactattacaatgggaagacaatttcagcaaaacaaaaacaatctaacaagactgaatctttaaaaataatagcttattctttatctaattttgttcaaaagccatacgagaaatatgcatgcaattggattttgttatgtgggtatatgttacattttgtccttgttactgattgttggcatgcatctattgtttagtcattgtttaaactgtgttttgtgtgtttctttttccctcccgttgtgtcagtctcgaaaaatagcatcacaagtaagtattttctgtttgtttccctttcctcaaatggtgtaatatattaattcagagctattaaagaaaaataatattaaatattgaatttaatactcagacattaaaatgaaataaatcattta

SEQ ID NO: 694986 - DNA, 558 bp, Homo sapiens
ttaaagcatattaatgtaccaatatcatttatagwgtatggagtacatttgtggaatgtgttaccctggattatggctacttttatagtgaataaatcttgtaaattccaaaaatgtgcatagtggaataaccattgtcccgtctgccgatcattaacactctactattacaatgggaagacaatttcagcaaaacaaaaacaatctaacaagactgaatctttaaaaataatagcttattctttatctaattttgttcaaaagccatacgagaaatatgcatgcaattggattttgttatgtgggtatatgttacattttgtccttgttactgattgttggcatgcatctattgtttagtcattgtttaaactgtgttttgtgtgtttctttttccctcccgttgtgtcagtctcgaaaaatagcatcacaagtaagtattttctgtttgtttccctttcctcaaatggtgtaatatattaattcagagctattaaagaaaaataatattaaatattgaatttaatactcagacattaaaatgaaataaatcattta

SEQ ID NO: 694987 - DNA, 558 bp, Homo sapiens
ttaaagcatattaatgtaccaatatcatttatagtgtatggagtacatttgtggaatgtgttaccctggattatggctacttttatagtgaataaatcttgtaaattccaaaaatgtgcatagtggaataaccattgtcccgtctgccgatcattaacactctactattacaatgggaagacaatttcagcaaaacaaaaacaatctaacaagactgaatctttaaaaataatagcttattctttatctaattttgttcaaaagccmtacgagaaatatgcatgcaattggattttgttatgtgggtatatgttacattttgtccttgttactgattgttggcatgcatctattgtttagtcattgtttaaactgtgttttgtgtgtttctttttccctcccgttgtgtcagtctcgaaaaatagcatcacaagtaagtattttctgtttgtttccctttcctcaaatggtgtaatatattaattcagagctattaaagaaaaataatattaaatattgaatttaatactcagacattaaaatgaaataaatcattta

SEQ ID NO: 694988 - DNA, 627 bp, Homo sapiens
gaggtcaggagatcgagaccacggtgaaaccccgtctctactaaaaatacaaaaaattagccgggcgcagtggcgggcgcctgtagtcccagctactcgggaggctgaggcaggagaatggcgtgaacccggaaggcggagcttgcagcgagcggagatcgcgccacagcactcccgcctgggcgacagaacgagactccgtctcaaaaaaaaaaaaaaaaaaaaaaaaaaagaatcccagctccactgtgtatttcctgtggactttgccaattcctctgagcctcctctatctgtagaaaggaaataggaatatccacctttccaatttgttgggaagtttctgccctcagtrataaaggcagatagtgtaagaacaaaagaaagacaatttaaaactccaggaaaaacataaagatgaagaaagagggaaatatacaagcaccttctttgactcagcaatgaaaaatacgtagatggtcacagtaatccttaaggtctttctttttctgtgctggtgggaggcttcaatacaacgctgaacaaaaagtagcaatagtaggcaagtttgccttgttcctgactttgcaggaaatgattctagtgtgcaccgttaggtatgactgt

SEQ ID NO: 694989 - DNA, 597 bp, Homo sapiens
cagccactgcacccacccattatttcttctcagtatgtagtttgctctttcattttcttaatagtgtttggaagagcaaaagtttttgatgtttagtaagtctaatttattattttttccctttatggctaatgctttttgaatactaagaaatctttgcctacttgaaggtgataaagaaaaagaaataaaaggcatacatattgaagaagtaaaattactctattctaagataatatggttatttatgtagaaagtcatggggaatctataaaactgctataatcaaaagtgmatctagcaaggatgcaagatacaaagtcaatataaaattatttttctatatactagcaaaatatagaaaataaaccttaataattgtgacagcatcaaaaaaaaaaaccagaaaatatataaggataaacatttttaaatatgcaggattccacaatgaatactataaaacattgcagcatgaaactataaaagacccaaataaatgaagggataaataaggttaaatgtaaacaatttacatttaaattgtagctgggactacagacatgtgccagcacacctagttaatttttctatttt

SEQ ID NO: 694990 - DNA, 637 bp, Homo sapiens
ttatgacacatgctacaatgtggatgaacctgaggacattatgctaagtgaaatatgccagacacgaatgacaaatactgtatgattctgcttctaggaggtacctagaaaagtcaaaagtataagggcagtaagtagaatcgtggctgccaggggctaggacatgggtggagggagaatggggaggtattgtttaatagcttcagtttgggatgatgaaaaagttctggagatgaatggaggtgatagttgcataacattgtttatattcttaataccactttcaacaggtttttaaaagatggtgaatgtttatcccgttgtttcagcattcccccttccaccacctagcccacttaaattatctgcttttttttttttttttttttttgagacaagagtctcattctgttgcccaggatctcagctcactgcaacctctgcctcccaggttcaagcaattcttgtgcctcaggctcccaagtagctgggattacaggmacgcaccaccatgtgcagataatttttgtatttttagtagagatggggtttctccatgttgcccaggctgtaaattatctgctttttattgcctcacatgacatttagcctctccccttggtcttgggaaagaatg

SEQ ID NO: 694991 - DNA, 655 bp, Homo sapiens
acatgctcatccttggcaatacatattttcccatcaactacccgctgctaatgagcctgagtgatttcggaaagaggtgctctggggattttctgcttagttttttttcataacctttccatcctagggtattgaacaagtgaagtgacaacagacaaaggaaaaacggaatctggtatatgaggccaaggggtgaaaacacacatacacacaccctggactgactatagtagacactgtggttgtttatgcaagcagctacctatccactacttctctgtgtggcccaagccaatggcttcccggtcttgtcagtgactgaaatgggcatgggtccagttctggccaatgagtaaaggagaggtctgctggagattaagaggagagcttctggaaaaagcttcctcacatcttttgagagaaagcccttaaagaaggcagttcctcaggatactgccgtattgggtaagacacctgaaagtgctgtagccatcttgccatctgcctgggaaagaagttaacaccaagcagagttaagaggggaaagaaacctgttttstcacaattatgatttagccactgaatcaattaaatctgaagcttgtgctaccatggacttcctattttataatttacataatgtttaagccagttt

SEQ ID NO: 694992 - DNA, 621 bp, Homo sapiens
caagacccccatctctaaaaacattatttttttttttaaaaaaaaaaaaaaggacagtagtgtgtgaggtgggcctggtggctcatgcctataattttagcactttgggaggccaaggcaggaggactgcttgagctcaggagtttaagatcaacctgggctacacagtgagaccttgtctccacaaaaaataaacaaaattagccacgatggtggtatacacctctggtcctctactcaagaggctgaggtgagagcatcacttgagccccagaagtcaaggctacagtgagctatgagccattattgtgccaccacactccagcctgggtgtcagagcgagagcttatctctacaaaaaaaaaaagaacaatagtgtgtggaagaagctcattgttctagggaagcacagagtgcaaggcaactccatcaccccatggagaggactttccacagcctatttctttgcactgaatgattccactcttaggatgaaatgtgcagtcttcttgatccaatattgtattgatttgaagtgtccattccaagtggcttccagaaggaagtaaaacractcaaattaaaaaatatctccattctttcttgcttatgttctttgat

SEQ ID NO: 694993 - DNA, 642 bp, Homo sapiens
tatggttggtatatagataaagaaactcttaatacccaccaggtgaagaccaccaggaatgcatctgtggtgaaacaagttaggttgactgttttgcagctaggaagagcgtatgccagatcctgccaagtgtcagtaaaagagaatgggagggctgggcacggtggctcacacctgtaatcccaacattttgggaggccgaggtgggtggatcacttgaggtcaggagttcgagaccaccctgaccaacatggtgaaacccccatctctactaaaaatacaaaaattagctgggcattgtggcaggcgtctgtaatcgcagctactccggaggctgaggcaggagaatcacttgaacccaggaggtggaggttgcagtgagcagaggttgcagtgagctgagattgcrccactgcactccagcctgggcgacagagtaagactctgtctctaaaaaaaaaaaaaaaaaaaaaaaagaaagagaatgggaggagttttcagtagggtttgggctgtgctggaagcagggactcctggactgaatgctatcgtacatcaactggaggtgggttagtaattgggtctttcagcagtctttgtttaggagacaggataaatgaaggggatttggaaagtcattgg

SEQ ID NO: 694994 - DNA, 642 bp, Homo sapiens
tatggttggtatatagataaagaaactcttaatacccaccaggtgaagaccaccaggaatgcatctgtggtgaaacaagttaggttgactgttttgcagctaggaagagcgtatgccagatcctgccaagtgtcagtaaaagagaatgggagggctgggcacggtggctcacacctgtaatcccaacattttgggaggccgaggtgggtggatcacttgaggtcaggagttcgagaccaccctgaccaacatggtgaaacccccatctctactaaaaatacaaaaattagctgggcattgtggcaggcgtctgtaatcgcagctactccggaggctgaggcaggagaatcacttgaacccaggaggtggaggttgcagtgagcagaggttgcagtgagctgagattgcgccactgcactccagcctgggcgacagagtaagactctgtctctaaaaaaaaaaaaaaaaaaaaaaaagaaagagaatgggaggagttttcagtagggtttgggctgtgctggaagcagggactcctggactgaatgctatcrtacatcaactggaggtgggttagtaattgggtctttcagcagtctttgtttaggagacaggataaatgaaggggatttggaaagtcattgg

SEQ ID NO: 694995 - DNA, 640 bp, Homo sapiens
ttactttcatcctacctatatagttatagttgaagtaaatttattgtggactgcagatagtaggaacctgttttttgattaattccaccaatccctgtcttttaattggtgtatttaccatttacatttaatgtagtcattgatatattagaccttaaatctgccatttgtacaatcctttcctgtacaatctaggtgaatatttttattaaaatatttgcagatatttttataattcttagaaggaggattagagggagagaattctacttcgtattagtcagggtccgtgtgtgtgtgtaatttactttataaaattggttcacacaattgtgggggctggcaactctaaaatctgtaggacaggccagcaggttggaaactaaggtaggagttaatgatgcaatmttttcttctacaggacaccttggtttttgctattaaggccttcaactttttgaatgaggcaccacacacattattgtggctaatctcctttacctaaagacaattggttgtaaatataaccatatgtacaaaatgtcttcacaacaacacctagattagtgttagatttaataactgggtactatagcctagacacgttgatacataaagctaaccattacagacttcaccc

SEQ ID NO: 694996 - DNA, 646 bp, Homo sapiens
cagctttcagttccagcactagaacagtgtattttagtaccttattgccttctataaaaatatacttatgattaaaaacttagaatgtgttttcagtaagctttctgtgtatatttgaaattttaataatagaaataataacataaacctttgaaatatcatgtggaaaatattaarcattaaataaagataaaattcacttcaatatgaggattttttcctttccttataacaatagtttcaaatcaaatttaatacatgtttttatactgctgatatttttaaataaatatattagaacaaataattaagtataaaaatatatgcagatatgaaaaataaaatcatttatagtcctagggtgccaaatcataggaattcccaaatgccaactcaatgctgtttcttcatgaagtattactttatatgactatttgatcactatttactcattaatttataaattccttcatcaatttttcattgaactctcaaaagccaaatagatattagacaatattctagacactgtgactacaaacatgaataaagcatagtttatcatgatgcttactgtctagcaaacagtcttcacatagtagatttaacgtgaattattagtcagtcactggtattctccactgat

SEQ ID NO: 694997 - DNA, 1200 bp, Homo sapiens
tttagccatatggtttattttcgtatgtgctagtagaagttctccatgtagtaatttggaataattataaaccgcttagttcttatactgtttacctttgtaaatttatgcaatataaatttatcaatgttcctgtagttatttggaatatttagaaatgttataaccttataggattttaattgctaaattgctgtgataaaagaagagaaaatagagcacttctatttcttatttcctccactcctcactcctccatttatagttctaacttgagtaatattattatgattctaaaatggtaggcaagtttatatcttttttttttttttgagacagagtctcgccctgtcttccaggctggagtgcagtggcgtgatctcggttcactgcaagctccaccccctggattcacgccattctcctgcctcagcctcctgagtagctgggaatacaggcgcctgccaccacrcccggctaattttttgtatttttagtagagatggggtttcaccgtgttagccaggatggtctcgatctcctgacctcgtgatccacccaccttggcctcccaaagtgctgagattacaggcgtgagccactgcgcccagcccaactttgtatctttaaattatataattctgttactgggtttatcaacttttaaaaatagctatttatcttctattatgcaaaaagaggaaatctacacacatatagtaccttctatgttttagaataacaaaaaatatttaattttgcctattcttggacaacagtttcttaggtcacacttaacttgccttgaggaatttgaagacattatttccatagtttgttttgagaaaacataagatatgaggctaatttttcctcttagaggtgactttctgtctagataccagtagatgtctttatttttgcagtcctttgtgactctagagtgtaactcaatccgcagcaatattttcctttacatgtgactaggttttagtattttactataattttttcttgaattttgtatttgattttatagtttaaaaatgtttgctcttaacattttctggaacattatttttgtatcttttctatctgtcttgtttccatgtatactattttcaatttgattccttcttacattttattttgcttcatattcttaagcttgtcttttaagtcttagactacattttcaac

SEQ ID NO: 694998 - DNA, 1540 bp, Homo sapiens
tttgtatttttagtagagatggggtttctccacgttggtcaggctggtctcgaactcctgacctcaggtgatctgcctgcctcaagcctcccaaagtgctgggattacaggcatgagccaccgtgcccagccaaaagcacatctcttctaattgctgccacagaacagaaaggaagcttttctttccaaaaaatgtttattctccagttgcctaaggagaaacagcgcaggttaaaacggaacaggtcaaaactcccatgctaatcagtagtgggatttcacctacgaatgggcactaatgggcactgcactccagcctgggcaacacagcaagaacctgtttagaaacgtatttttgtttcattaaaaaaagctttagtatgttttcttctcacttgctgtaattggaggaacctattcttggaggtaggatgaggtcagtcccatccaaacctatggctcaacggaagacagtggacaggtccccagaggaagatcaggatataatttgaccaaaggatggaagatgtttactacaggtctctactagacaccaagcaccatgctacattctggagacataatgttcaaagacacaattcctgccttccaggagttcacaggagaacagtgatgaggaaacagttataatacagcacaaggagaaaagcatgaacctgagaacacacaggagctcctcctgctcagccactccaacggggtgaagggtcataaaagagtgaaagtggggggttgtcatggaacttcccaaaagaggtaaatcttttaaactttttttaacattattttttacacacagcctcccataggagaagggagtgaaatcttgaaggataagtaaagctttatcaagtgtagatggaagaagggatttctaagcacagagcacatcagcaaaagcataaaaatctcaagaaaatgggagtagctgagaatgactggaccataaagtacatgcaagagccaaggagaagaggaagcagtcaggagagagtggtgacacacgaggctggagaggtgggcagacctcaaaatcaggccgtgctgacatttatgccaagatttaagtggcattgacataaactcgacagttggagatctgggtagggtaaagcatgaggaaaacgtcaggcaaaaaaacagggaaccagaaaaaagcctgaaaaggtgttaccacagaggtggaaggaccaagtaaaayagaaggaaaaacatttaaaagggaaagataggaagtggcagttgctgcaaagagattagggaggctaattcctgagaagacttgtgattagtaattaatattgaccttgacctctgacagaacgatttcagtgacagtgaaagggttacgtttgcttggaatttagtgaatgggatttaaagttgaagtgacgacagtaggctactctttcaaaatatttatgttttgcaaaagctatgtatccaaatacttataagatgcactcagtaattccccttcagaaatttatattaaagaaataatcagaaatatgtgcaa

SEQ ID NO: 694999 - DNA, 1678 bp, Homo sapiens
tctcaaaaaataaatctagccttttcattatatttctcttactacactttctatctcgttatttgtgaagttttgttttagttcctgagtattgactctccagattcccaaataccaatgtcctgtaccagattcttggtacatggaccagatacttgaacacttaaagcactgttggtgttgtactttgagagacacagtgtaagagctgtcatttgtttgccagctggttatttagctagagtggcaataccttgccttgataaagttaccgcttttcaggttgtagcttctgcaaatcattaggggtcttggaattgatttatctttcagaaatagattcacaaactcattcataaccagaatatccatttgtaatgggaaatagaagttttggatgacagtttcttcctagttcttcctaagaaaatcttttcaaatgataatcattaatttcttcycacacatggattttgagtgatgcaggttaattgtatcatctaatccagtctgatttacccatatccattgtagcaatgtgtttaacacatgagctagacttacttctttccatgactgctggagaaacataaaccatgtcttatttcatgattacccttttttttctagcttctaaactgattgttttctgactgttttgcttcagaccatgtgcattgtatgtgggtgtgcatgagtgtataatatgttcacatgatttggattaaattttctttttataatcagaattctgttatgtttccctgatgctgtgcatttcttgtttactggttagagtgagtagtttgtatagaaagctgatttcatttcattgtgtatggacatttctttttcatccacggagggtctgatttttgtggggattgagggaagtccctgcccaaggcaccatggtgtattgatatgaatatgggcttttggagttagactgtttaaatctggctctactacttgtaacttgtgtgatttgtgaagaaatgcttaacctgtcagcctctgttttcgcatctatgaaatggaaataatataacaagtccgtatgatagatggtaaggatttcatgagatgattttatatgtaaatggagataaccatagagaagaatatatggttaatgtagtccattatcatttctgtatattactactggtttgtttgtgttttttttttttttttttttcatgtgttcgggctgagctctgaattttcgtctgcctttctgggtttgttaacttatagtctatttctcattgttctatttctccaccctcaagttaagtatggtactcttattaagagtgggcatccatgcatagcgttaactgtcattgtgcatatactgaattgattgcaaaaagaatagtccatgttagaccaaggccactttttaattatacttaaagatcttgttgtcagcaattataactggttcattttatagaaatacttaaaagattgggatattcctaggtttcagaaatattttcagttttactttttatgatccgagaattcgtaacacagcttttattcttcactatagaatgaatactccacagatttgtggattatagcctgggaatcagaaatatcactgattcagagattaccttttattttgatttatttaggaaggcgacatgccaattcatgaact

SEQ ID NO: 695000 - DNA, 1678 bp, Homo sapiens
tctcaaaaaataaatctagccttttcattatatttctcttactacactttctatctcgttatttgtgaagttttgttttagttcctgagtattgactctccagattcccaaataccaatgtcctgtaccagattcttggtacatggaccagatacttgaacacttaaagcactgttggtgttgtactttgagagacacagtgtaagagctgtcatttgtttgccagctggttatttagctagagtggcaataccttgccttgataaagttaccgcttttcaggttgtagcttctgcaaatcattaggggtcttggaattgatttatctttcagaaatagattcacaaactcattcataaccagaatatccatttgtaatgggaaatagaagttttggatgacagtttcttcctagttcttcctaagaaaatcttttcaaatgataatcattaatttcttcccacacatggattttgagtgatgcaggttaattgtatcatctaatccagtctgatttacccatatccattgtagcaatgtgtttaacacatgagctagacttacttctttccatgactgctggagaaacataaaccatgtcttatttcatgattacccttttttttctagcttctaaactgattgttttctgactgttttgcttcagaccatgtgcattgtatgtgggtgtgcatgagtgtataatatgttcacatgatttggattaaattttctttttataatcagaattctgttatgtttccctgatgctgtgcatttcttgtttactggttagagtgagtagtttgtatagaaagctgatttcatttcattgtgtatggacatttctttttcatccacggagggtctgatttttgtggggattgagggaagtccctgsccaaggcaccatggtgtattgatatgaatatgggcttttggagttagactgtttaaatctggctctactacttgtaacttgtgtgatttgtgaagaaatgcttaacctgtcagcctctgttttcgcatctatgaaatggaaataatataacaagtccgtatgatagatggtaaggatttcatgagatgattttatatgtaaatggagataaccatagagaagaatatatggttaatgtagtccattatcatttctgtatattactactggtttgtttgtgttttttttttttttttttttcatgtgttcgggctgagctctgaattttcgtctgcctttctgggtttgttaacttatagtctatttctcattgttctatttctccaccctcaagttaagtatggtactcttattaagagtgggcatccatgcatagcgttaactgtcattgtgcatatactgaattgattgcaaaaagaatagtccatgttagaccaaggccactttttaattatacttaaagatcttgttgtcagcaattataactggttcattttatagaaatacttaaaagattgggatattcctaggtttcagaaatattttcagttttactttttatgatccgagaattcgtaacacagcttttattcttcactatagaatgaatactccacagatttgtggattatagcctgggaatcagaaatatcactgattcagagattaccttttattttgatttatttaggaaggcgacatgccaattcatgaact

SEQ ID NO: 695001 - DNA, 671 bp, Homo sapiens
ccctgctttagcttgccctccatgggctgcacctactgtccaaccagtcccaatgagatgaaccaggtacctcagttggaaatgcagaaatcacccatcttctgtgttgatcatgctgggaactgcagatcggagctgttcctattcggccatcttggaacggatccttggtgaaaccccatctgtactaaaaatacaaaaattagctgggcatggtggcatgtgcctgtaatcccagctactcgggaggctgaggcaggataattgcttgaacccgggagtcggaggtagcagtgagccaagatcaccatacataacattttaaaacaaacttttctctcaactctttttcttatagtaactttactagtctggaatttaataatagtacttcatagtcccaaattcttaagaacctacaattccctttatagcaattagggatgtcatttacatttgtatctcttattttcaaagttagtaattgaaagtcwacatttaaagtctaatttaaatgtagactttcaattactatgtcctcagggaatgctctaacttactaagacataataaatttaacattaactctttcagagttaatctttctgataaaatatcttacttaagtttattgtttttcatattcaccatattgacaaagacaagggaaa

SEQ ID NO: 695002 - DNA, 671 bp, Homo sapiens
ccctgctttagcttgccctccatgggctgcacctactgtccaaccagtcccaatgagatgaaccaggtacctcagttggaaatgcagaaatcacccatcttctgtgttgatcatgctgggaactgcagatcggagctgttcctattcggccatcttggaacggatccttggtgaaaccccatctgtactaaaaatacaaaaattagctgggcatggtggcatgtgcctgtaatcccagctactcgggaggctgaggcaggataattgcttgaacccgggagtcggaggtagcagtgagccaagatcaccatacataacattttaaaacaaacttttctctcaactctttttcttatagtaactttactagtctggaatttaataatagtacttcatagtcccaaattcttaagaacctacaattccctttatagcaattagggatgtcatttacatttgtatctcttattttcaaagttagtaattgaaagtcaacatttaaagtctaatttaaatgtagactttcaattactatgtcctcagggaatgctctaacttactaagacataataaatttracattaactctttcagagttaatctttctgataaaatatcttacttaagtttattgtttttcatattcaccatattgacaaagacaagggaaa

SEQ ID NO: 695003 - DNA, 649 bp, Homo sapiens
tatgcacaccaaaatattaacagcatttatcattgggtattaaaaatctcaagtgatttttcttcctcttcacaatactttcagaatttgaatactttattaattaatacattaaatttttctctcctctcaacaaagcagtatctaaaatatatgtattactgatatttaattaatatatgtgaccaayattattcacaaattcctagtagaattttaagtaatccttaaaatactacattattttgaaattcagctgatacaagtggattttttgaagatgtagaacattggagaatggtacaatgatcttacacagtaagaatactatctgttaagactaagaacaaaagggagaaggaatactctagaatccttgatgaaatctctttggggcaagagagataagtggagtacaaattaataaaattttaaaaacaaattcattttttcatgtactattgagtatctgttgtatgcagggagagacctctatagttctaaattcaatttgttagtttgacattaatgtaaatacaagttagcatgtaaagttttcctatttttaaagtccaacagtgttttctaattaatttattgaatttctgtttatataccttaaacttttgttataaattacttgctgttg

SEQ ID NO: 695004 - DNA, 649 bp, Homo sapiens
tatgcacaccaaaatattaacagcatttatcattgggtattaaaaatctcaagtgatttttcttcctcttcacaatactttcagaatttgaatactttattaattaatacattaaatttttctctcctctcaacaaagcagtatctaaaatatatgtattactgatatttaattaatatatgtgaccaatattattcacaaattcctagtagaattttaagtaatccttaaaatactacattattttgaaattcagctgatacaagtggattttttgaagatgtagaacattggagaatggtacaatgatcttacacagtaagaatactatctgttaagactaagaacaaaagggagaaggaatactctagaatccttgatgaaatctctttggggcaagagagataagtggagtacaaattaataaaattttaaaaacaaattcattttttcatgtactattgagtatctgttgtatgcaggsagagacctctatagttctaaattcaatttgttagtttgacattaatgtaaatacaagttagcatgtaaagttttcctatttttaaagtccaacagtgttttctaattaatttattgaatttctgtttatataccttaaacttttgttataaattacttgctgttg

SEQ ID NO: 695005 - DNA, 649 bp, Homo sapiens
tatgcacaccaaaatattaacagcatttatcattgggtattaaaaatctcaagtgatttttcttcctcttcacaatactttcagaatttgaatactttattaattaatacattaaatttttctctcctctcaacaaagcagtatctaaaatatatgtattactgatatttaattaatatatgtgaccaatattattcacaaattcctagtagaattttaagtaatccttaaaatactacattattttgaaattcagctgatacaagtggattttttgaagatgtagaacattggagaatggtacaatgatcttacacagtaagaatactatctgttaagactaagaacaaaagggagaaggaatactctagaatccttgatgaaatctctttggggcaagagagataagtggagtacaaattaataaaattttaaaaacaaattcattttttcatgtactattgagtatctgttgtatgcagggagagacctctatagttctaaattcaatttgttagtttgayattaatgtaaatacaagttagcatgtaaagttttcctatttttaaagtccaacagtgttttctaattaatttattgaatttctgtttatataccttaaacttttgttataaattacttgctgttg

SEQ ID NO: 695006 - DNA, 629 bp, Homo sapiens
caaagtgctgggattacaggtgtgagccaccgcactcatctttatacgattttttaaaaagtgtcttgatgttcarcgtcagtgcttctgtgaccagagacctctggaggagggtttgtggcagctatgtctcctaaggctctgagttagtcagataagggaagtttcagataagatttctctctgcgtctgttgtagctcagatatttttcattggaagttatctctttaccaagttagtgtactgttttcttcagaagtaaaaagagtcagagagaaagtgcttgaaatggaagacagagaagaaacagtccaagttaaaccttggacaacctgagtctgaactacgtgagtccacttagatgtggattttttttgatcaaacaatattcgccagatgcaaaacccatgtatatggaggggtgacttttcatataccacgattttgcaggctgactgcaggactgttgaccattagtatgtcttcttttgagaaatgtgtattcaaatcttttgcccattttaaacacaggttatttgttttttttttcctattgagttgcttgaactccttatgtattcgattattaatcccttgtcagatgggtagtttgcaaatattttccccc

SEQ ID NO: 695007 - DNA, 694 bp, Homo sapiens
cctcgagtgttgtaagtgagtgtgcacaagtcccagggtaaactgccaattctcggctttctgggccagcagccatgggctgttaagcaaaaggcaacattagcccgagcagtgtcttccatgattacctttgctcacacaccttttcctgccatgacatcacattacaacgtggaacatctggttcctcggcaggggaatgccacatctaactgtgggaggacactgtttggggaagccagccaagccagaggctgcctgcctccctgctgcttcctccagtgctgccagcaagaaggatgaagaaggaagagcctgggtcctcagggcctccatccctccctttggcaggggaaaggaccagtcgtggccaggacagaggatrctcaggtctgacgtgggctcaggaacgtcctcactgaccccactctttcacacacatgggctcaacacctcagagtatcagagaatatgcagtgacaaatccacaggttttcgaatgaaaaagacccacgggtgagttctagctttgcaaccctgagcaagtcgcttaacccctctgctttagtattctagggtcgctgaaacaaagtgccacaaaccgggcgacttcaacaatagcatttactgcctcacagttgaggagctagaagtccaagatcaaggtgttggcagggctatttccttctgaggg

SEQ ID NO: 695008 - DNA, 694 bp, Homo sapiens
cctcgagtgttgtaagtgagtgtgcacaagtcccagggtaaactgccaattctcggctttctgggccagcagccatgggctgttaagcaaaaggcaacattagcccgagcagtgtcttccatgattacctttgctcacacaccttttcctgccatgacatcacattacaacgtggaacatctggttcctcggcaggggaatgccacatctaactgtgggaggacactgtttggggaagccagccaagccagaggctgcctgcctccctgctgcttcctccagtgctgccagcaagaaggatgaagaaggaagagcctgggtcctcagggcctccatccctccctttggcaggggaaaggaccagtcgtggccaggacagaggatactcaggtctgacgtgggctcaggaacgtcctcactgaccccactctttcacacacatgggctcaacacctcagagtatcagagaatatgcagtgacaaatccacaggytttcgaatgaaaaagacccacgggtgagttctagctttgcaaccctgagcaagtcgcttaacccctctgctttagtattctagggtcgctgaaacaaagtgccacaaaccgggcgacttcaacaatagcatttactgcctcacagttgaggagctagaagtccaagatcaaggtgttggcagggctatttccttctgaggg

SEQ ID NO: 695009 - DNA, 694 bp, Homo sapiens
cctcgagtgttgtaagtgagtgtgcacaagtcccagggtaaactgccaattctcggctttctgggccagcagccatgggctgttaagcaaaaggcaacattagcccgagcagtgtcttccatgattacctttgctcacacaccttttcctgccatgacatcacattacaacgtggaacatctggttcctcggcaggggaatgccacatctaactgtgggaggacactgtttggggaagccagccaagccagaggctgcctgcctccctgctgcttcctccagtgctgccagcaagaaggatgaagaaggaagagcctgggtcctcagggcctccatccctccctttggcaggggaaaggaccagtcgtggccaggacagaggatactcaggtctgacgtgggctcaggaacgtcctcactgaccccactctttcacacacatgggctcaacacctcagagtatcagagaatatgcagtgacaaatccacaggttttcgaatgaaaaagacccacgggtgagttctagctttgcaaccctgagcaagtcgcttaacccctctgctttagtattctagggtcgctgaaacaaagtgccacaaacygggcgacttcaacaatagcatttactgcctcacagttgaggagctagaagtccaagatcaaggtgttggcagggctatttccttctgaggg

SEQ ID NO: 695010 - DNA, 665 bp, Homo sapiens
gcaacttacatcttgatatgagctaaataattcatgctcacagttactttaggatgaagaataatagcacaaaatgacttgctctataaccttgggcagatcctcttccatttctgagcctcaaattcctcatctgtaggataaggagttagatgagtaaatgctcacgtgctgattaaaacagatcacacatttaagagggcttgtatatggcatgtcataaatattttgtcactaccattttttaatctaactccatcactctacaaaacagaaatggaagtacatggaggttcattcaytcattcattcattcattcaatcagtcgttctataatgatttgttagatgtcttttatgggtcctgcaggcactatggcagcatctaagtgacttacccaaggttgcacagcaatctcatggcagatgtgggatatcaacaataacaatggctattatttgttgagggctcactataaaactagcacttgctaagtattttatatagtctaatttaattctcagaaattgttccctgtattttttatgataacaaaattgagccccaaaaacttaagtgccatctcaatgatttttactcaaatatttctccaaatggttgcataggtaccaaaagatgacactgagatgtagaaactaatata

SEQ ID NO: 695011 - DNA, 648 bp, Homo sapiens
taaatcatctataaatgacgtatcagctataatagacactgttttgtcaaaacagcacccacttcatttagaacaaatggtttcagtggatgctgccaatccttgcaccctcccccaggtccaatcttcccatccacctgcctccaaagtagccacaataaactgcaagtaatccaagctggtccagtgacaggtaaagaggtgcaactggcatgtgacccaaaccaggtaatgtgagttgctccctaatatttttccaacaacagaagacaagacacagctgtgtcccatctgaagccwcaagtattaaggaaattagtctggtaccatactccttcactgcagagagcagtctgcagtaacaaaataaaaccaagaggaaaatgaaattagatccaaaatgtggagagacagagtcctagtggggtccagtccctggctgtgaacatccttagaggtgtggtaaatgagctcttcgtctcctccaattctgggggccactcccagggtcctttcacataggtgatagttttcacccttgtgtctaagagttctaaccagtacacaactctgggagaatatatattaacacagtagttaaagaatcagttaatgttatatataacctgttgaacccaatcgttggga

SEQ ID NO: 695012 - DNA, 658 bp, Homo sapiens
taagattaactctggggtcgcatcattaaaatatgttttctctggcagctgtgtcatttagcctaactagtagcgaatgcaattctaaaattggcctcatttatgaagtttaatttgaataaaaactgtaagttcaattaaaataattggtcaaccgatggtggcttgacatacaaactcatggaaagctagggcaaaaatccatttttaaaaaccgagagtagctgaatacttgattgaattctctgttttgcttgtatagacaaattatcaagttaaagataatcccaaatattctgtgacatttagaagtacattgaggaatattatttccccctcactcctcagttttactaggaaaaaggtttcattgatattatctttaatataaatgcccagagaatatcctttccatagtcttactggcactatcataaaagtgaattcaataaccaagtaccaaaaatacagcagtttttaacaagatagatttaaatattgtaaagaattgaagttcgaaaggattttctttgataamaaaagatttctagcagaaattctcaatattttaaaatgaatttccagttatttctatgactcaaaattaattttccatttgcatagttaacgactttttgcttgataccagagtaatgtg

SEQ ID NO: 695013 - DNA, 1321 bp, Homo sapiens
attatgagaaaagattcatttgaatcctagttctaatttcaacacattacctttcaataatgaggaaaaattcagattttacacgtcagcagcttgcccagtaaaacaagagccacctcttatcgtgctcccaattatatggttgccacaggtcacccataatccttctttcaaaatacttatgtttcgcccattttatagtcatgaaaatcttatagaatgggtgtcttgctctcactgatttcttcagtctcgactgttctgtttggttctttttgaaattaaatgtttcattataaagacattgcgcatcatttttgtctcggtctatttggatgttaattttaaaaatgccatagcttgggtaacttatcaacaactgaaatttatagaggctagaaagtccaagatcaaggtaccagcagattcagtatcgggggggccgatttccttgtgcctaaatggcatcttctcaatgtgtcttcacagggtggaagagaaaaagtagcgccctgggacctcttttataagagcataaatcccattcctgaaggctctgtctgcctgatctaaccacctgccaagggccactcctaataccaatcactttggtggttaggcttcaacaatgaattttggawagatgtaaacattcagaccatagcaatatgtatgcagtttttgtgtgcatcgtcctagcatcctgcgtgctgcattttacttactgcatgtgtcatctacacaaagctggatcagcaagccgggaagacaccacagtgcagactcatcacagaaggtcccctgcctgctatgccatcattgccaatcatgaaattcaatgccatgttactataaatgggtattaatttaagggtcgaaaaatgctttaaatgtttttccacggaaattaatggtgattatatacttgacttttaaaatttactcttagatgagtttttcagagaaaaataaatcaaccctgaaaagacagggcaagactaataataaatataagaaattaagtttatggcctttatttttaaaatccactatgacctgcttcattgggcactgtttcccaaactcagttctatgaaacaatcatgggtcattgtttgaatggaaaacactggttgaaataagttgtgagtcactatagcaggacttctcataacatgtgatacccaagaacaagacacagtatagagcatttccccaaaatatttatcttccactaaatggttactgattagaaacattcaagaatttttaaatttgcttggttgatactgagagatatttaaggatataatcattaggc

SEQ ID NO: 695014 - DNA, 1605 bp, Homo sapiens
tggtgtgttctccctgacccacttccatacactcacctctctaaacataaagacagtgacttcagttctctgcgctcaccaggagagggaaaaatgggcagtctccagcctacattctttccttcatctccctctgctgggtctccaagctcagccatcctgaacctcttggtgaccatggctcctgagcttctgtgcttgcaggccagcctgcaaacagcaggtttgatgcctcgyccatggggcagcagctccccttaactgggctggttccttctgccccagagactgtagatgcaggaggacactttggaagctttcattcagcactttggaatatatgattccacctgaggttcgcagagtctatagaaaagtgattctcaaacattgattgtgttaaaaaatcctctacctgggctccttcaaaaacacactgtctgagagactgagacagttggctgcctgaaagaatttgactggactcacagtggattctaacatagctcgtctcttgaattgtcactgagaaataatccttccaaaatgacaagtccacctgagatttaccctgtcacctgaaatccacactcacttttccaatggtatattgattaccaaacgggagaaagcagggccttgctgtgcactaattagctccaataccctaggctgtcaccaggtggtggggtgcctgtttgctgctgtctaccttgctacctgtgggatcaccagcaactcctcaggaggttctgagtccccagctccttgcagacaggatgggtggagacactaaattttggttgatggctgggagtgtgggcagagggcaggtggatgcatagataaaggaataactgtaagtttaactgaatattggaaaaacaaaaggacaatagagttctgaagtattctgaagaaaactttaaagattgttggcctaggtagttgtaatttgctttcaaattttaaatttttttagatgacaaaagagtgatacatattcaaagtattaatttatgcaatagagaaatatatacataaaaaatcatgtccacctgtccatactactcaaagcaatatacagattcaatgcaatcctataaaaattttaatgacattttttatagaaatcaaaaaaattcttaaatttttatgcaatgataaaagaccttgaataaccaaaattatcttgagaaagaaaaacaaagttggaggcattacacttctgggttgcaaattatattacaaagcagtaataatcacacggtatggtattggtataaaaacactcatactgtatataccaatggaacagaacaaagagtctagaaataagtgcaagtatacatggtcatctaatctttgacaaggccacccagaagacaagatggggaaaagataatatcttcaataaatggtgttgggaaaattggatgtccacatgcaaaagaatgaaactggatctttatcttacaccttcatgaaaatcaactcaaaattgattaaagacctaaacgtaagatgtgaaacgataaaattcctggaagaaaacacaggggaaaagctccttgatattgtctttggcaatgattttttaaaaat

SEQ ID NO: 695015 - DNA, 1605 bp, Homo sapiens
tggtgtgttctccctgacccacttccatacactcacctctctaaacataaagacagtgacttcagttctctgcgctcaccaggagagggaaaaatgggcagtctccagcctacattctttccttcatctccctctgctgggtctccaagctcagccatcctgaacctcttggtgaccatggctcctgagcttctgtgcttgcaggccagcctgcaaacagcaggtttgatgcctcgcccatggggcagcagctccccttaactgggctggttccttctgccccagagactgtagatgcaggaggacactttggaagctttcattcagcactttggaatatatgattccacctgaggttcgcagagtctatagaaaagtgattctcaaacattgattgtgttaaaaaatcctctacctgggctccttcaaaaacacactgtctgagagactgagacagttggctgcctgaaagaatttgactggactcacagtggattctaacatagctcgtcycttgaattgtcactgagaaataatccttccaaaatgacaagtccacctgagatttaccctgtcacctgaaatccacactcacttttccaatggtatattgattaccaaacgggagaaagcagggccttgctgtgcactaattagctccaataccctaggctgtcaccaggtggtggggtgcctgtttgctgctgtctaccttgctacctgtgggatcaccagcaactcctcaggaggttctgagtccccagctccttgcagacaggatgggtggagacactaaattttggttgatggctgggagtgtgggcagagggcaggtggatgcatagataaaggaataactgtaagtttaactgaatattggaaaaacaaaaggacaatagagttctgaagtattctgaagaaaactttaaagattgttggcctaggtagttgtaatttgctttcaaattttaaatttttttagatgacaaaagagtgatacatattcaaagtattaatttatgcaatagagaaatatatacataaaaaatcatgtccacctgtccatactactcaaagcaatatacagattcaatgcaatcctataaaaattttaatgacattttttatagaaatcaaaaaaattcttaaatttttatgcaatgataaaagaccttgaataaccaaaattatcttgagaaagaaaaacaaagttggaggcattacacttctgggttgcaaattatattacaaagcagtaataatcacacggtatggtattggtataaaaacactcatactgtatataccaatggaacagaacaaagagtctagaaataagtgcaagtatacatggtcatctaatctttgacaaggccacccagaagacaagatggggaaaagataatatcttcaataaatggtgttgggaaaattggatgtccacatgcaaaagaatgaaactggatctttatcttacaccttcatgaaaatcaactcaaaattgattaaagacctaaacgtaagatgtgaaacgataaaattcctggaagaaaacacaggggaaaagctccttgatattgtctttggcaatgattttttaaaaat

SEQ ID NO: 695016 - DNA, 609 bp, Homo sapiens
ggtgactgggatgccgggctggggtccaaaccccatttaatctatgatataaccagaatgtagcgtagtgttactggtatgtctggctcataccccgtgagtgctttgtaggaaggcacaccaagtccaagggagactgccaggggcacatctcctggtagccatccgtgggttctgaggctcctccacctccccagaagcggtggggcttctcatcgctaccctcagaatacctcgtctaggccagtrtgctgtcatccttttttgggagtcccagagataaatctacctgccttctttccactttgacagctttacctgatccatggaaagactaaagacaatttctcagctcctcctgttctctccctgaagcaactctttgtggttttccagtggattgaaggctgaactgtaacggatagaggccctaggctggctgatttgatacctgtttatcatgataatccttaaatttgtttttttttttttttttctgagaggctacaccttgtatatccacctgaggaatccgaagcccaacacccatccttagaggcagctgagcaaccagttactggagcagggcccttggtggggagggggaca

SEQ ID NO: 695017 - DNA, 982 bp, Homo sapiens
tgggcactaaatcattaaaagatgaggccgttgccctagttgaaagcacaatgagccactatttcttgccacctcagcatcctaaggtctagtgctaccatttcttcagtgcagaactactttccaaaaacactgagaatgcagacatgagatggataaagcctgagttgatggctttgacttgtccacatcctttaggaaatctctcactgcccagaggtgtttattttatcctggctgcttgtcattgtaacggatggtctggtgctgcttgccaagtacytctggcataggttgagaagatcataccaagaacacgctggtgtgccacatgtcttcttcagggtatcagatttgcagagatagcagaaagcaagaaaaaggttggaatgagggtgtacaaggaagatatgaaggggagaggagctaccacatagcagtcccaggataatcacttttgtagtatactgaggcagagatatgatcaattctctactcactgggattcaataaaaacaacagatccatttaacttatgcacagccttataggcatgaggataagaagaaagctgctctcctatttctttgttggaatgacaaaaaccaacaaacaccacagtgatatatgtcataaaatgggctttaatgttccctcttacaacatggtattactgcttacactggaactggcacacagctcccaaggttggtttactctgaggaatgaagctggtatcccccctggctgcagtgcagctggagcggtcccaggcactgagctcagtataaactttggagtctaaatacccacatctcctgtagttcaccaactttgcagttctggaaccggcagtgcagattctgtgtatgccaagtaaaccagacactgttctgcctctttgtactaactgctctccaaccaccccctactctgcctccagtattactctgctttgtgagatactaaggaatggtctgcc

SEQ ID NO: 695018 - DNA, 601 bp, Homo sapiens
attgaatttccttactgcttatgggtctgctcagattttctatttcttcattattcagtcttgttatgtttctagaaatctatcagtttctttcaggttagccaatatgttggcgtataattgtttataatagtcacttaatgatcctttgtatttctgtggcatcagttgcaatgyctcctttttcatttctgacttcagttgagtctattctctttttccttagcctagctaagggtttgtcaattttattgatcttatgatcttttcaaaatgccaaactatttagtttctttacttttttctattattttcctattttctattttgtttatttctgctctatattatttccaagacctttttttttaaagctttataagacttacctaaaagcataggttcctaagccagtttttccaatttttttcctgcattccacagtaagaaaagcatttcatataataacacagtaaacagactcatacacatatgtgacttaaaaaaaaagtccaggctgggtacagtggctcacacctataatcccagcactttgggaggctgaggcgggtggatcacctgaggtcaggagttcatgacc

SEQ ID NO: 695019 - DNA, 1192 bp, Homo sapiens
aattagcatctgaaaaccccagctttggcctgaaggcctcccgtgcagtctggtgaatggatgcttgaaaacaatttgttttcctaattacgtaaatctagtgaagagtatttatctttttttttttttttttttttttttttttttgcttacctggggaaagtctaaaatytctggtctcaagccggaggagcgtatattaattctcttctccagccccaccctatgacttaccagagtgggtacctgggagaacagggagatggggtagggagactggcaggttgtctttattgaagtttcctgggcaatgccaccaggtctgtccccctctggtataaacctctgctcaattccagtccaaattctggctcaacctaccaaagtggttttgctgaactcagctcctggggctggccacatggtaccaacacatataggatatctcaaaaatgaatttggaagtcccaaacatgcgggtctttggtggctcagaaagcactaaggatcagattagaatagtgaactgccattgcacagaatggggaagggtttgtgttctggttatttcagatagtggctctttggattctggataatggaggtccaagtgctgacattgttaaaaaccagattaacagtagaaaccagatcttaggtacatccatctcagtgttctcttggaacacgtgagccatattgtcccaccacatctgttttctgggtgtcatttgctgagcagtgggctttagagtaggtcagtcatctggaggatctgcagtggggagatgggcgagtcttcactggacccctgcctgcggtgctgcttgggagggcagggccccagtgaatgtctcagtgagtaaatgactgtccccaaagaagccataataacctacgaggagatgagatggaggtgaggataagcagagcctggaatttgtgcaaagctgaagggaagtccttcccctggctgccctggggttggcctgccagtaaggggatgccaattaatttctcttgcaggaagctagttcgtgtccaaaaggctcaagttatgaagtacgaattaatccatttaaccagcttctcggagggaaagcccatgacaactgcattttcaaatgccatcctgaaagcgatatttcaagtggcagtgggtgggattagagcctgctaacgatttatgtca

SEQ ID NO: 695020 - DNA, 1192 bp, Homo sapiens
aattagcatctgaaaaccccagctttggcctgaaggcctcccgtgcagtctggtgaatggatgcttgaaaacaatttgttttcctaattacgtaaatctagtgaagagtatttatctttttttttttttttttttttttttttttttgcttacctggggaaagtctaaaatctytggtctcaagccggaggagcgtatattaattctcttctccagccccaccctatgacttaccagagtgggtacctgggagaacagggagatggggtagggagactggcaggttgtctttattgaagtttcctgggcaatgccaccaggtctgtccccctctggtataaacctctgctcaattccagtccaaattctggctcaacctaccaaagtggttttgctgaactcagctcctggggctggccacatggtaccaacacatataggatatctcaaaaatgaatttggaagtcccaaacatgcgggtctttggtggctcagaaagcactaaggatcagattagaatagtgaactgccattgcacagaatggggaagggtttgtgttctggttatttcagatagtggctctttggattctggataatggaggtccaagtgctgacattgttaaaaaccagattaacagtagaaaccagatcttaggtacatccatctcagtgttctcttggaacacgtgagccatattgtcccaccacatctgttttctgggtgtcatttgctgagcagtgggctttagagtaggtcagtcatctggaggatctgcagtggggagatgggcgagtcttcactggacccctgcctgcggtgctgcttgggagggcagggccccagtgaatgtctcagtgagtaaatgactgtccccaaagaagccataataacctacgaggagatgagatggaggtgaggataagcagagcctggaatttgtgcaaagctgaagggaagtccttcccctggctgccctggggttggcctgccagtaaggggatgccaattaatttctcttgcaggaagctagttcgtgtccaaaaggctcaagttatgaagtacgaattaatccatttaaccagcttctcggagggaaagcccatgacaactgcattttcaaatgccatcctgaaagcgatatttcaagtggcagtgggtgggattagagcctgctaacgatttatgtca

SEQ ID NO: 695021 - DNA, 1192 bp, Homo sapiens
aattagcatctgaaaaccccagctttggcctgaaggcctcccgtgcagtctggtgaatggatgcttgaaaacaatttgttttcctaattacgtaaatctagtgaagagtatttatctttttttttttttttttttttttttttttttgcttacctggggaaagtctaaaatctctggtctcaagccggaggagcgtatattaattctcttctccagccccaccctatgacttaccagagtgggtmcctgggagaacagggagatggggtagggagactggcaggttgtctttattgaagtttcctgggcaatgccaccaggtctgtccccctctggtataaacctctgctcaattccagtccaaattctggctcaacctaccaaagtggttttgctgaactcagctcctggggctggccacatggtaccaacacatataggatatctcaaaaatgaatttggaagtcccaaacatgcgggtctttggtggctcagaaagcactaaggatcagattagaatagtgaactgccattgcacagaatggggaagggtttgtgttctggttatttcagatagtggctctttggattctggataatggaggtccaagtgctgacattgttaaaaaccagattaacagtagaaaccagatcttaggtacatccatctcagtgttctcttggaacacgtgagccatattgtcccaccacatctgttttctgggtgtcatttgctgagcagtgggctttagagtaggtcagtcatctggaggatctgcagtggggagatgggcgagtcttcactggacccctgcctgcggtgctgcttgggagggcagggccccagtgaatgtctcagtgagtaaatgactgtccccaaagaagccataataacctacgaggagatgagatggaggtgaggataagcagagcctggaatttgtgcaaagctgaagggaagtccttcccctggctgccctggggttggcctgccagtaaggggatgccaattaatttctcttgcaggaagctagttcgtgtccaaaaggctcaagttatgaagtacgaattaatccatttaaccagcttctcggagggaaagcccatgacaactgcattttcaaatgccatcctgaaagcgatatttcaagtggcagtgggtgggattagagcctgctaacgatttatgtca

SEQ ID NO: 695022 - DNA, 1192 bp, Homo sapiens
aattagcatctgaaaaccccagctttggcctgaaggcctcccgtgcagtctggtgaatggatgcttgaaaacaatttgttttcctaattacgtaaatctagtgaagagtatttatctttttttttttttttttttttttttttttttgcttacctggggaaagtctaaaatctctggtctcaagccggaggagcgtatattaattctcttctccagccccaccctatgacttaccagagtgggtacctgggagaacagggagatggggtagggagactggcaggttgtctttattgaagtttcctgggcaatgccaccaggtctgtccccctctggtataaacctctgctcaattccagtccaaattctggctcaacctaccaaagtggttttgctgaactcagctcctggggctggccacatggtaccaacacatataggatatctcaaaaatgaatttggaagtcccaaacatgcgggtctttggtggctcagaaagcactaaggatcagattagaatagtgaactgccattgcacagaatggggaagggtttgtgttctggttatttcagatagtggctctttggattctggataatggaggtccaagtgctgacattgttaaaaaccagattaacagtagaaaccagatcttaggtacatccatctcagtgttctcttggaacacgtgagccatattgtcccaccacatctgttttctgggtgtcatttgctgagcagtgggctttagagtaggtcagtcatctggaggatctgcagtggggagatgggcgagtcttcactggacccctgcctgcggtgctgcttgggagggcagggccccagtgaatgtctcagtgagtaaatgactgtccccaaagaagccataataacctacraggagatgagatggaggtgaggataagcagagcctggaatttgtgcaaagctgaagggaagtccttcccctggctgccctggggttggcctgccagtaaggggatgccaattaatttctcttgcaggaagctagttcgtgtccaaaaggctcaagttatgaagtacgaattaatccatttaaccagcttctcggagggaaagcccatgacaactgcattttcaaatgccatcctgaaagcgatatttcaagtggcagtgggtgggattagagcctgctaacgatttatgtca

SEQ ID NO: 695023 - DNA, 645 bp, Homo sapiens
tccaaaagattctcctccaatttagcgaggggcagagatggttaaaaagagaaaggaaactgacctcaatcctgtgcagtccaatcgcagtcctccrggaagggagcacaagtgacaggggcagcccccttctactgggaagggtcccgtctgtcagttgaagtagcaggcaggagcccagagggtgagtacgctggctccccgggctgggcccacacagagcccaggtgtgtgagtcactcacttgcccgacctgctgggcgggcaagggcggtaagcaggaggacaggaggcagccctggcagtccacgaggaaaagctagactgagtcaagccagccggggctgagccatccatcaaccagcctgggaggaccaggaagctggcctgggtgaggaagggaggggcaagaaccaagatggggaatccagaggggggtgccaagtagtagggctgagctccgaccactgcccgctggcctgggaaggcacacagggcctgggtacagggcagggttggagggtcacccatgggctgcaccccttttagccagagaaggtggaaaggaatatgctttgaagtcagaaagatccaagtgccaatccccgccctctccagccatgtgacatcatgcaaccggccttg

SEQ ID NO: 695024 - DNA, 1649 bp, Homo sapiens
accctcattgtatcttgaaagtaactaacttgtttttgattttacaggctcataagcagaagggacttgccttgtctcagatgagactttggacttggatttttgaattaatgctggaatgagttaagactttgggggactgttgggaaggcatgattgtattttgaaatgtgagaaggacatgagatttgggagcggctaggggcaggatgatatggtttggctttgtgccccgaccaacatctcaygttgatgtgtaatccccatgtgttggaggagtggcctggtgggagatgactgaatcatgggagtggacttcctctttgctattctcatgacagtgaatgacttctcacaaaagctggttgtttaaaagtgtgtagcactttccccttcactctctctgtctccctcctgccaccatgttaagaaggtgtttctaattgtgttgtagtcctttgaatctttcaaaatataatctaaagtccttcaatctctaaactattatattaagtttagaaacagcaacacaaaaaggcttgaatgtcatattaatgacagatagaaatcaaggatttgtgttgcctgttgtgcatttactaactgggtgccagatgtaaacagaattgactcttcccctccctgctccctttatcttgcagcatgtggattaccataccctccctttttcccctccagtccacttttccccgctaaatatcaaagccctcaaaatcatcttgggagaaaggcacaaagtacagactgtttctccgtttccaggttcttgtcttccaggcatgtccttaaccttggcaaaataagcttccaaattgattgagaactgtctcagatagtttttggtttacatacttctaggcctattttgcatctgttacaatgcctaaaccatataacatatggaattccaataaaaggttcatgggatcctaggaggcccatgagcaggtttcaggaggtatatgtatcctcaaaactgaatacacagcttagaagttcagagggtttgtagctttcattagattcttgttggattcagtgaccatagcaggttttgaggcacaatggttgaagggaagaacttcaacttgagatgagaaagctctctgattatgagacttccaaggcaacagctcagatcaataaatttaagaatgtgattctatcagagcccttcgtgttgagcagagtttcagaccaactcacatgatattagtatacacaccaaaacagccaccatgttcagtggtgtgagggtggagcttgcccatctagtgaccacgcaccagtttccctctcctgtactgcctggctggggtgcctgagcagcatttccctgcagacagggagcccttaaaccattttgtagccttgcctgttttctccttttgccacaagacttaaagacaatggtaactggtgggaaacagatcacccagcagctctttactggcatcaggatatctggaaaacaaccactcagaagcgtggcaaagaaagggagttgtagaatcaggaggcatgtttttgtacagactatgataacatctgatgaattccctctgtaccacatcaaagtagaactcactaatgaccacaagacccctgtctgccacacgcacgatctt

SEQ ID NO: 695025 - DNA, 1128 bp, Homo sapiens
tacagcccttgaaatgttaactagtccaagctgacatatgccatcagtataaaatacataccagactttgaagatgtacaaaaaagactgtaaactatgtcaatttttatgttggtgaaattacaacatttttggtatagtggattaaataactttttaaaactaatgttattttatgagggaacattttggatctactcctcttaaawgtattaatagctaacaattactctgtaattctagcaccataataagcaaagtactcagcaaacattatgccttaatcacaacagcttgaagcagatattattacctctagtctatatgtaagaacagagattaaaaaaacaaacaaaaaaaaaaccaacaaaaaaccacaaccctgaagtccttcaggaagtgccagagttggaattcaaatcatagttcaaaatctgttcttttagttactatataatcccagcttctctctcatccccagcctctcaaattctagtttaaaattttggacaaaggaaaggtttcaactataaagccactaatctcctggcacattcactcccatcaactaactccaaaccctccaccacacacatgcaaaagtatcttttataaattattataaagtctaatcctactttctttaaaaggtaggcttcaaacaaattaatcagtaatttaatgttatttttaaaagtgataatcatgggtaacttgaaaacagtggaattattaatgttttaaaattatgctaggtcatatcatacataaaacatccaaagtgtttccaaagtagtctaagtgtaaatgaaaatgttactttatattacaacaatcatttaaaataattatggctttcatcaattctaataacaaccataaaaggtccccatttgaaggataaagaaacaaagaaaagctacaagtggcatgccaaggtcacaataaacaatatgtgaaaaaaccaacatccttagaatcccaagattttaattcacagtatctaatgggctgtcaagcaaactatatatgaaagacaaaatctaggatgtagtttcttttgctcaaataaaacaagatttataaaggatggttttcatggattaaaaaacccacaccacaaatatt

SEQ ID NO: 695026 - DNA, 606 bp, Homo sapiens
ttatcctgtgttaccagcaccccaactcctagtcaagtaatgaacaatatccacaaaatccctgacacggtgctcttgtggcatctcccttggtccctattaatggcaggtaagtggctccccactttgtctctagtaggtcccccaaatccccataactccaatttacaccccaaacgtctcccgtgatratctaaacatgataatctaaagtaactgctgaagcacattatcatggaccatttacagtactaattctgatagttctttatcttctacataaaatactattatttaattatctaaatttatttaatttatctaaataaaataaaatgttgtttaaaaggtatatctttgttgtgtgcagcaatgacagtccggccagtatttcccaggtttttaataaatatttccttaaaaataaataatactcctaaagcactcatgactaaaagtgttgttttgttttattttcgacttaactgaaaacctttttattctagtgatcttataatcaaaacgtccacaataaaaatctgtagttgatctcttaccgacttcttcaagaaaacttttctcaaagtagccccttaagttttattt

SEQ ID NO: 695027 - DNA, 606 bp, Homo sapiens
ttatcctgtgttaccagcaccccaactcctagtcaagtaatgaacaatatccacaaaatccctgacacggtgctcttgtggcatctcccttggtccctattaatggcaggtaagtggctccccactttgtctctagtaggtcccccaaatccccataactccaatttacaccccaaacgtctcccgtgatgatctaaacatgataatctaaagtaactgctgaagcacattatcatggaccatttacagtactaattctgatagttctttatcttctacataaaayactattatttaattatctaaatttatttaatttatctaaataaaataaaatgttgtttaaaaggtatatctttgttgtgtgcagcaatgacagtccggccagtatttcccaggtttttaataaatatttccttaaaaataaataatactcctaaagcactcatgactaaaagtgttgttttgttttattttcgacttaactgaaaacctttttattctagtgatcttataatcaaaacgtccacaataaaaatctgtagttgatctcttaccgacttcttcaagaaaacttttctcaaagtagccccttaagttttattt

SEQ ID NO: 695028 - DNA, 1466 bp, Homo sapiens
cttggttacatcatattttcctttttttatacattgcttgatttgatttgctattattttgcttacgatttttatatmtatgtttgcgaatgagattggtggataattatcttttctccttttcttgtaagttttgcactaacatgctatgctatcccttgaaacaattaggaattatttatttcttgaatatttgataaaatttgcttagtaagccatccaggatttctatttgttcaatttctttttcccttctttattgaattcttttgaattgattgaggtttctggaataatcattacatgttttcccctttggattttataagcacactgtttctgttctttaggggttactagaagtttcaacgtgcatgttaacttatcaaagtctgtagctaagcaatactttacctttggtctaagaaccttagaacacttcaactccatttaccttcctcctgatctatattattgttgcagtgtattttaattgtcttttcaaattttacaccataaatcattgtttttattttatataatcaacattcacctatttgctacctcctttctgcatctcggactatctagactgttccttctgttaataatctctgtgagtccttttctggggtcttgtttctgctggttctccctcatgcactttgtttcttgtgtggttggtttttgttttgtttttaactgtaagctgttcgttatccatagaaaattatttatgggggattttgtgaggcctcagatgaaggtggatcccttcaaagagtatttatatttacttctaccaggtgtttagaggtctactaacccaggaccactttaacgcggtagctgcaggctttgagaatcatcagctgatgtgaatttgggcagaacacccaggtgaggctcaggttttagttacaatttcttaggaacgtgttcttattctacctaagcctctaagcaccaagacatcttctcttgcaatctgctctgagttcccactttcgcatagattttggcctgtgattttaccctccggtgagttattttatgttttaaagcatatttttaatgtctattaagtatttttagttatcagtgggagatgctgtctgtataacaatataccgttgctgagtgtaacattgtcttctaagagtttttttaaaaattgtggtaaaatatacaaaacatagaatttatcattttaaccatgttaaagcgtgcacttcagtagccttaagtacattcactatgttgtgcaaccatcatcaccattctcctgtagagttttcatcattcccccaactgcaactctatacccagtaagcaatagctccccattttctccaaaacccaggcccctggcaccattctacttgctgtctctatgagtttgactacgggtaccacgtatgagtggaatcatacagtatttctccttttgtgactgacttctttct

SEQ ID NO: 695029 - DNA, 639 bp, Homo sapiens
tggctcatggtctgatggaggggaagaatatttggaattgtgcttgcagtggaaaatctgggtcacatgacttccatatgtttaagatgccttctggccaggcgtggtggctcacgcctgtaatcccagcactttgggaggctaaagtggaaggattgcttaaggccaggagttcaaaaccaacctaggcaacataatgaaaccccatcactacaaaacatttaaaaattagccgggtgtggtggcattgcctctgtagccacagctactcaggaggctgaggtgggaggatcacttgagccgtggagattgaggctgcagtgagccatcatcatgccactgcactccagcctgggtgagagagtgagaccctgtcaaaaaaaaaaaaaaaaaaaaaaatcccttctgattctgaaatgcttttctgctgtgtcccttcatgaggatgtctacaacaggaacttcctgggcccttgtcttacaagcttgcacccagatcccatcagtttagaagccactgtttgcttctgttttcttagtgataggatctgaatgtttgtgccccacccccygcaaattcacatgttgaaaacttaatccccaaggtgatggcattaggaggtgggacctttgggaggt

SEQ ID NO: 695030 - DNA, 596 bp, Homo sapiens
tgaaaccccgtctctactaaaaatacaaaaaaattagccaggcatggtggtgtgtgcctgtagtcccagctactcaggaggctgaggcaggagaattgcttgaacctgggaggtggaggttgcagtgagccgagattgtgccactgcactccaggctgggtgacagagcaagacactgcctcaaaaacaaaaaacaaaacaaacaaaaatcagatttaagaaatagtagactgtgacagtgcctcagacagcagccaagggcatttacttttaacaccatgagcatctatctttacgtctgtgttcattccagtattatcaacataccatgctttgatggtaaatcactaagtcgtcacttagtttgcctggtacgttcgagtagctgttgaagaatagatttcagtttaagatttcctttgtggctgtttttaaaatgatttctttggactgagttgtattccattttcrgccatcagtgtgtttataggcagacttcttatgtttatctctgggtgctttgttttgtaactatatttaaagacattaatagtgaaataattcacctttaaacaagatattgtaaaagtgtgtta

SEQ ID NO: 695031 - DNA, 596 bp, Homo sapiens
tgaaaccccgtctctactaaaaatacaaaaaaattagccaggcatggtggtgtgtgcctgtagtcccagctactcaggaggctgaggcaggagaattgcttgaacctgggaggtggaggttgcagtgagccgagattgtgccactgcactccaggctgggtgacagagcaagacactgcctcaaaaacaaaaaacaaaacaaacaaaaatcagatttaagaaatagtagactgtgacagtgcctcagacagcagccaagggcatttacttttaacaccatgagcatctatctttacgtctgtgttcattccagtattatcaacataccatgctttgatggtaaatcactaagtcgtcacttagtttgcctggtacgttcgagtagctgttgaagaatagatttcagtttaagatttcctttgtggctgtttttaaaatgatttctttggactgagttgtattccattttcggccatcagtgtgtttataggcagacttcttatgtttatctctgggtgctttgttttgtaactatatttaaagrcattaatagtgaaataattcacctttaaacaagatattgtaaaagtgtgtta

SEQ ID NO: 695032 - DNA, 632 bp, Homo sapiens
tcacggtgtttgtcaggctagtcttgaactcctgacctcatgatctgcctgcctcggcctcccaaagcactgggattacagacgtgagccaccatgcccggcaataaagcactttcaaatcatgaaagtgtaggataatttcttgagagtcaacatcatttttagaattcctatttgctaaagttagcatttatggaaggcctggatctagagtacagcaacgcctttaaaatccaggctgcaagagaaggtgtctggtaagctccttgacttctcagccatgacttgggccatttagtaacatttgtgttgaccttttcatacaatgagtcacaatattgtgatttgtatactgaccagatctttgagcttagagttgattttctaatagagctgataggtctgttcttgtctattctctcttatgggatttacaggatagtggtayagcctgtgagtatgaaacaaagaacaaagccaactggaccacaaggagactgaacccctgacccggggctcattagctccattcttaaaccacggcagctaaacagtcagccaattagaggttcacttggcagcagaggccagagccatgtgctgatctcatccaggctcaggaaagcacatca

SEQ ID NO: 695033 - DNA, 638 bp, Homo sapiens
ggggccagaagacagatttagtctcaaagtcaacagtggatcatttacgctggtcctgggcagctgaagagggaagcaggagaaggttgcaacagatcctgagagcaacaaagaatgacagagacccaaaagtgaaacgcccgtgactgagagaggaaggtagtgaccctaattaagagtttcaggtaaattacagaattccaaaatgtgggaatagcaattgtttacccaggaytgagtttttctattttttaaaaatttgtgtaactttaaaagcaatagtttaagtgactactaggcagagctcatgtactagggtacagatttcaacactgtgttgaaatacggtaaatctatcctaatgtacaatatacagtcacgcattgcataacagcatttcggtaaacaacgaactgcatatacgacagcgacaatgccctcataagactataatggaactgaaaaatactgcctagtgacactgtagctgtatcatagctcacatctgtgtaaacaaacctattctgctgccagtaatagaaagatgtagcatgtacaattataagtagtacataatacctgataatgataaatgactatgttactggtttatgtatttactatactattcttttcat

SEQ ID NO: 695034 - DNA, 769 bp, Homo sapiens
tttctcaaataggaaaaaatacagcagagttctgcactagtggtagtgacagcagttcacattttctcagatggttgaatacttcctgtcatatgacataactgggtcagccaaagtaacccacatctcatttcagaatgcataaatagaaatactacagagatgttcaaattgtagactggtgaaggaagacaacactcatagtcatttccttaggagctgtgtcaggccttcaatggaggaagtgacacaatctgcctgaatcactaaaatcaaatagtgacttatgtgaaggaaacattgcaaagccatgtatgttcccctgaaaatagtgcctgttcctttaacctctccataaaaataaagtattaaatatcagatacaattctagtaaggaaagaatctctactaggttcttcctgttccaccttaacccagcatttatcttaatataaaaaytttaatgaagtagaaatttcacacacatacatatatacagatagttcagcccatgccccatcccttgggataagctatgtcagtcatcggtcatctgtacatcacataactcgtattttaagaagaatttatgtaatacttactaaaagtcttacagatgtcagaaacagctttgaagactctatcagagaaattcactttcaccttcacatacttcatgttgggaagctgcaggcggagcagtttgtgctgaggggtgaactgaagcttagcatctgcctgaataccatacttatctaaggtccaatgt

SEQ ID NO: 695035 - DNA, 686 bp, Homo sapiens
tgcaggctctgtttaaagtgaagcatgaggtggttgacaattgaatttcacgatcccaaatatcccctggttctttcagggcacataactcaatagccaggagaaattattcctgccattgggggaaaatctgtgcccagctgttattcccgcccaggaaattcagatcctccatgttctctgattctgtgcacagtgaagtccgggttcaacactcctggctgaaaaggagattggaaaagtgtgtttctggtatttttgcttctaggctaggaatttggctctccttcacaaaatctcatcatggcaggggaatcagctatgcacagtcagggaaataaaatgctggacacwtaaaaggaataataaaggtccattgctgaattatttccatttcttccgttaactatgacctcaaaacactacacagacagtcctataaagccctccttaccgcatctcaaaacttcagaaaattgcaagatttcaggctacaagcttaagtagaaaggataaattgcttcccaagcctatcttgcccgtaagcttgtctttgttgcatcggatgaaatctcaattcccagacctaccagcttccttcccagagtggttggaaatgtctcaaaccataaagtgttttggaattaaacattcctaaagaaattgctgaactaaatatatttcaa

SEQ ID NO: 695036 - DNA, 1802 bp, Homo sapiens
tatgatttttgaggagtgaactgatcatcttcatcttgtcattccagtgcttattgtcacatggttgctgaatacaggaatgaagggtgagaaaactagaagctctggtacttaaccacagtgatagtcaattcaaagcacacctacgggcagattatattcaatattaartagttaattttgtattgtggtcatgcatatttttccttcctattgacacagataaatttctcaactttttttttactgactgacacttagctaactgtgaaatattttaggtaaagaacatcattctttcattttccttccaggtgctgctgaatttgaatctgagtcctctatatggaatctatcctcttctgcaggatctactcaggatctgctgatgagttacatctaaatcaagtttgaaaagcatcatgagaatatgcaacaattttttttttttttgagatggagtttcactcgttttgaccaggctggagtgcaatggccggatctcagctcactgcaacctctgcctcccgggctcaagtgattctcctgcctcaacctccgaagtagctgggattataggtgtgcgccaccatgcccagctaattttgtatttttagtagagacagagtttcaccatgttggtcaggctggtctcaaactcctgacctcaggtgatcctcccgcctcggtctcccaaactgctgggattacaggcgtgagccaccgcgcctggccgaaaatatgcaacaattttaagaaaaattacttaatgcattcagacccatggattgcatttagttcttctgtctcttagacttcgtctggagcagttcctcagttttcccttgaccttatgaccttgaatctttcaaagagtaaagtccagtaatgtagaatgttcgacaattgggtttatctgatgtttcattgtgattagatttaaattatactttttaaaaaattcaacttttagttccagggagtacatgtgcagctttgttacatgagtatattgcatcatgctgaggtctggggtacaaagagattttacatttttggtaaagtgtatcacagaagtgatcctgtaatcgtctcactgcatcttaccatgtgtcctacaattttgatttgtcctgttaattaatatcttgtggggaggtaatttgagactacgtaagtatctcttcctcataaaaccttcaatttattcatttacttgtatcaatacggactcatgggttattttctccaatagtgtataatttgttaatttttaaaaaaacttttcttttaagaaatgttatattttgacaatttcagactttttaatacaatgtcatgacttctttacttcttgggagccttccagcatcaatggtggcactctgtatgggtcccgtgatgttatttgactccacagtattgcattaaaaacaatgaaaaatatgtaagaaccataaatcatcactttttcccatgagacacaatttcttggatggatgaactgctcatgtggagatgattagcatcacaaagcattttaaggaaatacttgcaacagttctgctcactgcagtaccacaggtggctatgaaatcattccagtagtacagtgtacactatagttaattttacgcagttatggtttaatgctgcatctttgtttgtttacctttctcttggctgtgaatggtgccacataccatgtgtaaattttaataaatcgtattttttataatagattatatatattttatggtagtaatgatgaaatacatgagtatctacatatatattatgca

SEQ ID NO: 695037 - DNA, 1802 bp, Homo sapiens
tatgatttttgaggagtgaactgatcatcttcatcttgtcattccagtgcttattgtcacatggttgctgaatacaggaatgaagggtgagaaaactagaagctctggtacttaaccacagtgatagtcaattcaaagcacacctacgggcagattatattcaatattaagtagttaattttgtattgtggtcatrcatatttttccttcctattgacacagataaatttctcaactttttttttactgactgacacttagctaactgtgaaatattttaggtaaagaacatcattctttcattttccttccaggtgctgctgaatttgaatctgagtcctctatatggaatctatcctcttctgcaggatctactcaggatctgctgatgagttacatctaaatcaagtttgaaaagcatcatgagaatatgcaacaattttttttttttttgagatggagtttcactcgttttgaccaggctggagtgcaatggccggatctcagctcactgcaacctctgcctcccgggctcaagtgattctcctgcctcaacctccgaagtagctgggattataggtgtgcgccaccatgcccagctaattttgtatttttagtagagacagagtttcaccatgttggtcaggctggtctcaaactcctgacctcaggtgatcctcccgcctcggtctcccaaactgctgggattacaggcgtgagccaccgcgcctggccgaaaatatgcaacaattttaagaaaaattacttaatgcattcagacccatggattgcatttagttcttctgtctcttagacttcgtctggagcagttcctcagttttcccttgaccttatgaccttgaatctttcaaagagtaaagtccagtaatgtagaatgttcgacaattgggtttatctgatgtttcattgtgattagatttaaattatactttttaaaaaattcaacttttagttccagggagtacatgtgcagctttgttacatgagtatattgcatcatgctgaggtctggggtacaaagagattttacatttttggtaaagtgtatcacagaagtgatcctgtaatcgtctcactgcatcttaccatgtgtcctacaattttgatttgtcctgttaattaatatcttgtggggaggtaatttgagactacgtaagtatctcttcctcataaaaccttcaatttattcatttacttgtatcaatacggactcatgggttattttctccaatagtgtataatttgttaatttttaaaaaaacttttcttttaagaaatgttatattttgacaatttcagactttttaatacaatgtcatgacttctttacttcttgggagccttccagcatcaatggtggcactctgtatgggtcccgtgatgttatttgactccacagtattgcattaaaaacaatgaaaaatatgtaagaaccataaatcatcactttttcccatgagacacaatttcttggatggatgaactgctcatgtggagatgattagcatcacaaagcattttaaggaaatacttgcaacagttctgctcactgcagtaccacaggtggctatgaaatcattccagtagtacagtgtacactatagttaattttacgcagttatggtttaatgctgcatctttgtttgtttacctttctcttggctgtgaatggtgccacataccatgtgtaaattttaataaatcgtattttttataatagattatatatattttatggtagtaatgatgaaatacatgagtatctacatatatattatgca

SEQ ID NO: 695038 - DNA, 1802 bp, Homo sapiens
tatgatttttgaggagtgaactgatcatcttcatcttgtcattccagtgcttattgtcacatggttgctgaatacaggaatgaagggtgagaaaactagaagctctggtacttaaccacagtgatagtcaattcaaagcacacctacgggcagattatattcaatattaagtagttaattttgtattgtggtcatgcatatttttccttcctattgacacagataaatttctcaactttttttttactgactgacacttagctaactgtgaaatattttaggtaaagaacatcattctttcattttccttccaggtgctgctgaatttgaatctgagtcctctatatggaatctatcctcttctgcaggatytactcaggatctgctgatgagttacatctaaatcaagtttgaaaagcatcatgagaatatgcaacaattttttttttttttgagatggagtttcactcgttttgaccaggctggagtgcaatggccggatctcagctcactgcaacctctgcctcccgggctcaagtgattctcctgcctcaacctccgaagtagctgggattataggtgtgcgccaccatgcccagctaattttgtatttttagtagagacagagtttcaccatgttggtcaggctggtctcaaactcctgacctcaggtgatcctcccgcctcggtctcccaaactgctgggattacaggcgtgagccaccgcgcctggccgaaaatatgcaacaattttaagaaaaattacttaatgcattcagacccatggattgcatttagttcttctgtctcttagacttcgtctggagcagttcctcagttttcccttgaccttatgaccttgaatctttcaaagagtaaagtccagtaatgtagaatgttcgacaattgggtttatctgatgtttcattgtgattagatttaaattatactttttaaaaaattcaacttttagttccagggagtacatgtgcagctttgttacatgagtatattgcatcatgctgaggtctggggtacaaagagattttacatttttggtaaagtgtatcacagaagtgatcctgtaatcgtctcactgcatcttaccatgtgtcctacaattttgatttgtcctgttaattaatatcttgtggggaggtaatttgagactacgtaagtatctcttcctcataaaaccttcaatttattcatttacttgtatcaatacggactcatgggttattttctccaatagtgtataatttgttaatttttaaaaaaacttttcttttaagaaatgttatattttgacaatttcagactttttaatacaatgtcatgacttctttacttcttgggagccttccagcatcaatggtggcactctgtatgggtcccgtgatgttatttgactccacagtattgcattaaaaacaatgaaaaatatgtaagaaccataaatcatcactttttcccatgagacacaatttcttggatggatgaactgctcatgtggagatgattagcatcacaaagcattttaaggaaatacttgcaacagttctgctcactgcagtaccacaggtggctatgaaatcattccagtagtacagtgtacactatagttaattttacgcagttatggtttaatgctgcatctttgtttgtttacctttctcttggctgtgaatggtgccacataccatgtgtaaattttaataaatcgtattttttataatagattatatatattttatggtagtaatgatgaaatacatgagtatctacatatatattatgca

SEQ ID NO: 695039 - DNA, 2170 bp, Homo sapiens
  misc_feature 599, 600, 601, 602, 603, 604, 605, 606, 607, 608, 609, 610,611, 612, 613, 614, 615, 616, 617, 618, 619, 620, 621, 622,623, 624, 625, 626, 627, 628, 629, 630, 631, 632, 633, 634,635, 636, 637, 638, 639, 640, 641, 642, 643, 644, 645: n = A,T,C or G
  misc_feature 646, 647, 648, 649, 650, 651, 652, 653, 654, 655, 656, 657,658, 659, 660, 661, 662, 663, 664, 665, 666, 667, 668, 669,670, 671, 672, 673, 674, 675, 676, 677, 678, 679, 680, 681,682, 683, 684, 685, 686, 687, 688, 689, 690, 691, 692: n = A,T,C or G
  misc_feature 693, 694, 695, 696, 697, 698: n = A,T,C or G
aataggaagcaaaggttttacattgcaaaatataccacatgatccgacttttatttgcttttaaacttaagctgccattcctcagtttttagtagcaaattaaattcttcaattataaattttgagcaaatattaagctagttttattctctgaacaaatattaaacagctaatttgaggagatggtcagaaatggtcgataacaatgtagttttttttgaagagtcattatacctctggaaaatcaaatacaaaaaaaaaaagataaaagttaaaaaacttatttcagttttccacagtcatgattgaatttttgtcccctatgkttttatttggagacaatgattttatgagtgaatcaacattagtaaaacagagaaacattgaatgttttataatttctgtagtgcttatatgagtgcagtaatcaacaagtcaatatttgaaagcacttagaaaagtatctggcacaaaattggcatcattaagtatttgataagtaagactgataagattccccaaacaaagttttcttctcaatttaactttgaaaacgcttttgctttgatagtcttctgtccaatcagctttttaaaatnnnnnnnnnnnnnnnnnnnnnnnnnnnnnnnnnnnnnnnnnnnnnnnnnnnnnnnnnnnnnnnnnnnnnnnnnnnnnnnnnnnnnnnnnnnnnnnnnnnngcaaaagctaaaacggctgggcgactctggagagatcccggagagaataccaagctataagctccaccatggcaagaaggacgttcccgtctgatacatcacattagactggtactaatccaatgccctaggcacaccggggagggagcaaagaaatggggagagaaaaagaaggaggttaaaaaggcctcatccctgccttccaaagcaaagagaaagaatgtcaaccaacacaacgtaagactaatgcgatcttacttcctgatgacttaaaatactctcattctgagattatcagattaaattacttgctactaattcattctggacctctctattttaatctgacaatttaatataacttttactctgtcttgaggaaacattcatgaacgtaaagtcccacttggcagatactacctttatactcttcagtggaaacagaacactcaggagcactgtacctttgtagcaccactgagactttgtctcaacagtagataggactcagcaaggctaggcttaagcagcagtagaagcaacaacacttctggtgagcccttgaatacaagaagaagaataagccactcgtaattcttacacttagactatacagtttctactgaggaaatgccacatgccaatttaagctacctcctcagtcacagccacagacattccactgatttcattcagccttttggtgcggcatttaatatccataggctgatttcatctatatctctcatagccacagttcctgaagatagcatattctacttacccattgctttcatgactttattaatacatagctttctattccttctaccatattgtacaatccaacttcgttgcatttccaaaaaagttcactgtatttatagtctatttgtagaaacttctatttgtttccacagactgaaacttgtatttctctccatgattggacactggtccttctctcacctcacattattgtccatgaagtctggaggcagagccatgacccattcttctaaccatgtttttcaaagcttgatcatttttttctccctcatataaaacactctccttttcttaaatgtatactctcttcctcttctttatcattaatatatcttgatgggtcatttgctcctattcattcaggagttcaattgaactaaagtctccttcattgttatcccaactcctgccattagactgaaaatatgcatgtctatttagatatccatcaatctcccatttttaaaatttttctccattgaatgacctctactgccactctatttcagcatctcactcttaagagtacatcttaaacttctaaaagaaaaaaaaagaattcattttcctaatttatcacaactgtctattcttctataacatcatttattaaatacaatgcctgttatagagagaacagtttaaaatatttgatttttttcaatggggataaaaagatgaaa

SEQ ID NO: 695040 - DNA, 579 bp, Homo sapiens
aatatagttatttctgtaactgtctaaactcacctaaaactcatacctccaattctatctcccttaactagttctaaagagaattatgatctacttacctctataaaatgcagcattctttagattttagagatgcacmaaaattcagacatagagaatgtgtctaatattcaaataacagatccagactgttctaacaacacaatccaagtaaaccattaaaaaaaaaaaactggtctgttcattcacagcaagaagatgtttccagctgatgtgtttgattgagctagctgataagttttattactctcatgtagacaatgaaacaaatgcctaatggggaaaattgcattgagtctaacttggaagcaaagttggcctctggctagcgaatgtgtccaactgggaaaactagtttcaatcctttataaggcctaaaatgtaaagcaagaaagaaagacagaagatggatatttcattaagatagatgaactcaaaaagagcggtgatgcagagaaagttaataagggaagtagagaataagtggtgttccaattattaccagcataaagcaaattg

SEQ ID NO: 695041 - DNA, 1068 bp, Homo sapiens
cgcatcggtgcctttgaatgctaacctactccagaaacttcctcagctgcctgggctcttgggcccttagcaggtgatgttggctttgggagcttcccatgaagttggcctccagtttctctcttggcccctgaggaccctgtggaaacagagaaggaggatgctgtcatcccctggggatgagggcaccttctggtctcagcggcaagacatcgtgattccatcaatataggaggttcctttgggagcattttaatggcatcttcttacctgagcctgtaaacatattaggtctcatggaaaagtaggggaaacccagcatttttccttataagaatgtacaagtgtcgctttagaaatgtcaggtgtttttgaaaaatgaactagcccatgcttaaaatgggttcacggccctttccactgtcaccgtcactgggggagctctaatttggcttccgataggcacggtgatatttagtttctactctggaaacagtgccagctctgtaaaaggtgaacaaagctccatgttgtacagtgagtcttatttaatagcaaggcagacatgagttagatttggtttacatcacaagtttaaaaggtggaatatattttggctatctagaggatggagatggttctgtgtagtgactttttaaagccttaagtctggggcaaaacaaaacatatcagacatgcaggctggaaggcagaggatgcaaaggtggctgtctgggttggtaagacacttaaagttatagtgtatatggatgcatacacaatgaaatatggtcagttacagcatgcccttgcttaaattcctatgccttgttcttctayggagtggacagtgaggacacggcttttccctgtcgtgtctgagatccctatggtctgatgtcccatggcttctggcttcagttgggggtaggggtatagacggtgagtttccagtcttatgttttcacgcctttattgtagaaatgccataagggaagccccgtggtgaccgtggttttaagccttttgtcgtcttcgtaaggagcataccctggtttatctctagag

SEQ ID NO: 695042 - DNA, 751 bp, Homo sapiens
tggcttttttgcccagccctctagtgaagctgccccctcaaaggtccccgttaccttctcaccaaaccaagtttcttttctgagtcctgattcttggataccttcctgaggtttttaaaccagtcacctctcagggcttttgcatgtgggaggctgtagccccagatgcctgatggctgtttctcttacctccttccggtctgttaaaaartgcctccttttctgagagggaggagccctcaggaatggtttagcgccatcctctagacgatgagttttcactcagttcatgtgagatccagagctgtccaggtcacgcccttggcccctctgctttctcggggtacttcttgatcgtcttttcctcctgcccctgccttctacccctgtctgtctccactcccctttgatcgctgccatactcatttctggcccctcatctgtaggcatttcccactggacgacctgcccacccggtctctgtctccaattaaactcgcctcctcctcactctgggatggtatcgctgctgtcccattctcaaaatgccagggtcctgtctgacttcccactttcctttgtgcagctcatatcatacaatcaggcaccaaatacagatttgtatttcctttaaacctctcctgtcttactcggctcgggctctgataggggttagatgtctgtccactccaaatctcctgttgaaatgtaatccccagtgctggaggtggggcctggtgggaggattgca

SEQ ID NO: 695043 - DNA, 649 bp, Homo sapiens
gctaatttttttgtatttttagtagagacggggtttcaccatgttagccaggatggtctcgatctcctgaccttgtgatctgcccgtcttggcctcccaaagtgctgggattacaggtgtgagccaccgcacccggctcccaagttctttaaaaaawatatctatatctatatatatatatatatatatatatatataaaatatattatatatatatatattatatatatatattttattttgtttgagacggggtctcgctctgtcatccaggctggagagcagtggcatgattatggcacactgcaaccttgacctcccaggttcaattgatcctcctgcctgagcctccccagtagctgggactacaggagtgtgccatcacatccagctaatttttaaatttttcatagagatggggtctcactgtattgctcaggctggtctcaaactcctagcctcaagtgattctcctgtgttggcttcccaaagtgctgggattataggcatgagccaccgtgcccagctttaaatacagttgcagcgtaaaattcttctctttggcttaagaccttgcaatggctccatgttagataggagccatttcaatgttaagttacagagaagctcccccagccttccagcccct

SEQ ID NO: 695044 - DNA, 649 bp, Homo sapiens
gctaatttttttgtatttttagtagagacggggtttcaccatgttagccaggatggtctcgatctcctgaccttgtgatctgcccgtcttggcctcccaaagtgctgggattacaggtgtgagccaccgcacccggctcccaagttctttaaaaaatawatctatatctatatatatatatatatatatatatatataaaatatattatatatatatatattatatatatatattttattttgtttgagacggggtctcgctctgtcatccaggctggagagcagtggcatgattatggcacactgcaaccttgacctcccaggttcaattgatcctcctgcctgagcctccccagtagctgggactacaggagtgtgccatcacatccagctaatttttaaatttttcatagagatggggtctcactgtattgctcaggctggtctcaaactcctagcctcaagtgattctcctgtgttggcttcccaaagtgctgggattataggcatgagccaccgtgcccagctttaaatacagttgcagcgtaaaattcttctctttggcttaagaccttgcaatggctccatgttagataggagccatttcaatgttaagttacagagaagctcccccagccttccagcccct

SEQ ID NO: 695045 - DNA, 649 bp, Homo sapiens
gctaatttttttgtatttttagtagagacggggtttcaccatgttagccaggatggtctcgatctcctgaccttgtgatctgcccgtcttggcctcccaaagtgctgggattacaggtgtgagccaccgcacccggctcccaagttctttaaaaaatatatctawatctatatatatatatatatatatatatatataaaatatattatatatatatatattatatatatatattttattttgtttgagacggggtctcgctctgtcatccaggctggagagcagtggcatgattatggcacactgcaaccttgacctcccaggttcaattgatcctcctgcctgagcctccccagtagctgggactacaggagtgtgccatcacatccagctaatttttaaatttttcatagagatggggtctcactgtattgctcaggctggtctcaaactcctagcctcaagtgattctcctgtgttggcttcccaaagtgctgggattataggcatgagccaccgtgcccagctttaaatacagttgcagcgtaaaattcttctctttggcttaagaccttgcaatggctccatgttagataggagccatttcaatgttaagttacagagaagctcccccagccttccagcccct

SEQ ID NO: 695046 - DNA, 782 bp, Homo sapiens
aggcaggctgagggcagggctgggggagagcagagggagtttctccccactccgtgtccctgtgtagaactccaagaaacctgagaactctaaattcaaatccagccttccagatctttagaaggtgtatgaatagaacatattttattaaacagtttgttaacttgatttttaacttttaaatatttagacatatggaatgtgggtctccatttgtacttttgcttggtctaagaggggtgagtggaaaactcccaagggccaggattatgtcttatttgtcttgttcaccctcccccatccccccaaccttggacccctggaccttggtaatttccatcgaactggaaaaagaatgagatcccagcctgatagtgagamatacagatttgacaagaccccagtaggcaaaagaaaggttggtcaggcaactgactgcagagggctttggaggtgtggccagtggctggcgaggaagctgacccagtgtccagggggttaagagcaggcagaccacctgggttcaaagcccagttctgctctttaggactgtgtggccccagcaggttgctagctcctggtgcatcagccgccttcttctaagacagggtaacgataataatccctaatggccccaaccgtctagtttaccgggggaagatgtagtgtttggcatgtagtgagttctatgaaagtttgttatcatgtgaaatgaccccttggaaggaactcttaagcccagctaaggggcagctcctggcaaatcagagaaggagacgttg

SEQ ID NO: 695047 - DNA, 656 bp, Homo sapiens
tagaaacgtaaagccagccgggaatggaatccaaggaagccccgctgaggagatgagaacggaagctaccccaacctcccaccccctggtttcatttcacacggggaggccctcctaagggctctctgggtggcacacatgtcctgtctcagctgggggtttcaggacccacgctggctcaggtggccagtgcccacagatctgtgctccggcccttgttctatttctgattttccaagttgcaygtgagccaccccttctccgggtccctcctgctgcccttcaccagcctggcctccagcacacagtaggcgctccacagtgtgttcgtaggatggatacaactactgagtccctggctccattccctaagccaccctaccttcaagtcgccatcattttgccacccctttgctgctacttgagtaacttctgctcccaccagtcctgcctaccttgaacaaatgccggatggtctctattctacatactgttagtctgaggaaaacccactatgtcgccccattttccatttacatggtagcctgggtcacagaccatcagaactgcagcaggaaaggaaacaccatttacctctatcttgcactatcaactggctccacccaccatcaggcctggctgtggaggctccagtt

SEQ ID NO: 695048 - DNA, 666 bp, Homo sapiens
tatatgcaaataaggtcacgttcacatgtactaggggttagaatgttgacttttttttgggtaacaccattcaacccctaatctatgacaagattaagaaaacaacataagaaatataataacataaaaaacataagaaattacaatttaaatattttattactctttattatttcaatataatatatacatgatatcaatgataagatacacaccactgcattaattatattaattacagtaatagaattaaccgtcacatcaaacaaaaatcataatagatgaaaactattcacctctatgagttatgaattggggtgggtaaaaaacagggtgggggcagatttagattaaccattttgttgtattttatttcttrtcataaacatttatttctttgatgaaaattagaaaaaagtttagtctactctttcctgagcaatttatatacattaggtttctctttcttaagatgaagctgtaactagcatacagtcaaattcatcctttctagtatacaattttgtgaattttgacaagtgcatacattcaggtaactacaactatgatcaaaatatgaaagaattcgattactttcctcctcattcatgctggattccctttcattcctttgtagccaacttatccctttgccctagcacttgt

SEQ ID NO: 695049 - DNA, 603 bp, Homo sapiens
ctgaaattatatagtcatgatgattgcacaayctttagaattttctaaaaaccaattaatgtgttctttaaacaggtgaattttatagtatgtgaattatatttcaaaaataattaaaatatttttaaatgacctacagctacctataacataatgcttataaaagtaatttgagttataaaaaattaagtcatagaaggctgtaaatgtttccttttttgtaaaaattaaacagaaaatctaaaagccaaataaatacaaataaaattcagcaatctatttactcatgggggtagcataaaggtatatgcaaagctaatggtaatgtttttattattaaatatggtggatgcatgcatgttaattttataagaatgcttcttaccaaacatacatgctcttatatgcttcaaatattatataataagaacatttaagtgatttgcttttcaattttatgtggctggggaataatagtgcccctaattaacacagtgggcttaaaagcagatgacatgtcatgttatgatatgggtcagcctttctttagtcaatctgccccaccattcttcctctaatgattactcctcctgagtcactcaa

SEQ ID NO: 695050 - DNA, 994 bp, Homo sapiens
tatccccttcaaaatatttaccaaaatgaaaaaggataacaaaagtcttakcaaaagtgtattttgtttaaaacaacctataattaaaaacaaagaaaccaaaaacaataggacatattctcctcacttccatccctatcccttttttattccccacttaaaaaaaaaaagtcaagttcaagacagtttggagaagaatgatggcataacctttaaaaatctgagtccttatgtacaaaggaacagaagacttcattaaagagatgcgacgtttggcagttcagacccttactgactgtcaaaagcctgatctgggagaaatgtgacaactatactaccattttggagtctaatctcctaacaggggcattttgcccaccaaagggtggcatcaaatgccatttcctaggtgtagggctccaggccacccgagagactctcccttctgctgctgcctcacccatctcagcagacaggattcttaatacccatactacttggatttgcaggagatcttgaacaaaatgcctttttgtttaagatgttttctaaacaccagttcaattcccacattaaaaaatatttctattaaataaatagatggttttattgaaagcaaaattagtcaaattacttttgtgtacattaaatagaagaacaaaatcctgcacaaaaatactattctatgttttgctattgcagcttgctaagctgaagtgataaaactgcatataattatatattaaaagtcagaactaatcttaaatcttatattatcagcaatcatgctgctgtttaaccaccaatgtttacaaatattctgaaaccaccaaaaaaagcacttctatgaacaatccatcaaaatcatagctgcagccactatgtcactggctttggcttctaggtggccatcaagtgtgcaactgtctagggccaaaaataaaaagaggcaccgagagagcctggaagtcttggtgctaccattgaaatagac

SEQ ID NO: 695051 - DNA, 616 bp, Homo sapiens
gtcaggcaaatacaaggactgtttgaaatactttcgttccatgccactcaaagtgtggtctgtggaccagtcccttggggctttccagaaatgcagcctctcaggtaccatcctagacctattgaatcagaatctgtcttttttttwaaaaaaatattcagaggatgtgtatgcatgttaaagagtgggaagccccgatttagcagttctgcctttcaccatgttaataatcaccagcagaaaattagttaatacagaggacaattactgccagcattttggaaaataatcttacataaccaaaaagaacagtggaataaggtattaatttttagagtctcctaggaacaaaatctcatttaaaaaaaaaaaagtatcctccacattacagtctgctttcttgctgttggttttgggctagcagctgaggggcagcaagctgtgggctatcttaggcaccaagcaagccctgagggttagcctggtggaggagtagggctcctcctactcaagatctactcaagatctgcatgagtccagatcttctcaggtggcctcatgcagagcacacaggggagaaagaaacgagggattctgcatcctgagagcaatgtct

SEQ ID NO: 695052 - DNA, 657 bp, Homo sapiens
cctgcctcagcctcctgaatagctgggattacaggcgtgcgccaccatgcccagctaatttttgtacttgtagtagagacggggttttgccatgttgcccaggctggtctcgaactcctgacctcaggtgatccgcccatctcagccttccaaaatgctgggattacaggcgtgagccaccacacccggctgacatgggtattgtttgcctggggtctagtacaaggactgcagtgataataatgcctgcctacaatggagtgtcctaggcattgctcaaggtaatttttgcacagcatgctgacaaccttgaaacatcacacaggcataaaatctttttattattgatattcatgcagtcaagaatttgtcttaaaaccaaagagcaaaaatatcaattgtaaatatcaayagagattacaatagtcatcagtaatagctttcttactataagaatgttgtagtataattaaaaatgtaaatagtagcaataaatgcttagtaaagtttagaaagttttcagtttcaattatccatcagaatgaaaaggcggttttagggtgatgcaaaggggccaggcgtggtgtaagcactttgggggtctgatgcagatggatcacctgaggtcaggagtttgatgccagcctggctaacatg

SEQ ID NO: 695053 - DNA, 657 bp, Homo sapiens
cctgcctcagcctcctgaatagctgggattacaggcgtgcgccaccatgcccagctaatttttgtacttgtagtagagacggggttttgccatgttgcccaggctggtctcgaactcctgacctcaggtgatccgcccatctcagccttccaaaatgctgggattacaggcgtgagccaccacacccggctgacatgggtattgtttgcctggggtctagtacaaggactgcagtgataataatgcctgcctacaatggagtgtcctaggcattgctcaaggtaatttttgcacagcatgctgacaaccttgaaacatcacacaggcataaaatctttttattattgatattcatgcagtcaagaatttgtcttaaaaccaaagagcaaaaatatcaattgtaaatatcaacagagattacaatagtcatcagtaatagctttcttactataagaatgttgtagtrtaattaaaaatgtaaatagtagcaataaatgcttagtaaagtttagaaagttttcagtttcaattatccatcagaatgaaaaggcggttttagggtgatgcaaaggggccaggcgtggtgtaagcactttgggggtctgatgcagatggatcacctgaggtcaggagtttgatgccagcctggctaacatg

SEQ ID NO: 695054 - DNA, 1466 bp, Homo sapiens
cgttacttccagcatcttacttctggcaacaaattctgcgttagttgggaggctttccactgaaatttaaaaagcactcaaaagaagagtaaccaaaggaatttattgtctcacacaacaaagagttgaaaagttccagagttggccaaatctgtggcttaaaaatcttaatgctctcggtcaacttttaacaacaatctggtgagggagcagggctgctgacatggaataactattttataagcaatccacgttggctgccataatcagtcagtctgcatataatgatttgctgcctgtgatatcccacatattagcctaggcattacagagaccacatcaaacaagacaaacccaattcttaccttcaggagcttacattctagaatgcaagaaattcttacttgttaaagaatgatgaattatgattggtttcataagaaaataaatataatcctatgttattatacctaaacttttccaaagagaatatttaagccatcaagataatgttaaatcttttttcttttactctacagaacctcaaatcatactctattttagtttctgaatacattggctgggcatggtggctcatgcctgtaatcccagcattttgggaagctgaggcaggcagatcacttgaagccaagaatttgagaccagcccggccaacacagcgaaactccatctctaccaaaaatataaaaattagccgggcgtggtggcacatgcctgtaatctcagctacttgggacgctgaggcaggagaatcacttgaacctggaggtagaggtttgagtgagccgagattgccccactgcactccagcctgggtaacagagtgagaccttgtctcaaaataaataaataaatacatggatcttgattttcttattcagacttttttttccattttggaaattttaattgtctctttcttgttgttaacaaagttatatatgccttcaccgcattatttcaaacatccatgttttggggcacgagctctattttattcttaaatatattcagcatggagccctctgactttttggactcacttctgtatgtgggcgctacaaagatttctgggtttttttgtttttttgtttttctttgagacagagccttgctctgtcacccggcttggagtgcagtggtgcgatcttggctcactgcaacctccacctcccrggttcaagcaattcttctgcctcagcctcccaagtagctgggattacaggtgctcaccaccatgcccaggtaatctttttttttttttaagtagagacgggggtttcaccatgttggtcaggctggtcttgaactcctgaccttgtgatccacctcccttggcctcccaaagtgctgggattacaggcgtgagccaccacacctggccctcagatttctgttttttagataaattttattgtgtatatttaaggtatacaacatgatat

SEQ ID NO: 695055 - DNA, 1480 bp, Homo sapiens
tatgctcatggatttttaaaatatacctgcattatcaagattttttttccagaaagaatctgatagattaattatctccacactttagcctttagcagaagttagggattgataaactggcagggcaggtgaggatggcttgcctccaaaatgctaccagtcatagggggctccctttcttcttgtaaggagagtaacaatggctctttctattccaccattcttggagaacagtaatttgttgaagaaaatgaaatggagtttgtaggtgaatgtgcatttcaagttataaattaaaaaataaaactctagtaccacataagagttttctatgtatgtctgtttaaagtcaagaatagcggtgatataataacaataatccaaattgatcagcagwtataatttttctcttcttttgctctcctctactgggtgtccctgaactctgcttctttgaacaatgttgttcactcatctggattagcataaagactcattttggaaattatattccactattgctatttgtttttacagttttcaattcagctcctacttaagttattcaacatcactaccatagttgatctgtaataccgagagcatgcactctccatcagttaaaaaacaatgtccttgaaacatatattaatccataggtagtagaacattaaaacatttctaatccatttcactgaagttgctgtgaactgcagctcaacaaacaaggaggttagaacatcataactgatggagaaaactcaaccctgccattccaggttggttgcaagaatgctgggacgggaagctcagggaaaggaatccagaagttcagcatgcagccttggtgtgggtcaggcacagccaactgctgaaggtgtgttttgtgtccaagctggcaggtttactagggtacgcctcttgaagatggtgggtagcctgattagagcctagagtcaagaatgtcaatgggttggcccttctgatgagttatagtatcatgtcccaggagagctagattttcacgaactcatttcctcaaattcaaggttttagatagtttctctccatggctatgaggaaatgaaaataattaactatgaaacagtgactttgtcagtcttagtgttactgccataaaactttctggccatatgggaggaatttgtttctctggtctgatgtggcctggtgtcagctggaggggatccatctcagcactgatgtcactcctggccagttgtgtactgtgtgcttgggtatcgagtcatggtctgaagttcatcttcattgatcatctcatagtgaagttaattatttctgagactctgaagtcatggtctgttgtgagttcaatcaggatgaaactagaatcattaaagaatgagagggttactttcttcctgctgactggagagtgattttcaaacactccttagcagtagactcttttggtcaaacacacctttctgcagaattc

SEQ ID NO: 695056 - DNA, 598 bp, Homo sapiens
gcaaaagccagtgagtggtttcgccaagytggcggagaaggggtttgttagatacggagataaataaaattccataaaaaaagctttccctaatgacaaagaatcatcagggagaaatgacacagaatttgcattaatgtacatactagagtggattagaatgttttttcactccaactcctacagagtcacttatagccaaggctagattagagctttatagagcagaaaacattttccctttatgcaaaaaattttcagggaactaatgttctttttgataccagcagaaagcaaacagtgttaagatacttttattatggtaggtagcgtttgaaatatgttcccagcaatgtaaaagagcagcaagtgagtagcctgctaagagtcctgtagcaattaggaacttccagagaacgaataaagatttctcttatgcatatttaataacagctgaaattttatggtagagagtgccaggaattttgtgtctatgtgtttgtttttctttatttcttgcttcctattgcatcctctaatatcttattagtttgtaacattctcttagtggcttcagtataataacttgtattggaat

SEQ ID NO: 695057 - DNA, 632 bp, Homo sapiens
agactcagagggtttaaaggatatactttcaggtcacctgaggaggtcatgcaaagctgaggtctagtgatgtccagctcagtgaaattttcctgccatcaccatgtggatagttacactaataagcactcccatctgtaagccatttacatccatggttagttagttttaggtatctaaatagccataccatagtatccagtgatttaatcaaatgtgaatctaggtgttgttgtgaagatattttgtacatgaggttaacatctatgatcaggtgactttagctaaggaaaactacccttcattatgtgggtgggcttcatttaatcagttgaaggtcttaagtgcaaaagctgaggtttcctgtagaagaagaaattctgttctgaaactgaagcatcggcacacacaaatgtgtgtacctccactggcatctcagcatctgtaagcaggctcttgactttgaacacaaatgtttcatgttgagatggagtcctcagccccaacacataggacttttctggatcccagtccctacagttatatgataaagggtcaggargagaaagtgaagcttaatattacttaagtgaacatgactaggtaagccaggcagaaaattatcttaaaat

SEQ ID NO: 695058 - DNA, 636 bp, Homo sapiens
gcaagatgcgcattcatctgtcacacatccctgtgaaaatgtgtgaattaatgaactgtttaggctgaaagacactttaaagttaaatggcttggcattttattaatttcttttgttttttgaactcgacaacacacggagcaaattattctattgtcaaatgaaatttctacaagtaatattttcaagctaagagaatatacaaaaaaaattttgatagataagcacttatcaataatcacattagcaygtttttcagggctacagagtcttaacagaagacggtactttaatgactatttttcagactacctgttggcaaattgcagcccatgggccaaatctggcccaccatctgtttttgtaaataaagctttgttggaacacagtcacattcattcacttatacatcacctgctttcctgttacagtggccaagtgtagttgtgacagagaccatatgttacaaaactttaaaaatgaactatttggccctttacagaaaaagtttgctaacctctgaccaagaccataggttctcaacttttattattactatttcttttttaaatataagtggcccaggcccttttttcaatatgtaaataattaaattactattgttttccctgatga

SEQ ID NO: 695059 - DNA, 636 bp, Homo sapiens
gcaagatgcgcattcatctgtcacacatccctgtgaaaatgtgtgaattaatgaactgtttaggctgaaagacactttaaagttaaatggcttggcattttattaatttcttttgttttttgaactcgacaacacacggagcaaattattctattgtcaaatgaaatttctacaagtaatattttcaagctaagagaatatacaaaaaaaattttgatagataagcacttatcaataatcacattagcatgtttttcagggctacagagtcttaacagaagacggtactttaatgactatttttcagactacctgttggcaaattgcagcccatgggccaaatctggcccaccatctgtttttgtaaataaagctttgttggaacacagtcacattcattcacttatacatcacctgctttcctgttacrgtggccaagtgtagttgtgacagagaccatatgttacaaaactttaaaaatgaactatttggccctttacagaaaaagtttgctaacctctgaccaagaccataggttctcaacttttattattactatttcttttttaaatataagtggcccaggcccttttttcaatatgtaaataattaaattactattgttttccctgatga

SEQ ID NO: 695060 - DNA, 370 bp, Homo sapiens
ttggctaggttacggtttccagtttggtgaaacacaagtttaagatgttgctgtgaaagtatttttcagatgggattaacagttaaatcagtatactctgagtaaagcagatcaccctccataatgtgggtggtcctcattcaatcagttgaakgccttgagagaaaagactgagattctcccacagaaggggaggaagaaggaaggaaattctgcctccagactgtctttggactcaagacaccaccaccaactcctgctagaattcccagtctgcatgtgtgccctgtgaatttctgacttgccagttcccacaattacataagccaattttataaatgaaacttcctacatatatatatatatatat

SEQ ID NO: 695061 - DNA, 578 bp, Homo sapiens
taggaggcccaccatccggaacgcctgtgctggagaggaggccctggtgtggccacataaccttctgctggtgcctcagaaggacccaaaggccagaggactctcaagagaccaagatgtctcatctttgcggtggccactattctgtctgtcacagcctggcttcaggctcccacagacgtgcatccattccacatgcaaaatgcactcactctctccaacacccagtccccagagacgcagctggagctggatgccggcacagggaagtggcgcaagtctgggctccccgccgccttccaagctggctcttcaagggccaggtgctggggatgcaaacgtgagtcaggtaatgcccctgctccccccgcctcccggccgccaggccacggccttkagaagggaaggaaaacaaatgtggagagcattctgtctccagggctctggggaccaggtctgtgctgggcacaccagccgctttctcatcagcctgtcgtattttcttcagagcaacgatcagatgtgaagctgtaccattcacttcttgcctgcctttccccctcctctggaatccaggg

SEQ ID NO: 695062 - DNA, 617 bp, Homo sapiens
ccacaggtcaacagagtgactatgagcccatgctcaggacctgagaaacagccttgcgggccccatcaaccacagacatgctcctggcgtgcccagtagccctctgcttttaataagggcctgagaaacagtcccacaggctgcccccagcaggcacaccaccgagtgggccttgcacctgtatctcagacctgagagacaagcaactgtgtatgcccaagtctcagggccgagaaacaaccctgggagcttactcaggccaactaagcagccatatacctgtgtcccagcttgaggaacagccctttaggccacccsacacagaaacactcccaggccaactaagcagctgtgcaaccttgggtgagcctgagaaatagtcctgtatccattcccagcagatgcacctccagaccagccaatcagccatgaatgcccatgtcctggacctaagaaagagctccatgggctactcccagaagacatgcccttaggccagccgagcagcctcgtgtccacatcctggctcacagaagtagtccccagggcttcccctggcaggcaccacccaggccagctgagcagcagtgtgcacacatcctgagctagaatagctc

SEQ ID NO: 695063 - DNA, 617 bp, Homo sapiens
ccacaggtcaacagagtgactatgagcccatgctcaggacctgagaaacagccttgcgggccccatcaaccacagacatgctcctggcgtgcccagtagccctctgcttttaataagggcctgagaaacagtcccacaggctgcccccagcaggcacaccaccgagtgggccttgcacctgtatctcagacctgagagacaagcaactgtgtatgcccaagtctcagggccgagaaacaaccctgggagcttactcaggccaactaagcagccatatacctgtgtcccagcttgaggaacagccctttaggccaccccmcacagaaacactcccaggccaactaagcagctgtgcaaccttgggtgagcctgagaaatagtcctgtatccattcccagcagatgcacctccagaccagccaatcagccatgaatgcccatgtcctggacctaagaaagagctccatgggctactcccagaagacatgcccttaggccagccgagcagcctcgtgtccacatcctggctcacagaagtagtccccagggcttcccctggcaggcaccacccaggccagctgagcagcagtgtgcacacatcctgagctagaatagctc

SEQ ID NO: 695064 - DNA, 609 bp, Homo sapiens
cttttataacactaatcacatagctacttgtttaaagactgcctttcctgttagaatgtaagcttcataaagtaggcagatggccataaggccatagagcacatcagtgctggttagataaaggctaccctttctccagacagatgcaaccctgtgccatagtgcacagcttatcaagtggaatgctgcctgcatttcagttcccactcaagtccttggcagtaaacatgcacaaccacatgcaatgtccaaaatgcagagatcacctctttatttttaccactgtaaccccagtatctaacacaaagtctgacacctggaagatgattaataattatttatcaaactgaattttgatacttgaaagggaagtaaagacccaattataaacacagcmtttccattcatttgcccaattagttatcctacatgttttttttctattccccctaaaatatacacatacacacacatataatgtctctacacaaaatacagagtatatttttctaagcctgtgatccaaaattatttgcctaatttgacctctagaaagtccgactactataacttagctttctgtttaaagtttcaggggtaaagtggaag

SEQ ID NO: 695065 - DNA, 1464 bp, Homo sapiens
caagaagtaatttgtataccactgtgattctcatttctctaatggctaccataccacttattgagtgcttacatttagttcatctgacagctctgtgaggcaagtcatagcccattatacacatgagaaaatggtggctcatttaggttaagcacataggagcccagatttgattcttaccaccgcatcccagcatttaaccaccaaaaycactatggcaaatgattttcttatgctaagaaaaagagtaaagattataacccgttatacaagctgaaattttcaagcttttagaaatgacataattttggttatatgatcaaaatttctggcatgccaaataacataacttatgcaatgatttcacatagtatatagtatgataccctgaacagaaaaaaaaagttgctgggtttaaaatgtatttgaatctttagtcttggtccatttttgccgctataacaaaatatctgagactggataatttatgaagaacagaaatatactccgggaagcccaagatcagggtgccagcaggttctgtgtctggtaaaggctcatttctcattgatggtgtcttctaggcatcctcacatggtggaagggacagaaggcaaaaaagggaggaacactgtgtcctcacatggcagaagagcagaagagaatgaactcattccctcaagccctgctagaagggcactactctcatccactaggactccaacctcacagcttcatcacctcttaaaagccccacctcttcatactatcagttgattattaaattccaacatctgaatgttggaggacacatccagaccgtagcatccctcaaaaaaagaataaagatgttccatagcacccatcatttattgaaatgattttcgaacacaaatacagcattgagagcaagcttttaaaataaattgaggggcttctgggtcaagatcactaatggaacacacatgttcattttatattcttctctggacactattaaaatgagagtaaaggaatgttaaaccataaacccacaaaaataagagacctggcaaagagaaaaatcagtgtgaaaaagcacattgcaaatttctggaagatgaaaaggagatagaggtagacagccagatgaagatgagctgccaagaagagaccttagtataaatgactttgcaaaccctggagggtgccagagtcaaggaagacaaattccacaaaggcaaaggcatgactgtaaagaagggctgaaaagaaggagattcattgaaagcctctaaaaccagctctttcttttccttccccaccccatgcaaagatggaccagcaggcaggaggtctacaagctgtaggcaaaggattgctgggctgaatgaatgaataagcagaagcaagtggcacaacaaaacatgccagaattccaaaactgaaagctgagttcaagtggaaaaacaaaatagggatgaa

SEQ ID NO: 695066 - DNA, 1464 bp, Homo sapiens
caagaagtaatttgtataccactgtgattctcatttctctaatggctaccataccacttattgagtgcttacatttagttcatctgacagctctgtgaggcaagtcatagcccattatacacatgagaaaatggtggctcatttaggttaagcacataggagcccagatttgattcttaccaccgcatcccagcatttaaccaccaaaaccactatggcaaatgattttcttatgctaagaaaaagagtaaagattataacccgttatacaagctgaaattttcaagcttttagaaatgacataattttggttatatgatcaaaatttctggcatgccaaataacataacttatgcaatgatttcacatagtatatagtatgataccctgaacagaaaaaaaaagttgctgggtttaaaatgtatttgaatctttagtcttggtccatttttgccgctataacaaaatatctgagactggataatttatgaagaacagaaatatactccgggaagcccaagatcagggtgccagcaggttctgtgtctggtaaaggctcatttctcattgatggtgtcttctaggcatcctcacatggtggaagggacagaaggcaaaaaagggaggaacactgtgtcctcacatggcagaagagcagaagagaatgaactcattccctcaagccctgctagaagggcactactctcatccactaggactccaacctcacagcttcatcacctcttaaaagccccacctcttcatactatcagttgattattaaattccaacatctgaatgttggaggacacatccagaccgtagcatccctcaaaaaaagaataaagatgttccatagcacccatcatttattgaaatgattttcgaacacaaatacagcattgagagcaagcttttaaaataaattgaggggcttctgggtcaagatcactaatggaacacacatgttcattttatattcttctctggacactattaaaatgagagtaaaggaatgttaaaccataaacccacaaaaataagagacctggcaaagagaaaaatcagtgtgaaaaagcacattgcaaatttctggaagatgaaaaggagatagaggtagacagccagatgaagatgagctgccaagaagagaccttagtataaatgactttgcaaaccctggagggtgccagagtcaaggaagacaaattccacaaaggcaaaggcatgactgtaaagaagggctgaaaagaaggagattcattgaaagcctctaaaaccagctctttcttttccttccccaccccatgcaaagatggaccagcaggcaggaggtctacaagctgtaggcaaaggattgctgggctgaatgaatgaataagcagaagcargtggcacaacaaaacatgccagaattccaaaactgaaagctgagttcaagtggaaaaacaaaatagggatgaa

SEQ ID NO: 695067 - DNA, 1892 bp, Homo sapiens
agcccccatacttcctctccagcatttccacctggcagagaagggtcgaggggaacaaggtcagaaagtcatggcagcctcatctccctaggcactcaaccacaccacccccactggaatcatggctgactgcttacagccaccgagagcgccaggctaggtgctcagtgttgtctcctcacttgaatttcagataacactagtcaaatgggattggattatgttttgttttcttatttgcaagaagaacatattgattatttgaaaacaggaaacaaacagagaagccaaaaaaaaagaaagcaaggtagaaataaatggagagcaagaaggaaagaaaggaggaagaaagagaatgagaaaggagaaggagagagggagagagaaaggcagagaaggaaggaaggaaggtaggtaggtaggttgaattacctacattccaaacacctaagcataactagaatatgtcttttggtgtagggtatatgtttttgtatatgtccttccagttttttcctatatgtagtattttgttttccctccacctttctttttagccaaacaatctattgtatggcactcttctgaaaaggtcaactgatgtgtgttcttcctgttagactgagttttttggggactggatccaggactcattcatctttacatcgccaggacccgggcagggagctcagtaaatgtttcttgagtgaatacaagcctcagtggatgggtggtgaatgagtgcatccccagtggggtgaagggtcctgggccagtcttctccaattccagcctcattatccctccctgataccacccccaagagccacatcccaaaccctcccctggcgctctcttgcatcccgactcccattcccaaccagatgcctctgttgcaccttcttgtcctgcaggtctgtggagagttcatagctgtccgatagggccttggagcgctttatctcctcctcctcctgcttcctcagggcgacactggctggctggaggcgtgcccgctgagcccagggaaggcccactccagcaggggggccccccatgtggctgctggaggggggcagctggctcagccggtaggggggttggctcccaggactatcaaccgctgtgctcaggtcactgcctggggcatcaccctccacactgtggggatgagataagatgagccaggatgtggggacaggacaggggcctactgggccatactgagagtgggtgagccagatccctgccccccatcccatccaccccagcttcctcacagatatagggacccaacacttacaggccacggtgagtcctagctcttggacgtctccccactcccacccaagtcccctcccttccagcccccctgcctttacggcaagatcctcttagactcctttccctcaaggctctgcctggtccccagtcctcctcacccctcacagccttctcccctagaccactctcctcccagtcttgtctcctcatgccctttcttctgccccctcacagctccacccctccccacagacctcttccccttacagctccatcccctcctggccttgtccccaacgcagtgctcgctgtgatttccctcccagtcygattcccagcaccaccccagactagctccttcaaagcgccaccccctcccagccctgtcccagctgtgtgaggcccacccctgcacacagctctcccctcatccgcccagccctgtcccctgcagcctggcccctgccccctggtgcctggactccgggccaggccaagccagttcccagggttccctggttgcgagggcagggccagcagcagggcagggcgagcagcaacagtgggaggcgcctcccatccagcatcctcacaggtaaagagcagcc

SEQ ID NO: 695068 - DNA, 436 bp, Homo sapiens
gagacagagtctcgctctgtcacccaggctggaggctggagtgcagtggcacgatctcggctcacgatctcagctcactgcaacctcctcctcccgagttcaagtgattacccggcctcagcctcccgagtaggtgggattacagttgcccgccaccacgcccagctaatttttgtatttttagtagagacggggtttcaccatgttggccaggayggtctcgaactcctgacctcaggtgatccacccgccttggcctcccaaagtgctaggattacaggcgtgagccaccgcgcccgggcctattttcattataaaataaacatgtcctctttccagaagatggaaaacagaaagttcgcccctattctctccactgtaaacatctaagcattgttatgtttccatctgttatatttttctatgtaaaatttga

SEQ ID NO: 695069 - DNA, 436 bp, Homo sapiens
gagacagagtctcgctctgtcacccaggctggaggctggagtgcagtggcacgatctcggctcacgatctcagctcactgcaacctcctcctcccgagttcaagtgattacccggcctcagcctcccgagtaggtgggattacagttgcccgccaccacgcccagctaatttttgtatttttagtagagacggggtttcaccatgttggccaggatggtctcgaactcctgacctcaggtgatccacccgccttggcctcccaaagtgctaggattacaggcgtgagccaccgcgcccgggcctattttcattataaaataaacatgtcctctttccagaagatggaaaacagaaagttcrcccctattctctccactgtaaacatctaagcattgttatgtttccatctgttatatttttctatgtaaaatttga

SEQ ID NO: 695070 - DNA, 1434 bp, Homo sapiens
tacgtatgtatttaaagaatttagacttgggtcttagaatcaggctctccctgaatccttcaactgcgagatataaatataagggaatgttggcaatcatggtctgctacatgaggaacagcggaagccaatctgcaataaaaaagatagtttagagagaaggagatgtgacagagagtcctggaaggttttgattgcattttctgaggtgtactgcaatttgccctaacctgccttgagaaacattttaatccttagaataaacgtatcctttggaataaattccacatttgataaagatagttcaaatttggtataagttatttgtagccaagtgtcctaattaatactcaagtaataagtagtttactgcttaacagtagaattagttctatttcatataatttttccatctctcattcagatgggaagttgctctccttcctcttgtaaggtcatgatgctctatatctgcaaactcaagggagaaaaagtctcttaacttgaaactatacaggaaaaaaaaaaaccctgatgtcatttctagtacttaattggtatttatctgccataaacacatgaagctgttttggtttgttcagttacccttgtctgcatagggccatttaaacccaaattggaattgtctctgggttactctcagtgataacaagaactttcaattcatgccaattataggaattcacaaacacagataggggtgaccaaggaatccaaccagaactttctgtttagtttcattagactcagacttaatgagaaaaaaaaatcattagcactgaaaaacttgtaagtcttgtttagtttcttgctgaaatttaaataatactgattgtgtctgtgatggaaactggtaaagaataaaatgaatatttaatttagtaaggtatacaaaacaaaacatgagagggagcatagctattcctaaatggaaaaataaattggtatactacaataggaagtatgatttccttttaatatgtttgttttatagaagttactaattgcagaaaccattttgatttaacatcatcaataaaatcaatgtgtgaacaatatcattacattcgaaagatgacatgtctaacaaaatggcactatcaatatatatgtatttaaagacagtctccctttaactttgctagacaccaaaagtttaaatgcacaatgccaagggcagttaagtgtcaaaatacaaatgtatcttaatattttatttaaggcttctattgttaaaaataatgcatctaacataataaagagggtatttgaaatttcatatttcaatatccccatggtttgccatagaagacaaatataartacatgcatgaaattgtgattttattttcttggttactttttggttacagctcatcactttgcattagtgcatacctccaaacctccaata

SEQ ID NO: 695071 - DNA, 617 bp, Homo sapiens
ttctcacctaagatgacagtttgaaatttatttattcactgttatttctcatattgaytaaaggaatctacttatagattagtattgtgatttaaagataaacagatatttttggtgcatgcatatatttgttatgcgaaagtgattccttatgtttttaagagaagcaacggagatttactactgaaaaatatatgagagcaaatatgattactttgtaaagggcattttaataacggttcttttaatccaagtagataaaatataaaatttatcaattttaaatatctctcagatgcattcatttactgaacattaactaatatgattatatttacaataattaaaaaaatagtcttttgcttggagaaaaacattttaatatatcaagattgatgatttttctgtccatttgacttaatactaatttccagtttaggggcaaaaagatcatttgtagaagcatgaattcagtgaagctgttttttaataatttttctccctaatcccttagtataaatctttggggacttttttctttgagtatttatatgtaaggcatgaagagtatcatttgcatttttatttgaaatgttctgacttttagatgaaaagag

SEQ ID NO: 695072 - DNA, 2303 bp, Homo sapiens
aatgggtaaatgcacaattttctaaggtaagaatggtttgttactttacttttaagatctaagttgtgaaattttcaaaatggactatgtacctgtgtatcttaaaaatccgttttatttctctcatagtgtcattttattttagctgtgcaaatctggaaatattatgttcactcttatttaaggagtaagcagcagaagatatggcaaagatacactatttaattatataaaatgtatatctttgattcttcttgacaatgtgagtttctttaatgacatgagtcctcagagtttatagctgcaatcttccatcaagtagctagaawatgtcacccagcagaagaagatatgagggaattttgttgtgaaaattatcatttttttgtccctcttggtctttaccaagttcaagaaaagcaatataattgctttgggtgtattcagccactatagtttagagcatatttcaaatgattaaagacaataagttcatcttgtttttgtgcaggcttcaatccatactcttaatatttacttaatttgcaaatacaactcaatttttaatcaatagcgtgactctagatgattataggtggacacagagcaagatattcttaccttgaaaactagtattaggaatgcaatatatggaggtttattgggatgtcaaagtttaaaagacttgcattttaattattattctcgatttgggtaaatcaatcaaatgtttggtgagtcggttttcttatgtttccatcatgaatgtttgtatatgtatatattgattgcttaattgagacatcaaatctagataatggaaaaataaagctaataaaatatggcccttaaacccaaggctttaagagtggcatagttttgatagtggatattttgtttcttattgtaatgatttaaagagtcactaaaagtgaaaatttctactaaaatgcctgaaactcttaatagctatgaattactccctctatgggtctgattttgtaaaattcatgataatggagccaaaacaatccactaggagatccaatctcaaaagttctcccttttctatgacaaacatttttagaatatcgtctattctttgtggtatttggtagtagaatgttgccatgtactctttaatttaacttactgaattttaactaataaaagttcattttatttacttgctgaataattaacaaatttctattacagacgtaaacagaaacatgtattttaaaaacgttttttaaatcctcaactttttttagctaagtgaaataaaatataacaacacaaatatagaagaataaataaaaagtaaacctaggatatttaggaaagttattcataattctccgaatatttataagatggttatatatagtttaattgctgtatatactggcatcattgacatttttaagttttggaattctgaagcagacaagagacatattttcaaacaaacatacagacaaatcagaattgtgaagaaattttctgaaatagtaaatgtaacaatactctgaatctttgaattgaactagagtaatttttaaaaggtgtgtaaacatgacaagtactgtgtatcctcattcccgcaagttgaaatagatcttcgctctgtgcattaaccttttccattatcatttatcacaactcacctgttaatatagaaatcaaagcttgatatccaatccatcctctatttatatattgttagcactgcctcagagcaattcggtatatttttttctgtccttatgaatgcccatatcttaaaactgtaaaatattcacatatatgagcacatttattgttttcttccaaaatatttgcatcctctaactcaactcacacttttcatttatattacaaatgttctccctaagtctgttataactgatcaggagagtcaccattctttcaagtacagaaattctattatcaagcatatcctaggtgtcaggaatagaaataaaagtttacaaagacagaggagaaaacttatttaaaggtaaaatgtatatatacctgtgcactaacttctaattttgagaacttgcaaagaatctttttcctcttttcttattcttttctgtcaaaacttagctaagtgactgcattcttttagacacttttgaagaagatgggaatttagaggaagctagttgattcagtttaagccacttggtgaaaccaaaagataaacataattgtgatatatatatcatttggcaatttattgcatcgctgcatgcctttcagcagaattctagccctgtaggatacacaga

SEQ ID NO: 695073 - DNA, 599 bp, Homo sapiens
tgcatgatctcacttctatgtggaatctaatagtcaaactcatagaaacagggtagaacagtggttaccaggcgtggggaggagaaggaagtgaggagaagtagtccaaggatacacacytgcagttatggaggatgagtcagcctagagttcagcttgaggactagagttaataataatgtactgcataccacaaattcgctctcagagtgaattttaggtgctcttaccccacacgaaaagggtaactgtggaaggtgggtggataaggtcatttgcttagctgtagtaatcacttcactatctacatgcatatcaaaaacatcatgttatacaccttaaatatatacaatttaagtatatatgtgtacaattctaactgatgtaatgaatctggaagtcctcaattaatatcaaataattaaaatattaaagatgatgcatttatcaagacagaatgggtacatggaaatgatataaaagaagaaaagatatatggaatacttacaatcagaaataatatccctgaataaaaacctgtatactacagcagaattttttctttttttgagatgagatctcactctgtcccccaggct

SEQ ID NO: 695074 - DNA, 626 bp, Homo sapiens
aaaggcttttgttttccttctgcaaaaattggaatgttattcttatgtctgttggctctgcctggggccctaatgcaagtgtagccattgcacattaacatcaagttcctgacagtgggcgcgaaggtgtacgatgattgccttgagaaatataagcagtgcacccaagtgtccaataggtgttgacttgcctttctaagccataggtttccatgatgtgtttggcctaaatgggagccttacatgtattacattttctatatttactaamgatccttttcactacaaacatcattagcatcgtatacaaatatttattgatgttcacttgcatccaaggcactgagacaaaacatagaattaatggttactgcctctaatatggttaccgtatagctcagaagagcagagggtaaaaggacaccggtgatttttcctagttcattttaaaactggagactctgacaccaggatggttgattcacctaaacttacaaaagcagggaaacgtatcaattaaaagaaataaaaagatcatgaagagcctccatgagattcttgttgcattgggaagctttggtagcaacacattgtcacttcagtgaaataaacataatattgcatta

SEQ ID NO: 695075 - DNA, 666 bp, Homo sapiens
aaagaaggataaagatagataagaagaatagagggtgataaagaaaggataaagaagggggtatgagctctggattggttggtttatatatgaagacatacatgcaggcaagttgtttatgtccaggaattagcttatcctgagagggacagtccctccaggggcaacaaggccctggatgtcaaagcatcaaattcagaaartaagagacatgactaatacaccattaaagtcaatattatcattaatattattcgacattatcctgaagtctctagccaatgcatacaacaaaaaaaacaataggatgaaaaacgatttgaatgaaaaagacttttaaattctcagatgatgtatctacttaaaatttaaaaacaaagtcaacctattaattatagaaaccaaaaactgtcctatatactatataccagtgatgctcaattataaaatgtagtataaaaagtgattcacaatagcaacaagaactacatgtctagaattgatagacaatttcaaagtctgtataaggaaagatgtaaatgtttattgcagataaaaaagaaaacatcaggaaggtaagagttataggccatcaccactctacctagttccaataaccacgattgaattaaacgacatgagttccccaacatggttctaatttca

SEQ ID NO: 695076 - DNA, 666 bp, Homo sapiens
aaagaaggataaagatagataagaagaatagagggtgataaagaaaggataaagaagggggtatgagctctggattggttggtttatatatgaagacatacatgcaggcaagttgtttatgtccaggaattagcttatcctgagagggacagtccctccaggggcaacaaggccctggatgtcaaagcatcaaattcagaaaataagagacatgactaatacaccattaaagtcaatattatcattaatattattcgacattatcctgaagtctctagccaatgcatacaacaaaaaaaacaataggatgaaaaacgatttgaatgaaaaagacttttaaattctcagatgatgtatctacttaaaatttaaaaacaaagtcaacctattaattatagaaaccaaaaactgtcctatatactatataccagtgatgctcaattataaaatgtagtataaaaagtgattcacaatagcaacaagaactacatgtctagaattgatagacaatttcaaagtctrtataaggaaagatgtaaatgtttattgcagataaaaaagaaaacatcaggaaggtaagagttataggccatcaccactctacctagttccaataaccacgattgaattaaacgacatgagttccccaacatggttctaatttca

SEQ ID NO: 695077 - DNA, 615 bp, Homo sapiens
gtggcagcagttactatataagacatagtcttaattatagttagagtgaattttctgttgaaatgcaaaatcagttcctggatcagggaccttagtgccctcccccatggcctcctgactccattttagttggatatggtatgaatgattccgttttgtctaatcaactttcacacctctctcaaacttacaccagcaaacacccactggggagtgtttgcttaagcaaaagttccttaagctgataaacaactttagcaaagtctcaggatacaaaatcaatgtacaaaaatcactagcattcctatacaccaataacagttaagccaagagccaaatcatgattgaactctcattcacaattgccacaaaaagaataaaatacctaggaatacagctaactagggaagcgaaggatctctataaggagaactacaaacyactgctcaaagaaatcagcgaagacacaaatggaaaaatattccatgcttatggattggaagaataaataccgttaaaatggccatattgcccaaagcaatttatagattcaatgctattcccattaaactaccattgaaattcttcatagagctagaaaaaaactattttaac

SEQ ID NO: 695078 - DNA, 2116 bp, Homo sapiens
tgctatgccataaacatgggctgaataagttaaatgaataaaggtagaggaggcctgtccaccacagatctttctattcctttccacaaagaagttgggcctgcccagactgatcagcagtactgtaatttgtgcatcccagttcacccctaacttcttctctcatacatggaagaaaatgcatatcagttagaatgcttcgggctgcaagtaactgaaaagtcaaccagcagtggcttaaacccaacacagatgttgttagttacttaatgagtaggcgattccagagtagatgcaatggctcagtgctgccatcaaaacctaggctttccccatcttttttttttttttttttttttgagaaggagttttgctcttgttgcccaggctggagtacaatggtgcaatcttggctcactgcaacctccgcctcccaggttcaagcgattatcctgcctcagcctcccgagtagctgggattacaggcatgcgccaccatgcccggctaattttttattttttttagtagagacgggtttcttcatgttgttcaggctggtctcaaactcccaaccttaggtgatctgcctgcctcagcctcccaaagtgctgggattacaggggtgagccaccgagcggtggccggttttccccctttctgccctgtcatcatcagtgtcttctgctacagcaacaaacattctctcaaaactgtgtccagcagaaagggccaaaaaggggttgggggagggcatttgtttgcaagattgaatttttaaaattaagtgactgtctgtagtgacctctaagagagtactcatgacataattttgtaattattttttacctgtgaacatgcctcacctccaccctccacagccagcttcttcatgaacagaaactgtattttaggactctgcttccccagtccctggcacagtctaggcacccacagtgttgacagaagagggggctctgaagggggccaagagtgaaaggtggggagggaccacaggtgagggaggggaggggtcctttgctagaaccagggaactcaaagggaaagtgggcatcagggtgctcatagcataggaaaggggaagtggtaagtctgaraaaaggtgggagagggttgcggcaaaccttggcacagtctggagagaaccgcagagaggaaaggaagggtgtagagcctgaggtttatgccaacacagcttcttcctttaggcttcataatatttcttccatctcactgggcattgtttcctcccagcaaggtgagtgtgtggctgtcacaatatccagaagtgtccaagtgcaagtgagccctggggtgggtgttactgatggctcctggaatagttggaggaacgaaagacttttaaatccacttcctttttcccacccatatggtctaatggaattgaatgcttaacaccaggcacttttttaaaaagtagggaggaggctgggtgcagtggctcatgcctgtaatcccagcactttgggaggccaaggcaggcagatcacctgaggtcgggagttcaagaccagcctgaccaacatggagaaaccccatttctactaaaaatacaaaaaaattagccaagcctggtggcaggtgcctgtaatcccagctactcaggaggctgaggcaggagaatcacttgaacccgggagacggagtttgtggtgagctgagatcatgccattgcactccagcctgggcaacaagagcaaaaaactctgtctcaaaaataaataaataaataaataaataaaattaaaaataaaaaggggagaggagaagctaaaatattgggggtgattaagaaagaatgaagtgtgccaggcacagtgattcaagcctacagtcctagcactctgggaagctgaggcaggcagatcacttaaactcaagagttcaagaccagcctggacaacatgatgaaaccccatctctatgaaaaatacaggtgtgtgcttgtagtcccagctacttgggaggctgaggtggggggagtgcttgagcctggaaagttgaagctgcagtgagccaagattgtgccactgcactccaggttggatgacagaaaaagacgctgtttaaaaaaaa

SEQ ID NO: 695079 - DNA, 588 bp, Homo sapiens
tggcagggattttactggaaatgaatgttttattctcttaatcattttctccctcatgccaggtctcactaatccagcttacagatagaactccatatttactaatccttttgtgtgtaacccatttttaaaaacagcatcaaactggacactcaaatgtcattatatacatgtgatattttatgcagaacagacttctaaaatgcagaaaakagtcttgattaaaatggaaaccttttaaataatcacagggtataaaattaaatggaataagtctgaagtaatgcaagtcaaccaaaacagctttaacgctgttttcctcatttccctctgctttgtcccctgaagagtataaaaattcttagcagtgtattaatggagtgctgagtgcccccctgagagtacccgacccctcctctccagagtcactggtgtaatcactgccgactgttcacactgtcagcattctttcctcgctgcctctgttcaggccattctcctttgaggcaggcatccctttcctttttcgaaataagggttctcaaccgtggggctgttgatattttggaccacgtggttttctagtgt

SEQ ID NO: 695080 - DNA, 992 bp, Homo sapiens
aggggccaaacagattcagcacattaaaatataggaccaaaacctaaccacactaacattccaagcacaggacttgcagctagatttaagctaccacatcacaaacaagtcatatatccagatggttttaagacctacaaacttcaaaaacttaggcaatggtctaaagacccaggagagggagtttccttcttgtattcatctgttctctcattgctataaagaattacctgagactggataatttataaagaaaagaagtttagttggctcacagttccacagactgtacaggaagcatggcaggggaggcctcaggaaacgtacaatcatggcagaaggggaaggggaagcaggcagcttctacatggctggagcagaggaagagagcaaagaaggaggtgtgcacacttatagacaaccagatcacatgagaactcactatcacaagaacaacaagggggaagtctgcccccacaattcaatcacctcccaccaggcccctcctccaacagacccgtcctttagttgtaatcctccaactggggattataattcaacatgagatatgggtggggacagagagccaaaccatatcactcccaaaacagcaggatgcaaggatacccaaggggggtttttctggggcatctcagcagtacrtgtgtcaacgccactctttcacattttttttttcattattccctccttactccccctcatttatctttttttttttcctactctcagtacccttaatcattatttaattctgctaagtaagggcagggcaaaagtcatcactgacccttatattggggggagggctagaacactacaaggaagttatgttttcatcattattgcattcactttaaattaatatctatagccttggattccagaatctgttttctagtcctagttcactctacctagttaatcaatactaagcaacatccactcttagaatttcaccgttcaatatcact

SEQ ID NO: 695081 - DNA, 602 bp, Homo sapiens
attcctcatttccagtgtgatggtatggcagcatccattcagtctgccaaagagggactgtgaatcataatttaagcaaatcatttgcaatctgcatgtacaggttactggcactctatttgaaaataatttaatcactgccatggagatcaaccaggaatcaattccagattcctatcaccagagtggtgctgtaagttactgcgttatgtgagtctcatgacagataaaatctactctagatagtttaacaagaaagaaatttaakagaagaaattaagtttaacattgttgggtgatatagtataatatccagaaatgactgtcagagcaatgcttccgaactgcctacctatgggagctataaactctaccacttctgaaaatgtaagaatgaaggagctatcatcacaacttcaattttctaggttacattgtcactgttggtacaaaataaatatctgcgtagggttttgtgaaccatctgcagtatttcttcatactagtttccaagaacaggaaacttagaaccagagaagtaaatttgtgagcagacactgtagaaatccaggaaaaaagatactaatatgaagaatattatt

SEQ ID NO: 695082 - DNA, 1479 bp, Homo sapiens
tgacatataaaatggagtaaagttagacatttattgtgctatgtccacgtcatatttagaaattacagagccctacttttaataggacaacatcagggattgtatctactaaagacagaaagcccttcccactataatcttttccttagagaattatgaatcatatgacccattgggatacctggaaatgatacattcctatattttagttcttattgtgtatactaaatagattttagagaataagattaaaaagaaagaaaggagttgtagagtattcactctaaccatgaaattagggtgatgtgtggaactgaaataaaagaaagaggagcatatgaactggaatgtagattactctaattccttcaatagcaagaatgcacaaaatgatgccaacactgactttctttattttatccatctcctgcaaatgagaaatacgctaaagaagatctttgaatcctgatcagtaagacataagaacaaagtaggagaagacattagaacatttgatcatattagaggaggtggacttcccagtatttctgtgaattctttataaatcagagggcttcacatcttctttcctgtgcatggtgtaattgtctagatgtgccaggatgaggctcatcattttacaagcacaatatataaacacatagggtagttagagtttttaatgtgaaaaataaattaacattatatcacataatttatgggaaatgtgcaatatattttattgactgcctgtagaacttggaaatatgattcatatgaatttgccatttcagcatgatgaattgattgtcacattgaggattatggaattagctggaagaacagatgattaaccaccacagcattttggctagtgaagttttaccttctgatttttgaacattaataaatcacacttcagcatatgggattattttggcaatagagtcacttatcaatttaatcatttcaaactagagtaatgtgtcagttgcaaatgctgcagacatgaaaaccagttcctgagaacaattgagtattattcttacagtcacattaattacagctgaaacaaaccttgaagagctaagaaaacttagcacaacttatctactatttacyagaaaaaaaagaaatcgatacggccattaattgcacaaatagcaataaatactttggctcctctccaggaagtgtaccaactgagagaatttttcatattgctggtttcattacacagatcgtagtcacagtaaaccgggcagtggactgctgttcaataaactaaatttaatgttactcaattatgatcatcgtgctcagatataatactaataggaacatcaaccgctattacattttcagatttatgtaaaataattcaaatgctatttgctgtccctcagatacaaggttcatccggttgtttatgcagttggttgatattgatcgtgcacagcaggtagcatagtagaggcc

SEQ ID NO: 695083 - DNA, 1479 bp, Homo sapiens
tgacatataaaatggagtaaagttagacatttattgtgctatgtccacgtcatatttagaaattacagagccctacttttaataggacaacatcagggattgtatctactaaagacagaaagcccttcccactataatcttttccttagagaattatgaatcatatgacccattgggatacctggaaatgatacattcctatattttagttcttattgtgtatactaaatagattttagagaataagattaaaaagaaagaaaggagttgtagagtattcactctaaccatgaaattagggtgatgtgtggaactgaaataaaagaaagaggagcatatgaactggaatgtagattactctaattccttcaatagcaagaatgcacaaaatgatgccaacactgactttctttattttatccatctcctgcaaatgagaaatacgctaaagaagatctttgaatcctgatcagtaagacataagaacaaagtaggagaagacattagaacatttgatcatattagaggaggtggacttcccagtatttctgtgaattctttataaatcagagggcttcacatcttctttcctgtgcatggtgtaattgtctagatgtgccaggatgaggctcatcattttacaagcacaatatataaacacatagggtagttagagtttttaatgtgaaaaataaattaacattatatcacataatttatgggaaatgtgcaatatattttattgactgcctgtagaacttggaaatatgattcatatgaatttgccatttcagcatgatgaattgattgtcacattgaggattatggaattagctggaagaacagatgattaaccaccacagcattttggctagtgaagttttaccttctgatttttgaacattaataaatcacacttcagcatatgggattattttggcaatagagtcacttatcaatttaatcatttcaaactagagtaatgtgtcagttgcaaatgctgcagacatgaaaaccagttcctgagaacaattgagtattattcttacagtcacattaattacagctgaaacaaaccttgaagagctaagaaaacttagcacaacttatctactatttaccagaaaaaaaagaaatcgatacggccattaattgcacaaatagcaataaatactttggctcctctccaggaagtgtaccaactgagagaatttttcataytgctggtttcattacacagatcgtagtcacagtaaaccgggcagtggactgctgttcaataaactaaatttaatgttactcaattatgatcatcgtgctcagatataatactaataggaacatcaaccgctattacattttcagatttatgtaaaataattcaaatgctatttgctgtccctcagatacaaggttcatccggttgtttatgcagttggttgatattgatcgtgcacagcaggtagcatagtagaggcc

SEQ ID NO: 695084 - DNA, 1479 bp, Homo sapiens
tgacatataaaatggagtaaagttagacatttattgtgctatgtccacgtcatatttagaaattacagagccctacttttaataggacaacatcagggattgtatctactaaagacagaaagcccttcccactataatcttttccttagagaattatgaatcatatgacccattgggatacctggaaatgatacattcctatattttagttcttattgtgtatactaaatagattttagagaataagattaaaaagaaagaaaggagttgtagagtattcactctaaccatgaaattagggtgatgtgtggaactgaaataaaagaaagaggagcatatgaactggaatgtagattactctaattccttcaatagcaagaatgcacaaaatgatgccaacactgactttctttattttatccatctcctgcaaatgagaaatacgctaaagaagatctttgaatcctgatcagtaagacataagaacaaagtaggagaagacattagaacatttgatcatattagaggaggtggacttcccagtatttctgtgaattctttataaatcagagggcttcacatcttctttcctgtgcatggtgtaattgtctagatgtgccaggatgaggctcatcattttacaagcacaatatataaacacatagggtagttagagtttttaatgtgaaaaataaattaacattatatcacataatttatgggaaatgtgcaatatattttattgactgcctgtagaacttggaaatatgattcatatgaatttgccatttcagcatgatgaattgattgtcacattgaggattatggaattagctggaagaacagatgattaaccaccacagcattttggctagtgaagttttaccttctgatttttgaacattaataaatcacacttcagcatatgggattattttggcaatagagtcacttatcaatttaatcatttcaaactagagtaatgtgtcagttgcaaatgctgcagacatgaaaaccagttcctgagaacaattgagtattattcttacagtcacattaattacagctgaaacaaaccttgaagagctaagaaaacttagcacaacttatctactatttaccagaaaaaaaagaaatcgatacggccattaattgcacaaatagcaataaatactttggctcctctccaggaagtgtaccaactgagagaatttttcatattgctggtttcattacacagatcgtagtcacagtaaaccgggcagtggactgctgttcaataaactaaatttaatgttactcaattatgatcatcgtgctcagatataatactaataggaacatcaaccgctattacattttcagatttatgtaaaataattcaaatgctatttgctgtccctcagatacaakgttcatccggttgtttatgcagttggttgatattgatcgtgcacagcaggtagcatagtagaggcc

SEQ ID NO: 695085 - DNA, 1674 bp, Homo sapiens
ggatccagactgacttactgaactataacacttccagaccaagttttaaaaatgcttttttttttgagacggagtttcgttcttgttgcccaggctggagtgcaatggcatgatctcagctcaccacaacctctgcctcccaggttcaagtgattctcctgcctcagcctcccgagtagctgggattacacgcattcgccactacacccagctaattttgtatttttagtagagacggggtttctccatgttggtcaagctggtctccaactcccaatttcaggtgatccgcctacctcagcctcccaaagtgctggggttacaggcatgagccaccgcgcctggccaaaaacactattttttgacaaaactcttcttttcctttattgagtatgccagccttctctctcttctcactctcctttttattcctcagccatcatggccttccctacagcaatgcagggtctccagggcaataatttcttcagcagaagagggaccaggcaatgcttaactccagcttatcttctcatggccatcaaaagtctccctgccccaagccctcagagccaacccaacaccacacacaaggcactcactgactgatgggtgaacggcaggcagcacaccccagctgctcccaaacaggggctgcaggtgctcatcagctgtttccacgtgctccctgcagcacattttctagccacagtcagccctctgcatccgtgggttttacatctgtagattcaaccaagtgcagatcaaaaatatctggggatagaaaaacaaagaacacaaattcaaaaaactaatgtagtataacaactacttgctagtatttacattgtattagatattagaagtaatctgagatgatttaaagtatacaggagaatgtgtgtaggttatatgcaaatactaccccattttatgaagggacttaagcatccatggattttggaatccttggggtcctggaaccaatccccttggtaccgagggatgactgtacacgtgcaccaatttggctctgagctcaatgcctaaacataatctcccagcattggactggccctttccaggtaggggataagggacaaataaaaaggcaaaggaaaggaatttgatgaaacaatgacccgaagagccatttttcagttcctgatgcagctgcttctttactcactrtatcgtcaagcctactatttaagctgctgctgtaatcgagccatggaaagatcaataaaaagaatagcatttctttgtcatggaacagcttagaggtgagtggtccagactgaagggaatctgctccaggacgaagtgcctttcgtcttgttgccctttctcagggtatggtctttgtgtacctggttaaagttgggctgccagtaggcagagaagacatgaaaagcaagcaatttctgtttaggcaagtgacataggagctgcactcatcacttcaattcacatttcactggcaagaaacttggcctgatagtcactcctaactgtaaggagtccaagaaatgtggtctctcaatgagtcatcttatacctagataaaattatatcatgatgaaaacaaaaaataaatttgggggaacagtcagcaatgtgctgaactctccaatttttcttcccatcccaagagtcaagtagcagtggctt

SEQ ID NO: 695086 - DNA, 1358 bp, Homo sapiens
ccttacatggtttcttttgtgagagtttcttttccgcaatgagattttgagcaatttatagaagagggttctgtcttttcttttgttgtagcccattttgcacttatgtaggtgactgaaccccatcttttgtcctctcaaagcctgtgtcttgtctgtgcacactgccttcactgaattcaacagggggacaaataagccacttctcagaaggcaagggaatgagctcctctcacttcaaggcaataaacctcttttatctgttgaactggtcaagctcttggaatgaatgaaagtctattattagagaaaagcccaaaagagttttaatgcttgattctttatatactgtgaaatagggctttcattcactttccctccactaatattttggcacaagagacctcatgaaggctacccgaccttaccccgaactacctcgttagcaacagtgtcctaggaatacattctattttctgaaagacttgttaagttcgtattaaaaaaaataataggccaggcacggtggctcacacctgtaatcccagcactttgggaggctgaggcaggtggatcatgaggtaaggagattgagaccatcctggccaacatggtgaaaccccatctctactaaaaatacaaaaattagctgggcatggtggtgcacacctgtagtcctagctacttgggacgatgagacaggagaatcgcttgaacccgggaggcggagatttcagtgagccaagatcgagccactgcactccagcctggggacagagcgagacttcatctcaaaaaaaaaaaaaaaaaaaaagaaatttgtttctgcagatggaggtggagggtagtgtcttctaaaaaagctccttgactcgtgatccctgaatttcttctcatttggttccctcctaactcatttcgctctcaaggacaagctgcctggggtgggtggggcgctaggcagcagagaatggaagcagtttctctagatcttctaggttacagcgacgcggtgggtctccacactgtgaagacttgacgaggacctggtgcctcttaccacttagctgagcttgagcaggctgtcactgtacagccccttacaaccaccactcctactgagccctcttcctgcttccttccatctctttgaggtggcttttaattatcccaagggtgaagcgctaaaatgggatgtcttaggcccctcttagttcttgataaaccatgaaatagaacacgtaaaaccgtgtcactaccgtgctactaaaaacctagccagaccaccttaagtggagtgactatggctaatatcttracttgatgtttaaaaaactgtgcgattgtgaagttttgat

SEQ ID NO: 695087 - DNA, 1294 bp, Homo sapiens
caggaggcttgattcaggtgctgcgggctatgaggcgagagcgcccatgccaggtttaaagcaagaacaattggatgcaaatcccccgcactgcttaacactctcaggtgttccaaacaagttcttatttcaaaatgggcatggctttatttctaaagatgcctatttctgcaaagaaaaggaaagagagcaccttgttatttacaagtcaatgaaaaaaaaagcacaacatcttagayagtttcctgcaaaaggctgctgtaagggagatgggataatgccttcgacagtggattaatctcaggagcagcccttgatgacagtctctagagtgaccatgtgcttccggactctcccaggcagtccccaggttcaaatatccttccctttgtcagaccatatgtcccatttttttggtttgtaaaacatggatacatactcacaaaaaagaaatatttttgaaaccaacaacaaaggatgggaatgtaagtatatttcttgattatggatctgccatggctgaatttcggatttgggagaaaaagagctaggcactgataagaatcttaaattcaatcaacgttatgtgttctctaattgacaaggtgatgtctgtaaggaaatgagatcgattccagtgcctctgggcctctgtgagatagcctagaagtccagctccacagtgacaggggttatcaagagaaaggaggctgtcgggctgcgttcatttctgctattcccttccttgaacccatttaaaggtgtgcttgtcatgctgggctctgagtggagagggtcagggaagcggagatagcactggacttctgccccaggggagcatgcaagggaaagagggctcaacattttgctaggccaatgctgctgtggtagtgcgactgtaccacaggtccacgaacccatttcctgccaaactctcagtcatgccacagtgactagtaacaagaacgaaagaacaaaaggaaaagaaaaaaaaaatctcatcgacagatgactgatgtgtcctgacactgaagactcagaagtagctggagtgtctagaagtccacttactgccattttctgtgtgctggctttgcctgttatggttattttgggaggcggagggtgttggggggcagaaaagcccagctcattcttaaagagtcctctagatgagtcctcagttagcctcatctcctgtgggagtgaggcattaaattaaggaaaacaagtggactgtcatgaatcactgagattaaggctaactcatagttaccaagagatagcacagtgt

SEQ ID NO: 695088 - DNA, 1294 bp, Homo sapiens
caggaggcttgattcaggtgctgcgggctatgaggcgagagcgcccatgccaggtttaaagcaagaacaattggatgcaaatcccccgcactgcttaacactctcaggtgttccaaacaagttcttatttcaaaatgggcatggctttatttctaaagatgcctatttctgcaaagaaaaggaaagagagcaccttgttatttacaagtcaatgaaaaaaaaagcacaacatcttagacagtttcctgcaaaaggctgctgtaagggagatgggataatgccttcgacagtggattaatctcaggagcagcccttgatgacagtctctagagtgaccatgtgcttccggactctcccaggcagtccccaggttcaaatatccttccctttgtcagaccatatgtcccatttttttggtttgtaaaacatggatacatactcacaaaaaagaaatatttttgaaaccaacaacaaaggatgggaatgtaagtatatttcttgattatggatctgccatggctgaatttcggatttgggagaaaaagagctaggcactgataagaatcttaaattcaatcaacgttatgtgttctctaattgacaaggtgatgtctgtaaggaaatgagatcgattccagtgcctctgggcctctgtgagatagcctagaagtccagctccacagtgacaggggttatcaagagaaaggaggctgtcgggctgcgttcatttctgctattcccttccttgaacccatttaaaggtgtgcttgtcatgctgggctctgagtggagagggtcagggaagcggagatagcactggacttctgccccaggggagcatgcaagggaaagagggctcaacattttgctaggccaatgctgctgtggtagtgcgactgtaccacaggtccacgaacccatttcctgccaaactctcagtcatgccacagtgactagtaacaagaacgaaagaacaaaaggaaaagaaaaaaaaaatctcatcgacagatgactgatgtgtcctgacactgaagactcagaagtagctggagtgtctagaagtccacttactgccattttctgtgtgctggctttgcctgttatggttattttgggaggcggagggtgttggggggcagawaagcccagctcattcttaaagagtcctctagatgagtcctcagttagcctcatctcctgtgggagtgaggcattaaattaaggaaaacaagtggactgtcatgaatcactgagattaaggctaactcatagttaccaagagatagcacagtgt

SEQ ID NO: 695089 - DNA, 317 bp, Homo sapiens
gggtgtttaaacagggcctgaagcaaggttttgccaacctttcagaggctgcataacaaatattttttatttgctccgtcaggtgttggagttagctatagcctcctgaaggtcatctctgagccttcactccctgttacycacaccaacctttatgagtcccctatgaaaataaaatcaccctaggagggatcatactaagctataatcagttaataccttgcttttcaattaacactctagcagggattatttgaaagtcgtctgagaacagaaatagaggtaggctggcacttggaaagcctggttagaataag

SEQ ID NO: 695090 - DNA, 1342 bp, Homo sapiens
aaaaaaaaaagctgtgagccagagttctggaagacttcatgtggatatagttgctgcccagcatgaaggcagtacatgaggagaagaaacagtgagtttgtatccaagccattaacgagtacaggggggaaaggtgggaggttcaaagacaaaattaagaggtatggaaggaagtatatattgttggcacragtcttaataaaagaaggttttttgccccaggacagaggagtaatcatctgccaattgtaatggcgagctaggagaccatgcagtccacagctcgtgatacatgggtgtagaagaatcagcctcttccatagaggttgcagcagttattgtgctctggggagagcctggagatggagttttgtgaaatggttgaggatataagtcaggttatttacagtggaatgggggtctctgaggagggaagtcagcagtgtgagaaacatccgagtggaatgaaaataatgaatgataataatgcatgtccagcaccatgccaagggtgtgagatatttattttatttaatcattacactaattctgcaatgtaggtgctatctgtcttttgcatattaataaactgacactgagagcatttagaaactcctctaaagtggtgtatctaaaaagtgactgagttcaagacctggtctcttaaccactaacccagattggaatgagaggatgcaagaggagaaggtgccatggagctaccattttgggaaagggcctctgatgacaggatgggagacatcatggatctaaccaactgtaagaacctaggcatgtgtttattggatctgctggatggcagaagcccctgatcagaatcagctgcctatcctgagagttccagatggaatgtgtttggaggaacatattcaaggcttctcacaaatggctctaatccttcctatatttaagcattcagttcacaaagactcctcaagaagaatatccagagaagctcttgttggccaaggctctctattgggaagtatacttgggaattgcttatcaaaggtaatccctgctccatgtcatcaatgggatgttagaagtgtcttttttatcatggcttttgacaaagccaggaattcagtactaagtaaatagagataatcaaggatctgctctccaagctctggaattagcaacaacaggactgaagagacaaggagtgattcttcgggttattttctctccctttctcctaccactagttgtgtccctcccatagccttctgctttctaggttttgccagctgtggtgagagatttgctgatactcattcagattcctttggattgctcttactgtttctgcacattt

SEQ ID NO: 695091 - DNA, 619 bp, Homo sapiens
tcaccgttttacaaattctcttaagtttcaaagatgacaatgctggcttaggtcatttcttgttctgcagtgcgatgattatttttcctgtgccatggtgagttgaggttgactctggctatgagaatgcctgccggccaggtttctgatggaataaattattattgaataatgaacaataataagaatattacttactgtctgcgtagtacttacaggaagcagtgatgtctatactgccagatggctctcyggctggagacacttctatcttccaggaaggtgagctgctggaggccgccagctgaatctctccccaggaattgctctcaccccaaggagtcatcttttccaaggtatatgcccctccctggggtgcaccaaatctcatggctgttcccagcgaggtctcaaggcctaggcaccttgcctcaaatgtgtacgggctcccagctccagagcacccgaatgaccagcacaggtctcacttgcagctgcaccacagctaggcatccgccctgcccatcgggcccctccctcccttaggtaagttactcttgagggtacccaccaggatatctgcttcccagaacctgcttcctgggagcccgccctacgc

SEQ ID NO: 695092 - DNA, 619 bp, Homo sapiens
tcaccgttttacaaattctcttaagtttcaaagatgacaatgctggcttaggtcatttcttgttctgcagtgcgatgattatttttcctgtgccatggtgagttgaggttgactctggctatgagaatgcctgccggccaggtttctgatggaataaattattattgaataatgaacaataataagaatattacttactgtctgcgtagtacttacaggaagcagtgatgtctatactgccagatggctctctggctggagacacttctatcttccaggaaggtgagctgctggaggccgccagctgaatctctccccaggaattgctctcaccccaaggagtcatcttttccaaggtatatgcccctccctggggygcaccaaatctcatggctgttcccagcgaggtctcaaggcctaggcaccttgcctcaaatgtgtacgggctcccagctccagagcacccgaatgaccagcacaggtctcacttgcagctgcaccacagctaggcatccgccctgcccatcgggcccctccctcccttaggtaagttactcttgagggtacccaccaggatatctgcttcccagaacctgcttcctgggagcccgccctacgc

SEQ ID NO: 695093 - DNA, 778 bp, Homo sapiens
tgaggtgacggggagaaaagggagatgaagttgtggcaaagagcatttacgaatacgtttccttggttcttagttgctgcctaaactgctgctgtactctccaaacacaaaaccgcgtcgtgggaaggtggagatgtggctgcttctgcagcatcccgtgttagagaaacagagcctgagaatgagacacatcattgtcaaaagaagcttcttcttttcttcacacaagggatgattagatgcttagtatctgttgcaaaaactgagaaaatcaaaacttctaaaaatttcctttcaaatttctttatgatccaagatgatacctaattgcataytttccaaacattcatttttccaaaagtagaatgggtgaaattccttatgaaagaaaccctcaatagtctgtttttttttgttttgttttgtttttcatttctagttttaggctacagtgataacgtaggaccctttttaaaaaaaattaagaccaaagccgggcgctgtggctcacgcctataatcccagcactttgggaggccgaggcgggtggatcacaaggtgaggagattgataccatcctggctaacacggtgaaaccccgtctgtactaaaaatacaaaaaattagccgggcgtggggtgggcacctgtactcgggaggctgaggcaggagaatcccttgaatccggcaggtggaggttgcagtgagtagagattgtgccactgcactccagcctaggcaatagagcaagaatcggtcttaaaaataaataaaaaca

SEQ ID NO: 695094 - DNA, 778 bp, Homo sapiens
tgaggtgacggggagaaaagggagatgaagttgtggcaaagagcatttacgaatacgtttccttggttcttagttgctgcctaaactgctgctgtactctccaaacacaaaaccgcgtcgtgggaaggtggagatgtggctgcttctgcagcatcccgtgttagagaaacagagcctgagaatgagacacatcattgtcaaaagaagcttcttcttttcttcacacaagggatgattagatgcttagtatctgttgcaaaaactgagaaaatcaaaacttctaaaaatttcctttcaaatttctttatgatccaagatgatacctaattgcatattttccaaacattcatttttccaaaagtagaatgggtgaaattccttatgaaagaaaccctcaatagtctgtttttttttgttttgttttgtttttcatttctagttttaggctacagtgataacgtaggaccctttttaaaaaaaattaagaccaaagccgggcgctgtggctcacgcctataatcccagcactttgggaggccgaggcgggtggatcacaaggtgaggagattgataccatcctggctaacacggtgaaaccccgtctgtactaaaaatacaaaaaattagccrggcgtggggtgggcacctgtactcgggaggctgaggcaggagaatcccttgaatccggcaggtggaggttgcagtgagtagagattgtgccactgcactccagcctaggcaatagagcaagaatcggtcttaaaaataaataaaaaca

SEQ ID NO: 695095 - DNA, 1158 bp, Homo sapiens
gagcaggtgccctcaattggggacttgatacagtttggccgtgtcctcacccaaatatcatcttgaattgtagctcccataattcccatgtgttttgagaaggacctgttgggagataattaagtgatggggccagtttcccccataatgtttttgtttggacactatgatcagagagaactgatgacttctacaacagtctgctcttcagctcaatattccaccaccaacagaccttgggttttggggagttaatggggcactcagatgattgctgatggaaactccaggggaagtaagggtggggaagaagtgtagcttgtaaaagatttcccatcttttagtcctmaactttcaactgggggaagaatattacattttaaatccaacccacagaaaggaaaattcatcaaaatctccaagccgaatgggatctgcgaccctttccatgaagactgatcagataggcctggcgcagctttctgctctgctcccaagagctgtgcaatgtgtggtccttgggccattcctgctgcataaatgtgcattctttgtattggaacccagagtgtaggaactagtcgctttgacagagaatgaggctggccctgcatccatgttagacattgctatccttttcttaaggtttcttcattgttacatagtacatcttgggaaaggaaacagaaagctaactgcagtgttaattcttggaactggcatgaaaacgaagaggagaagtgacacagcgaaagagcttacgtttgggaatcaaagacctggattcattttctacctctgtacttgcaggatttgtgcaagattttgaccaattacttaacgcatctgagccccaaggatcctgaccataaaatgaggctacttcttcctacctctggacaatgtacggattggctggggggcagaagaaattgccctggatgtcctctttcctttctggtgcctatcttccccaccagcaaactcggcggcctggacctccaaatgtatcctgactccgagctgggtgatttctttttcttccgagccacaaccatctccattctggacggcatccatgtgctccgaaagctctcctgcttcctctcagacttcccaaccatctcttccccagggcacccgtgggatccaacggca

SEQ ID NO: 695096 - DNA, 635 bp, Homo sapiens
gcattcaatacaagaagcgtgaactatcagtataattgttaactgaaagagaaaaagagagccctgaggtgctgtgcaggtagcaatcacaagaaacagctgtcaccctcagggcagcaggacaaagggaagtggtggaaattattgatgcttagccacatagagaagggaccctacaggtctgaagtggaggtgctccctggtgcggtcagtatctctgagctcagagcaggggctctgggaggaggtccctgtgactgcagctggggtcatgggaacgggtgtgtaataaaggtggttttggaaggataagctccatactggagccagctcctgcccagaggaagcagtgtgaccagtgtgatggccacagaagcagaggccaagaagccccaggaagcaaacatgaaggacccagagcccttcttcctcctccagcttgtgggcccatctggtgccctgtactgcaggcagcttgcaggtcccagctttggcatcctagatcccaaggtggaagggaggtcgtggagctgacagcaagctaacagaatccccaaacacacggatgtgttttcctttgattgaatcataagggccagtctctttcacacttcgaaacctrtgactacatatcg

SEQ ID NO: 695097 - DNA, 629 bp, Homo sapiens
ttgttttatcattcagaggccgctcgacatctggcagtggctcaggctgcctccttctaggccatgatgagcactggttcaccttgcagcttcactacctccacacatgacccagagtccagcacatcaggggaaaaaggggagtaaggagcccacagatgcggtcagtggctccacgcagaagcagcacatgttggctcctcagtgtacttattgaccagagctcctcacactccctggcaggatccttgtgggcttcaggaaactgcatgcccagccccgccccaccaccccccaacctgatcttctctccttcaccgacaccaccaagaagtccttgggagctggattttagaaacaggctagtcytcccctccgttcacagatgatgacatttctacccaaccatttaaatgactgtgtgaaattcacacatggaattaatgtcatgccgccacgttttcacaatgtgtggtgttctcctagtgtccctgatgcttgaagaccctggcatcgagttccctgggtcaccagcagcagtcgtttaagagcagagcaatggcacccgctctgcaacccagtggccgcactctcacagactgggtgaacatcctgcctgcagctccaca

SEQ ID NO: 695098 - DNA, 629 bp, Homo sapiens
ttgttttatcattcagaggccgctcgacatctggcagtggctcaggctgcctccttctaggccatgatgagcactggttcaccttgcagcttcactacctccacacatgacccagagtccagcacatcaggggaaaaaggggagtaaggagcccacagatgcggtcagtggctccacgcagaagcagcacatgttggctcctcagtgtacttattgaccagagctcctcacactccctggcaggatccttgtgggcttcaggaaactgcatgcccagccccgccccaccaccccccaacctgatcttctctccttcaccgacaccaccaagaagtccttgggagctggattttagaaacaggctagtcctcccctccgttcacagatgatgacatttctacccaaccatttaaatgactgtgtgaaattcacacatggaattaatgtcatgccgccacgttttcacaatgtgtggtgttctcctagtgtccctgatgcttgaagaccctggcatcgagttccctgggtcaccagcagcagtcstttaagagcagagcaatggcacccgctctgcaacccagtggccgcactctcacagactgggtgaacatcctgcctgcagctccaca

SEQ ID NO: 695099 - DNA, 3383 bp, Homo sapiens
cagtgtctctacgtactgtgatggtgggggtcagggcttcggcaatgaatgttacactgccacaactccattcatattagatttgcggtctcaacaaaagtctgaaaatggtgtctaaagaaacaaatagaggagaatctaaagccttggccagaacctgtaggaaagggctttaagtttctcttttcaattcagataacgatagtgtcacccccacatctagagtttgagttgttcctcagaaacagccatcatatgttagttgtggacctttttaaaaaaaaaaaaaaaagattgatacaaaagagatcaccaaggtctcagatgcccttttgctgtgaccaacagactaaaatatttctttccctagcactcatttcctttatcttacttgtaattttattttcccctgatggcactttatgctctcttcatatatatatatttttatatataatttaatttataattatgttttaattatatataattattatatataaattatatacaatttaattatatataaattatatataattttattttatttatgtattatatataatataatacattatatatttaattttctctattacattttttgcatactrtctctgaggcaaatctctctctacccttatctgctgagcttgactcctttgaagcaatgtagagattcaagagagaattgactaataaatctgattttgtagacatgaaatgtaaaattaaatgtgagtatagttattctccttccagtagcctagctgatccattaatatcaagaatcacagacagtagaggtaaacttttggctccttgtgatattaaaacaagccagcaaacagagcacatattcattacaattgttgatttttttcagcaatttttattccattagttcctctaacttgctcatatgcacaattcaaataaattccagatttagtaaaactagttcaattttataaaatgttataaagcaaatcatgtcacaacttcatagttattgtgttatctatgcctttacaccataatacacatttaaaatcaaaacatttcttgtctgctaaattgtgaaatttgtttaaattttaatactcctgttcatgatagaataaaattagcacaattttgccggaaggattaattggtaatttttttagaaggaaatggtggttaaaaaaaaaaatcagaagccctaagtatttaaaatccatttggtccaataattttattgatagaaagcttgtcttggaaaataataataataatatgtaaacaaaagtgtttagcacaaatatgctaatagcatcatcatttatatttgtgaaaattttaaaacaaataggctacaatacggttttaatgaagtaaagactcctgcagctacactgacagaatataatgtaaccaccaagaaagatgtcaataaaaaagagttacaacatgaaacatacttattctatgatgcttacttactatgtagtactttgaaaattggctgtacctgtgttcccacagagctaacagggagagcaagagaaagatctagtggcagatggggagcaaatgacccatggagctgagtgtcctgggaacctcgagcatcaggggctctgagggacaagcggacaccagaaagacagcggagagtttcacgcatcccctgggacactggagaatccttgattaagaccctctgggcctaccctgttctggaagcggcactgctccagcgcacttcctgaccacacgtcagacgcctgcaaagcaataacggttttagaaaagaattcaacatgcgtgtggagtcctaacgggggaaagggagttaggctagtgggacagaggaaagcaaaacgagaaggcagataagctataactctgcctttcttcatggtccaggatacagagccctcctgcacaaataactcacaattttgctgtgcccaattcttcccagacacctacctgcaagttagttcactgcaaccttggcgttgttagtactgcacaaagccctctatagcacacaacataaacactattctataaaatccccagcaagtctttgttttcttgcagtcacctccgttttgctggtctgcttgttttgtttttgtttgtttgtttgtttttgcaatggattttcatattttttctaataaatttgccctatatttacaaaaaaataaattaaaaaataaaataatgcgacaaagcacaatgcatttctttcattttctgcccacatgggacactgggttatcagctctgtttaccaaggcttgaaacactctttaaccaggaactttaggaaaatcccaagatgctttgaacattattggtcccaaactttgaaagagcatcatctttgtaaggttgcagtgatggaagtatctgagttcctttggctgctttaacaaaagaccatagactgggtggcttgtacacaacaggattttattcctcaagttctggaggctgggagactgtgatcagggtgcaggcatggtcaggctctgatgaaggctttcttcccagctgccaagtggccaccttctccctgtgtccttacatggtggaaggggtgagggatctctctggggtctctttgtaagagacccactttttagagacccattaatcccactttaccctgatgacctcatcttctcccaaagccccacactacctcttactaccaacatttcatctacgtggttaggattttaacatatgaactggggaggtggggaaaccagcttatgaccaccttagaatctgagcctttattctgtctttgtgtatgggtgagggtgtggccagaggcagaggtgctgtggggtccttttcactgttaattaaaattaatacggtaacctctgcttcactgcactctgacattttctgtgaaatgcaaaataatatctcccagggttctggttaattaagtgatgtcaacataggacagaaaaattacttagaaaaaaaaataggctccaagaataaaatgtcaacaggttgactgtgagtgtgttagcttgaaagtatttattttcttctttaaaagaaactctgcatattccagattggttttagtgatcatgcacctatttatatagaaaaaccattgtttttcctaaacaataatgtctaaccatgccctgatttttgggtggtgtactgtcataactggatgcagatgttcctcactaactttccttcctctgacagttacggagttatgagagaggagagatgtttgtgtacatttgaaattacaagtataaaaatccatcatgtgtatacctgggtccaatgcactctgcagaaagacgtgaggatggattcccctggccactcactcatgc

SEQ ID NO: 695100 - DNA, 3383 bp, Homo sapiens
cagtgtctctacgtactgtgatggtgggggtcagggcttcggcaatgaatgttacactgccacaactccattcatattagatttgcggtctcaacaaaagtctgaaaatggtgtctaaagaaacaaatagaggagaatctaaagccttggccagaacctgtaggaaagggctttaagtttctcttttcaattcagataacgatagtgtcacccccacatctagagtttgagttgttcctcagaaacagccatcatatgttagttgtggacctttttaaaaaaaaaaaaaaaagattgatacaaaagagatcaccaaggtctcagatgcccttttgctgtgaccaacagactaaaatatttctttccctagcactcatttcctttatcttacttgtaattttattttcccctgatggcactttatgctctcttcatatatatatatttttatatataatttaatttataattatgttttaattatatataattattatatataaattatatacaatttaattatatataaattatatataattttattttatttatgtattatatataatataatacattatatatttaattttctctattacattttttgcatactgtctctgaggcaaatctctctctacccttatctgctgagcttgactcctttgaagcaatgtagagattcaagagagaattgactaataaatctgattttgtagacatgaaatgtaaaattaaatgtgagtatagttattctccttccagtagcctagctgatccattaatatcaagaatcacagacagtagaggtaaacttttgrctccttgtgatattaaaacaagccagcaaacagagcacatattcattacaattgttgatttttttcagcaatttttattccattagttcctctaacttgctcatatgcacaattcaaataaattccagatttagtaaaactagttcaattttataaaatgttataaagcaaatcatgtcacaacttcatagttattgtgttatctatgcctttacaccataatacacatttaaaatcaaaacatttcttgtctgctaaattgtgaaatttgtttaaattttaatactcctgttcatgatagaataaaattagcacaattttgccggaaggattaattggtaatttttttagaaggaaatggtggttaaaaaaaaaaatcagaagccctaagtatttaaaatccatttggtccaataattttattgatagaaagcttgtcttggaaaataataataataatatgtaaacaaaagtgtttagcacaaatatgctaatagcatcatcatttatatttgtgaaaattttaaaacaaataggctacaatacggttttaatgaagtaaagactcctgcagctacactgacagaatataatgtaaccaccaagaaagatgtcaataaaaaagagttacaacatgaaacatacttattctatgatgcttacttactatgtagtactttgaaaattggctgtacctgtgttcccacagagctaacagggagagcaagagaaagatctagtggcagatggggagcaaatgacccatggagctgagtgtcctgggaacctcgagcatcaggggctctgagggacaagcggacaccagaaagacagcggagagtttcacgcatcccctgggacactggagaatccttgattaagaccctctgggcctaccctgttctggaagcggcactgctccagcgcacttcctgaccacacgtcagacgcctgcaaagcaataacggttttagaaaagaattcaacatgcgtgtggagtcctaacgggggaaagggagttaggctagtgggacagaggaaagcaaaacgagaaggcagataagctataactctgcctttcttcatggtccaggatacagagccctcctgcacaaataactcacaattttgctgtgcccaattcttcccagacacctacctgcaagttagttcactgcaaccttggcgttgttagtactgcacaaagccctctatagcacacaacataaacactattctataaaatccccagcaagtctttgttttcttgcagtcacctccgttttgctggtctgcttgttttgtttttgtttgtttgtttgtttttgcaatggattttcatattttttctaataaatttgccctatatttacaaaaaaataaattaaaaaataaaataatgcgacaaagcacaatgcatttctttcattttctgcccacatgggacactgggttatcagctctgtttaccaaggcttgaaacactctttaaccaggaactttaggaaaatcccaagatgctttgaacattattggtcccaaactttgaaagagcatcatctttgtaaggttgcagtgatggaagtatctgagttcctttggctgctttaacaaaagaccatagactgggtggcttgtacacaacaggattttattcctcaagttctggaggctgggagactgtgatcagggtgcaggcatggtcaggctctgatgaaggctttcttcccagctgccaagtggccaccttctccctgtgtccttacatggtggaaggggtgagggatctctctggggtctctttgtaagagacccactttttagagacccattaatcccactttaccctgatgacctcatcttctcccaaagccccacactacctcttactaccaacatttcatctacgtggttaggattttaacatatgaactggggaggtggggaaaccagcttatgaccaccttagaatctgagcctttattctgtctttgtgtatgggtgagggtgtggccagaggcagaggtgctgtggggtccttttcactgttaattaaaattaatacggtaacctctgcttcactgcactctgacattttctgtgaaatgcaaaataatatctcccagggttctggttaattaagtgatgtcaacataggacagaaaaattacttagaaaaaaaaataggctccaagaataaaatgtcaacaggttgactgtgagtgtgttagcttgaaagtatttattttcttctttaaaagaaactctgcatattccagattggttttagtgatcatgcacctatttatatagaaaaaccattgtttttcctaaacaataatgtctaaccatgccctgatttttgggtggtgtactgtcataactggatgcagatgttcctcactaactttccttcctctgacagttacggagttatgagagaggagagatgtttgtgtacatttgaaattacaagtataaaaatccatcatgtgtatacctgggtccaatgcactctgcagaaagacgtgaggatggattcccctggccactcactcatgc

SEQ ID NO: 695101 - DNA, 1138 bp, Homo sapiens
tctccaagcagctatataaggtggctcaagtaacattatgatttattttggtctaagccctttcataacgtccttttaaaatacaaagagaatggctacgaaatggtgccagaacccagaaggcccagctggactgacaggagctctgagcagttcataggacaagcagggacccgccgaacctctcccgtttctgtgctttctctaaatgcagcaggtcctctctttactgcccatgcttttaaactatgaaaaaaaattttttaaagaaatctagcagtgattaatggagacctcaaataacactgtacatgggctttgttagagacaggtaatcattcttaacagctcttttcccagaggaggcctgggtgggccgagaggcatccagagtttaggaagtgcttttattgcagactgcaccttggctaatactatcctctatgtactggctgcctgtgtcactcctgctgaggactgtggaggggatgcgagagggacgcctctctgggttctcctgagagaagcagcagatcatcttcttcatggtgccatacatgtcctcgtccttgtaggagtagatgatggggttcacgacggagttgagcagcgccagcagcaggaaccaccttttcacatgctgcacgccacactgcctgcagttcaggccgtcgaggagcagaaccaccaggcccggggtccagcataccacaaacgcccctgcaaggagagaagaggaggcaacagatgctcagaccttaggggacttattcaggttttcttctctcccagcctttagccagtggcatcaaggggccctcatgatttgttttgacaactgcaaggcaaacttccacctaccatctgagcatttgagacctacgcttggtacaggcaaataggtgggaacctccttgactatcaatcacatttcatttcactttcttttctgcttacccaggtcttgtgattatgagagactcacatttacattctgcttaggaggcagtgcacatgcatgatctcygttagttctctgaaccacactgggaggctttgttgcactcattatccacattggacagataagaaaaccaaggcccaattctagggggagatgagaggagaactctctgac

SEQ ID NO: 695102 - DNA, 616 bp, Homo sapiens
tttcttagtcccttggaaaagcaaaaccaagcagaactctgagtctgttcctcatgaataccaaaataagattaaattcaacatctaaggactttcaataagaaagaagccagaaggattcaaccatcagggaayagccgaccaaaggcattagaaaattggaaaccagaaatgagaaaccaggagccgtgagatgtgctgaattacccaggagagtggggctagacctcgctttgatggcagcatattcttcctgtttttatgtgaacaaaactgagtaattgtctccccatcgcaatcacagcagccagtaatgaacgagaaacattgggctcaaccagaacacccgtgtctacctacacagcccaaagtgggaggaaagagactttgaagatatcactttcagctgcacataaagatggcccgtgttcactcaggcaaaggtgtgagccatccaggacagcgcaatttctgtatgtcaacagaataattagcttctgcggctgccttgtgtaattgggtctccccaaaagatacattgaagtcctgatcctccagacccgtgaatgtgatcttatttggaaataggggtctttgaccaggttaaggtgaggtc

SEQ ID NO: 695103 - DNA, 616 bp, Homo sapiens
tttcttagtcccttggaaaagcaaaaccaagcagaactctgagtctgttcctcatgaataccaaaataagattaaattcaacatctaaggactttcaataagaaagaagccagaaggattcaaccatcagggaacagccgaccaaaggcattagaaaattggaaaccagaaatgagaaaccaggagccgtgagatgtgctgaattacccaggagagtggggctagacctcgctttgatggcagcatattcttcctgtttttaygtgaacaaaactgagtaattgtctccccatcgcaatcacagcagccagtaatgaacgagaaacattgggctcaaccagaacacccgtgtctacctacacagcccaaagtgggaggaaagagactttgaagatatcactttcagctgcacataaagatggcccgtgttcactcaggcaaaggtgtgagccatccaggacagcgcaatttctgtatgtcaacagaataattagcttctgcggctgccttgtgtaattgggtctccccaaaagatacattgaagtcctgatcctccagacccgtgaatgtgatcttatttggaaataggggtctttgaccaggttaaggtgaggtc

SEQ ID NO: 695104 - DNA, 660 bp, Homo sapiens
cgttgtgtttctccaccatcctgaattctgcgttgtgtttctccaccatcctgaattctgcgttgtgtttctccaccatcctgaattctgcgttgtgtttctccaccatcctgaattctgcgttgtgtttctccaccatcctgaattctgcgttgtgtttctccaccatcctgaattctgcgttgtgtttctccaccatcctgaattctgcgttgtgtttctccaccatcctgaattctgcgttgtgtttctccaccatcctgaattctgcgttgtgtttctccaccatcctgaattctgcgttgtgtttctycaccatcctgaattctgcgttgtgtttctccaccatcctgaattctgcgttgtgtttctttaccatcctgaattatgcgttgtgtttctccaccatcctgaatcatgcgttgtgcttcttcgccatcctgcattctgctttgtgttttttcacagtgttgtcttctgttttacttacttgtgtgtttcgtctgttgtttttctctccagtggtacctgctttgtgagtccgttttcttcactgatatatccagttgtccacagtagacacctgataaatatttacttgtggaatgaatgaataatgaatgaatgaatgaatcatgtccgggggccttcctaatgtgc

SEQ ID NO: 695105 - DNA, 660 bp, Homo sapiens
cgttgtgtttctccaccatcctgaattctgcgttgtgtttctccaccatcctgaattctgcgttgtgtttctccaccatcctgaattctgcgttgtgtttctccaccatcctgaattctgcgttgtgtttctccaccatcctgaattctgcgttgtgtttctccaccatcctgaattctgcgttgtgtttctccaccatcctgaattctgcgttgtgtttctccaccatcctgaattctgcgttgtgtttctccaccatcctgaattctgcgttgtgtttctccaccatcctgaattctgcgttgtgtttctccaccatcctgaattctgckttgtgtttctccaccatcctgaattctgcgttgtgtttctttaccatcctgaattatgcgttgtgtttctccaccatcctgaatcatgcgttgtgcttcttcgccatcctgcattctgctttgtgttttttcacagtgttgtcttctgttttacttacttgtgtgtttcgtctgttgtttttctctccagtggtacctgctttgtgagtccgttttcttcactgatatatccagttgtccacagtagacacctgataaatatttacttgtggaatgaatgaataatgaatgaatgaatgaatcatgtccgggggccttcctaatgtgc

SEQ ID NO: 695106 - DNA, 660 bp, Homo sapiens
cgttgtgtttctccaccatcctgaattctgcgttgtgtttctccaccatcctgaattctgcgttgtgtttctccaccatcctgaattctgcgttgtgtttctccaccatcctgaattctgcgttgtgtttctccaccatcctgaattctgcgttgtgtttctccaccatcctgaattctgcgttgtgtttctccaccatcctgaattctgcgttgtgtttctccaccatcctgaattctgcgttgtgtttctccaccatcctgaattctgcgttgtgtttctccaccatcctgaattctgcgttgtgtttctccaccatcctgaattctgcgttgtgtttctccaycatcctgaattctgcgttgtgtttctttaccatcctgaattatgcgttgtgtttctccaccatcctgaatcatgcgttgtgcttcttcgccatcctgcattctgctttgtgttttttcacagtgttgtcttctgttttacttacttgtgtgtttcgtctgttgtttttctctccagtggtacctgctttgtgagtccgttttcttcactgatatatccagttgtccacagtagacacctgataaatatttacttgtggaatgaatgaataatgaatgaatgaatgaatcatgtccgggggccttcctaatgtgc

SEQ ID NO: 695107 - DNA, 660 bp, Homo sapiens
cgttgtgtttctccaccatcctgaattctgcgttgtgtttctccaccatcctgaattctgcgttgtgtttctccaccatcctgaattctgcgttgtgtttctccaccatcctgaattctgcgttgtgtttctccaccatcctgaattctgcgttgtgtttctccaccatcctgaattctgcgttgtgtttctccaccatcctgaattctgcgttgtgtttctccaccatcctgaattctgcgttgtgtttctccaccatcctgaattctgcgttgtgtttctccaccatcctgaattctgcgttgtgtttctccaccatcctgaattctgcgttgtgtttctccaccatcctgmattctgcgttgtgtttctttaccatcctgaattatgcgttgtgtttctccaccatcctgaatcatgcgttgtgcttcttcgccatcctgcattctgctttgtgttttttcacagtgttgtcttctgttttacttacttgtgtgtttcgtctgttgtttttctctccagtggtacctgctttgtgagtccgttttcttcactgatatatccagttgtccacagtagacacctgataaatatttacttgtggaatgaatgaataatgaatgaatgaatgaatcatgtccgggggccttcctaatgtgc

SEQ ID NO: 695108 - DNA, 1510 bp, Homo sapiens
aaattttcaaccaggactactacaaacttggtgcattcatagacttttctgtaaaacggtacatggctttgcctttatagagatactcatggtgttccttcaaaacttcatacttgcatccacttttctttgcaaggaaataaacttcattgttataaaaaaagatccgagtaagcatttaatacaaaatggaagtctgtgaagagtccagaattgctgatttcctctggaaattcagcaactcgygttccttgtctaaatttaaaattgggttttagacatctgaatgtgaggcgaaaatggggaaacttgcattattaaaacagtgaatttttatttttatttcttgtatttttagtagagacggggtttcacaccatgttagccaggatggtcgccatctcctgaccttgtgatccgcccgccttggcctcccaaagtgttgggattacaggcatgagctaccacgcctggccattaaaacagtgaattttgaaaaaattaattaaaatgaatttcaaattaaatggtcttttacatacatgtatgcatatacactaatacacttagaatacactgctgtcaacagatgtcaatgctgactggtataggtgactctgcctctacatataggccctggcacacaaaaaaacaagatatattctttgaacatatagtcaatacacttaaaatgattatatttatttgtacctgctttaaacagtttgtggtttccagtaattcttttttatcttaaattagaaaaaaatattattcactttaataattaaatgttaaaattaataagaatttaactttttgttctcatttacagtattttttaaccatgtaatatttataacaagtttaggatctgcatattataaacccagacagataaaatagattttctttctaaatccacccccgcatccattgccaaataaattataatcacagatgtatcacgcctcatttaggtttcaacccactttcacttgattaggaacttgactacaattttcatttattctggaatttctcaaaaatagccttttaaagtttgaatgattttagaacttctctttctttatccacacattcatgctgcatcataaggtgttttgaagattacctaacaattaatataaaacacaaggcacgcgatatgacattagtaaatggtagctattattattattgttgctgttgttatctacctcatcacaacatgccaggtaatgccagcacatcagcaaagctctaattctcttatctctacatttcttatctagattcaaaccagtggttacattctttgcaagctctgtatttgttttcttagcttcaaaacttttactgcctttctcacagaattggagcttaaataacaattatatcaatagtaaaacattaatactgataggcattgtgttcagtactttttatgtacctcatctcatttaatctccacaactttgtgctacaggtattattagctctgttttac

SEQ ID NO: 695109 - DNA, 1510 bp, Homo sapiens
aaattttcaaccaggactactacaaacttggtgcattcatagacttttctgtaaaacggtacatggctttgcctttatagagatactcatggtgttccttcaaaacttcatacttgcatccacttttctttgcaaggaaataaacttcattgttataaaaaaagatccgagtaagcatttaatacaaaatggaagtctgtgaagagtccagaattgctgatttcctctggaaattcagcaactcgtgttccttgtctaaatttaaaattgggttttagacatctgaatgtgaggcgaaaatggggaaacttgcattattaaaacagtgaatttttatttttatttcttgtatttttagtagagacggggtttcacaccatgttagccaggatggtcgcsatctcctgaccttgtgatccgcccgccttggcctcccaaagtgttgggattacaggcatgagctaccacgcctggccattaaaacagtgaattttgaaaaaattaattaaaatgaatttcaaattaaatggtcttttacatacatgtatgcatatacactaatacacttagaatacactgctgtcaacagatgtcaatgctgactggtataggtgactctgcctctacatataggccctggcacacaaaaaaacaagatatattctttgaacatatagtcaatacacttaaaatgattatatttatttgtacctgctttaaacagtttgtggtttccagtaattcttttttatcttaaattagaaaaaaatattattcactttaataattaaatgttaaaattaataagaatttaactttttgttctcatttacagtattttttaaccatgtaatatttataacaagtttaggatctgcatattataaacccagacagataaaatagattttctttctaaatccacccccgcatccattgccaaataaattataatcacagatgtatcacgcctcatttaggtttcaacccactttcacttgattaggaacttgactacaattttcatttattctggaatttctcaaaaatagccttttaaagtttgaatgattttagaacttctctttctttatccacacattcatgctgcatcataaggtgttttgaagattacctaacaattaatataaaacacaaggcacgcgatatgacattagtaaatggtagctattattattattgttgctgttgttatctacctcatcacaacatgccaggtaatgccagcacatcagcaaagctctaattctcttatctctacatttcttatctagattcaaaccagtggttacattctttgcaagctctgtatttgttttcttagcttcaaaacttttactgcctttctcacagaattggagcttaaataacaattatatcaatagtaaaacattaatactgataggcattgtgttcagtactttttatgtacctcatctcatttaatctccacaactttgtgctacaggtattattagctctgttttac

SEQ ID NO: 695110 - DNA, 1510 bp, Homo sapiens
aaattttcaaccaggactactacaaacttggtgcattcatagacttttctgtaaaacggtacatggctttgcctttatagagatactcatggtgttccttcaaaacttcatacttgcatccacttttctttgcaaggaaataaacttcattgttataaaaaaagatccgagtaagcatttaatacaaaatggaagtctgtgaagagtccagaattgctgatttcctctggaaattcagcaactcgtgttccttgtctaaatttaaaattgggttttagacatctgaatgtgaggcgaaaatggggaaacttgcattattaaaacagtgaatttttatttttatttcttgtatttttagtagagacggggtttcacaccatgttagccaggatggtcgccatctcctgaccttgtgatccgcccgccttggcctcccaaagtgttgggattacaggcatgagcyaccacgcctggccattaaaacagtgaattttgaaaaaattaattaaaatgaatttcaaattaaatggtcttttacatacatgtatgcatatacactaatacacttagaatacactgctgtcaacagatgtcaatgctgactggtataggtgactctgcctctacatataggccctggcacacaaaaaaacaagatatattctttgaacatatagtcaatacacttaaaatgattatatttatttgtacctgctttaaacagtttgtggtttccagtaattcttttttatcttaaattagaaaaaaatattattcactttaataattaaatgttaaaattaataagaatttaactttttgttctcatttacagtattttttaaccatgtaatatttataacaagtttaggatctgcatattataaacccagacagataaaatagattttctttctaaatccacccccgcatccattgccaaataaattataatcacagatgtatcacgcctcatttaggtttcaacccactttcacttgattaggaacttgactacaattttcatttattctggaatttctcaaaaatagccttttaaagtttgaatgattttagaacttctctttctttatccacacattcatgctgcatcataaggtgttttgaagattacctaacaattaatataaaacacaaggcacgcgatatgacattagtaaatggtagctattattattattgttgctgttgttatctacctcatcacaacatgccaggtaatgccagcacatcagcaaagctctaattctcttatctctacatttcttatctagattcaaaccagtggttacattctttgcaagctctgtatttgttttcttagcttcaaaacttttactgcctttctcacagaattggagcttaaataacaattatatcaatagtaaaacattaatactgataggcattgtgttcagtactttttatgtacctcatctcatttaatctccacaactttgtgctacaggtattattagctctgttttac

SEQ ID NO: 695111 - DNA, 578 bp, Homo sapiens
gaaacttttcacagaataaaggtagtgtgttagtccatttgcattgctataaagaaatacctgaaaccaggtaatttataaagaaaatagagaggtgtttctggctcacgattccacaggccgtacaggaagtctgatgccagcatctgcttctggtgaggactcaaggagcttgtaatcatggcaggagctaaagggagagccagcatatcccacagtgagagaggaagcgagagagaggagggggttccaggctcctttaaacaaccagctttcctgtgaactcagagtaacaactcactttttacctcgagttgggcaccaggctattcaagagggatctgcccccatgacccagccacctcccaccaggccccacttccaacactgacaattacatttcaacatgagctttggaggggacaaacatycaaaccatatcaggcagtcattctctactctaggccatgtctgagccaaaccaccagacaatgcaataatattcttgctaaaatctaagtagctaaggacaggtgtcctccttagctccacagaagtcaaaagcctgaggcttagaa

SEQ ID NO: 695112 - DNA, 2181 bp, Homo sapiens
tgagttgaaatggccatttgaaactatttctccattcagcagcaagaagcatcttctaaatggataaattcccagattcacaggctctccacatggacagatatgaaaatgctcctatgataatggtaagtcaattccatgatggaatccacatctgtcttcataggatgggggtgaaatattcacttatcagctggcattaatggccactaaaggagttaagagggttccgacatgaacagacttcagatcccagaactagagctttgtttttggcaagatggacagatttggaaggacccatagttctgacagagctaatacagggagcatgctgttgatcccacaatactccagcagagacaaaatctgccttggccactggcacattgaagagccagcaaccattaggcagacgctcaagtaagcaggtggtttttgtcagtggagggcctacaagtggacaaaccagagcatggggaggaggaaaaggcaataggtacacaataggtaaaggtttggccaggcagtctatatgggtgtagtatggcagcaggatacagaaacaagttcagcaggacatctgtcctgagaaggttgagcagaaggcaatacccaaaatcaagaagaaacaaagctcagcacaaggcttgttcaccaagattgagcaaaatctacttattagtacttcagtaaaaggccagagcagaaccaccagcaatttgtattatatgctactcattcaatgctcttcaaaaccccttgaagagtaccaggtctaagggaggggaggtggcaggaggattgttggaagactccacctgtgaattctgggagtgttataaccagaagcaatataagatgtgtaaagggagggagtatgaaggattgaaaaagaacagtcctgattaggctcagttttttcacttcgaaagtagaaactaatataagctgctagggttgttgaaaaggctgaacataaagtggatagcacatagaactccaaggatgtgaatgaactagcctcttcagctacttacaaaatggtacaatgaccaagcatattctctaaactagggagctttcaacaggttatgaatactggcaataataattgctaacattcactgtagacttatggatcaatcactgtcttaagttcattacatatattatcccattggatcttctcatcctacaagattgagattaatttcattttacagataaggaaaccaaagaacagagaagttaagtgacttgcccaagattacacattagttagtggcagtgccagaatttgaacatagattccagagcccacactgatagtctagttacacataatatcatacttcctctatgcgataaaaaaaaaattagagaaagacatggaagagcaagaattgattcattcaatacctacttagaacctcagtggtagaccacaatgagacagatacagaacctagtaaaagtgtagcagcacacttttttatgtaattgtctttggtagtcattcctctgactatgctcctggcataaagctctatcagcatagccatggcaggagcagggagtttatggccagaagctttattgcccagtgtgagtaatggtggttcatggccagcatcatttctgggttgaagtactccgtggtgcacagatacaagcagcagctgcatcattttccccttgatctagaaattgctaggtggcagaattccacatactagattgtcatataacctatccacacaaactttaaatatcaacttacgtccccagaaatctgaaagatttaatgttgtttccaaaggtatttacagtacatcaaagacttttgatgacagttcatccaaaataaaaaaaaaaataggagaaaaaaagcagcagcctgacacctatgatatatctgccaygtctttaatacattgttatgcaattatttattgttttacataagtaattcatgcttgttttagatgtaacattttaaagttacctaaaatacaaccaaccagagatgatcattacaaatactttgttgtttagccttccaaaatgttgtcctagtcattaaattttagtaaaaatagaaatatatttatcatattgtacagtctactgtgtaactgcctttctcatttatcaatattaatatcttttcatgtccca

SEQ ID NO: 695113 - DNA, 1510 bp, Homo sapiens
taattacactgataagttgtatttatatgttcctttgtattttcccaagtcattttatatacattatgtcatctgaaagaaactaaaatattacacaggaactgacatttaraaagaatgctttatttgcacagctgtctgatagggaggtttgttgtagccaactatatttcctatgcacctggttcacctgtttttataggaatattttaattctttacttttcagtttaagtggcagcaatatttttgaaatgacagttcgacttgaaagtgaaaaaatatagttatttccacctggaggtcatttttgtccattttactaaatgtgctcatcttttttaatcttttagtggaaaaaaatgccaagagacctggtagtatcttctgtggcactcgtgatttttttttttcacactttctcaaaaagtgcttactacaaagaatccaacttcccttcaagtaatgctttttaatgaaaacaattattttctgaattttgactatctgctgaacagtttccactatgacaaaacccaagacaagatccgtaagagttttacattgctttcaaaattttgatttccgtaagatacatctgcttcttttttgaggagtttaaggaaatcaagcttttcatatcattaatttatttctcctctgctggtaaaaatacaggtactttatccaagtacgtgatgctattgccttgggaaacaacagagacaaacgctttaactcccattttatgtccaccctcttaaagattaaatattggtgggaaatttgaaatcactctggggttgcagctaacttcagtttctgtcaagctccctgttccttgtcttggacttcatattagccacatgtatcctggtcatttaccagtaatgaggtgaagatattttatcttcagacttttggggtttaagtcaggattttaacaacttaggtactgctctttatttcaatttcttcacctaaaatgggaacaataatagtccttaactcagagagagagagctattgtgaggagtaaatgagagaatgtttagaaatagttttgactaattactgccatatactcagggctagataaatatttccatgatagtcattttacctagtccataaattttactttgaaaaaaatacttgcatagttataatttgacagataatattaatgttaatacaattagtatctaacttttcctctgtattatgtacacttaacatatttaacctttgtaataattatttgaggtaattaatattttacagaaaaaaataacaagaggctaaataatatgtccaaactcatacagtgcttgtttgcttcagccccagagtcgatgagatttctgtaatacatactaaaatactgcctttctggtaatcgcattccttcctgaaaatacccactcataaatctcagtttattccctcccattttttttcttgtatttatgggtattatttgaagggcaatacaaaatctctggcttaca

SEQ ID NO: 695114 - DNA, 1510 bp, Homo sapiens
taattacactgataagttgtatttatatgttcctttgtattttcccaagtcattttatatacattatgtcatctgaaagaaactaaaatattacacaggaactgacatttagaaagaatgctttatttgcacagctgtctgatagggaggtttgttgtagccaactatatttcctatgcacctggttcacctgtttttataggaatattttaattctttacttttcagtttaagtggcagcaatatttttgaaatgacagttcgacttgaaagtgaaaaaatatagttatttccacctggaggtcatttttgtccattttactaaatgtgctcatcttttttaatcttttagtggaaaaaaatgccaagagacctggtagtatcttctgtggcactcgtgatttttttttttcacactttctcaaaaagtgcttactacaaaraatccaacttcccttcaagtaatgctttttaatgaaaacaattattttctgaattttgactatctgctgaacagtttccactatgacaaaacccaagacaagatccgtaagagttttacattgctttcaaaattttgatttccgtaagatacatctgcttcttttttgaggagtttaaggaaatcaagcttttcatatcattaatttatttctcctctgctggtaaaaatacaggtactttatccaagtacgtgatgctattgccttgggaaacaacagagacaaacgctttaactcccattttatgtccaccctcttaaagattaaatattggtgggaaatttgaaatcactctggggttgcagctaacttcagtttctgtcaagctccctgttccttgtcttggacttcatattagccacatgtatcctggtcatttaccagtaatgaggtgaagatattttatcttcagacttttggggtttaagtcaggattttaacaacttaggtactgctctttatttcaatttcttcacctaaaatgggaacaataatagtccttaactcagagagagagagctattgtgaggagtaaatgagagaatgtttagaaatagttttgactaattactgccatatactcagggctagataaatatttccatgatagtcattttacctagtccataaattttactttgaaaaaaatacttgcatagttataatttgacagataatattaatgttaatacaattagtatctaacttttcctctgtattatgtacacttaacatatttaacctttgtaataattatttgaggtaattaatattttacagaaaaaaataacaagaggctaaataatatgtccaaactcatacagtgcttgtttgcttcagccccagagtcgatgagatttctgtaatacatactaaaatactgcctttctggtaatcgcattccttcctgaaaatacccactcataaatctcagtttattccctcccattttttttcttgtatttatgggtattatttgaagggcaatacaaaatctctggcttaca

SEQ ID NO: 695115 - DNA, 1053 bp, Homo sapiens
gaagatctttctgagtgtgacatttaagctaccaactagaggacaagaagcagcgagccatgtgaaagtctagaaggaggatattctggacagagagaacaatgggtcacatctgtttttcattttgttctcaacatccaaaaagcaggaagtacggtaagcatcctcgtcctcatrtgtattattagaatgtgtagaaaagagaatgtgtaaataagggcctgggactgtttagatgcttcataataaatgttcctctccttccctttttactaactcttgctatactttcttgaagttatttcttaattgggaaagaatggcatactatatctaatatttgcttgcttttatttaaacaaggcataaagaaaaggcttcttactattttgccatttttcctgtcagtaaaaattttaccaaaaatattttgagttttccaagcccttcctcacctaaataaagcagctttgacaatgttctgcttacactcaacgtaacataccctgaagttacctatcatgccgagtatcttattttaacactaagatcatttatgtaattagaaatattttaaatatgaatgttgtaagtattataccaattgtgtgtgttttttttaatgccctgttattgttggtagtgaacgcaaagttgagttaggtgtttgaagttagttccttgctgacatatacagaagagctaatattgtatctgtgactatgtttcctttggctttctatgttcagtttacagagtcaatagccatatggagataaaatatttgcttgatctggagaacatatatgagtttctctgttgaaatattttggttttcaatacatgctttccttacttctaggtctcattgcttttaaatcaggaaattcagaacatgtttaggaaatattgagaaattcattgttttttcactgaaactcattattcattataatttcaacagactacctttgagaatgttccacagaaatatgatagtcacttaactggagctgatgatggtcaaagaggaaaaattacaataaaggaaca

SEQ ID NO: 695116 - DNA, 641 bp, Homo sapiens
aactaatgtgggagcacactcagtatagaccagagcttcccaaattttaacaaatcagctgaggaccttgttggaagtgcagattctgattccacaagtctgcgattctgtatttctaataagatctcaggtgatgccgacccttcttgtcctaggaccacactctcagtagcaagggtatagctgtgccttcagagaaatctcgaagaagagcccttggatcaccactcaagacataacaggatcaagggaaagcatgattttccytttatttctgagcgtgtctctggccagaggggaaggagaaagagatgaagaaacagaaatcatcattggaagatactactgctaaatgaagagaagagaagtcatgggaatagtccatcaaaaggcggcagaaaggtcagaatcaggacaacagatctagagactacttttgcaaaggaagagggattgtgagtggaggaggagggaggaaagaaagaagttggctagttaattttggagttgataatagggaaacttgagagctgtcacttctagtgactgcaatatattggcactcaaacagaagattaggtgattgctgttccaggaattactggaaggagggagtgctagaatgggggtaaaccacagga

SEQ ID NO: 695117 - DNA, 598 bp, Homo sapiens
ttgtgatctgcctgcctcggcctcccaaagtgctgggattacaggcccggcccaagcccttgtcttttttttgttttgtttttagcctggagggcagtggcgcgatctcggcttactgcaagctctgcctcccaggttcacgccattctcctgccttagcctmccgagtagctgggactacaggtgcccgccactacgcccagctaattttttatattgttttagtagagatggggtttcactgtgttagtcaggatggtctcgatctcctgacctcgtgatccggctgcctcggcctcccagaatgctgggattacaagcgtgagtcacccaccgcgcccggccccaagcccttgtcttttaatgggtcaattgcatcatcctcacctatgaatgacagcactggaaatggtgactccatgggtaaatacatggttttatttttccttttcttttcttttttttgagatggtgtctctctatgttgcctagcctggtctcgaactcctgggctcaagtgatcctcctgcctcagcctcccaaagtgctaagattactggtgtgagccaccatgccggtccagcaatccatggttcca

SEQ ID NO: 695118 - DNA, 598 bp, Homo sapiens
ttgtgatctgcctgcctcggcctcccaaagtgctgggattacaggcccggcccaagcccttgtcttttttttgttttgtttttagcctggagggcagtggcgcgatctcggcttactgcaagctctgcctcccaggttcacgccattctcctgccttagcctcccgagtagctgggactacaggtgcccgccactacgcccagctaattttttatattgttttagtagagatggggtttcacygtgttagtcaggatggtctcgatctcctgacctcgtgatccggctgcctcggcctcccagaatgctgggattacaagcgtgagtcacccaccgcgcccggccccaagcccttgtcttttaatgggtcaattgcatcatcctcacctatgaatgacagcactggaaatggtgactccatgggtaaatacatggttttatttttccttttcttttcttttttttgagatggtgtctctctatgttgcctagcctggtctcgaactcctgggctcaagtgatcctcctgcctcagcctcccaaagtgctaagattactggtgtgagccaccatgccggtccagcaatccatggttcca

SEQ ID NO: 695119 - DNA, 603 bp, Homo sapiens
cccaagttcttctcacactgtgagaactggactgagctgtcactgccattgccgacttactaaaccctccaaaaatgcagcagagtctgaggtcgtgatgaccactccttcatggatccatggcacaaatcatgaaatgagagaattatttcccttgagtttgaacttggcctcagaacttctcttgaaccccttgrcaccctcaagcagccttgatcaagcagaataaagacttcacaggaagtcttttccccatacctgagctaaggccttctgatctcccataaagagctactgtgaagatcaaactccaaattaggctgtgaaatgacctatatttgtcttctgtgacccttaagctctcttaacaagagttatcccccttgtttctaaactgccaaagtttcatgctgtatgtcttcccctggcctacctcccatgaatgttctcaggatctttcttcctccaacctggttctctgttaagacccttctttcttagttccaaagataactgctcatttaggctgacaaactcaccaaatgtgcaaatgctccacaggaacatatttgcatttttgaaagtcccttctggaaacaatgg

SEQ ID NO: 695120 - DNA, 1053 bp, Homo sapiens
taagagagtgaacttaaagaacaagtccaaggactgcgctctggggccttcaagtttaagaggccaggcatgtgaggaactgctagttaacgctgccagatgtaacggccactaagggaggtggaaagtgattacagggtgtggtcctggaggccgcgcagaaggtctgtctacaggagaggggagagatcagctgactcatgctgtggccaggtcagatgtgaggagggctgggcatgaccactggctgtagcagcgtggagctcactggacctgcagcacccagctccarattccgtgactggcaggtcacccttgtgcactaagtgcttggtgtgctgatgtattggcagggggctgttgtgcacatcatcacgtaagatgtgctctgggtccttgaggatttaaagcttagttgaggagctggatatatgcatataaaaagataaataataatagaggttggcacgttttcggtgtcgatggagtagtacagacaaaacaatgccatgggatttaggagctcggggcatttgtcagatgcatctgtggctgtggaaggcgccctgagggaaatgaaactgtcatgcacagtgatggagtgagtcctcagcagagcagaaggaagacagagaggctgactgaggctaaggcgggcattcatgtggctagtgaatgaggaggtaactgcggtgaggcacttagtggggggtttcaaactgaatcttaatatgacaattctctggggacactaattgaggcaggccagatgtggtgtctcatgcctgtaatctcagcactttgggaggctgaggcaggcagatcacttgaggtcaggagttcaagaacagcctggccaacatggtgaaaccccatctctactaaaaatacaaaaattaattgggcgcggtggcgggtgcctgtaatcccagctactcaggaagctgagacaggagaatcgattgaaccctgggaggcagaggttgcagtgagccgagatgggacttctgcactccagcctgggcaacagagcaagactccatctcaaaaaaa

SEQ ID NO: 695121 - DNA, 1053 bp, Homo sapiens
taagagagtgaacttaaagaacaagtccaaggactgcgctctggggccttcaagtttaagaggccaggcatgtgaggaactgctagttaacgctgccagatgtaacggccactaagggaggtggaaagtgattacagggtgtggtcctggaggccgcgcagaaggtctgtctacaggagaggggagagatcagctgactcatgctgtggccaggtcagatgtgaggagggctgggcatgaccactggctgtagcagcgtggagctcactggacctgcagcacccagctccagattccgtgactggcaggtcacccttgtgcactaagtgcttggtgtgctgatgtattggcagggggctgttgtgcacatcatcacrtaagatgtgctctgggtccttgaggatttaaagcttagttgaggagctggatatatgcatataaaaagataaataataatagaggttggcacgttttcggtgtcgatggagtagtacagacaaaacaatgccatgggatttaggagctcggggcatttgtcagatgcatctgtggctgtggaaggcgccctgagggaaatgaaactgtcatgcacagtgatggagtgagtcctcagcagagcagaaggaagacagagaggctgactgaggctaaggcgggcattcatgtggctagtgaatgaggaggtaactgcggtgaggcacttagtggggggtttcaaactgaatcttaatatgacaattctctggggacactaattgaggcaggccagatgtggtgtctcatgcctgtaatctcagcactttgggaggctgaggcaggcagatcacttgaggtcaggagttcaagaacagcctggccaacatggtgaaaccccatctctactaaaaatacaaaaattaattgggcgcggtggcgggtgcctgtaatcccagctactcaggaagctgagacaggagaatcgattgaaccctgggaggcagaggttgcagtgagccgagatgggacttctgcactccagcctgggcaacagagcaagactccatctcaaaaaaa

SEQ ID NO: 695122 - DNA, 634 bp, Homo sapiens
gagagattctgattagaaaggagcatggaaataaagttgtttaatatttacaaataacctcctggaatgctaaaatcttggactttatcctttcccttcccctcccctcagattctttgcggaagagttgaagaaagagagcataaggaattctgtaaccagaggcagaacccaaaactaactgggccatgtcctgcttacatggctgtggggagaatctttccatcaggacccccatggctaaaaatggttataaactaaattgacagctttgccacaaaagtctaaaggagctcacaggaagaggaagattttattgttgatcagtggatgtcaggcaggtctctccaatgtcaatgagaatagataggttgcracattaaaaaaaaaaaaacttggagatcgttaagagaaccatcagggcccaagacccacattgcttacatctcttgccttctaaaggccaggtcactttcatgtcagaatgtaaggatcaacagagaaaaatgtgggcaaggcagcacagagggtatgaacactgacaaagtttcattatttataaaaatagggacaatatgacctgtgttataggggattaaacttatcagaggataagtaaaatctgaacctaaaa

SEQ ID NO: 695123 - DNA, 1392 bp, Homo sapiens
acattttctttgcttaaaatagaaggtagaactttattattattgaaattctaaaattattattattattattattatgagcacccataatgccagtgacgtgggagtcacttacattggcattaggaagctgaagtcctgtttttagttggaatataattatggggaagggaattctactactaccactctaactactctggagcttaaaggatggcagttgtgatgattcttcagggaaatggtgaaggaaaatcttagctgtttatgtgcttataaggagaggtccgtgcttccccctccatttttttgtcatgaaaaatatggaaccaaaggggaacaaaaagtagagtgctagaatgtaaactccttgagagcagagtttctttttcttttcttttttttttttttttgagacggagtttcattcttattgcccaggttggagtgcaatggtgcaatcctggctcactgcaacctccgcttcccgggttcaagggattctcctgcctcagcctcccgagtacctggtattacaagcaccaccaccatgtccggctaatttttttgtatttttagtagagacgggttttcactatgttggccaggctggtcttgaactcctgacctcgtgatctgcccgcctccgcctcccaaagtgctgggattacaggtgtgagccaccacatacagcccgagtttctttttcttatttgttcactgatatatcccaaaatcttagaagaatgcctgacacttaggtaatcaataaatactaaatgaataaatattaaatgaatttaatagttgcccatgtttattagcagattcctttattgataacagaagccttaatagcttttgtcaatttgaattaatctcttaatcaaaaaataatttttgatttcagaaaataagcttacatttttaaagatttagcatgaaaaccatgagctgatgtactagctatacactgcaktttctttttagcagtattttaaatcccaccaattttacgtagattagcataaataatctctcttctatgtacatttaattaataggctttaaatatgatttggtgaatactttgcttttatattttttaagaaagatgagcattttcaaagtgattgaaattttaaaagtattcatcttgtgtagtacttatttgtatctagaatggatttttctttcaaaattaaggatatatacaagttcagaaaactgtcatataagctatgtttttgaatgagatggccatgatttccttgacttggaagcatgatttttcatttatagttttgttgtttttattgttgttaatcagaaagaattattttaaatcagattacaagcaaactttttattaagcaaaagctttgtataagt

SEQ ID NO: 695124 - DNA, 822 bp, Homo sapiens
agtgcccatrgtttagctaaacttcagaggctaagagcatagtcctgcacttgattgcccttactttagacaccagtctcaattttggtggtccccaggttaccctcatttctgactagctagctacaaatttgagggttaattccttagaacgactcacagagctcaggaaaatgttaaacttagtattacagttttattatagccaaaggatataaaaatcataaccagccaacaaggtctgggagggttcccaaacactaagtttccactgttctcaggaatgttttgtcttgctagcatcttaatgtgtggcagtatgcagaatattgccaacccaaagctccccaagcttttggtgttcagagattttttttttttagattgtcaaaaatataacaaaaaatttaccttacccattttgagtatgcagtataatagtgcattctcagaaagaaagaaggaaggaaggaaggagggagagaggaaggaaggagaatgttaatttctcttttggtaaaaggaacagagtaaaacaatttgtgcacattttgtgcaacatctccagaacagatatccaaatctttttttttctttaatttttctagaactttttttgtcttacaaaattaaaactattcattgaacagctcccttttccctctcccacttccctccagctcctggtaatctccattctttgtgtttctaaaagtttgagtattttagatacctgaagtagctgtctttttgtaactggtttatctcagcataatgtcctcaaggtttattcatgatgtagcatatgacaaagtttcctta

SEQ ID NO: 695125 - DNA, 2821 bp, Homo sapiens
tttagcaaacctgtttccctaggaggcctctcttaccacaacagacagatgggtgctgatgtcagcagcagtgcaaagctgtaagtcagcactaatgggggtggtacctgagggccaatgagagagagagctctgcccagcttggcctcctctgagacccaccccaatgggaagacaaggtaagaagcccatcctgggcttcctggccaggttcctggaataggtggcaggttcatggtgggtgactggggctcaaatttggcatctctgggacaygggaattggaagggcttgtcatgggccatctggtttaagcctatgcagagaaaagaaaggcattaggattcccattacctagatgaggaaactgaggccttgggagggggagagttgtacctaaggttagctggagaagcagcagcagaatcaggctcagaacttctgtaagagcacctccatttgtgtacaagggtgggagtatggggcagtgagctcaccaggacaggaatcagcagacctaggcaggctgtttcctcttctgcaaaatgggagtgccaaaaagttgctcctagggtgtggagaggattagacgagatgggcataagtaaagcaccctatgaacattaatttccttttccccacagatcatttgtcctgggtgggagtcttcagtgcacctcagtgtgtgtttgtgtgtgcatgagtgagtatgctgtgtgtgtgaaagcatgcacaagcccctccgtgtgtatgtgttagtatgtatgtgagtgtgtgatttgcaaatcctgaccaggcggccattgtgaggggaagtggcaatgtttaccgaccttgggaggtattagaggttggagcctctaggattggcctggcatgggctgaggtggcgggactggagttggaggtgctctggatcccccaggcttctgtaaaccctgaaagctgctgctctggacactaacagggcagggcagggtcacgcagctcctgttaggggcttaggcaaagtcatcaagtgactcggagtaggtctttaggaggtccccctgggcatttgttggggagtccagccaggggtgtctgagcagagatgagggaatgggctggagggcaccagggagaggagaagaagcagggctcctctctctgcctcttcagggcaaagaattctgctttctttgtagctggaggtgacctcaacttcctccccttgctctgggaagaggcctgaatataagtcaagtcatttgtgctaatcgttgacatttttgagacgtgccttccctgggagtttgggggcctagtatgcaaatctatgcacattatgtgacatcaacagaaaaattggaacctcagggaattgctggagcagagaggttctccttcagaactgcttctaagctgcctataattccccccattaaattcacagaggcaaaatgtgttagatcctggagggtcaagactgaggccagatcacaatggcctttcagtccacggtctcactttacagatgaggaaagtgaggcccagaggggaggcatgacttgcttgagattatacagtcagtggcaatgctggggtcagacctggcccaggatcatccagattcattttttgacttaatatgcacaacacacacacacacacgcacacagacacacacacacacagcctatccttcgcacagtacccacagctttattttgcttcacagcagtacctgaccttgcatgtttacatttccttctccttctgcctgaccagaataaagctccataggggtgagaagtgtgcttgttttttcatgttgtattcactgtcgtatcgtcagcatctaaaacacagaatggtgggattcattcattcatttgctggtcgcctctctgatgtgccctctccattccagaccctggtgaaacagaaaggtgtcagacctggcccctagaccctggctcaggtggcttcaggccctttcttctgggccccagttgcctggggggtgggagggatcccctcacccaggtcccactggcgctgactctggaagctcaccccaggggaggagaagctagggatgagaattaagagtcctctccaaggaactcccagagcagaatcagggaagcccccacggcactgaggagagtgggagtgtgaacacagtagcttgtgaccagggaggtggcagtggggaggaaggtagaagctcatttgggaggcagggtgtggggacttggaggggaatcctaggaggagagggtgaacgagtactgtggaggctctgggcactgggtgtctagggcaggctgtgcaggtggggctgacagagaaagaacactgccatttattgacatttggggtaggctgcagagtgggggctggtgtagagaggcaaaaggccagactccagtccctgcacttcatatgggcagagtggcgaggcgttacataagccccaaaaagagctttggtcgaaggcttaattttctcatctgtaaagtggggatgataacatgaacctgggcatgggggcctcgtgtcaggagggaggtgagtctcatatgaagtaatctgtctgaacaccctcagcccactgctggacccccaaacatgagctggcctgtcttcccagtcctttctcccttttcccagggtacattctctgggaagtggggccctgtggctgctgccctgtggaggggccagtccccatcctctctgctccccagcccctgtatgttcatttgcccaagaggtcacccagtttcctctgtcctagttgaccagaaccctctggactctgtgggtgctacgg

SEQ ID NO: 695126 - DNA, 651 bp, Homo sapiens
tcaattcaagaaacatttaaatgaacacctactgtgtgctgggcattctcctagaccctcagaataagaaaccaggacatgaggagagctaagtgctggctagagatgggcctagggggctttgaaagctcagaytcggggcctggggacaggggcaatacctcagctaagagtcccaagcgagagcaggcctcagccaagacaggaagttaggagaaggctttccaggcccaggaaacagcattgtaaaggtacagacttggcaggttggagcagtgcaagctcaggggcatgtttagctggagacatagagggtacatggggcatgtttgctggggagaagggctgaggccagagcgccaagacagtcattctcagagctggggcttgtgctggcattctccccgacttcattttatacccttctatgttctggagagctggccccatggactgcctcaccctggctctcctgccctgtggcttctggttgaattcagccaatgggaggcaccagcagataatctgaagatgggaggagagagaggcacctccagcaaccttgctagaccacagtgcggtgggtatgtccctctatctatggctgcacagctcctagcaaatgaccctctctttgcagcgacggccttc

SEQ ID NO: 695127 - DNA, 1521 bp, Homo sapiens
gaggctgagacaggagaattgcttgtacccgggaggcagaggttgcagtgagccaagatcactccactgcactccagcctgggtgacagagcgagactccatctcaaaataaataaataaataaataaataaaatgaataaaagaaaaagaaagaatagaattagaataccataattttgctgcccctagttaattaattaatgtaggcattaagtctcaatagccactaacatcaccaaaagacagatgctatgtgcctcctgcgtgaagaccacacaccaccacctaaaatgttgctaacaggatccaacctgagcctgatcagatctctgtgtccagctgccaattcaccagaaatgcagagaacagaggaacatgctgaattgcaccgggagtgtacaattagcaaaatccagactataggaaactctacaggttatacagcccaggtactttgacaaatctgttgtaaagaatggagggaatgargagtgtgaccaacacaccctaactgacccccagtggatcctgcccttgtgtaatcccttcctcttgagtgtgggcaggaactgtgagttgctcctggctcacagagtagggcatatgtgatgggatgtgactcacgtgctcacctttttttatagatttcaccttaaccgactgtggggagagaagctcctgctagtcttgaagaagcaaacagccatgccatgaccagcttatggggagggccatgcagcagggaacagtgggtggcttctaggattctgggacctgagggtagcctccaaccaacagccagcaaacatctggctgtcatcagtcatccaaccacaaggaaattcattctgtcaacaacctgaatgggtttggaagtggattcttcccctcgtgaaacctgtagatgagaatgcaacccagataacaggttaatttcagcctgtaagttcctgagcagaggacctagctaagctgtgccacagctttttgacccacggaagctttgagatgacaattgtggtttgtttttttgtttgtttgtttgtttgtttgttttttgagacggagtctcgctctgtcgcccaggctggagtgcagtggcgcgatctcggctcactgcaagctccgcctcccgggttcacgccattctcctgcctcagcctcccgagtagctgggactacaggcgcccgctaccacgcccggctaattttttgtatttttagtagagacggggtttcaccgtgttagccaggatggtctcgatctcctgacctcgtgatccgcccgcctcggcctcccaaagtgctgggattacaggcgtgagccaccgcgcccggcctgtttttttttttaattcagacagggtctcgctcttttgcccaggctggtctccaactcctgggctcaagagatccttccacgcaggccccacaaagtgctgggtttacaggcatgctcggccttgtgaatttcgaaaactttatttgaatgactttttgtttttttgtttgtttgtttg

SEQ ID NO: 695128 - DNA, 644 bp, Homo sapiens
cggaaaaccttacctctttttacctgacagactccaacttatccttaagggattagcaaaggcwttaccatttgctggaagtgtttattgagccattcagaataaactaaatgcttgtgatgttccctatacatatctctactattgcccttccacgctgttttatacttgttgtgtgtctgtttcctcccattagactatgagttttttgagatgtcttatctggcacaggaccttggacattaattaattaacaaatatttacagagcacctacaatgtactaggcaccattctaagtgcataaaagtgcacagaggagttggaactccttaaccccacatctttaataactaagtaaattgtgcattatgtcaggagatggtaaattataggagaaaacctgaagcagagatcgacagtgttgatgaggaggcagggtacaatttaaatataattggcacatgtgtctcataatcctcattcatgcagataccagagggaagaaaattccaaacagaacagcctgcgtaaaggctgtgagaggaggcacgtctggcaggctcagacagagcaaaggccagcagcccagaaaagaccaagcagtgagagaagaggaggaagtggagccaaagatatcatggg

SEQ ID NO: 695129 - DNA, 1203 bp, Homo sapiens
ctccagaaggaatttcagagctctctgatccgttttgtagacaagagaagttaaaagtggttaaggccatacagtcaaggcctcacagctggtcagtggtataaacraatctaaaaccatgtccttatgatcagtccctgggtcctttctgtaatgccccatcagaaaatagatggaaaaagaaataggcatgaacaatcatcctgtctgaaattcactcatattgtctttgtagatattttcgcaaatttttaaagaagtatctagggacgtgctgtccagtaaggtagccaccagtcatatgtggttattaaaatttgataaaattaaaaattttgttttttattttcattttcacagcaatattgcagtaagtatatttttattaattgattttgaaaatcatcaagtacgactagaggcgttaagttctcaatattttcagcaaccaaaatttaactgaattttcaagtttaaacacatttcaagtgtttaacagctgcatgtggttagcagctaccatattggacagctcagatacagaacatttccaacactgtggaaagttttattccacagcagtgatccagggcagggattatcaacatcagcactgttaaagacttgggctaattctttagtgtgggaaagctatcctctgcactgtaagatgtttggctgcatctatcccagaatgccagcagcactcccccagatgcttctttactaaagaagcaaccaaagatgtcttactaaagacaaccaaaaatgtatccagactgtttaagtgtcccctggcaggcaaaattctcacccccacccacttctcatcccattgagagtcaccaatctaagatggcacgataatgagaatgaaaccttaaaattgctttgacaccatcagagaaactgacaatagatattaaacatgtatttaaattaattttcagggcattttgaaaacaagcagttttgcttactgttgtatgcagaaatgatggaatgtaatgagtgttttgggtaatgtttatgattaatcagatgacagtggggaataaaacgaaattctttcaagtttgtacaagatattccagaaaccattctggaaatgaggctgccctttgtgggagcagtctttactttgatctgcaaaatttccactcactttaatccaattttgttgttcttttcagttatctgcaa

SEQ ID NO: 695130 - DNA, 639 bp, Homo sapiens
tgggagaggcactcctcacttcccagacggtgcggccaccggtggaggtgctcctcacttccaagacggtggggtggccrggcagaggcactgctcacttcccagaccatggggcggccgggccaaaggtatttttatatggaactatttgttcagtttattttcagcaaaatagactatttagtggactagtcaattatctagggccaggaaaatgaggatgagaactgctaaaaccatctgttaatgtccacaaacaccctgaaatccagaaacaagtctttttgtcccaaatcagaactaaaaatatattccctgtcctaaaataaagaaataaaagaagaagcaaatgtattcattgcaatctacctatactaggtacaaaataaaagcaaagtatttggacagtctcattcctttcttatgagagccaaaataaaataataaaattaatttaaaaggcaaccttagctaaaacctgaatgcaatattttgttttttaaatccttcaaaaattggagaaaatagactaccattgggctggatgaaataaatttgagaataagtacatatctctgagacttgctctaaatctgtaaatgaactaattaattaattaaatggaaataaatcaatcaa

SEQ ID NO: 695131 - DNA, 642 bp, Homo sapiens
tctctctctctctctctctctccatacatacatcctattggttctgtttctttggagaactctgactgatacagattttggtaccaaaagtggttcttaggctgctcattcatcctgacaatsaaaagtggttcttaaagaacaaaatcttaaaaacccattttctaaattggctctggggtttctgcaattggttccctagtctaattagatttaaaagcattagtgttgcatttccaggagtaaaaggaacactgataatccatggcatgatatgatgataatagagatactcagaatatcaccattggattcttttaatcaaatacttaaaagaggcaaggttctgggtgacctatgtaataccttcaaacatctctgtcaagctaatcttagagttttcatttcacacgtgaactgggaataattacttttaccccaaaaagagttgtattgaagaaaaaatgagctaacccttttggaatatctggcacatggtatgcacttactaaactgtcatgttatcaaggttgacactacggctttgttattgattataaatggttatttattgttatcaattaggtaacatttgttgaatgtttatttattaaattaaataaattaaatatttaagtgttc

SEQ ID NO: 695132 - DNA, 1920 bp, Homo sapiens
agagagtaatctggggatctgaagaggagcacaactagaaggaccagtcggtgttctagttggatgacctgttgtgtaaagctctgtgtgtgtgtagcagtagcaggaaaggggaagtcaggaaatgggaaagagaagtggtctgaagtggtgatgacaaggaaggcatataacaatctccttcagagaccagcagcaagagggttttagagagaaaataccctccacttaggggttctacaaggaaagcagtgagcttagggtgacccagtttttagcaagatggcaaaggaagcattcagagaatagtctgaagatacgggagattttgctcccgattgatcttgagtctaagaatttacagtggaagggtttcagagcttgaagtagcatgggcgatggattaggagttatttgtatgaagtgacaggaagataaaaatctgagggataaaggatgacctgggagtctgggctgctctggtgattcgaagcagaaatcaatggcaccatgagctgagccttgatggtgctgaagcaggtggtaatgataagtctgtgagtattcatgaaggagaacatgtgggtgtctgagtctctgctggtgtggagtcaaagaaaaggccaggttttatctgcactggccaaggctctggggtttccttctcattactgtagaagtcactgcatatcctatttgtattttatccccagtgccatccagtgcacagagatgaagctcagtaaatgtttgttgactgagaacagtccctgtttacgataaactaataataaacatttgttaaatttgaagactggaaataatgtacatgaaacaattgtgaataacttggcatgtctgtggagtttttcataccagatgctgttaagcttcgcatggcagaatgatctgagaatgagtcatcactgactcatggatccagcttgtttcacctgcagcgctcactttaagtcacaatgaccttttctgactacttgtaatggcagcacagtggggactgcagttcctggagagtgcaccattaatagagtagttagccagtactgttttgttgtccctcggagtaaaagggaaagtgaagcaagagaacagagatttaatactacatattttttcactcaattgagaaatacaactgaaaaaaaatatatatccttataaaacttactgttttaaaagcgcagtccttgcaagttgatttgggtgttttcagatagtgaaaaacttttaaaagatattaaattattacttttacttatgaagaataaaaggtaacatagagacatagaaatcaagaaatcctcgagtattttctttagaaacaccccgattagagaaggagtttccgtttttaagagaaaattaaaccagatgaccttaagtcctttttaacacaagtttgtattaataccaattaataaattaatmagatttgaaagatttgtggacaaatgcctttataacgttcttaactgatatggactgaactgtatgccccccctttccccctggaattcatatcctaaagctgtaactcccagtgtgactgtatctggaaatagggtctttagaaggtaattaaggttaaatgaagtcatagggaaggatcctaatcccgtaggactgtggccttaaaagaagagaaagagatgtatgagttccttatatattttggatattaaacctttatcacatatgtggttcgcaaatattttctctcactctgtaggttggcctttcattttgttgattgtttcctttgctgtgaagaagcattttacttttatgtagtcccgtctgtttattcttattttttgcttttttgcctgtgtttttggagtgatatccaaaaaatccttgccaaggccaatgtcaaggggcatccccctgccccatcct

SEQ ID NO: 695133 - DNA, 1920 bp, Homo sapiens
agagagtaatctggggatctgaagaggagcacaactagaaggaccagtcggtgttctagttggatgacctgttgtgtaaagctctgtgtgtgtgtagcagtagcaggaaaggggaagtcaggaaatgggaaagagaagtggtctgaagtggtgatgacaaggaaggcatataacaatctccttcagagaccagcagcaagagggttttagagagaaaataccctccacttaggggttctacaaggaaagcagtgagcttagggtgacccagtttttagcaagatggcaaaggaagcattcagagaatagtctgaagatacgggagattttgctcccgattgatcttgagtctaagaatttacagtggaagggtttcagagcttgaagtagcatgggcgatggattaggagttatttgtatgaagtgacaggaagataaaaatctgagggataaaggatgacctgggagtctgggctgctctggtgattcgaagcagaaatcaatggcaccatgagctgagccttgatggtgctgaagcaggtggtaatgataagtctgtgagtattcatgaaggagaacatgtgggtgtctgagtctctgctggtgtggagtcaaagaaaaggccaggttttatctgcactggccaaggctctggggtttccttctcattactgtagaagtcactgcatatcctatttgtattttatccccagtgccatccagtgcacagagatgaagctcagtaaatgtttgttgactgagaacagtccctgtttacgataaactaataataaacatttgttaaatttgaagactggaaataatgtacatgaaacaattgtgaataacttggcatgtctgtggagtttttcataccagatgctgttaagcttcgcatggcagaatgatctgagaatgagtcatcactgactcatggatccagcttgtttcacctgcagcgctcactttaagtcacaatgaccttttctgactacttgtaatggcagcacagtggggactgcagttcctggagagtgcaccattaatagagtagttagccagtactgttttgttgtccctcggagtaaaagggaaagtgaagcaagagaacagagatttaatactacatattttttcactcaattgagaaatacaactgaaaaaaaatatatatccttataaaacttactgttttaaaagcgcagtccttgcaagttgatttgggtgttttcagatagtgaaaaacttttaaaagatattaaattattacttttacttatgaagaataaaaggtaacatagagacatagaaatcaagaaatcctcgagtattttctttagaaacaccccgattagagaaggagtttccgtttttaagagaaaattaaaccagatgaccttaagtcctttttaacacaagtttgtattaataccaattaataaattaatcagatttgaaagatttktggacaaatgcctttataacgttcttaactgatatggactgaactgtatgccccccctttccccctggaattcatatcctaaagctgtaactcccagtgtgactgtatctggaaatagggtctttagaaggtaattaaggttaaatgaagtcatagggaaggatcctaatcccgtaggactgtggccttaaaagaagagaaagagatgtatgagttccttatatattttggatattaaacctttatcacatatgtggttcgcaaatattttctctcactctgtaggttggcctttcattttgttgattgtttcctttgctgtgaagaagcattttacttttatgtagtcccgtctgtttattcttattttttgcttttttgcctgtgtttttggagtgatatccaaaaaatccttgccaaggccaatgtcaaggggcatccccctgccccatcct

SEQ ID NO: 695134 - DNA, 623 bp, Homo sapiens
ggacaaaccaaaagtgcaactatgtgtggtaatagaagtgttgattaatttgattgtggtaatcattacacaaaaatatacgtatgtcaaatcataatgttgtatactttgagtatacaaaatttttatttgtcaattatactttaataaagctaggagggaaaagaagatgaagaaagaaagacttctctgtcttcaccatgtgaggacacatcaaaaaggtggccgtctgcaaggccctcaccagacaccaaccatgctggcaccttaatcttggaattccagtctctmcaactgtgagtcatccagtttagggcattttattatggcggacacctacccacctttctagaaatgatgcttgtttgtttctgaaggaataatagaatcataacttattattggttaggagctgaattctgaaacattgtacaacagtaaaaaatttgccatggaaatatttaattattttaagaaatattaagagacattaagatcctccctcagactgctaacgtctcattggtatggactgtgcttactggtgcatcaccagcatactgagtgaatgagcaaaggcatccaaagaatcagctgaatggtaagggattgtgaaataagaa

SEQ ID NO: 695135 - DNA, 609 bp, Homo sapiens
ttaccttcctgcctacctgctccacttcctgggcaggtttcctgcttggcagcaattcctccaattgtagctcttcattctgtttttaaacatttctccatgcaatcttgattattcttatggactatggaggaaacacttttgacccttatgataacctgtgaagtcagtaagcatcaggataaaattgggacctcttaacagactcctgtactccagctgaatctccrgtttgggcttacaatttcttctcctaatatgttggtgatacatgttttggtagagaatattattctcaaaaattgctccatgtggctaggcacagtagctcatacctgtaatcccagcacttcgggaggccaaggtgggaagatggcttcaacccaagagttcaagaccagcctggccaacatgtgacctcatctatgcagataatttaaaaattagtcagtcatggtggcatgcatctgtagtactagctacccaggaggctgtggtgggaggattgcttgagcccaggtatttgaggctgcagtgaaccatgatcacaccactgcaatccaccctgggtgacagagtgagaccctgtgccccccacccccaaataaa

SEQ ID NO: 695136 - DNA, 609 bp, Homo sapiens
ttaccttcctgcctacctgctccacttcctgggcaggtttcctgcttggcagcaattcctccaattgtagctcttcattctgtttttaaacatttctccatgcaatcttgattattcttatggactatggaggaaacacttttgacccttatgataacctgtgaagtcagtaagcatcaggataaaattgggacctcttaacagactcctgtactccagctgaatctccggtttgggcttacaatttcttctcctaatatgttggtgatacatgttttggtrgagaatattattctcaaaaattgctccatgtggctaggcacagtagctcatacctgtaatcccagcacttcgggaggccaaggtgggaagatggcttcaacccaagagttcaagaccagcctggccaacatgtgacctcatctatgcagataatttaaaaattagtcagtcatggtggcatgcatctgtagtactagctacccaggaggctgtggtgggaggattgcttgagcccaggtatttgaggctgcagtgaaccatgatcacaccactgcaatccaccctgggtgacagagtgagaccctgtgccccccacccccaaataaa

SEQ ID NO: 695137 - DNA, 617 bp, Homo sapiens
ttatggagcacatttgtggtttatgttgatctttaaggtaataatattttctaaatcaatctttgcactatcaacaaacatttcctgacaactaactgtaatgcagaactaggcactgtcagggggaacaccagcattgacaatggtgtattttttaagtgtaataacaattgagtccctcctcttaagagcacaggatctacaaccaactaccttccctcccttcacccttttcctcctttttctttacataaatgtttgttgagagtccatttagtacagaacactgtactgggtactgttagggactcttcatttaactaaagtgtagataaatcagatatatgaaccaacttccacaagraattatttatgaccaattttataaagttcaattaggactaagagagcttcaaagcattatatctgatgaaatatcctggcaatatcatatctcaggattgtggtacgactaatatgagactctttccagagcatctgttctagcctgctcaggtttctgtaccttctcttatactgtataaaattaatgaagtttactggattcaatatttggtctcctacttagctaactgagtaccaaaagctcatttctc

SEQ ID NO: 695138 - DNA, 609 bp, Homo sapiens
actgccagactacagtgcaaaacaacacattttttatattccaataaatataaatatgatttataaaacattccctattacggtttctctttttaattttatttttataaagtcttttgttatttttcttaagcattctgaatatcyatgatttaataatagcatctatgaaataaccaagtattaaagatcagcaatattttacccaattgcatcccattttttaacttaccatcattattattgggagaatcataattcattatccctgcttgatacaactgaatagaactttacaagaatgtttgctgcacacacattctttgagttttgttaaagagcagaaggtttaaacagcaaagaggaaggtcaagaaggcaaagtaaaagttcctatttcatggaattacttgatttacttatcgttttccttgaggtctgacagacatactggtggttaacttaactccttcagatagatttaaatgctctgggaaatgtttatttgacctacccttggagatgttttgatataagttctttattgtttaataatttggtaattctaaaaggtcttaagaaatgaccaagagcagaaataaacattaac

SEQ ID NO: 695139 - DNA, 563 bp, Homo sapiens
ccaattcccccttcaamaatctccatcctgccttttacacaacacaatcctgaaagctcacaatgtgcactgttttccatttattctagctaggcctcttcctccacttagtagccatctccccagctgcctttttctccccgaattagtccagaaaacacttattaatctcttactgtattattttcaaacagccacattatcatccctgcagcaggcttctccgcttttttctctatcaatctgtaaagcatttatggagcacgtgctgtaattccttcaccaacgtccactcaccaacgtgttatcttcctggttaagtttgctccattgaagtcagcaaacatcaatgaggcctctgctggatataggtaatcaccctcctttagacttccggtctccactccagccctccatgcaggtcctttgcgtctgcttccttctttccatcaagcatttattatctatggaatactgacaagtcccttcccctttccataatcacaaattcaatgttttccattttttctttgtccagaaaacatttattgagcacctgctga

SEQ ID NO: 695140 - DNA, 1424 bp, Homo sapiens
tggctcggcaggggaagagatctaccctggcttggcttggytggcccctctggactgtggactgcaaacaccctctgctgcttctggaagattcctttgccccatccctgcttgagcccgtcatcacccccaaccttgagaagtgggcatcccataccctttggccatcagcccaacaggctaataagggggtggaaattggggcagaggaggagagtgtacccactggtgagttgtgcttcctaagttgcagactggggacttaggggacagtggcaccaccctgttgtgagtcccacaccctgggcctccatccctcccctggggcctgggcaaggggaacttcagcctgccaagtctgacacggcatctcccaacaactctcctttccccggcaggtcaggcgccgggctctcctcaagggctgtggtgctggcccgggtgcaggccctgggctggcatgggccgctgctggcgctgtcgttcctggcgttctgggtgccctgggccccagctggcctgcagttcttgctgtgcctgtgcctctatgatggcttcctgacgctcgtggacctgcaccaccatgccttgctggccgacctggccctctcagcccacgaccgcacccacctcaacttctactgctccctcttcagcgcggccggctccctctctgtctttgcatcctatgccttttggaacaaggaggatttctcctccttccgcgctttctgcgtgacactggctgtcagctctgggctgggctttctgggggccacacagctgctgaggcggcgggttgaggcggcccgaaaggacccagggtgctcaggcctggttgtggatagcgggtgagtggccagccccggctcttcaggtcctcaccagcaaccttctaagtctgatttcggtgctgggtccccggctgatgggggctgccctgggatgtgttgggggataactctggccagccccaggcagttctccactcccttctgccccatagcctgtgtggagaggagctgcttgtaggcagtgaggaggcggacagcatcaccttgggccggtatctccggcagctggcacgccatcggaacttcctgtggttcgtgagcatggacctggtgcaggtatggggagcagctcccggcccctctacagctgggctggacttcactcaaggggacagactcctcaagagctgggaacttggccacgcatggtggctcatgcctgtagtcccagcactttgggaggctgaggtgggtggatcacttgaggacaggggttcgagaccagcctggctaacatggcgaaaccccataaaaatacaaaaattagctgggcgtggtgtaattccagcatatctgtaattccaactacttgggaggctgaggcaggagaatcacttgaacccggaaggc

SEQ ID NO: 695141 - DNA, 1424 bp, Homo sapiens
tggctcggcaggggaagagatctaccctggcttggcttggttggcccctctggactgtggactgcaaacaccctctgctgcttctggaagattcctttgccccatccctgcttgagcccgtcatcacccccarccttgagaagtgggcatcccataccctttggccatcagcccaacaggctaataagggggtggaaattggggcagaggaggagagtgtacccactggtgagttgtgcttcctaagttgcagactggggacttaggggacagtggcaccaccctgttgtgagtcccacaccctgggcctccatccctcccctggggcctgggcaaggggaacttcagcctgccaagtctgacacggcatctcccaacaactctcctttccccggcaggtcaggcgccgggctctcctcaagggctgtggtgctggcccgggtgcaggccctgggctggcatgggccgctgctggcgctgtcgttcctggcgttctgggtgccctgggccccagctggcctgcagttcttgctgtgcctgtgcctctatgatggcttcctgacgctcgtggacctgcaccaccatgccttgctggccgacctggccctctcagcccacgaccgcacccacctcaacttctactgctccctcttcagcgcggccggctccctctctgtctttgcatcctatgccttttggaacaaggaggatttctcctccttccgcgctttctgcgtgacactggctgtcagctctgggctgggctttctgggggccacacagctgctgaggcggcgggttgaggcggcccgaaaggacccagggtgctcaggcctggttgtggatagcgggtgagtggccagccccggctcttcaggtcctcaccagcaaccttctaagtctgatttcggtgctgggtccccggctgatgggggctgccctgggatgtgttgggggataactctggccagccccaggcagttctccactcccttctgccccatagcctgtgtggagaggagctgcttgtaggcagtgaggaggcggacagcatcaccttgggccggtatctccggcagctggcacgccatcggaacttcctgtggttcgtgagcatggacctggtgcaggtatggggagcagctcccggcccctctacagctgggctggacttcactcaaggggacagactcctcaagagctgggaacttggccacgcatggtggctcatgcctgtagtcccagcactttgggaggctgaggtgggtggatcacttgaggacaggggttcgagaccagcctggctaacatggcgaaaccccataaaaatacaaaaattagctgggcgtggtgtaattccagcatatctgtaattccaactacttgggaggctgaggcaggagaatcacttgaacccggaaggc

SEQ ID NO: 695142 - DNA, 1424 bp, Homo sapiens
tggctcggcaggggaagagatctaccctggcttggcttggttggcccctctggactgtggactgcaaacaccctctgctgcttctggaagattcctttgccccatccctgcttgagcccgtcatcacccccaaccttgagaagtgggcatcccataccctttggccatcagcccaacaggctaataagggggtggaaattggggcagaggaggagagtgtacccactggtgagttgtgcttcctaagttgcagactggggacttaggggacagtggcaccaccctgttgtgagtcccacaccctgggcctccatccctcccctggggcctgggcaaggggaacttcagcctgccaagtctgacacggcatctcccaacaactctcctttccccggcaggtcaggcgccgggctctcctcaagggctgtggtgctggcccgggtgcaggccctgggctggcatgggccgctgctggcgctgtcgttcctggcgttctgggtgccctgggccccagctggcctgcagttcttgctgtgcctgtgcctctatgatggcttcctgacgctcgtggacctgcaccaccatgccttgctggccgacctggccctctcagcccacgaccgcacccacctcaacttctactgctccctcttcagcgcggccggctccctctctgtctttgcatcctatgccttttggaacaaggaggatttctcctccttccgcgctttctgcgtgacactggctgtcagctctgggctgggctttctgggggccacacagctgctgaggcggcgggttgaggcggcccgaaaggacccagggtgctcaggcctggttgtggatagcgggtgagtggccagccccggctcttcaggtcctcaccagcaaccttctaagtctgatttcggtgctgggtccccggctgatgggggctgccctgggatgtgttgggggataactctggccagccccaggcagttctccactcccttctgccccatagcctgtgtggagaggagctgcttgtaggcagtgaggaggcggacagcatcaccttgggccggtatctccggcagctggcacgccatcggaacttcctgtggttcgtgagcatggacctggtgcaggtatggggagcagctcccggcccctctacagctgggctggacttcactcaaggggacagactcctcaagagctgggaactyggccacgcatggtggctcatgcctgtagtcccagcactttgggaggctgaggtgggtggatcacttgaggacaggggttcgagaccagcctggctaacatggcgaaaccccataaaaatacaaaaattagctgggcgtggtgtaattccagcatatctgtaattccaactacttgggaggctgaggcaggagaatcacttgaacccggaaggc

SEQ ID NO: 695143 - DNA, 653 bp, Homo sapiens
tttaacctaaaactagtatatggatataataggataaagcaaataagtaattatgttagaaagcaagatgttcagcataagattagaaagatacaaatatatggccaggcgttgtggctcacatttgtagtgccagctgtttgagaggctaagacgagaggattgcttgagcccaggaatttgagcctgcagtgagctrtaattgtgccactacactctagcctgagtgacacagtgagaccttgtctctaaaacagtaataaaataaataaaagatacaaatataaaatcaaataagtaaaaatgttatattcttaaatttggattctaattagcaagatgaacaaaagatgtgttttctctttcttttaaaaaaaatgtattttatcttcgtcactaaaaaagccttgaaacaggccgggcacagtggctcctgtaatcccagcactttgggaggccaaggcaggcggatcatgaggtcaggagttcaagaccagcctagccaatatggtgaaaccctgtctgtactaaaaatacaaaaaattagcccggcatggtggcatgcacctgtagtcccagctactcaggaggctgaggcaggagaatcacttgaacccgggaggcggaggttgcagtgagctgagattgagcca

SEQ ID NO: 695144 - DNA, 1166 bp, Homo sapiens
aatgagtacagtatagtgaagtataagaattaatgattattctgtatatatacacagatgtgtacaggtgttaatgtacgtgagcacattcaaaaactgagcattggagatggtgctcacatttgaatatttaggacactattggtggtcttttgatggtatattcatgagtgtcatcgtattcgtatttaaataataagacagcctcttgctagcgagcacagaacaaaatgattaaatgggaatgagttgattcagagatttaatagccaaaaatttggcagagctagatgacaagagagtgcagcagtgagaaaaatattccattttagtgacagaaaaaaatccacaaaaaaccacagcattaaacattattcatgggtactatttgtcttcacttgttgattttaaagttttcggttacatgtttccatatcagatgacattattattttcatatacagttatttaggtcaccaaggaggtttcttttgttactgttttgggttaccacatattttttttggttcatcttacttctccctaaataggaatcagaaaatgactttctgaaagttgaatttcctggttctagataaagactatctaagcagaattttaatccactgtaaatcaatctttacaacctgaatcactgctgtcattacaatgtaaatcttaatttttttaaatgtcaaatttgtcacacattttccatccctctttatgtaaatatgtcccaggtattttcctaataaatatataaactactttgggtttctttgcctgtgaatcatagaattgtatacctttaatggcttagaaaataaggcatgcacctctctagaagtccttacaatttcttaattcttttaaatctttttcatgaaagtaaagtgctgtgaggctaaggcttggcttatgaaaacttctaggtaacatgcatcttcaaaataacctacaaagaagtggctttattttattacaggcctaaatatgtcaacaatgcttttttctargtcttaagacaagttatatacatttttttaatattaagattttaactcatacgaaatatgaagtatcctgtctttacttgggatgctcaacaaagtcttaattactattataactgatttaaaatctatttgagaatctattatatg

SEQ ID NO: 695145 - DNA, 645 bp, Homo sapiens
gcatcaccattggtctctgcccatcccttccacctctagtgactgtgagcctttcccctctctctggtcacttatgagaaactagagccaagccaggcagtggcgaactcttggcattatatggtaggtgtattggtcagggttctctagagggacagaactaatgggatggatggatggatagatagatagatagatagatagatagatagatagatagatagaggggagtttattaagtattaattcacatgatcataaggtcccacaataggccatctgcagtctgaggagcaaggagagccagtctgagttccaaaactgaagaacttggagcctgatgttcgagggcaggaagcatccagtatgggagaaagatggaggctgggaggctaggccagtctctcttttcacatttttctgcctgcttgtatcctagmtgcactggcagctgattagattgtgcccaccagatttaagggtgggtctgcatttcccagcccactgactcaaacgttaatctcctttggcaacaccctcacagacacacccaggaccaatactttgtatccttcaatccaatcaagttgacactcagtagtaaccatcacagtagggaatttcttttcttaatttggaggaagt

SEQ ID NO: 695146 - DNA, 946 bp, Homo sapiens
tacaaaaattagctgggcttggtggtgcgtgcctgtaatcccagctgctcaggagtctgtggcacaagaattgcttgaacctgggaggcggaggttgcagtgagctgaaatagcaccactgcactctagcctgggcgacaaagtgagactctgtctcaaaaacaaaaacaaaaaaccaaatgtacttaagtagtttaagccttgtcctgagttagctctgataactgggacctccctaaccccgcaagaccctcaggctggcccagggttcagccagtggctgaaatagacaaggaagtccagtctactccagagcctgagtgttcccaggatctttatccttttccctttctaamctcttagtttatactctacaaagagctttgtgattagtttcctttatagatttttaaactaaactgtgtcttaccttgccttattttttaaaactcaggataagcaggaattgtcagtaggctggctgtcaaacaggggaagttcaaggacatatgctggccaccccctgccccccatacttcttctctgatgccagagctccctttggatccaaaggcctaggagagaaagtggatagccccactgtaacctcagtaccctgcgggctcagcggagtggcagggtcaagtttccttccagccccaaagacaggcagtactgtggcaggccaggtttccctaatggctaaacaggcaggcctccataacaaccgtttcagcactgactgagtggttaacgttaaatactaaaagcagaaagagcaagtgccctcatacgaagactccaaggtaacaaaagcccaccaagagttttgcccaggcccttcctggggcttgaggcatgacaagataatgaaggaattcttaacaggacccatttaggattaaacaagttttattggggtctgaaggaactccccaaccctcca

SEQ ID NO: 695147 - DNA, 1158 bp, Homo sapiens
tagtagagaaaacaagcgtgctaaatacaggctccatctctccaaagcttatttttatagatgccattcaattaaccgggagaacacacccaaaagggagatggtaaaataatcctccctgtttcactgctggggaaactgaggggtaggaagggaagagtggtttgtccgaggtggttttgctctccagcaatgtgagcaaaggtcccaagtcttcagattccaagtttggtgttttatctctaaaataatacgctaaggaactagcaagaaccttaattactcctctagttcaagtgggtccttggatgtttctataggaaacatgtttctgttgggaacccctaagtgccttggagggggcagagggtctcaaatggagtgtcagaaagaggttggctgagggagctttactaggaggtaggggaaaagttgtgtggtcttggccaaggacaacaggatgagatagggaaagatggtcattccaaatttcctagagcaaaagaattttaaaaaattctctttttaactagaaattcactttatttatgttgcatgatggactatgagcaaccaggagctctgacttcggcatcttggaatcttcagcacatcactgctacgctaggatgctcacgagtttaggctgcaaatctgcatctatctatatttatctatctatgtaaatgtggtgaaatatatataacatcacatttaccatgttaacatttttttttttttcagagatgagtcttgctatattgcccagrctggcacgcatggttactcacaggtataatcatagtggactacagtctcaaacctctggctcaagtaatccttctgcctcagcctcctgagtagctgggactataggtgcatgccaacatgcccagcttaactatttttttgtttgtttgtttgagatagagtttcgctcttgttgcccaggctggagtgcaatgtcgcaatctcagctcactgcaacctctgcctcccaggttcaagcgattctcctgcctcagcctcctgaatagctaggattacaggcatgcgccaccacgcctggctaatttttgtatttttagtagaaacactttggtcaagctggtcttgaactcccgacctcaggtgatccgcccgcctcagcctcccaaa

SEQ ID NO: 695148 - DNA, 1334 bp, Homo sapiens
  misc_feature 272, 361: n = A,T,C or G
gggagataaacttggattttgttattttatttattttattattttgttgtagcaatttgccaatggccccctaaagaccatcaccaacgccttttataggtggcagttgatataggccctgcctatattaccaactaaatgtcattttatttacctatactgctttcctcctcactaggctagagagcataagcactgcctgcagcctaacatcttggcttctccatgaagaataccatattttttaaaccttttttttcccccccacgggnaaaaaaaaaaaaattttaaaaaccccttttttggtgaaaaaaaaaaaaaggggggggggaagaaaaatttttcccaaaaatttttttcncccaagggggggaaaaattttctccccaaaaagggggggggggggggcccgcttttttttttttctttttttttttcaccccccccccccctcccatggtctcccattattgcctctgatcatgtctgaaggtgagaagatctctctccctctttctctcactctagctcttgctctccctttcactctgtctcttcctatatgacttggccatttagacaggcccagtggtttcatgaataactaaacataagaagtcaagagaggcctggctcagagagcatggaccacatcagccttttgaagttcccttagtgtattaaagcaaaacaaaaatcaacacaatattgaaccagtttgcaaacactgggatatcttatgttttcatatagcaaatagatgcatttaatacttagaacttaaatgcagaatcacatttggtgctagtgtcatttgccacttgacatatgacactagtgtgctactatcatttaaggcccttcatgactgtggggtgtaatccattcctactcactcttaatagattctgacctatacaggcagaaaggtagtrtgggagagacctctgggaccataagatcaacacctcccactttagactcttctctacaacagccctaggagactacaccagccttagcttgactccttccagcactggctcctactatttctcaaggcaatttattacatatcagaacactttgcagttgttagaaattctcccgatgttataacttcctatagtttaacaagtgtttgctcaacatccactatacaaagaacactacttataaacagaactagaatagctctgtgaaaaaggaatgatagtaaccctcccctcacctgaggtaggaagaggcattttaccatctgaaacctccccacaaactctacacaaacctgcatgcatctaaagagttttttgtccaggcaacaaggataacta

SEQ ID NO: 695149 - DNA, 461 bp, Homo sapiens
ggctgtggctgaggacgctgttgcctcctctgccgatgggatcctcctgggccyggtgtgtcctccctgcccgtgccctgctgagcagtgtcgtgcctcaggcccctgcaggcccactgtcctctggcctcagactaagccttacacaccggggccctggttagcacagcagagagcccacaggagcaggagcttttctggtctttttctaaagtcacagccctcctgcttctttttacatttttaaattgatagaaaatacacataacctaaaattgaccactttcatcacgttaaagttatgatttagtgcatgttagtgtactcacagtgctgtgcagccatcaccacaaattccaggcctttccctcactgcacaaagaaacccagacctgttaggagccgctcccgcctgcccggcccagccccggcaccggcccgtctgcttcctgcatctggat

SEQ ID NO: 695150 - DNA, 1104 bp, Homo sapiens
ataatctcttacaaacctactctgctgctaacagttctttctctagctttggtgataaaagtatctgtagtttatgttcaaaaattttagcctattttaaagaagataaatcatttttattgtgaacatagacaaagtgagttagcctcactgaacttcagtttgttttacagtaacatggaataataatagcaatctcgtaagtttgggtgagtatccatggtcttcttggtgtataacagaaaaattgtgaatatccacctgtaagctatgattattgtccccaacaattctatattttaaaaaggttcttatttaatagttattttctatgttaaaaactgaaaacatttggaatattttttaaattatgaaactttaaatttagtagcaagaagacatctctcattattttctcatctgtaaaatggggataacaatatcccatgyacaggattgttgtagggatttattgaaaaatgacatacgaacccctaagaagagcacacagcacatggtaagcactgagtaaacatactattattattaacattgtgtaaccaaggcctacaagcaagcatttggaggcaacagggaccaatacaggaaataatttgatgttcttattacaggaggttggctggttttctccagtgaatatgccccaaggtattgggtatgaacatgcactaaagatttggctagcatatataaagaagtatttccttttttccattcactctattcactccagaaatacatttttaaacatttcccaaatatggtatcgatgggtgttagtccagtgaacttgactttttaagaaaaatggaatttcccaattagaagaaaacaattcatcaagtaggagacttgaaaagaaaaaaaccttcaaggattatttatttataaacttaaatgctgtttcttaggtgccatacactgtgcctgaatcatattaaataatttagtgatcataatacatgatggtgctaatctctgtttctattttacatacaggaaaattaaggcctgcaagattgagtgaaaatttcagtgtcccactgctcatatgcctgaagttcattcgaatacaagcaatct

SEQ ID NO: 695151 - DNA, 637 bp, Homo sapiens
tttgcatactttctgttgtattctgaagtataaactcccagttttattacccatgtgctcattttcagaggtttttctatgtctgtctatattcacattatcatctttttgagaggataatggagattgcatggaaagatccttccccaatactgccatggctctgggtttagatcccgaattaattgcctctatttgattaagagtttctgttttttctggaactaaggaaaccaacttttccacagagtttgttagatgctttgtgcctgaacccactttttctgtgagtgaactaaacaaagaaccaacagcacattgtactccagtcaactcagggaaagagatggccgtgtccttgtcattcttgacaatagttaaaggtggtatttgatccccaggcgttctctgttctgcatcaagagtactattttgtttatgtgattttttagtttttgaaagtgaaccaaatctattaatctcctcttccttctctgctaaatattctgacacygtttctaccaaacactgaagctcatccattgtatcaatacggtcctccttgggctcctcaatagaggaaggggttatctcttctatagagcactcagacagatctccaagtgtttttgcatca

SEQ ID NO: 695152 - DNA, 678 bp, Homo sapiens
tccacagcacttgagactggtccgagactcagccagatcaccccaggttggccttggaagtcacctctgagtcagttctcactgactagcacatccagggctcctcccctcatctccctgctcttttctgctcagaactcatgttccagatggactcagctggcaagtgtttgagacatgtctcagcatcttgtgatgtgttactgaacctctgggccttgtgtgggctgagtcactgactctgacttgatccctgatgcatattggccccttcttcctgggtccaaaaaccaaagcccatctttggaatgcaggccacagagtgcctgccaccaggcctggaggggaccactctccagggagggacagtcagttggacctrtctgcagtttttctgttctctccctttttcctctatactgattctttctgggaatgtgtttgtcaagggaaggggatataaggaccatcccagacactgggcctttctccctcccagctctcttcctcacctcacttttgttctacctgagctatgagaccaaatacagctgggaatcctgccttgacaggaatattcttctatcaaaaaagatgaattgtttttctagcaacttggggtaggtggtgaatcggtgagatcaggaaatgagaggggaggcagcttttctcttgtca

SEQ ID NO: 695153 - DNA, 638 bp, Homo sapiens
gcaaaaggtacaagtagtattctaagtgagtagtagagaggaagagacacttttctatctaggaagtttttctttaacagtttttctcttggaaatgtctgagaaagttttgtggggaatatggggcttttaggcgcaaaggatgctgtttattttgggtaaggggacgtcttgatagaagggacagaggcaggaacctttagggcatattcatctgggaaaggtcatttaatgtgtattctgactgtcaggtagggaagttgagttacgaaggtacttgggccatattaaggaattatttgaaggttattttgagatttaagttacacatagtatagttttgaacagatgtgtctgtgtgagctgttggttatcagtcaaagraactcaaagtaacttaagcaaaaaaagaaaggcatagctcaagtaactgggatgtttaggggtggcatactacaggcattgttggattcaggggctcaaacattgtcagaaggcctcttttttcctctctctctctgtccttgctctgccttccctacgttgagctctgcataacagccctttctctgtgatctatgagacagtggccagcggctgcagcccacaccctcctagcttagttcctttggcagaac

SEQ ID NO: 695154 - DNA, 1000 bp, Homo sapiens
cacagtgtctgcaaagcactgtaacatgaggttcaccttatacctagtactgtgtctgagtccctgacggtactagacgtccactgatgttacgtagattgagactgttgtgcaaccatcaccatcatccattttcagacctcttcatcttgaaaactctgtatctatttaaccccatttcccctcaccccaatccctggcagccaccgttgtactttctgattttatgaatttgacttactctacatacctcatataaatggaatcatacagtatttgtcctttttgtgactggcttatttgcttagcgtggtatcttcagggttcttctatgttgtagtttgtgtgagactttgcttcctctttaaggctgaataatattccayggcacgtatttcccatatgttgttttctgtattcatctaatgggcgtttgggttgcttctaccttttgggccactgtgaataatgttgctgagaacagggctgtgccagttcatcttcgagatcctgctttcagttcttttggctgtatgcccagaagtagaattgctgggttatatggtaatgctgtgtttaatttttttttttaggtacccactatattatgcatcagatttttaaactcagaactgtctacattggctacaaaaatggtcagtgagaatttctttccccaccctaatcctaaccacggcacaaaatcttacattcagccgcagttgagggactactggtaatttttcatctactgtttctgtccttcataaaaatggagacagattgaaaaaggagggctttttaaaactaagacgagtcatagccttcccggtaggtgaccttatagtttatcgcctctcaaagtgaaaggaacgctgttaatgctatgctgggttaacacttgtaaactgggactgtctctggggtgccctccttcttggggtttgtcttgtcttttttaggaagcagtgctggatcttggcagcatttagagagccac

SEQ ID NO: 695155 - DNA, 2881 bp, Homo sapiens
tgattctttcattcttctgccaatgagtaatatagcctgtcatgagtttggaaaatatgtaacacctgaaatgtctgtgtctaaataaagaaagaataaattcaaagaaaaatatttgtaattaaagagaagagtaattagatcaagtgtctacaaacatacgggtaaattgcagtgttttctatttccaggggtctttattttacaggtcacttgtggcataatgcactagaaagttgtattcttgtacataaccagtccccaactagaaatgacattaacaaatgcatccacgaaatgcaaagaaccactttaattgttgctttgaaactcctttatccttttatttataaaataaatgccatccaaataatgaggacaaaccctaccttcctttcttttccgtgtcatggcatatattgaaataccagtatctgtacagcacaagggagtcaaaaaggaacatgctcagactagaggcacagttaacagactgaccaccttgggctcaacccaccacccagagggaagagcaaaccggcatctcctcacacttgtaacctattcaccacgctccacagggaagctctgagtttaagccaccaactaatagatgtgcaaaataaaccagagaaactattaaatattaaaactaggattagcgagaataagataataattagtcctggaaaacctgactagctattataatttactgggctcagattcttacttgaaaatctatcttctgagctttcacattcctctaacatttgtagctttctcaatgtttaacagatgaaattaaagttacaaaatatttattacacatatcttgtgaaaaaatggaagacaccaatatatagtcaaaaaataaagattagctgggtgtgatggctcacacctataacgccagcactttgagaagctgaggcaggaggatcgcttgagcccaggaatttgagatgagcacaggcaacacagcaagagcccgtctctacaaaaacctgtttttttttaattagcccggcgtggcggtacacacctgtagtatcggctacttgggaggctgaagcaggaggatcccttgagcccaggaattagaggtagcrgtgagctatgatcgcaccactgcaccccagcatgggcaacaaagtgagatcccatctcaaataaagattttacaatataaataatatacgaaattaaaaatagatgaatttatgctgaatcttatcattaggttcactacaaaggatgaaaactatagcaaactcagagcatgtgaaattctttcctaaaggtatctcagaatattccttctgttgtgaattttgaaaacttgtttgtgctaagaacattagctttagtggacagctactgatttttcctatctaaaatccactcccctttcttctggtaatggtggcttgaattgctttggagaatcatttaatttgtgtgaggctaactccacacctaacacgtggccagttaagaatacctccttccctggccacaattattggtcctgggatgcagcccggatcccatctccttgtaactcctcccctgagattttgctctactgtagcttgtggaaactctgtggttctttaatctctctccctcctcccttgttttctacgccctgccccagacataccaagcgtctttcaagtcttcaaacagcccactctccaggcttgtgtcccagctgttccctctaaatggagcatccactgcttgagctgaactgacaaccattcatgatcatctctctccccgcaactgggtgactccacaacatactcccatggtgtcctctacttcccaaacacccatttccatgccttctaaggacttcctgcttctctctgtgtgtctctccccaggagaaagttctgtgaatttgttttcttccccattttatctacggtgcctggagctgtttctagtatgtggcagatgtttaataaatattattaaattaacaaattactgtacaaatatattaggcagtaagtccttatattagaaaatatttaaatgaaaaattctggtggttataggaatatattttacaatatattgtaaccacaaaagtttcatttgatataactttgtagaaaatcactcattataaagtcaaatacctatgaatggttgttaacactttgcaggacactgtttgctccatgccattttcccaaatccttacaacaggtaaacacaaaattcagcaactactccactctgaaaagacagcttcccacccccacttccataccagccaaatgaggtgattacagacatgtcttctaattgtatacaaagaaaagaatgtcatacttcatcttctaagcatctcggcagcttcctctagtagacccaaggcccattcccaaacatggtagttaataaaacggccaatcctgccaccagtctctgtcctcttgtgagcgtggctacgcggctgtgtgcagagctccattttctgtaggtggcatgcagccagcttcctggggctctggatgcctgcccgtgaatggtaccactccaaaactggatggcacatggaaaccgtgcaatctaaagacctggtcaaaaggccacctcagcttcgtgtccgagttagagaagaagccatatgaagcgagggcccacacatgccttcttcttcgtgagcagctgtgaatcacacctgtccttccccctctgtgattttacatcattttgtcattctaacagattgtaaaaaaccagttatgagagtttcagactggcaaatgcagagtcctcaaacaaaaaggccatggtatttttccttagaaagcaaacgtgctatgaaacgaaatattaaaaagatgtagaataaact

SEQ ID NO: 695156 - DNA, 626 bp, Homo sapiens
tgattatatattgatatggtttggctgtgtaaaaatggactaatacatatatattggtttacatccagagttcctggctcttaactcccatagcccttgttagtcttttattataatgctgggttgctttattaggcctcaggagcagatgtcaggaaacaatctctctctctgaccttctcctgttgacacaagattctttcagtgctgcttcaccagccagaaatctccacggttggccagctgcacctctggcyggggcctcactcagctctgggcttgccactagacttgctctgcccattaagcctggcaggcaatgcttagctcatgttattggcccaggttccacacctgctgtggctctgtgctcagcccatagctgggctgggcatgctgtgactggcttctgccttgggtgccagcatctggacaaggggtgggggatgcagcagagcctgaaaacttggagatgccagcaactgcggagccccaaggggtgttacccttttgctcagggagtcctaagctctgagcccccaggaagcatcacagcttgttcctgttatagctcattcattcctaccatctgcatgctttcgtgaatgggggcatgtcccagctca

SEQ ID NO: 695157 - DNA, 551 bp, Homo sapiens
aaagtcctgaaaagaagaagtattacagcacttctctaataattcctggtctgtttcaaggagagctcagccctgtgagtagggcatactgtgggtgataagggcactaatctaggagcttctcaggaccgcgcattgttacagtcccaggcactgcatccagtcccatcttcctaaagtgcagaactgaccttatcccttccytgcttaaaacattgccctggagcagagtgggattagagtcttgccccacttcctgtctgggagattgaaggcaggtgacttctgagcctattttctactctaccttgggccagtgatacagcctgtatgtgcctcagtcccctcacatacaaaattagatgatggtagctcctacctcattgggctgtaagaaatagatgataagggaaaaggctaagaagtaggatagctgtattagttcattcttgcattgctgtaatgaaatacctgagactgggtaatttaaaaaggaaatagatttaattggctcaccgttctgcagcctataaaggaagcataaacggaag

SEQ ID NO: 695158 - DNA, 1482 bp, Homo sapiens
tagtttcaagatgtaaaaatcctacatagtcagacaacctgctttggctatatcatcagaaatggcttaaaagcaaaaatgacattccagttattccacacacaaatccctgatgttaacatccctagcctaaaaatagccatttggaaggaaagccctatttcaaagcaaaggaaatgtgagtaagacaatatctggtcctggaaatgtcagactcaaaattgagttctttagatgggaatcgattctaaaataacatctctgatttgttatataacaaaacacaatggctttataaactttatataaacattatcaatttctgatggttttctcttaaaagggtagctctgaagtaattattctctctttaaactgtatttactgagccgctgacttttttctgatttcattcattcattttccccatttcccctccccattcccagtctagactaatgaacacaatatttgagaaatcaaaaacttaggcaaagatcttttayttgtggttaggcttacaccattccaaaaagtaaatataattaacaaaacacttaaaagtaccagaggaggtgccccggtatcagtagaaggcactaatcagaccacagaagaaagcttgacaaggatcttcatatacggatgccagcttcaatcatgtcaaatgaacatgttgttctctcagtggtaacagttagtaggccagagcagaactggagactcttttccactggtgtaggcagccagggctctccaggagtactattatagatgacatgaaggtgactaccacggtagcaatgacaacaatcccagttacaatgactgaacaaagctaaggccatcagtataggcttgaagcgatctagaaatccttctggagcctctcatcagctgatcatccctgatacatcccttggatggccacagaatccattttcacaaaactgaatccaatgcattgtgttatcactgcaacacgtgaggtctggtagttgctaatttggaaaaatggtaaatactaatactattgcaaatagtcaatctatgctacaagaaaaacatattaacacacacaggtacttttggtggtatggctttaaattctgtgctgggctataaaaagcattataagcaaagttaatgagtaacagtttttattaaaaagaaaaaaaagaagtaatttaccaaaattagtttaagacatattaaattttatgcaaatacctttacaaaaactgaattatataattagagtgctttttatacattaatactgaatatgttacattactatatattaaagatataatttgaaaactagagctgtttcaaaatactgtgttcaaatgtcattctttgggaacccagagaaattgcctgatcaccatgctgtccttccacaaggggtttctctcctgagtcaggagagagtcattaagtaacatttaaaaaaaaaaaaaaaacaagagtaaaaca

SEQ ID NO: 695159 - DNA, 1482 bp, Homo sapiens
tagtttcaagatgtaaaaatcctacatagtcagacaacctgctttggctatatcatcagaaatggcttaaaagcaaaaatgacattccagttattccacacacaaatccctgatgttaacatccctagcctaaaaatagccatttggaaggaaagccctatttcaaagcaaaggaaatgtgagtaagacaatatctggtcctggaaatgtcagactcaaaattgagttctttagatgggaatcgattctaaaataacatctctgatttgttatataacaaaacacaatggctttataaactttatataaacattatcaatttctgatggttttctcttaaaagggtagctctgaagtaattattctctctttaaactgtatttactgagccgctgacttttttctgatttcattcattcattttccccatttcccctccccattcccagtctagactaatgaacacaatatttgagaaatcaaaaacttaggcaaagatcttttacttgtggttaggcttacaccattccaaaaagtaaayataattaacaaaacacttaaaagtaccagaggaggtgccccggtatcagtagaaggcactaatcagaccacagaagaaagcttgacaaggatcttcatatacggatgccagcttcaatcatgtcaaatgaacatgttgttctctcagtggtaacagttagtaggccagagcagaactggagactcttttccactggtgtaggcagccagggctctccaggagtactattatagatgacatgaaggtgactaccacggtagcaatgacaacaatcccagttacaatgactgaacaaagctaaggccatcagtataggcttgaagcgatctagaaatccttctggagcctctcatcagctgatcatccctgatacatcccttggatggccacagaatccattttcacaaaactgaatccaatgcattgtgttatcactgcaacacgtgaggtctggtagttgctaatttggaaaaatggtaaatactaatactattgcaaatagtcaatctatgctacaagaaaaacatattaacacacacaggtacttttggtggtatggctttaaattctgtgctgggctataaaaagcattataagcaaagttaatgagtaacagtttttattaaaaagaaaaaaaagaagtaatttaccaaaattagtttaagacatattaaattttatgcaaatacctttacaaaaactgaattatataattagagtgctttttatacattaatactgaatatgttacattactatatattaaagatataatttgaaaactagagctgtttcaaaatactgtgttcaaatgtcattctttgggaacccagagaaattgcctgatcaccatgctgtccttccacaaggggtttctctcctgagtcaggagagagtcattaagtaacatttaaaaaaaaaaaaaaaacaagagtaaaaca

SEQ ID NO: 695160 - DNA, 1482 bp, Homo sapiens
tagtttcaagatgtaaaaatcctacatagtcagacaacctgctttggctatatcatcagaaatggcttaaaagcaaaaatgacattccagttattccacacacaaatccctgatgttaacatccctagcctaaaaatagccatttggaaggaaagccctatttcaaagcaaaggaaatgtgagtaagacaatatctggtcctggaaatgtcagactcaaaattgagttctttagatgggaatcgattctaaaataacatctctgatttgttatataacaaaacacaatggctttataaactttatataaacattatcaatttctgatggttttctcttaaaagggtagctctgaagtaattattctctctttaaactgtatttactgagccgctgacttttttctgatttcattcattcattttccccatttcccctccccattcccagtctagactaatgaacacaatatttgagaaatcaaaaacttaggcaaagatcttttacttgtggttaggcttacaccattccaaaaagtaaatataattaacaaaacacttaaaagtaccagaggaggtgccccggtatcagtagaaggcactaatcagaccacagaagaaagcttgacaaggatcttcatatacggatgccagcttcaatcatgtcaaatgaacatgttgttctctcagtggtaacagttagtaggccagagcagaactggagactcttttccactggtgtaggcagccagggctctccaggagtactattatagatgacatgaaggtgactaccacggtagcaatgacaacaatcccagttacaatgactgaacaaagctaaggccatcagtataggcttgaagcgatctagaaatccttctggagcctctcatcagctgatcatccctgatacatcccttggatggccacagaatccattttcacaaaactgaatccaatgcattgtgttatcactgcaacacgtgaggtctggtagttgctaatttggaaaaatggtaaatactaatactattgcaaatagtcaatctatgctacaagaaaaacatattaacacacacaggtacttttggtggtatggctttaaattctgtgctgggctataaaaagcattataagcaaagttaatgagtaacagtttttattaaaaagaaaaaaaagaagtaatttaccaaaattagtttaagacatattaaattttatgcaaatacctttacaaaaactgaattatataattagagtgctttttatacattaatactgaatatgttacattactatatattaaagatataatttgaaaactagagctgtttcaaaatactgtgttcaaatgtcattctttgggaacccagagaaattgcctgatcaccatgctgtccttccacaaggggtttctctcctgagtcaggagagagtcattaagtaacattyaaaaaaaaaaaaaaaacaagagtaaaaca

SEQ ID NO: 695161 - DNA, 651 bp, Homo sapiens
ctgccacctcccagattcaaatgatccttgtgcctcagcctcctgagtagctgggattacaggtgtgcactaccacgcccgactaatttttatatttttagtagggacagagtttcaccacattggccaggctggtctcgaattcttgatctcaggtgacccgcccaccttagcctcccaaagtgctgggattacaggtgtgagccaccacacctggtgggtcttttcaacttgcttttgttttcacttatgtctcatagtttctatcaacttactttgttttgccttttttgtacattagttaatgccttttcctgcttttaatgtcatccaattcaatagaaagatatggaatactatgtaattaatttttaaagttcctctacctaactctcaaatagatttttggtgctgagtattattgtaggaaactgatagtttggtaaggtctcagtccagctacgaattaatatggtttcttggctaaattatatactctttttctgtattttagtkttctcatctatagaatgctacttgtaatatctgccatagaagtgtacctcatagaagtctaaagagaactaaattatgtatatgaaaatatatgtcaatttatctagggcaaaggctacactttactaattgctg

SEQ ID NO: 695162 - DNA, 1289 bp, Homo sapiens
tctactctgccatacgttactagtgacttcagacaacagtgtcgaatctcatcagccaaaacccaccaggaacacaacgtgtagttatacagaagttggcttcgtttagcttgcttctgccggggccagtgtacccagaagaaccctgggactattttggaaaggcagacttggggttgttgttggactgggtgatttgaaggtggaattagggaaatgggaccagatctgggttggatgtggccaggaggcagaaacaattcagtgattgggtatccaacaacttttatctaggaggtaggagattaaagtagagttagagtggccatgcagtaaagaatttgcaatcatacatgttggtgagaaaagggggcatctggttatttttgtggtagtaatgtgggcccatctgtgtccgtttttgagcattcattatgttctgatgggaatatgggggtcaggttgtcaattagactggtctttactttgaaggtcggtagggttgaatttaatttgttcaccaacttacttaatttcattctgaatgctgatgcttgaggaataggttttaatggagcaagatgcagtgggaagtagggacttagaggatgtctaaataaccgtgtctgagcagtcactggtttttaaacattgtagctgctcaatggtaataatgcaaattttaaaaaaggcagatgggtagttttcgcctagcttgagaagctttaaaaatcatcatgacgactgtactatcttaaaacgtgatcagctatagaagcagataaaactgtcgagctgttattaaagtgtacttacagttgaaacatattagtcttcaaagatgccatccagttactgatccagaggtaatgttaatggtggtgttactcacggtgccaaaacacccacagatcagtagaaaatgtggacagtcaatttagaaaatttgcaaagcagtcagaagtgagaggcagtgttgggtagtgaagagtggaccagactccaatcttggtcctagtccgagctttgccactgtgtggtccagaatgtctttgccactctcttaacttagtcatttcatctctctgggcctcagtttcytcatctgtcataatgaggaagttgaacacctggtctctgtgttccttctaaagtttctgtcattaagtctgtttgaagatagtctcttcttttgaaagtattagtttgtttggccagttgggccaggtcataaatattacggaattattagtcagctcttgaagacaggaatgtttgagggctttgaa

SEQ ID NO: 695163 - DNA, 627 bp, Homo sapiens
cttatcagcatttattactgtcagaccttatctcctttatktaccatctatgtgtttattgtatgtcatttctcactgaagtgaaagctcccagagtgcaggaacctgtctatcttggtgaatgtctgttctctatctcattgtccagcagagagcctgatatatgagctgcccagtatgtgcatattggatgttgaatgaatgcatgcttttcttctttctgttccctatttcccatttccctttccactctatgcctgtctcatggctcatgtcccaagcttcatgttttcagatatctgctccaattaactaaaagctcttatcaaattaagagaatcctttcacaggtgcagttgtatttcccttgaaattggacttcttaggttggaaatttagtcaaaaggacaaatattgatagatacgatgacttattcagtgcccctcaagttgagatcaccatcagtagcttttcattctctcatcccaaagctcttatagggtctttagatctataagagatagtagtcttatatgaggtagaacactgtcttgttttgaaggtctttcattgcatcagggcttcaacaaaagagaattccttctgccctggaagtatgagaggga

SEQ ID NO: 695164 - DNA, 627 bp, Homo sapiens
cttatcagcatttattactgtcagaccttatctcctttatttaccatctatgtgtttattgtatgtcatttctcactgaagtgaaagctcccagagtgcaggaacctgtctatcttggtgaatgtctgttctctatctcattgtccrgcagagagcctgatatatgagctgcccagtatgtgcatattggatgttgaatgaatgcatgcttttcttctttctgttccctatttcccatttccctttccactctatgcctgtctcatggctcatgtcccaagcttcatgttttcagatatctgctccaattaactaaaagctcttatcaaattaagagaatcctttcacaggtgcagttgtatttcccttgaaattggacttcttaggttggaaatttagtcaaaaggacaaatattgatagatacgatgacttattcagtgcccctcaagttgagatcaccatcagtagcttttcattctctcatcccaaagctcttatagggtctttagatctataagagatagtagtcttatatgaggtagaacactgtcttgttttgaaggtctttcattgcatcagggcttcaacaaaagagaattccttctgccctggaagtatgagaggga

SEQ ID NO: 695165 - DNA, 627 bp, Homo sapiens
cttatcagcatttattactgtcagaccttatctcctttatttaccatctatgtgtttattgtatgtcatttctcactgaagtgaaagctcccagagtgcaggaacctgtctatcttggtgaatgtctgttctctatctcattgtccagcagagagcctgatatatgagctgcccagtatgtgcatattggatgttgaatgaatgcatgcttttcttctttctgttccctatttcccatttccctttccactctatgcctgtctcatrgctcatgtcccaagcttcatgttttcagatatctgctccaattaactaaaagctcttatcaaattaagagaatcctttcacaggtgcagttgtatttcccttgaaattggacttcttaggttggaaatttagtcaaaaggacaaatattgatagatacgatgacttattcagtgcccctcaagttgagatcaccatcagtagcttttcattctctcatcccaaagctcttatagggtctttagatctataagagatagtagtcttatatgaggtagaacactgtcttgttttgaaggtctttcattgcatcagggcttcaacaaaagagaattccttctgccctggaagtatgagaggga

SEQ ID NO: 695166 - DNA, 602 bp, Homo sapiens
tttagagaattagaatgcacacaaacactgaattctgaaggtatacggaagctaacataaaaactgttgattcagcagtcatttctggacttgtctacaccatgggtccactgttataagtcgcaatgttcaaacytgcttgctctaagtgtagtgctcagaccgggggcatctaggagccggttagaagtgctgaatctcagcccttaccccagacgtactgaatcagaatctgcattttaataagattcctacgcacattaaagtttgagaaatgctgtcctagaagaataaaggtctcgttaaaagatctacagttgatggaaggctaaattaggctcttttaaattaaattacactttctcacttacactggactcgagagagtgaaataacttcccatgaatgtttcccgatcatcagtattcacttgatgtggccagagtggctcttccctctgtttgggtacttcctccaccacccagctttgccctttgctgtgccccttcccttggtttcccccttccaggtggcactcgctctaagaagctgatcttctggtcctgctggcacctgcattgtgtctcttgacatgatctctt

SEQ ID NO: 695167 - DNA, 651 bp, Homo sapiens
ttcagaaagtaggaatgaaggcatggacacattgcacaggtaagctttgctttcttcacaatttagccatccaatcaacaggcatttgcctgtctgggtacccagtaaccctcttaagtgccacaggcctcaggcttagtcttgcaagccaaagcaaggtcattagtacctgggattgagttctctgcgttcaggcctcaaatcccctttttaaatggcttctgggmtagcctcatctttcctcccccttagaaatacaggaggccagataccccaagacactgtttaaattataagactggttcacttttcatgaataaacatgagagataatgtgtgaaggggaaaaacatttaccaatcatgcgtcttcaaaaccttccaagattatgcagctttaatggctgaatgattttgaaagaaaaacttgtaaatggagctgcacctgaactcataataaaaaggcatcagattaattgagtctcagagcttccctaacaataagcctgacctgcatatccaagttgtggccggccaaggccaagagggcatttgcccttagtctcaggctgctccagtttgacagaaagtcaaggcaggccactcctgacagggtacactaataaggacagagggttagggcacttcaaga

SEQ ID NO: 695168 - DNA, 651 bp, Homo sapiens
ttcagaaagtaggaatgaaggcatggacacattgcacaggtaagctttgctttcttcacaatttagccatccaatcaacaggcatttgcctgtctgggtacccagtaaccctcttaagtgccacaggcctcaggcttagtcttgcaagccaaagcaaggtcattagtacctgggattgagttctctgcgttcaggcctcaaatcccctttttaaatggcttctgggctagcctcatctttcctcccccttagaaatacaggaggccagataccccaagacactgtttaaattataagactggttcacttttcatgaataaacatgagagataatgtgtgaaggggaaaaacatttaccaatcatgygtcttcaaaaccttccaagattatgcagctttaatggctgaatgattttgaaagaaaaacttgtaaatggagctgcacctgaactcataataaaaaggcatcagattaattgagtctcagagcttccctaacaataagcctgacctgcatatccaagttgtggccggccaaggccaagagggcatttgcccttagtctcaggctgctccagtttgacagaaagtcaaggcaggccactcctgacagggtacactaataaggacagagggttagggcacttcaaga

SEQ ID NO: 695169 - DNA, 1499 bp, Homo sapiens
gggaaacggtggtttttatggaggtcctgaaagtatacctaataggagctactttttctctagtgcccatgtaggctctactgaaagggtttgtcaaccagtttaccacaatgcgagatgtcttacttttaccttgatgaaatgcttatgaagtttcttagtgattttttttcttcatgctcacctgctgtgcctgcaatgggccatgtgggaagatccaccctctgcttggaaactagctcactctctgtttcatcacctagtgtcttgctggcagatgtggaagatcttattcaacagcagatttccaacgacacagtcagcccccgagcctccgcatcgtactatgaacagtatcactcactaaatgaagtaagccatcacacagctcttcaaagctactattttcatttaaccagtattgccatttcaatcaggggaatattcaagaatcataattggtggaagatggtaaaaaataaaacacaaacacacttaggttaattaaatggtggtcattcattttttggtagatatcttccctgagaagactgcatcatatttggtaaactgcaggatgtttgtctacagctaagaatatctctaactgctgggaataacactttatgctatggaacaacagaaattaaagaattggggcttttaattaaaactgccaccaaaaaattaccagtccaattaatcatgtctctttggaccattaccctaattttactaattaccagattagctcactgaattaaaggaatatattcacttatatttaatacactataactaattgcattttattccttagaaggaagctatttaaactaataataataataatgcctttgttttaatctgtaagaaattggattttttttctatcagtacttacaggttccactccttctagagagaacttgagtaagatgttgatgtgcaggtgagacctcagcaagctttcacataatccactaaaagccattccctgtatttgttagttgaaagaataaatkcgcaggaggactttcttttttatatgatattctccaagtagtaaaaataccttgatgcctttttatgagtatgcagctatattgcctaatataactatttttgtcatctttgactaagtgcccagaaactattagggaccatatccatatttttaagacatctaagacttaggtaatgagaatcaattttatgtatataatctttaaaagcatctgttccttcccagttaattaagccagagtcagtatgcttctagaatgtgtgcctggttgattgagggggccttaaaattgcacccccccttttttaatctctcctacatctatccaacttagaccacctctctccagcatccatcagcacgactgcatgagcaaacttgatgcagagaggcttcataggtgggatttcaccttcataaaaggtgaaactgtcactgctgtgataagtttggtggggagaggggaatgcca

SEQ ID NO: 695170 - DNA, 1955 bp, Homo sapiens
atatagatatacatatctatctaacatataccatctgtatatctgtattgatatmtattttctagatatctatacatctaggtatataaatatatatgggtatatatatatatatatatatatatatatatatattccttcacattatattaaaactcttaagaagcagaaagtatgacagaaagatcttagaaacatcgagacattgtatcctcaaagaaacatagtaaaactagatcgcatttctcaactaaaacagtggaaagtacatgacaatgcgattatattttaactgttccaaaaaaaaaagaaagcaaacaaaacaaaaaatgagaatctatcagccacaccatttataatacactttagatatatttgtacaagtgaaaatggagactaagtcctcaccagcagaaagaatcatactaaaagatctaccaaataaattcttcaaaattacctacgtggaaactcagagataaagagtaaagtaagaaattcaaaaacttgtaaacaagttgtgtgcatttacagaagaatctgtaatggttttcacaaaagtaaggatgtgattctcaaattacacatagtaccaaaatacaagataaaactttctgacgcatttggggatggaaatgtatttaaattgtttggaggccacgtggagtatttacaaaattgacccatttctaaaccagtgcttgtctagcattggaaatttttcccacatcaggagacatttaacgaagtgtggagacattttgattgtcatgacttggtagagaggtgtgtgctaccagaacttgataggtgaagccaggaagaccgctaaacacactgcaatacacgataccaccccacaataaagaattattttacccaaaatattaatagtgctatggtagaaaatcagtcttctagcccatgaattgaattgtcatcaaagtataaaataatgaaattatataaaatacaccctattaacagtatgtaattaagcttaaaaaagtaacacaaaggtaactgtgaaaaatccccgtctgcttgaaaattatatactgtacttttcaatagtccatgaaacaaagaagaaaagttgatagaaatcaatatatttagaattaaaaattgtttaagatgcagatttccaaatgtgcaaaatagaattaaagttgagttcggagaaaagagaaatatagcttttaatgcatctaatgggaaaaatacagaatgaataaattaatatttaaaagttagaaaaagtgtaaggaattacttcaaagaaaacaaaggaaaccaaacaataaagagaactgaataggactgaaaaaagtatgagttttaaactatttttgaaaaaagtatatgaatttaaaactatttatgattttaaaaaacagcaaaaaatgagagaattttatgtgataaagtatctacaactggggatcaaaaagtactggaaacatttaaaataagagagaaggcaaaacaaagcagtattagaaaacaggacatcatcatagactctgcagtaattgaaaagacaatgagaagacattgtagcaaattttacataaatcatgctgaaaattgaggtgaaatgaacaaatttctagaaagacaatttacaaaatatgacagaagtagaatatttaatcctttatcaaaaataatgaataatgaatctaaagttgaaacctttttatttagaaaactgaaggtatatgactttgctgctgaaatccaacaaatgctaaggcaagatataatgccagttttacataaaatattgatagaaaactctaataagtgataatacttccagatatataagttcaaaacaactttacagtttaattacaggaaaggtaaatcactgacaaatatcggtcataaataataaattataaacaaaattacttttgcagtatatacaaattatgctatatcatgat

SEQ ID NO: 695171 - DNA, 1955 bp, Homo sapiens
atatagatatacatatctatctaacatataccatctgtatatctgtattgatatatattttctagatatctatacatctaggtatataaatatatatgggtatatatatatatatatatatatatatatatatattccttcacattatattaaaactcttaagaagcagaaagtatgacagaaagatcttagaaacatcgagacattgtatcctcaaagaaacatagtaaaactagatcgcatttctcaactaaaacagtggaaagtacatgacaatgcgattatattttaactgttccaaaaaaraaagaaagcaaacaaaacaaaaaatgagaatctatcagccacaccatttataatacactttagatatatttgtacaagtgaaaatggagactaagtcctcaccagcagaaagaatcatactaaaagatctaccaaataaattcttcaaaattacctacgtggaaactcagagataaagagtaaagtaagaaattcaaaaacttgtaaacaagttgtgtgcatttacagaagaatctgtaatggttttcacaaaagtaaggatgtgattctcaaattacacatagtaccaaaatacaagataaaactttctgacgcatttggggatggaaatgtatttaaattgtttggaggccacgtggagtatttacaaaattgacccatttctaaaccagtgcttgtctagcattggaaatttttcccacatcaggagacatttaacgaagtgtggagacattttgattgtcatgacttggtagagaggtgtgtgctaccagaacttgataggtgaagccaggaagaccgctaaacacactgcaatacacgataccaccccacaataaagaattattttacccaaaatattaatagtgctatggtagaaaatcagtcttctagcccatgaattgaattgtcatcaaagtataaaataatgaaattatataaaatacaccctattaacagtatgtaattaagcttaaaaaagtaacacaaaggtaactgtgaaaaatccccgtctgcttgaaaattatatactgtacttttcaatagtccatgaaacaaagaagaaaagttgatagaaatcaatatatttagaattaaaaattgtttaagatgcagatttccaaatgtgcaaaatagaattaaagttgagttcggagaaaagagaaatatagcttttaatgcatctaatgggaaaaatacagaatgaataaattaatatttaaaagttagaaaaagtgtaaggaattacttcaaagaaaacaaaggaaaccaaacaataaagagaactgaataggactgaaaaaagtatgagttttaaactatttttgaaaaaagtatatgaatttaaaactatttatgattttaaaaaacagcaaaaaatgagagaattttatgtgataaagtatctacaactggggatcaaaaagtactggaaacatttaaaataagagagaaggcaaaacaaagcagtattagaaaacaggacatcatcatagactctgcagtaattgaaaagacaatgagaagacattgtagcaaattttacataaatcatgctgaaaattgaggtgaaatgaacaaatttctagaaagacaatttacaaaatatgacagaagtagaatatttaatcctttatcaaaaataatgaataatgaatctaaagttgaaacctttttatttagaaaactgaaggtatatgactttgctgctgaaatccaacaaatgctaaggcaagatataatgccagttttacataaaatattgatagaaaactctaataagtgataatacttccagatatataagttcaaaacaactttacagtttaattacaggaaaggtaaatcactgacaaatatcggtcataaataataaattataaacaaaattacttttgcagtatatacaaattatgctatatcatgat

SEQ ID NO: 695172 - DNA, 650 bp, Homo sapiens
ggcccaaaatagaaattgagtagttgaaagtaaaggaggctataatgcttacacacagaaatttacagactgagattcattcatttaacacaacattgacatagagccttgtagaatggaacttgaatcaacattttaagtttttttaatgtccattttttactatttcttatcctatcacatttcattttatcttttaattctattttaatttttttattgaggtaaaatacacaaaatttatcatctttcccatttttaagggtaccattcagtggtaatatgtacatttatattmttttttcccccctttcttaccccttctccctagttttcctggcctctggtaaccaccaatctactctctatcttcatgagatctacttttttagcttccaatatgagtgagaacatgcaatatttgtctctctgtgcatggtttatttcacttaagataacagcctacctctagtttcatccatgtagctgcaaatgacaggatttcatttttttatggctgaatcacattctgttatgtatataaatcagatttcctttatccatttatccattgatgagctcttaggttgattccatatttggctattgtgagtagtgctgaaataaacatgggagggccgatatctctt

SEQ ID NO: 695173 - DNA, 2959 bp, Homo sapiens
acctttaaacaaaactaattatacatccatttaaagatgaaaaatcatgcagtccttcacaataaaaagtgcatttctgatccaagagaaaacaactgcagtaatgaaaatccctaaacttactggagagtgtttctttccgagaattggttccaacttcatagaagtaagaggtgctgaggtcagagtgagcagaccgtgtgattcaaaagcgtgtatccaagcagcaaatgtactagaattgggaagtattcagcaaggaggtgtctccaggcaggtagggctccattccccaatcaggctaaatactggctttcagaaatccacttgacaactctgattgagatgagattgcagtctgtaaaaggtcaagaaaacttttatactctagctaccatgatcacaaaagtgccaaaaagcagggacaaagaatagggagtttgcagaaaagaagaaaatgtaatagccctgtctcctcccaagcatggtgaaaggtaaaatgtggctgagaaaaaaaatatttgtgtcaggcctagattctcagtctgaattgaaaacaatagcaatgagattgtcctatacaaaggcaacgcgtcagaggcaccctgcataggctgttgtatcttgttttgtaattccaagtaaaagctctgtttgggcatatttgctgtaggattagaatcacagaatgtttgagttaggtaggatcttggaaaccacctaggacacctcccattcctcccaatcccaacacctcctgtcagttttacacacagggaagctaaatccaaaagcgatgggacttgctctctggcttagctctgcatttgagctaaagtatgcctccagcctgcaagctcagctcccatggagacaggatagtatgaatataaaacgccccagatgtgcagccagaaagagctggtggctcattctgactctgccactcattagctgcatgaataaatcattgagcctcagttacctcgcatgtaaaatggaaatgacatatgccacatagggagttatatttagtaaaatgttattataaaattattattgtaaaatgcttagtatattgcttagcacatagtaaatgattattattcctcattctttagcaacataaatgtataatgactcaccttgccagctcagttgggtccccttcataccttagcagaactttcattagtccttagagggtcacttaaccctctttctcattccccatcaaatcacttcaaattctcatttatcatatcaatccctctatgttcttgccaactcactccttttcatttttccttctaccgtgcaaaaaacttgccatacatcctatcaacccatctttttattttcttttgttttaccttctaaacatacctggccttgtccttttgctaaagagactggtccatccttttccatgctattcagaaccacattccatttttttcagccctctctattttcatatctcactgttcccttcttcctttcttccttcctatccatcagcctataaacttaaacttcattacaagaaaagttacaataattatattagttccctcaatttccatgaaaatatagctcttttccccttgwtctcattttgtgttctggtttgttttttttactgtcaattgtctcctaagtacaagctgcagttggtcattgtcttctagtctgctttatcatctgccttcacactgtaaaggtgaaggtcctaagaacaccatagacctccttatgtccagactcaaaggcctcaatgaactcttcaccctcctggatctcatggcagcaacaacactgctggccacctgcccctccctaatgctctccacccctttacctgccagagcacctggctgccctcctgcctctctgatcccactttttcttgttgtagtggtggttgtttctgttaactccataactgttggataagctcagagttccatctttggtcatcttctccctatatttacctgccttgatgatctcattattgccctcttccattgctccttacctgaattccagctctactcagtatctctaaagcactccagacttaatatatgcataaaaacacatttctgctctcattccaattctacaagtttcagttaatggagcctactaaccctgttagccaaagagcctgccttccctcttccttacagcccacctcatcttccatatctaaccagtcatcacatcctgctattcatccttagaaatgtccccctccagcccaggctagcatctccatgcccatggccttggctttagtgggaacctcatcatttcagagctagaatattacaaatagtctccaatgtggtttcaaccgatcctagccttcccacttcagtacaacctctatacattaaccagaggtggaaatagattggagcatgaatctgttccacccctgggctgcaacataaaaccaccttccgtaaactgacataaaagtcttttcagacatgtaattacctccacaccagggactctagtcacatgtagtatctcaccattcctaagcacattgccctttcacaaatcttgatcctacacattcaagtctcattgccaggaatatcattcccctctatctcttcctgttaccaccttcagcacccaattcaaatgtcacccatctctgtgggtatccctagacaaccccaggcaaaacgtggccatggtactttgttcacacctatatcaagctcttaccctgtggaattgtaataaaacactttaatgtgtctgtcttgacagtggcattgtcagtctttcacagccggaattacactttttcaccttttatttcagcacctattagaaagccttgacatattaggtgatcaaatacacatttgtggaataaatgaatgactatatagtggaatgtagccaattgagactgatgcttttattgccc

SEQ ID NO: 695174 - DNA, 1497 bp, Homo sapiens
attctcctgcctcagcctcccaagtagctgggactacaggcatgcrgcaccatgcctggcaaatttttttttttatttttttttatttttagtagaaacagtgtttcaccatgttggccaggctggtcttgaactcctgacctcaggtgatccaccacctcagcctcccaaagagctggcattacagagtcatttttaaactagggtttggtgactggaagtacggaagtttcaattaggcacaaaatagcccaaaataacccctcctcattgtatttacttaagtattctttgtatatagcttaattcgttcatgtaataaatacatatgtgcatctgtttatatgtgtgtgaatatggatgtgagtatgcatgtgtgtatgtgtgtttacatgtctgtgctcacctatgtgtgttgagcacagatgctaggccctagatacagtggttaacaagaagaaaatagtctctaccttcataggttattttccagtgggggttataagagagtgacactagattttgagatttttttgaaggccaggtctgactgtatcagattatctatatctagcacagtgcattataaatcttaagttctcaatgtctgctaaataatttttcaagctgaaaatgtcagtttcaggttgaaatcactctcaaagctatgatttgttccaagatgaattgttcaacatgaacatatatatgtctattttagtaaacagatacacgtggatatatatagtttaagcatcatcattcttaggtgtagtcaacagaatctactccagcaagtttaatcagaaaggcatttattagacagtaccgggtgatgtacagcatctccaggagggccaagagccaagaatagatgctccgtagccaggagcacctgcaaacagagaaacatctatccaccatgagactgttctaggaaaaacctctttcctcctgtgactcaactctttccccaggtttcccatcagagcttgccccagaaaaactaaatgcttctattgtcatcccacacattgttcccttcccttcttccaaatctcatgtgtgtataaaacctgagccatatatggagctctgactgcgagaaagcatgaaaattgtcgctattaactttccggcctccccagtactgaaaggcatactggaaggggaattggaatgagtaatgtgcaagccaatccatcataaaattgctacagtttacactaagattgttgtcataactagctgactgcttggactgtgttcctagagagaaccataaataaaaggatagaagaaggtttcattcaatgcctagaatgtgtcagggtgagatggacaatccccttccctaaattctactccccagacccgaggggcagcggtaagcaagaagtgactctacacatcctagaaatcttaagctttgcaatggaactgagctgcattctctcagagagaagtaacaatgcctgtctgacccacttcaaagag

SEQ ID NO: 695175 - DNA, 1497 bp, Homo sapiens
attctcctgcctcagcctcccaagtagctgggactacaggcatgcggcaccatgcctggcaaatttttttttttatttttttttatttttagtagaaacagtgtttcaccatgttggccaggctggtcttgaactcctgacctcaggtgatccaccacctcagcctcccaaagagctggcattacagagtcatttttaaactagggtttggtgactrgaagtacggaagtttcaattaggcacaaaatagcccaaaataacccctcctcattgtatttacttaagtattctttgtatatagcttaattcgttcatgtaataaatacatatgtgcatctgtttatatgtgtgtgaatatggatgtgagtatgcatgtgtgtatgtgtgtttacatgtctgtgctcacctatgtgtgttgagcacagatgctaggccctagatacagtggttaacaagaagaaaatagtctctaccttcataggttattttccagtgggggttataagagagtgacactagattttgagatttttttgaaggccaggtctgactgtatcagattatctatatctagcacagtgcattataaatcttaagttctcaatgtctgctaaataatttttcaagctgaaaatgtcagtttcaggttgaaatcactctcaaagctatgatttgttccaagatgaattgttcaacatgaacatatatatgtctattttagtaaacagatacacgtggatatatatagtttaagcatcatcattcttaggtgtagtcaacagaatctactccagcaagtttaatcagaaaggcatttattagacagtaccgggtgatgtacagcatctccaggagggccaagagccaagaatagatgctccgtagccaggagcacctgcaaacagagaaacatctatccaccatgagactgttctaggaaaaacctctttcctcctgtgactcaactctttccccaggtttcccatcagagcttgccccagaaaaactaaatgcttctattgtcatcccacacattgttcccttcccttcttccaaatctcatgtgtgtataaaacctgagccatatatggagctctgactgcgagaaagcatgaaaattgtcgctattaactttccggcctccccagtactgaaaggcatactggaaggggaattggaatgagtaatgtgcaagccaatccatcataaaattgctacagtttacactaagattgttgtcataactagctgactgcttggactgtgttcctagagagaaccataaataaaaggatagaagaaggtttcattcaatgcctagaatgtgtcagggtgagatggacaatccccttccctaaattctactccccagacccgaggggcagcggtaagcaagaagtgactctacacatcctagaaatcttaagctttgcaatggaactgagctgcattctctcagagagaagtaacaatgcctgtctgacccacttcaaagag

SEQ ID NO: 695176 - DNA, 1175 bp, Homo sapiens
tttcatgtagtcatcgtaccacctctctactctgatgtaggcatcactgttgacattgttgtagtatcagttaaagtgctcttcaatttttgcccatctgtacctccaatttagtgatcccaaggctctggggaagtaaaaaagctcttttgatgatcatggggttggatctaggagctgattcttgattcagattctggagctcccttcaaactgaacggagcccagcgtgattttagtaggtgtgcagaagtgattggggttgttaggattggaaattttgttgaggcaaatcttgcagtttgccctttcctttctacattacggggagctggtcacccttccactcacccaccattyaccaaacaaatggtagtgctttcttcttgatgaaaggaatgagtcagtcctgaccatctggaagctttcagtttagtgcaggacaaagacatttttatatctcaggctctcaagaaagcagccaattgaagggtatatatagattgctactatttggttttattgtttttctgtggaaaggtaagtttagtaagcaaaggataaaaaaggtctatttttggcaatcactcaagcttaagttacctgccacacaggacgatatgtgcagcttttggaaatagaataatttcctttgaacaaaagctttgggtagattgtaaatatgagacagttataaatagggcccaggattaatttgctaagtgatagcaaattaaaagacaaaatttaagtgcaaataattggagaaggacttttcaaccatactgtcacatctatgtaacaattactttcagtagtagcctcaccagatcttaaaggtaatgttgcaaatagtgggtttcctttatttaagtatattaacttcttaaatattatagataaatacaaagatgagcagtagattactgtgttattaattactattttttggtatattttttggttaggaattaattcagaatgcagaagatgctggggagacagaagttaaatttttatatgatgaaactcaatacggaacagagactctttggtcaaaagatatggcgccatatcagggtaagaatcaataattaggaacaaattttattgtatgcactaacaggcagtttttaatgattaataatgctttgtttaatgaacagtctatcatt

SEQ ID NO: 695177 - DNA, 562 bp, Homo sapiens
ggacaggaagccccaggtagactacaggccccaggtggatgcctaggcccctggtgaacaccacgctccaggyagataccctgaccccagggcaacatccagttcccagtggacatcaggccgcaggtggatgcccagttcccatgtggacatcagtccccaggtcaacatcaggccccaggtggacactggacttaagatgtatatcaggcaccaggctcacatccgtgccacagcaggacacaatgtcacaggtggacagccatcccacagaggataccgaggactcagacggacgttcaggctcaaggggaacataagacactatgtaggcaacaggcctgggtgcatatcagaccccaggtaaatactcaggttccaggagtacaataggcttgaggtggatacccaggtccctggtagatacccagtccccagctgaatgtcaatcctcatgggacggcacactccacagggaaactaggtgccaagtaaatgcctaaacccctggtgaatatcaagccccaggggtatacctagaccagagctggacatctggccc

SEQ ID NO: 695178 - DNA, 620 bp, Homo sapiens
gcagtcaaaagcattcagtgaatgttagttcccacctcccatcctcaccacactccttgagcatttccttgcagttttgttatttttttcaattgccttggttttaacactcaagttgctcaatccttcctcagtaccgccttttagaaagcaaaagaatactcttgtgccgtttctttttcagtaagagcctgccgtatatacagtgagaagatttaatgggataacatgagatgaattatttaattgagatctatatattttttaaattgacatttactttaaaagtgttttggcatttctacaatctatattattttataattttaaattggctttaatgggattatttccacagatctgaatgatttttctcacctaggaaaataaaatgtttttcttctctataaaaattctttaatgttaatctttttatccattttcaaaattaaaccttgttataatttaattatagtcacaatctatttttatgttacamatgttcactttgtgggtaagataaattgaactcctatttgcttttgatgaatatttaattggacattaaatatataaaaaatgctgcttttcctaatcctttattatttagggagaatatc

SEQ ID NO: 695179 - DNA, 602 bp, Homo sapiens
tgaagttacaygagtaaagcctttcccaacaactctctgaaacagcacctgcactctcgatgcctgaagttcactctctcctctcctttactgttatatttttctatttggcacttaccaccaactgtcaaattatgatttatgtatctgcttatcatctgtttctcctactattttactctctgttccttccctcttgttaagaacaactggcatataggagtcaccaaacatatatttgctggatgaacagaagaagatcagtgccagaaacccgaatacaggcccaggcgcggcctgcttcccctctccaccaccttttgttcactgtggagatctcgggtaactagtcaaagtttaactaagtcagttgattaactacctaaacatactaggactttaattccttaattcaaatgtttaaaatcctattcctctatataagccaaagatcactcatataaaaatttgcatagacctgcaatttccatcaatgcatcaaactagttccttggaaagaaaacttcctaggacaaactctgaaggtaaatgtcagaaagtaatcaaaaagactctgaagtcttacccaattgattgtgaaa

SEQ ID NO: 695180 - DNA, 2050 bp, Homo sapiens
atgggaaactcaaaggctttggctacatgaattttaaatttctttctctccataggcacccttttaggccaaggactctatttattgtgtcaagggtagaatatctgagtattgaagagagtggctgacacaaagaagtatgtaacttcatttgtcaattttaataattggcatgtattcgtaggcttttaaataatattcaaattttaaaatcctgtaacttgggtcttcaaaggagcctccttccaaaacaatttccaatagacataaggagaaatgawggatgtgacaatatatatgtgaaccagaattatatttggatttaacaggtcaattattcagctgatatttctatttgaatacgcttacacaggaaaatgtagggataagttgaatttatggtgatgaggagtggagcacgtaaggtcaggggtagcaccatgatccatggtgctgaagggccaacaggtcccaaaggctaatggatcaaaagcagatgataacattatgtatccagcaccatgctcctaagaccttgcacactgtgtgaaaggtgaccacactgctggatgaaattccaagtgaagcggcatacacagattctcttaagggaacgtttgaacttttgatcaaaatacagcccagtgaattctggagaaagagtctgaaaaacatcagaatatttttgttctaaagaatgtacagtctagtcatattgtattgtgtcttgtcatattgtatttttcataatatttattctgatgtgatttgctatttgaatgctgtttcactctctgaaatatgaaaaacttggatccttcttgaccaaattactgtaaacaatgacagacttattggaccttacataatgacattcaaacagaacaaaattcagtcctgtgtgaggaagatgaatacttccaacagaccaaacagaaaaacttaatttttcctcctgcctgagtcatacatccccagaagactcacactacgtatttcctctcttctgggctggaattggtcttactctgtgcttacttgctgctattatgatgtttaaacagcaagtcattgaaggagatagaaaaatggtcaaatagtatccacatcacatctacttacagtagtgctggagtaacataatgcaattctgtagagttgtataatttttctattatttatttattagaaacagggtcttgctctgttgctcaggctgggagttcagtagcaccatcacagcccactgcgccctcaaactacttagcttaggcgatcctcccacctcagcctcccaaaatactttcttaaatactacatgatgttgatttctttgcttttactttgtggtgagctctagtgctgaaaagggtcttctccctccatttctttcctgtttctaaattctgtttatctaaataacatagggataaacctgaaaagcaggatattactagagacaaggttttgagcatttgttatttatgctttcatagccatgtctacagagaattaagggacaatgccttttatatgtttaattttatttattaccataagatccagctacaggtccaaactcgactataattcaattagcagaaaaaatatctgtccaaaggaaactactagaatggcaatactgttttaggacacttgctgttatcttgtaactgttaaaataagatttctctgttttacatcaatcaaaggatacaagtttcagattttgccattgcagtatggactatattaactggtgttttcttgatttgtgacactgttagatgttattttcatcactgtgccaaggggtaactgaataatcatttggtctagccactacttgtaggttagcgaacttctgaaagaaacatgcacttaatagaccatgctgaaagatataaatactccttaattattagcaaagcttgtgttccaatcctggcagaaaggtctctgttaataaactcagtgtgtgttttaactccagaatgctgaaaaaaatagacatttttggtcagtctgaactcaaaccaaatatcttgcc

SEQ ID NO: 695181 - DNA, 666 bp, Homo sapiens
atgaataacatttttctttaccagttagggtgtgyagacttggattgaatcagattcatcatggatctccaggactcttacctagatcctaagtgcatgctttgaagactttgtcttcactcctgactgaatgatagggaatccattggcaagtcagattcctgaactattgctccactccaaacaattgtcattgaaactggtaaggacatattttgattcttaagccataagtgaagtgtttgaagctgggttagagtcccgggcttttttataaaggcacctcctgtgctggaagttcttctacctggttcctgatctaagtagggattattccctgactccctgggctggaaatctctgcttcttgaacctctgtgagacaactctattctttttattggattctgcttctcctatgggaatttgtctgtcacagtcttcctgaatctctgctgactatatgttctttcaactctgttcacccctgcgagacgcttttccttcccatttcaagctgaacttttcagtcacttgaactttattatccctaacctatattgggggctctggagggacatagtggcccctcaaaagcaatcacccaaggctaaaaagagagaaaaataggaacagtttggaaactgagcaaatgaaaaatcctaa

SEQ ID NO: 695182 - DNA, 666 bp, Homo sapiens
atgaataacatttttctttaccagttagggtgtgcagacttggattgaatcagattcatcatggatctccaggactcttacctagatcctaagtgcatgctttgaagactttgtcttcactcctgactgaatgatagggaatccattggcaagtcagattcctgaactattgctccactccaaacaattgtcattgaaactggtaaggacatattttgattcttaagccataagtgaaktgtttgaagctgggttagagtcccgggcttttttataaaggcacctcctgtgctggaagttcttctacctggttcctgatctaagtagggattattccctgactccctgggctggaaatctctgcttcttgaacctctgtgagacaactctattctttttattggattctgcttctcctatgggaatttgtctgtcacagtcttcctgaatctctgctgactatatgttctttcaactctgttcacccctgcgagacgcttttccttcccatttcaagctgaacttttcagtcacttgaactttattatccctaacctatattgggggctctggagggacatagtggcccctcaaaagcaatcacccaaggctaaaaagagagaaaaataggaacagtttggaaactgagcaaatgaaaaatcctaa

SEQ ID NO: 695183 - DNA, 626 bp, Homo sapiens
tcctcctctacttttttacttctttatttcaacctcttttttttctactggagaatagttttcttcattctgtatggtgcaagtgaactcagatctgtttggcttttcctagctataccaccagtgaggaggttactactaattcccctcagtttcattcaaaattccaggggaaagattttggtgaatgaatgcaggttggatcctatgcccagcctttggtgaagggtttgtgggactttaacctgcagctctcacagatttcagtatagtggatgggagcagttctcagatgaggtgtgagggatttcctggaatgaagcagagaggaagtcaggtagacaaataattggtattgactatagctataattgttgtcactcaccatctttaccagcatcattatagaattcaatttcttctctatcaagtgtagaataatacagtctgagaatcctcattacattttaatggcactgatagaaaaattttaaactgaagttacaaaatgaaaaagactaaatrttagtagagttcagaaatctgtggccatccctattcctggaggtgcaggtgagacagggcatgttttgtgatatgtacactctgagcctgtggtcaaatgc

SEQ ID NO: 695184 - DNA, 584 bp, Homo sapiens
cttataaaatgttgaggttctagaggtataaaacccattagactagacagaataattgtattcccattcgtacagactcattgcagagyagaaaatcaaatccttgggaatcagatgaagtatatcatagcattcttaattatttgggatctaaccagaatcattaaaatggtaaaaacaaaattatattttaaaagtacaaaaagaatttagttatgattatcatcagcatgggtttctcatctacacttcaacaatgagattaacactacatgaaacactggtctaatgctttacaagaaagagttaaacgtccctcaaaagcttcagataattacctaagccagaagcaagatgttagactaggcagactaatgatctgatctaggatggtaattcccatggttcctaaggagcacaagcatcaatcatttaataaatacatggtttccagtggactccagagtgggtgaaaaaaaatctcagcagtaagaaaatagtccaaattttcctggtgtatcaatatgtatgtcgcttaaagcaagtctatttctaacataacacatttctaatctttctttcat

SEQ ID NO: 695185 - DNA, 601 bp, Homo sapiens
tgcagcagctaatatattttatctgaagaggaaatcccctgtctccgatggacctgacttcttcatttcctgtgaatagcagagctatctgcatctgtagggtctcaggaccatgttgagaatatttgtctacctctgctggaagcccttctgwttagtcaggctccttgagttggaaacataaggatttataatgaaaaagagtcacacagtaaaaacagaaagaatgaaaagaaaacaaaccaataaagaacctatcctatcataacatttgaggttctggtatttgctggctttggagggagttcaaaataaatgaaagaaatgtgtattttattaaatgctaatatttagaagatgtggtggaaaaaagaaagataaatgtttccaatcatatttgcaaatatgaggcatctcctacccctttcacaatggttaggtattttccttgcatttgagcaacctacatggttttggaagtaatgcctggaactagccaaaaaaattgtactaggagtagcatgtgaatctaaccaacagagattgcaccacattatgctctcagcctagatcacagtaaaataataagctttatctagtc

SEQ ID NO: 695186 - DNA, 1654 bp, Homo sapiens
gcagagtcccacaaaaagagttcagcgttcctctaaaattagagattaaatcaattatgcaacccaacactgcagcacatgtggagctttcgcagaaagtctgggcaaaattagttagcctgccgtgatattttgctatctgcaatggccagaatttggcttcctttttgtaactgagagaaaacgaaagatgaagaatagggactaagtacaaagaaggcaaaggtgacctaagagaaggaaatacatgctattgcaacataaaaatgaaatgcttcttgaatgtgtaaaagctgataaatggaaagctttaaaggctgagatcctcattttcttctcaatctagcaatcaaagaaaggtgaggtgctctctccagcgtggactttgcccctaaatgagggtagccacctctgagacagaagatgctcaggatacgcagctcatccttggtttacctttgtaaagcttctctaaactatactaagaggcatattaaacctgggcaaatttatgtattcataatgggaggaaaaataattgtcattgtgctgcaaagacattccggatattttcacatgcacaatttaattctcacaattttatgatgaatacagttgaggttctgatgaggaaactgaggcaaagagaggttaagtagcttgtcaggaatcacacagctgttaaatggcgaagttgggccttagacttaataagtaccatcctaggacgtgtggatatggaggaatagaaaagaagtaaagggaagcaggcattacttagtatgatggtgggcagtgaaggggaaacaatgtgttccagatgctaaaatcacctggagagatggtagaaaatgagttctggcatatgaaagataatcattataattatttggggaatatggtacaaatgggttccaggaacttcaaaaggtaagaataagaaaaaaaggcatttcattattttattaactaaagctctttgatggaatcaagtataatcctagtttgcacttaagcccactctgtcaacatgactcaccagaccttgtaccaagccaacccgtaagaaattatttacccttccttcaactcactctcctctgtgctcatgagatttcccagcatttatgttttaccttcatcttaactaactctgattcatccctcaaaacttggctccaccgtaatttattcctaaaagccttctatgatcttgaattagatgtccccttttgtgtgtaaaatcttctgtaccccttgctaaagtaattctacttcaagaaacttgtcctcaagaactagtaggggacaaggacaaagaataatgctcaaagttctccactgcagtgttatttatttataattggcaacatttaaaaacaccttgaaatagcaaacaattagaaatatttttgtccattttaaactccttcctttcttcccagactttttgacacacttaatagctgaaacatacaagtccccaagcaaccatatactcccttgcctctgcccccctctgccttcattcctgtttttgtcacggccaactcttacatactttcaaacccagttsagatgccacctcttctggaaatgcccttgtcaactaagtctgggttaagtgaccttctaagggctatcacagaatgcc

SEQ ID NO: 695187 - DNA, 1174 bp, Homo sapiens
aggtttgggaagccagaacagaaaaggtcagattaagtttatttatgtttttaatataaagtttgaactaataattttaataattcctagaacattgttaggtgctatggggtttagatagtgatttttttcctgtttgctttgttttctctctctctctctctctctctctctctctctctctcttttggcagggtctcattctgttgcccaggctgctggagtacagtggcatgatcatagctcactccaatttcaacctcaggggcctaagccatcmtcccacctcagcctcccaagtagctgggaccacaggtgtgtgacatcatgctaggctacattttttttttcttttcacttttgtagagatgggatcactctagttgcccagactggtcttgaactcctgggttcaagtgatcttcctgtcttggcttcccaaagtactgggattataaggcaagaggcactgtacctggccttatatagtcttatttttattaaatatcaatgaacaataaaaaagttgaatggtcacagaagacaagaatacaaaaccagtcacaaggcaataaacagcattttttatgtcaaattgatggtggtacagaaagtggggaggctttgggcattcagtggaaagagactcccattgaagacttcttgaaggcatagtgaccgtagtgacttgtgtcagttttcaagaatgagagacctgaagagcaaagtaggggagagtgaactgattcatctggctggagcagatggcttatataaggaagttagaaaatgaagctttatgagttttaaatttgcattagtgttcactcaatgttaaacagttctatggatttttacaaatgtgtgatcgtgtatatgtactcccatagtattacacagaatattgccctaaaaaatctcatgtggatgagttttaatctcactttcacatgaaacttctcagaatattatagtgacctattatttgaagagctttattcaacaatataaataataataaaaagattgtctaggtcaggggtccccaacccccagggccacagaccagtacagatccttagcctatcgggaaccaggacgcacagcaggaagtgagtggtgggcaagggagcattactgcctgggctccacctcctgtctgattaggggtcat

SEQ ID NO: 695188 - DNA, 1174 bp, Homo sapiens
aggtttgggaagccagaacagaaaaggtcagattaagtttatttatgtttttaatataaagtttgaactaataattttaataattcctagaacattgttaggtgctatggggtttagatagtgatttttttcctgtttgctttgttttctctctctctctctctctctctctctctctctctctcttttggcagggtctcattctgttgcccaggctgctggagtacagtggcatgatcatagctcactccaatttcaacctcaggggcctaagccatcctcccacctcagcctcccaagtagctgggaccacaggtgtgtgacatcatgctaggctacattttttttttcttttcacttttgtagagatgggatcactctagttgcccagactggtcttgaactcctgggttcaagtgatcttcctgtcttggcytcccaaagtactgggattataaggcaagaggcactgtacctggccttatatagtcttatttttattaaatatcaatgaacaataaaaaagttgaatggtcacagaagacaagaatacaaaaccagtcacaaggcaataaacagcattttttatgtcaaattgatggtggtacagaaagtggggaggctttgggcattcagtggaaagagactcccattgaagacttcttgaaggcatagtgaccgtagtgacttgtgtcagttttcaagaatgagagacctgaagagcaaagtaggggagagtgaactgattcatctggctggagcagatggcttatataaggaagttagaaaatgaagctttatgagttttaaatttgcattagtgttcactcaatgttaaacagttctatggatttttacaaatgtgtgatcgtgtatatgtactcccatagtattacacagaatattgccctaaaaaatctcatgtggatgagttttaatctcactttcacatgaaacttctcagaatattatagtgacctattatttgaagagctttattcaacaatataaataataataaaaagattgtctaggtcaggggtccccaacccccagggccacagaccagtacagatccttagcctatcgggaaccaggacgcacagcaggaagtgagtggtgggcaagggagcattactgcctgggctccacctcctgtctgattaggggtcat

SEQ ID NO: 695189 - DNA, 1174 bp, Homo sapiens
aggtttgggaagccagaacagaaaaggtcagattaagtttatttatgtttttaatataaagtttgaactaataattttaataattcctagaacattgttaggtgctatggggtttagatagtgatttttttcctgtttgctttgttttctctctctctctctctctctctctctctctctctctcttttggcagggtctcattctgttgcccaggctgctggagtacagtggcatgatcatagctcactccaatttcaacctcaggggcctaagccatcctcccacctcagcctcccaagtagctgggaccacaggtgtgtgacatcatgctaggctacattttttttttcttttcacttttgtagagatgggatcactctagttgcccagactggtcttgaactcctgggttcaagtgatcttcctgtcttggcttcccaaagtactgggattataaggcaagaggcactgtacctggccttatatagtcttatttttattaaatatcaatgaacaataaaaaagttgaatggtcacagaagacaagartacaaaaccagtcacaaggcaataaacagcattttttatgtcaaattgatggtggtacagaaagtggggaggctttgggcattcagtggaaagagactcccattgaagacttcttgaaggcatagtgaccgtagtgacttgtgtcagttttcaagaatgagagacctgaagagcaaagtaggggagagtgaactgattcatctggctggagcagatggcttatataaggaagttagaaaatgaagctttatgagttttaaatttgcattagtgttcactcaatgttaaacagttctatggatttttacaaatgtgtgatcgtgtatatgtactcccatagtattacacagaatattgccctaaaaaatctcatgtggatgagttttaatctcactttcacatgaaacttctcagaatattatagtgacctattatttgaagagctttattcaacaatataaataataataaaaagattgtctaggtcaggggtccccaacccccagggccacagaccagtacagatccttagcctatcgggaaccaggacgcacagcaggaagtgagtggtgggcaagggagcattactgcctgggctccacctcctgtctgattaggggtcat

SEQ ID NO: 695190 - DNA, 1300 bp, Homo sapiens
tatcttaagaggttcaaattaaaccataaatgtaattaggtctttgggggaaaatataattgtcctatgaaaaacattttcttctcaggctagggagatattctggaacttttgaaaactctcctttaaataagaagattttataagtatggctgtgtgtttctgtatatctaaggaatcatcttttttataacgtgtatactggaagataggtctagacaaacagatgaatagatacatagataggtatttttctattttattaacctacttctcggcaattttsaaaactcatagcaaccgaagagcttgtcatttttcctcagtcctgtatttcaaaattcccaaaggcaaaccatcagaatgcattaataaattgttgtcttccataccctctgtgtctttcaaacttaaggatactagaacctgtaaatccattctctgacacatgaagaaaattaaccagttagtggattattttaactcctttcagcatgacaattacttattccacttttaatgaagatatgctaggttaattttggggggatttcactggtctatgaaattgttctcctacattaacccccccaaaaagaggaagaatgaaacaacataagtgcctacttatttccaaactctttactgtgttgtacaatataaatgaaacataatcagatctggctgggttcagcctgtctgtgattcatctcttgggtagttttactcactgggtaaaatgagaacgtcatccccagggcctggaatggtattgttgtatcctccccagccttcttcaacaccttgccatgtttcagggagggaccattttaaagctgattcaggggcagaggtagaagctagaaaataaaaaaaaattttgaaaatctaatccattgtgataacttccaaattctatccttattttaggatgctagtggtattttcacctcccaaagaagctgcctatcaatattttataagtttctgtacaaatatttatcagttaaaaagcaagtaattattcaatccttagattaccttcacttctgaaaaaaatcccacttttgttattatacatctgttttgccttataataaatatggcatgcttatcatgaaatatttaaaaaatgcaaataagaaaggtaataattgcccataatctcactaccttgcaataactaccttttatttctgtttccttccagaatttctcagaatttttacataattgagattatatcaaatcctgttcttattttttacacccagttctacttttgcttagcttagcctat

SEQ ID NO: 695191 - DNA, 612 bp, Homo sapiens
caggcactgaggggagttctttttaatggtacctgatcacgaaaggaagcaagattttgccaggagaagcttcccgagggaagtagtaactcagctgcattttaaagccttagaagttattcaggtaaaggggaggttgtgatgagtgtatgacaagagggttgcactgcagacagaaggatgagcatgagccgaggcaaaaattgggaagtcaagtggaggaatgataagaaatttggtgttgctgaaccacagagctagaagagaggtaagtgacaaggttggtaaaataaacagaggccagagtatgaaagataataaaggtggagggtccagagacttccagcacattaagacagaagtggatgaatagtttgtgccatagggcattcagggtatctctgtggtctccagatggagctatacagcaagcagtggaaaaatatgaattggaaagatgggaagagctctgagcccagagatgaatttggcatcatcggcctagaagctgtatttgaaactctgagggtggttgtaatagctccagaggatttcaaggtgacaagggaaaatacctgatatcagaaacaygaggaacacttagttattttt

SEQ ID NO: 695192 - DNA, 1391 bp, Homo sapiens
tgaagtacttggcrattcttcaaaccctaaacatgttttttgaaaggaataaaatcatcaaagaaatagaaatgaatcttagaatggtaaggtacattaacttaatgaccaattctttacccctcctatattcacgccttgtgatatatgatttttaaaatatctctcactaaagaggcaggggctatttccctcccccttgaatctggactcagccatgtgattttctttagctgatgaaagaggcagaagtaatgaagtgcaagttttattgatattgttttattgttttgtcttaattagagagacttctttgggatgttttcaaacttgctggtaataaattgactctaattcttcattcttcattggagtaaagtgtcagtggtcttcagaaggagaccttgggagccttttgtgcaggaactagtagatagaaggagattgtgtctgctgacaggaatctctgaactgaacgatgaggtctagcagatattggtatttcagaccaggtgtaaatactgttttctgacatatgatctaagagtttcattcaaatatgtgaaaattagataggatttttttatgccatgaaagagagtagaaagttagaaacaggaagaatgaattactttttctttcccacaacactggggcaaactcctttattggaagaaaaaaaaacaaagcaaaaaactaaagaagccaccctaattagaacattcatgtgtttggcttaacacgagtctctttttgatgcctatccctgaatcatgattaggtacctaaacatgagtaggtaggcaatttgtgttgttttgtcactttttaaaatttactatccaattttccttatgttcatgtcttatcccgggctgatatagctgttaagttacatgtcttagtctgtttgtgctgctataacaaagtaccacagactggataatttatgaagaacagaaatttatttattttatttttggagatggggtctcactgtgtcacccaggttgaagtgcagtggcacaatcatggctaactgcagccttgacctcctgagctcaagtgatcctcccgcctcagcctcccaaagttttgggattacaggctgaaccactgcacctggacataaatttatttcttatagttctggaggctggggagtccaagatcaaacactggcataataggcgtctggtgaaggtttctccctccttccaagatggtgccttgttcgtgcatcttccagaggggagaaacgctgtgttctcacataggagaagaaatggaagggcaagagagtactctcttcatcctcaagcccttttataagggtactatcttattcatgagaattgaatcctcatagctttatcacttcccaaaggcca

SEQ ID NO: 695193 - DNA, 646 bp, Homo sapiens
ttccattatttgtgagtgaattattcctttcttttgaataatggccatctttatctcaaataatgctttttgccctgaaatccattttgtctggtaatatttctgaaccggctttcttatgattarcatttatctgaaatagtttttatcctttatttatcaaagttttttattaagttttatgtatgtgtattttgtaaacagcatgtagctggatttagtgggcttttttttcttaacctaatctaagactatctggctttaataaatcttttatcttttagttccacatttttgtaattactgcctagttttaacttatttcctgttatcttattttgtgttttttattgaactgtgggttttttcttttttgcttattttcttaatgtaatttattgaatactgtactgaaagtaaaaaacagaattgttgtatgcgtacttgaagtagtttctactgaaggtgcatcacttttacaccaccataaagtcaaaaaaccactgagttgaaccattgtaagttgatgattgattatactcaacagtgttatatgactaatgactgccagattagatagtgtagctatattaatgctgttttcttattttctgtattctttttcaatacacaataattgtacata

SEQ ID NO: 695194 - DNA, 666 bp, Homo sapiens
taaaaatgtgaatttatattacataacttttcattaaaatgataactatactgtatttaaacaatcatatagattacgagaggaaggagatttttgtggaggtatatacattggtagaggccccagtaaaaatctacttcgggaggcctgggtctacccttgcatctgtggcttggtaaggtgatttttttcactctctgatcttgagactctttacaaaattagttgaaacttcaaggccttgctggccgggcgcggtggctcacacctgtaatcccagcactttgggaggccgaggcaggaggatcacctgaggtaaggagttcaagaccagactggycaacatctctacaaaaaatacaaaaattagccgggcatggtggtaggcgcctgtaatcccagctacttgggaggctgagacgggagaatcacttgaaccctggaggcagaggttgcagtgagctgaggtcatgccattgcactccagcctgaggaacacagcaatactctgtctcaaaaaaaaaaaaaaaaaaaaaaatttaaaaattgaacttgatttgaatgcagtaatttgaaatctaggagcaaatgctaaatttgaaatgtagaagtgtgattaacttccatcttaaaaataaacactttatttaaaacaaatcaacgttt

SEQ ID NO: 695195 - DNA, 1530 bp, Homo sapiens
agaaggtcctgggatgatcatggtgaattccttcccttaatcctatcaattggagaatttacttcttccttgataatgagggagaaatcagaaacatttccaacttttgttccctaaaaragaaaattttgtctcatctatgggaatgtaaaaataggtgatcttttttcttttctagcaaagagaattaaacttagctcttatcaaagctcattatttgttacctacaggagagataataagacaagagaaaaaaattctcaactaacaagtagttgttcaagtgcaacagaacgctttgtgcctgacgacttaacacttaaaaatatgtgtgtataaatggtggggataactgtaacacttggatttttaataaaaaagaaatgttagcaaagagatgaaaccacatgagcagaagagttaaagcttgtatgatatctagaggttttcagatagcttgtagtggagaattaagtataattacaaaatactttgtcagtcagtacctgtcatttggtgccctaaaaagtatgtttccttgtttattataaagaataaaaattaaacccatctaagtagacacccccatcttaattttgcaaagatatacaagaggtggatttaggtattatcccatttaacatgccaggggattgaagctgagatttgccaatttactgaaggactcagagttgtctaacagcagatccaagacccaaatcttcacacttgactccaatcttctaaccactttttttccacctgtctttattgctcaaaactttcctattaatatttaaatatataggatgataggtgtggcaaatgtacaaatgtcctttgcaagcacaatagtggaaaaagacatagtatgttttaatttcatacataaagagctgaaagcagtcaacgatatcattctgttgagtcattaaagcaataagtacagttgcccctcagtatccatgagaggctggttttagtattcactccccccacaccacctcccacccttaaggatgccagaatttagtggaggttcaaatctcttatataaaatggagtagtttgcatataacctacgcacatccttcagtatactttgactcatctctagattacttataatgcataagataatgtacatgctatgtaaatagttgttatgctgttttttatttaaattactttttgtggttgcattgttatttttttctgaatattttcagtttgtggttgattgaatctgtagatgtgcgtggatatggagggtagactgtataagataaattccttgagcatgggaacttaattcacactgcctaacacagcactacttggatagtagatctctaataagtactttttaaaggaatgactgataattctgctttggatacaattttggtttgtgatggtgtgagacgtgttaagttttgtaagacggttgctttaatatcttcatctatttcacctcttagaagaatctctctctttattcaactctaattttcccctacgatggagagc

SEQ ID NO: 695196 - DNA, 1530 bp, Homo sapiens
agaaggtcctgggatgatcatggtgaattccttcccttaatcctatcaattggagaatttacttcttccttgataatgagggagaaatcagaaacatttccaacttttgttccctaaaagagaaaattttgtctcatctatgggaatgtaaaaataggtgatcttttttcttttctagcaaagagaattaaacttagctcttatcaaagctcattatttgttacctacaggagagataataagacaagagaaaaaaattctcaactaacaagtagttgttcaagtgcaacagaacgctttgtgcctgacgacttaacacttaaaaatatgtgtgtataaatggtggggataactgtaacacttggatttttaataaaaaagaaatgttagcaaagagatgaaaccacatgagcagargagttaaagcttgtatgatatctagaggttttcagatagcttgtagtggagaattaagtataattacaaaatactttgtcagtcagtacctgtcatttggtgccctaaaaagtatgtttccttgtttattataaagaataaaaattaaacccatctaagtagacacccccatcttaattttgcaaagatatacaagaggtggatttaggtattatcccatttaacatgccaggggattgaagctgagatttgccaatttactgaaggactcagagttgtctaacagcagatccaagacccaaatcttcacacttgactccaatcttctaaccactttttttccacctgtctttattgctcaaaactttcctattaatatttaaatatataggatgataggtgtggcaaatgtacaaatgtcctttgcaagcacaatagtggaaaaagacatagtatgttttaatttcatacataaagagctgaaagcagtcaacgatatcattctgttgagtcattaaagcaataagtacagttgcccctcagtatccatgagaggctggttttagtattcactccccccacaccacctcccacccttaaggatgccagaatttagtggaggttcaaatctcttatataaaatggagtagtttgcatataacctacgcacatccttcagtatactttgactcatctctagattacttataatgcataagataatgtacatgctatgtaaatagttgttatgctgttttttatttaaattactttttgtggttgcattgttatttttttctgaatattttcagtttgtggttgattgaatctgtagatgtgcgtggatatggagggtagactgtataagataaattccttgagcatgggaacttaattcacactgcctaacacagcactacttggatagtagatctctaataagtactttttaaaggaatgactgataattctgctttggatacaattttggtttgtgatggtgtgagacgtgttaagttttgtaagacggttgctttaatatcttcatctatttcacctcttagaagaatctctctctttattcaactctaattttcccctacgatggagagc

SEQ ID NO: 695197 - DNA, 1224 bp, Homo sapiens
gttacatccacagattttgtatgtggaggctaagaagaaaatgcatatggcaaacacagcctctaggtgaccccaattaatcatcagtctacctttatgcccaacacttcccattgggagtttagctgggtcagacctgctacttaagaatataaaaccrccagatgtcagtagtggtgcacaatggctctaatgaaacttcctccttggacaaagtataaaatttcacatacagaaagaaataaacaagcagtgaggcagtacaatatgtaaattattaaattttttatacttttttctgaatagaagttgacttactctagaagaaaactaaactcttttttgaacctttgtataagatatttggggttggatttttactgaattagccatgttttgtttcaagaaattctaaatagacattccttgaggaatgagaacaaaaggacaaaattctgtaagtaaataaataaataaatgctaactttagttgtatatttactatagggcttcttagaatttataacgagtttatatgtcttgcacatcttcaaaatgggataaaggtatacattgctttcaatattatttgaccttattattaaaggatgtaatttaccaagaatactctttggaaatactaattgttttctttgcattgcaaataaagtgttcttagtacaaaatgtttatgtgatcaactgacaaccattggaattattgaacctgagaaacagaaaaaaataaaaagaataaagaaaagtaatcatagtctaagggagctgtgagacaccatcaggtgaaccaatacaaacattataggagtaccagaagaagagagcagaaagggaagaaagaagaggtaataaatattttacatatatggatagattatataatctgtattttaaaactttctaaatttgataaggcacatgaatatacaaatctaagaagcctaataaacttctagcaggaaaaactcaaaaagattcacactgagacatgttgtgctcaaactgtcaaaagccaaagacataacatagtcttgaaatcatcaagagaaaaatgtctcacctcatgtaagggtgtctcaataagttcaatagctgctttctcataaaaaaaaaagtagtggttttgaggcagtgtgatgatgtatttaaagtactgtaagaaaaaaaattatctgtatctgactaaactaactttcaaaactgaggg

SEQ ID NO: 695198 - DNA, 604 bp, Homo sapiens
tggaataatagacatagaagactcagacgagtgggagagtaggagcgggatgagggatgagtaactgcaaaacaggtgttgtgtacattattcaagtgatggttccactagatgcttggacttcaccagcaatatatccatgtaacaaractacacttacatccctaaacttatacaaatgttttaaggtaaacataaagaacactatataccacctatatccttgtatcaataagcaagtttgggggaaattgagatgagaagacccatcatgactgaaatgggagagctgatgccttctttaatgccaaaattgtcttaagatttctcattgcaacccttccttcatcacagcaaaggttcagggagggcaaaggcactcaaattctgagaaatactcttacaggggaaaatagggataagatctaaagttccacttcttttgatcttgtagattcaaccattcatttattcactcattcacgcaacaagtgtttgtcacgtgccaactgtgggccaaatattgtattctcattagggatagaaatgaaatgaaaacagatgccttcctcatggcatttatattatagataagggagaaaga

SEQ ID NO: 695199 - DNA, 604 bp, Homo sapiens
tggaataatagacatagaagactcagacgagtgggagagtaggagcgggatgagggatgagtaactgcaaaacaggtgttgtgtacattattcaagtgatggttccactagatgcttggacttcaccagcaatatatccatgtaacaaaactacacttacatccctaaacttatacaaatgttttaaggtaaacataaagaacactatataccacctatatccttgtatcaataagcaagtttgggggaaattgagatgagaagacccatcatgactgaaatgggagagctgatgccttctttaatgccaaaattgtcttaagatttctcattgcaacccttccttcatcacagcaaaggttcagggagggcaaaggcactcaaattctgagaaatactcttacaggggaaaatagggataagatctaaagttccacttsttttgatcttgtagattcaaccattcatttattcactcattcacgcaacaagtgtttgtcacgtgccaactgtgggccaaatattgtattctcattagggatagaaatgaaatgaaaacagatgccttcctcatggcatttatattatagataagggagaaaga

SEQ ID NO: 695200 - DNA, 588 bp, Homo sapiens
tggtacactaagctttttcccgcccctgctttacttggtatyagggaacaacaaagggattggaaaggtgagtgtatttcttctgtaagattcagtgctcagagcctgacagaccaagatgtattaaattttacatgaagctttgtgtctgcccccatgatgactgaagtgttttggatttatacaaatagatggatttagtctgttgacaaaatcataaagaaaaaggaatgcataaaggtgcagtcatatctattaccatacagaattataatgtattgttttttaaataacatcacaaggtaagaatgccttcaactcaaagagcttgggaaaagtggcttctggtcccagacttggccctatcagcaacttgctacacaaattttggctaggccatttgacacaaattttggctaggccatttgacacaaattttggctaggccatttgaattcacggtcttttataccaaaaaccaaccaaccaatcaatgcagtataacgcaatacaaatggaggaagactaattttccttacgtagtttcaggaggcaaattgcttactgattctttaaaaatgtcaagtt

SEQ ID NO: 695201 - DNA, 603 bp, Homo sapiens
tgtgagctgataacttgggaaaatattcgttcttctagttgatatgttttgctcattttgggaccttttgaagttttggttttttaaaaacttattgaaatacgacctacatacagaaatacggataaattgtaagggcacagcacagtgaatttttataaagtaaacatgctcatgtggctggcacccaagtgaagaaataaaaaatagtatcacaaaaatttcagaagaatcctactgatccttctcagttactattattaattataagamtaataatcaatatgcccatcaaaaggtgatattatttaacttctggtaccctgtattaatgcttgaactttatacaaatgacttatgtgggtttttttgtgtgtgtctggcttcatttccataatgttatatggttaatctacattgttgtgttcattttcactgagcctaggatttcacggcacagacataccacaatttattcattctattgatgatggacattgagtggcttctaatatttggctattactaataataccgtgaaaaacattcttctatgtgtcttttgatgaacatatacacattttgttcaagttcatgcttaga

SEQ ID NO: 695202 - DNA, 961 bp, Homo sapiens
tggaaatgtggaaaaaaatgattttcaacacaagatgacactatctcttctgccccacactggtaatwtttcagtaaatttttgtacttttctgtattttttacttttaatagttttgatatattttgtttaaaaatcatttctttccttctttccttttcttaccaccttcctactctctcttccttcatccctccttccttccatcctgcctacttttcttccttcttttgaaaaacagtgaagatagtttaaatggagaaggtaaccagcacagaggccacttcctgctccttgtgatggttccccagtatgcagcccctctaaaatcactccctgcttcagcagcctgtcttctgcttaggatgaccggctgtgggtagtcacattctatgcctgttttctcagtatattatcaccagtgctttctttcactctctacatgtgttgtcctgttaccagtgggaggtatctgctactggtggcaaatctgtgtgggtctacagcaacctcaattcttgccttcctcagaagaaagaatttgactgaggggcataaggcagaaaaaatgatggaagcaagtatcagagcaggagtggacatttattaaaaagctttagaggccaggtgcggtggctcacgcctgtaatcccagcactttgggaggctgaggtgggtggatcacgaggtcaggagattgagaccatcctggctaacatggtgaaaccccctctctactaaaaatataaaaaattagccaggcatggtggcgggcgcctgtagtcccagctactcgggaggctgaggcaggagaatggcgtgaaccctggaggcggagcttgaagtgagccgagatggcaccactgcagtccagcctgggcaacagagcaagactccgtctcaaaagaaaaaaaaaataataaaaaagctttagagccggaaagaaaggaaagtacacttg

SEQ ID NO: 695203 - DNA, 961 bp, Homo sapiens
tggaaatgtggaaaaaaatgattttcaacacaagatgacactatctcttctgccccacactggtaatatttcagtaaatttttgtacttttctgtattttttacttttaatagttttgatatattttgtttaaaaatcatttctttccttctttccttttcttaccaccttcctactctctcttccttcatccctccttccttccatcctgcctacttttcttccttcttttgaaaaacagtgaagatagtttaaatggagaaggtaaccagcacagaggccacttcctgctccttgtgatggttccccagtatgcagcccctctaaaatcactccctgcttcagcagcctgtcttctgcttaggatgaccggctgtgggtagtcacattctatgcctgttttctcagtatattatyaccagtgctttctttcactctctacatgtgttgtcctgttaccagtgggaggtatctgctactggtggcaaatctgtgtgggtctacagcaacctcaattcttgccttcctcagaagaaagaatttgactgaggggcataaggcagaaaaaatgatggaagcaagtatcagagcaggagtggacatttattaaaaagctttagaggccaggtgcggtggctcacgcctgtaatcccagcactttgggaggctgaggtgggtggatcacgaggtcaggagattgagaccatcctggctaacatggtgaaaccccctctctactaaaaatataaaaaattagccaggcatggtggcgggcgcctgtagtcccagctactcgggaggctgaggcaggagaatggcgtgaaccctggaggcggagcttgaagtgagccgagatggcaccactgcagtccagcctgggcaacagagcaagactccgtctcaaaagaaaaaaaaaataataaaaaagctttagagccggaaagaaaggaaagtacacttg

SEQ ID NO: 695204 - DNA, 622 bp, Homo sapiens
accacaaataaatatcacttgtttgctgtttcacaaaaagcacaccaagatgttcaaatttcccataaatcattcacactcacacttggatagataccaaattgtttggaagtaaaacaatctcactcaagacaaaagaacgtttctttaaaatcttcagattaaaaaacacaatcaacataaagaaaatgctgtcwctgcttattagttgggtgtccttgacaagaactttaacctgttattgggtttgttccaactaaaaaatagggaagttaatagtatttgactcagaacaaggttggtttctcttgtattattattattattattattattggtggtggtttgcaggaaaggtgctactggaaataagggaagaggctatagtttcccagagtgacctttccctcaccccagctattcttccttcttcctctactgccatgatctggacaacttcactttcaatccagatttgtaagatggtaaaatagtggtcactttttactttatcaggccattttacagctaaagggaaagtggatagggaacatactttgattaaaggtaggatacaacatagaaaatctagaattcataaatactagattctcatgaagta

SEQ ID NO: 695205 - DNA, 608 bp, Homo sapiens
tttagtagagatgtggtttcaccgtgttggccaggatggtctcgatctcttggcctcatgatccatcagccttggcctcccaaagtgctgggattacaggcgtttgctaccacacctggccaatttgtatatattttcatgctatgttattcactgtataaaatgttcattcatcatgtataatcactatagattaaactttgtatcaacagaacctgattcattcaaatcagatattttaaaaatttaatgactttaatctggattctcactttaatattaatattctgctttttgtttactttattttgacatactttatgcattttcagtctccctgtgcatttttatcrtcagtttttcttgtacatagtatatattttaagcttatttgagaaacttcatcttttataaagggaatttaagtaattcatatttatttaaataaataacttttggtattgattctaataggtaataattgatatatttcatgattcctttccttttttctattatgctttataaattatgcttactttttggctctgtagttatttgcaaattagaatatttaaagataatttatattagataacattttaaat

SEQ ID NO: 695206 - DNA, 1521 bp, Homo sapiens
attctcattccacatagtgacataatattgaactatctatgtgactgaaatttgcagcaacatttagttataatatttttgtcttaacttcagattctgtgttattaaaataaagtgtgcaaaatttttccatttcttggaaatacatttatttggtagatttccaacttccaaaatgtctcttgtctgtgatgagttgattggagatagaaagattgcctaatttatttaaggcatagattctgtttttgaaacaccaatatgtaggcacatacggtttttttccaggctattgtatattttctagacagtgaaaatagcatatcatatagaagagttgtttaaagaccatcagttcgggtgcaaaagttttatatactgggtctttttcactctttctttgtatttggcagaaaaagtagaagtgttacttctttaaaaactgttcaattgctgtgcctgcctgaggccacatctttctacatatactttaggcaggcagatcacctgaagtcaggagtttgagaccagcctggccaacatgttgaaaccccatctctactaaaaatacaaaaaaattagccaggtttgctggtgcgtgcctgtaatcccagctactccagaggctgaagcaggagaatcgctggaacccgggaggcagaggctgcagtgagccgagatcacgccactcaactgcagcctgggcgacagagtgagactctgtctcaaaaaatataaaataaaatgcacatttgttcttttcaaggaactatctttgtcaacatctgcagaaaactttaatgaaacgtatccagtgattacgtggacttcatttgtacagaaactgccaggaacccagaaacacagctgctttcttaaccttatcaaaaataagagtcacagtgtcagcatttacccgcccccccgacaaaaaacacacacttctattgatctagaaaggtatttatattttgatgacccacaagaaatatttttggaaataaagtttggactagctacctatatattacagatctgttttaatatttacaacataaataaatagatattaccctgtccaaaacaaaaatagcactgacaaaagatcgacatactcaacaagaccacaccccaacaaaggcctgcaaacgttgtatgtacaggcttttgaggaaaatgcagcagaaaaaattagctttaacaagatagaaacacaaacatatttaattttaactaaatagaagtcatttgaatgtattgaatagttgttaatattatttttaacagcaaagaaatagctgaattttatttaagagctaactatgctgccaaaatacatgcaattctacctggtgcttaaatggttctttttcaccatcaatagcttgtaacctaaacaataccawatttaaaatctacatatctaccattccatatctagaatgaggtgccggggtgggaaaagcataacccttattgttgtaatggtaaggcagactagctccccatgctagccatcct

SEQ ID NO: 695207 - DNA, 639 bp, Homo sapiens
agaagcagaggaacacgtcatggagacggaccgagttgaaggagccagggatggtgacaagcggaaggaagtgtgttttgtccccatccagggaagcttttgtttcatgagacttacttgcgcacgtctggtagctgccctggacattcatggactttcgttttcactcagattttgtggttcacgtgacacaaagcatgaggacatcactgggcgagagggccaggtcaccccactgccgaggggcacgccccagctgtgcaccgctagagtgggcttgtccagtcctcggacacggggacagggtgtgcccatctcatgtaagacatgaataatagtagaaatttctgttgcatgagaactctctgcattatcctcaccattttcctgtaagcgtaaaacgtctaaaacttttttatgagcacactaattcctcacttaaggtcgtcattaggttcttggaaatggcaactttaaacaaaaggacagacagcaggtcctcaaataacattctttccttcaacatcatttcatcctaaggagaaaaaaatggattttgttacatatcctggttcatttccaagaaccaggtgggcatagaattgaccaaaggtggaggagarcagatgtgcggctccg

SEQ ID NO: 695208 - DNA, 920 bp, Homo sapiens
  misc_feature 108, 109, 110, 111, 112, 113, 114, 115, 116, 117, 118, 119,120, 121, 122, 123, 124, 125, 126, 127, 128, 129, 130, 131,132, 133, 134, 135, 136, 137, 138, 139, 140, 141, 142, 143,144, 145, 146, 147, 148, 149, 150, 151, 152, 153, 154: n = A,T,C or G
  misc_feature 155, 156, 157, 158, 159, 160, 161, 162, 163, 164, 165, 166,167, 168, 169, 170, 171, 172, 173, 174, 175, 176, 177, 178,179, 180, 181, 182, 183, 184, 185, 186, 187, 188, 189, 190,191, 192, 193, 194, 195, 196, 197, 198, 199, 200, 201: n = A,T,C or G
  misc_feature 202, 203, 204, 205, 206, 207, 296: n = A,T,C or G
tgcagactgactgattcctagaaaaattctaaggagggttctaatttgtaattgttaaaaaagaagtaaatttgactttgtttgatgagggaggaaaaactcactgtnnnnnnnnnnnnnnnnnnnnnnnnnnnnnnnnnnnnnnnnnnnnnnnnnnnnnnnnnnnnnnnnnnnnnnnnnnnnnnnnnnnnnnnnnnnnnnnnnnnntaagctttttaaagttcttttctaattttacattgtattagattttctgattcttttgtaaatacagaacttaaatagaaggcaacagngaaatttatataggaactattttcattccacttgtgtaagttaagtcttgactctttcaaatgcaaaaaacctattttatgctttgttaaaattatggtgtcacttagattgactttagttgactgcactatataatatagaactatgaatatgtagaataacatgaaaaattggaggtgctggtggtatggctgaccctgtttcagaagcaggatagtataaaagcatcagcctaagaatggcactcccactaactagctatgtaatcttgacctctttgggctttagttcctctcataaaaggaagagatgtattggaytagactagatgatcaccactttctcttctagttctaatttttttaattctaatacctatattttcaagttatgtcaattaaatcattatcaggttatttcctaatgtaagaatagctaaaatgttgcagagaaataagtgacccaacaaaatttattcatctgttatgggtaagatctgccataaattcttcctaaataatttgtttactaactctttaggccactgtgctttgcggtccattagtaaacttgtgttgctaagtgctaaacagaatactgctattttgagagagtcaagactc

SEQ ID NO: 695209 - DNA, 920 bp, Homo sapiens
  misc_feature 108, 109, 110, 111, 112, 113, 114, 115, 116, 117, 118, 119,120, 121, 122, 123, 124, 125, 126, 127, 128, 129, 130, 131,132, 133, 134, 135, 136, 137, 138, 139, 140, 141, 142, 143,144, 145, 146, 147, 148, 149, 150, 151, 152, 153, 154: n = A,T,C or G
  misc_feature 155, 156, 157, 158, 159, 160, 161, 162, 163, 164, 165, 166,167, 168, 169, 170, 171, 172, 173, 174, 175, 176, 177, 178,179, 180, 181, 182, 183, 184, 185, 186, 187, 188, 189, 190,191, 192, 193, 194, 195, 196, 197, 198, 199, 200, 201: n = A,T,C or G
  misc_feature 202, 203, 204, 205, 206, 207, 296: n = A,T,C or G
tgcagactgactgattcctagaaaaattctaaggagggttctaatttgtaattgttaaaaaagaagtaaatttgactttgtttgatgagggaggaaaaactcactgtnnnnnnnnnnnnnnnnnnnnnnnnnnnnnnnnnnnnnnnnnnnnnnnnnnnnnnnnnnnnnnnnnnnnnnnnnnnnnnnnnnnnnnnnnnnnnnnnnnnntaagctttttaaagttcttttctaattttacattgtattagattttctgattcttttgtaaatacagaacttaaatagaaggcaacagngaaatttatataggaactattttcattccacttgtgtaagttaagtcttgactctttcaaatgcaaaaaacctattttatgctttgttaaaattatggtgtcacttagattgactttagttgactgcactatataatatagaactatgaatatgtagaataacatgaaaaattggaggtgctggtggtatggctgaccctgtttcagaagcaggatagtataaaagcatcagcctaagaatggcactcccactaactagctatgtaatcttgacctctttgggctttagttcctctcataaaaggaagagatgtattggattagactagatgatcaccactttctcttctagttctaatttttttaattctaatacctatattttcaagttatgtcaattaaatcattatcaggttatttcctaatgtaagaatagctaaaatgttgcagagaaataagtgacccaacaaaatttattcatctrttatgggtaagatctgccataaattcttcctaaataatttgtttactaactctttaggccactgtgctttgcggtccattagtaaacttgtgttgctaagtgctaaacagaatactgctattttgagagagtcaagactc

SEQ ID NO: 695210 - DNA, 795 bp, Homo sapiens
atccagcagatgaaacagaaaatgtaattttcttctccatgtagggctgtagtttctgaaggtaatacagtttaaaaccaagttaggggcgttttatgcccccacatcctcaggattaggacactgcctaaagctgtgctgcagcaaggtcctactggatggagacacacgcacctgtaagggtgatgtcatcatcatcatcgtctatgatttcttcttcagcaacatccagtgaactctcagtaatcatgtcaytgggctcttccacacaggctagaccggcataactattgagaatatcagcaccaggaacatgttccacaattacggcaggaaaaatagctggatcaccaagctgggaagggttagggagaggaaaatgaaaacaaaggattaacacagttttgcttttgttaaataatgctcaaaactattttatactagccatcaatttaatttttagatcatcaggctgtatctctataatctttctaggcattaggtaatttgtatctattacaaccaaataatggcattaaaatttaaaaatgaaggctgggcgcggtgactcacacctgtaatcccagcactctgggaggccgaggcaggcagatcacgagggtcaggaaatcaagaccatcctggctaacatggtgaaaccccatctctactaaaaatacaaaaattagctgggcacggtggcatgcacctgtagtctcagctactagggaggctgaggcaggagaatcacttgaacctgggaggcggaggttgcagtgagccgagatcgcacca

SEQ ID NO: 695211 - DNA, 2077 bp, Homo sapiens
ttatatggtttggctctgtccccacccaaatctcatcttgaattgtaacaattcccatgtgtcaagggtggggccaggtggagataactgaatcatggaggcagtttcccccatgctgttctcatggtagtgaataagtctcatgaggtctgatggttttataaatggatgttcccctgcacatgctctctcctgcccaccatgtctgactaaattttgtatttttactagagacggggtttcactatgttggccaggctggcctccaactcctgatctcgtgatccgtccaccccgacctcccaaagtgctaggattataggcataagccaccacacccggcctcttttttttctttttctttttttttatctggagactgagttttgcactcgttgcccaggctggagtgcaatggtgcgatctcagctcactgcagtctccacctcagcaggagagcaggaatcttcagtgatccacgggcagatctgcagccattgtgggcacctgttcctcccgcgacctttgtgcccacgtctctccctccagtacctattgcacgaccccccacgtccgcctcctgccattgccagcaagtgccttgcgcgggtacctggctgcgcttattaatccattatggtcgctctgtcactggtgccattatgtgctcacgtgcccactccctcaggtttagaagtcgcgtcgcccggcaacagaacaatctgctggcttagcctttggccaagttggcagctggacgaggacgctcagagcccagctctcgagagttcaagtatccgacagttccccactgctcccaggagcggttacccgggcactctgtgcccctcattcctgtttgggccaaggccgaggacctgcgagtagggctcagttgcctggagccccttcagcccatcgcccagttcactttgcttgtgggatctccccgttgctcctgcccctggactgagtggcaggccatcctacaaacacccggacactcgacatcagtggtgtcaagacaactctaagaaggttttccgtgatcctgcaagacctgtgttccatcctggtgattctctcttcaatttcactgcacaggtaccacagtaagccagtgctgtgtgctccgaattccagggcatcccccagctcagccactacactcagcacaaggactctgtggggcccaggagcaggtagtcacccctttgggctcctcaacacccggctgtccccagacttgtgtccagggaagatagtgttgagggccctcaaggagagcagggcagggatgcctgagcaggacaaggaccccagagtccaagaaaatcctgatgatcacagaacggtccccgaggtcaccggggatgcacggtctgcattttggcccctgcgggacaatggaggcctctctccctttgtgcccaggcccgggcctctgcagacagacctccatgcccagagctcagaaatcagatataaccagacatcccagacatcctggacgagctcgagcaccaaacgaaatgctatctccagctcctacagctccacgggaggcttgccggggctaaagcagaggaggggaccagcctcatcccgctgccagctgaccctcagttactcaaagacagtgagtgaggacaggcctcaggctgtctcttcgggtcacacacggtgtgaaaaggcggcagatacagcaccagggcagacactcgccccmaggggtggctcccccagatcccaggcctctaggccccgtagacgcaagattcccctgctgccaagcaggcgaggggagcctttgatgatgccacctcccttagagctggggtaccgggtcacggctgaagacctgcacctggaaaaacaggcggcattccagcgcatcaacagtgcactgcacgttgaggacaaggccatctcggactgcagaccctcacggccttcccacactttgtcctcacttgcaacaggggcttcgggtgggcctcccgtttctaaagcacccactatggatgcacagcaggacagacccaagtcccaagactgcctgggcctagtggccccc

SEQ ID NO: 695212 - DNA, 2077 bp, Homo sapiens
ttatatggtttggctctgtccccacccaaatctcatcttgaattgtaacaattcccatgtgtcaagggtggggccaggtggagataactgaatcatggaggcagtttcccccatgctgttctcatggtagtgaataagtctcatgaggtctgatggttttataaatggatgttcccctgcacatgctctctcctgcccaccatgtctgactaaattttgtatttttactagagacggggtttcactatgttggccaggctggcctccaactcctgatctcgtgatccgtccaccccgacctcccaaagtgctaggattataggcataagccaccacacccggcctcttttttttctttttctttttttttatctggagactgagttttgcactcgttgcccaggctggagtgcaatggtgcgatctcagctcactgcagtctccacctcagcaggagagcaggaatcttcagtgatccacgggcagatctgcagccattgtgggcacctgttcctcccgcgacctttgtgcccacgtctctccctccagtacctattgcacgaccccccacgtccgcctcctgccattgccagcaagtgccttgcgcgggtacctggctgcgcttattaatccattatggtcgctctgtcactggtgccattatgtgctcacgtgcccactccctcaggtttagaagtcgcgtcgcccggcaacagaacaatctgctggcttagcctttggccaagttggcagctggacgaggacgctcagagcccagctctcgagagttcaagtatccgacagttccccactgctcccaggagcggttacccgggcactctgtgcccctcattcctgtttgggccaaggccgaggacctgcgagtagggctcagttgcctggagccccttcagcccatcgcccagttcactttgcttgtgggatctccccgttgctcctgcccctggactgagtggcaggccatcctacaaacacccggacactcgacatcagtggtgtcaagacaactctaagaaggttttccgtgatcctgcaagacctgtgttccatcctggtgattctctcttcaatttcactgcacaggtaccacagtaagccagtgctgtgtgctccgaattccagggcatcccccagctcagccactacactcagcacaaggactctgtggggcccaggagcaggtagtcacccctttgggctcctcaacacccggctgtccccagacttgtgtccagggaagatagtgttgagggccctcaaggagagcagggcagggatgcctgagcaggacaaggaccccagagtccaagaaaatcctgatgatcacagaacggtccccgaggtcaccggggatgcacggtctgcattttggcccctgcgggacaatggaggcctctctccctttgtgcccaggcccgggcctctgcagacagacctccatgcccagagctcagaaatcagatataaccagacatcccagacatcctggacgagctcgagcaccaaacgaaatgctatctccagctcctacagctccacgggaggcttgccggggctaaagcagaggaggggaccagcctcatcccgctgccagctgaccctcagttactcaaagacagtgagtgaggacaggcctcaggctgtctcttcgggtcacacacggtgtgaaaaggcggcagatacagcaccagggcagacactcgcccccaggggtggctcccccagatcccaggcctctaggccccgtagacgcaagattcccctgctgccaagcaggcgaggggagcctttgatgmtgccacctcccttagagctggggtaccgggtcacggctgaagacctgcacctggaaaaacaggcggcattccagcgcatcaacagtgcactgcacgttgaggacaaggccatctcggactgcagaccctcacggccttcccacactttgtcctcacttgcaacaggggcttcgggtgggcctcccgtttctaaagcacccactatggatgcacagcaggacagacccaagtcccaagactgcctgggcctagtggccccc

SEQ ID NO: 695213 - DNA, 2077 bp, Homo sapiens
ttatatggtttggctctgtccccacccaaatctcatcttgaattgtaacaattcccatgtgtcaagggtggggccaggtggagataactgaatcatggaggcagtttcccccatgctgttctcatggtagtgaataagtctcatgaggtctgatggttttataaatggatgttcccctgcacatgctctctcctgcccaccatgtctgactaaattttgtatttttactagagacggggtttcactatgttggccaggctggcctccaactcctgatctcgtgatccgtccaccccgacctcccaaagtgctaggattataggcataagccaccacacccggcctcttttttttctttttctttttttttatctggagactgagttttgcactcgttgcccaggctggagtgcaatggtgcgatctcagctcactgcagtctccacctcagcaggagagcaggaatcttcagtgatccacgggcagatctgcagccattgtgggcacctgttcctcccgcgacctttgtgcccacgtctctccctccagtacctattgcacgaccccccacgtccgcctcctgccattgccagcaagtgccttgcgcgggtacctggctgcgcttattaatccattatggtcgctctgtcactggtgccattatgtgctcacgtgcccactccctcaggtttagaagtcgcgtcgcccggcaacagaacaatctgctggcttagcctttggccaagttggcagctggacgaggacgctcagagcccagctctcgagagttcaagtatccgacagttccccactgctcccaggagcggttacccgggcactctgtgcccctcattcctgtttgggccaaggccgaggacctgcgagtagggctcagttgcctggagccccttcagcccatcgcccagttcactttgcttgtgggatctccccgttgctcctgcccctggactgagtggcaggccatcctacaaacacccggacactcgacatcagtggtgtcaagacaactctaagaaggttttccgtgatcctgcaagacctgtgttccatcctggtgattctctcttcaatttcactgcacaggtaccacagtaagccagtgctgtgtgctccgaattccagggcatcccccagctcagccactacactcagcacaaggactctgtggggcccaggagcaggtagtcacccctttgggctcctcaacacccggctgtccccagacttgtgtccagggaagatagtgttgagggccctcaaggagagcagggcagggatgcctgagcaggacaaggaccccagagtccaagaaaatcctgatgatcacagaacggtccccgaggtcaccggggatgcacggtctgcattttggcccctgcgggacaatggaggcctctctccctttgtgcccaggcccgggcctctgcagacagacctccatgcccagagctcagaaatcagatataaccagacatcccagacatcctggacgagctcgagcaccaaacgaaatgctatctccagctcctacagctccacgggaggcttgccggggctaaagcagaggaggggaccagcctcatcccgctgccagctgaccctcagttactcaaagacagtgagtgaggacaggcctcaggctgtctcttcgggtcacacacggtgtgaaaaggcggcagatacagcaccagggcagacactcgcccccaggggtggctcccccagatcccaggcctctaggccccgtagacgcaagattcccctgctgccaagcaggcgaggggagcctttgatgatgccacctcccttagagctggggtaccgggtcacggckgaagacctgcacctggaaaaacaggcggcattccagcgcatcaacagtgcactgcacgttgaggacaaggccatctcggactgcagaccctcacggccttcccacactttgtcctcacttgcaacaggggcttcgggtgggcctcccgtttctaaagcacccactatggatgcacagcaggacagacccaagtcccaagactgcctgggcctagtggccccc

SEQ ID NO: 695214 - DNA, 2077 bp, Homo sapiens
ttatatggtttggctctgtccccacccaaatctcatcttgaattgtaacaattcccatgtgtcaagggtggggccaggtggagataactgaatcatggaggcagtttcccccatgctgttctcatggtagtgaataagtctcatgaggtctgatggttttataaatggatgttcccctgcacatgctctctcctgcccaccatgtctgactaaattttgtatttttactagagacggggtttcactatgttggccaggctggcctccaactcctgatctcgtgatccgtccaccccgacctcccaaagtgctaggattataggcataagccaccacacccggcctcttttttttctttttctttttttttatctggagactgagttttgcactcgttgcccaggctggagtgcaatggtgcgatctcagctcactgcagtctccacctcagcaggagagcaggaatcttcagtgatccacgggcagatctgcagccattgtgggcacctgttcctcccgcgacctttgtgcccacgtctctccctccagtacctattgcacgaccccccacgtccgcctcctgccattgccagcaagtgccttgcgcgggtacctggctgcgcttattaatccattatggtcgctctgtcactggtgccattatgtgctcacgtgcccactccctcaggtttagaagtcgcgtcgcccggcaacagaacaatctgctggcttagcctttggccaagttggcagctggacgaggacgctcagagcccagctctcgagagttcaagtatccgacagttccccactgctcccaggagcggttacccgggcactctgtgcccctcattcctgtttgggccaaggccgaggacctgcgagtagggctcagttgcctggagccccttcagcccatcgcccagttcactttgcttgtgggatctccccgttgctcctgcccctggactgagtggcaggccatcctacaaacacccggacactcgacatcagtggtgtcaagacaactctaagaaggttttccgtgatcctgcaagacctgtgttccatcctggtgattctctcttcaatttcactgcacaggtaccacagtaagccagtgctgtgtgctccgaattccagggcatcccccagctcagccactacactcagcacaaggactctgtggggcccaggagcaggtagtcacccctttgggctcctcaacacccggctgtccccagacttgtgtccagggaagatagtgttgagggccctcaaggagagcagggcagggatgcctgagcaggacaaggaccccagagtccaagaaaatcctgatgatcacagaacggtccccgaggtcaccggggatgcacggtctgcattttggcccctgcgggacaatggaggcctctctccctttgtgcccaggcccgggcctctgcagacagacctccatgcccagagctcagaaatcagatataaccagacatcccagacatcctggacgagctcgagcaccaaacgaaatgctatctccagctcctacagctccacgggaggcttgccggggctaaagcagaggaggggaccagcctcatcccgctgccagctgaccctcagttactcaaagacagtgagtgaggacaggcctcaggctgtctcttcgggtcacacacggtgtgaaaaggcggcagatacagcaccagggcagacactcgcccccaggggtggctcccccagatcccaggcctctaggccccgtagacgcaagattcccctgctgccaagcaggcgaggggagcctttgatgatgccacctcccttagagctggggtaccgggtcacggctgaagacctgcacctggaaaaacaggcrgcattccagcgcatcaacagtgcactgcacgttgaggacaaggccatctcggactgcagaccctcacggccttcccacactttgtcctcacttgcaacaggggcttcgggtgggcctcccgtttctaaagcacccactatggatgcacagcaggacagacccaagtcccaagactgcctgggcctagtggccccc

SEQ ID NO: 695215 - DNA, 971 bp, Homo sapiens
tttttattgtctctataacaaaattataatgtcttgaatcatttcttatatttaagccagggatattggaatttaaattacaatgagtttaagaatgaatatcaacataggttctatccaaaaaattagagtgaggaaaagttaaatgttaaaatacactgccttctatttaattacagagtaagcttcatcagctgtcttcaagaaaaaattagtgatagattccatttctctaaagtaggtacatttctatggtcaagtctctttattcacgataacactgataaaagagaatgtctattgagccttttctcatcattaaagacataagcaaatttggagactatttctcagccaatatcatgtgattgataataagttgtaaaagtgttcctatttctccacatcctctccagcagcatgtaccctaaaacttaaagtataataaaaaaaaaaaaaagaaaagaaaaaaataaataagttgtatggctgaagtttgaacatgggtctatctaaatttaattaacmctctgaagcactatatcaccctaaacaaagtggagtattttacatatatcctgattgcatgatgaaataatgcccggaaaacaagaaatatgcatacacacacacccacattcagaagttagcattaataaaatgttaactagaatttttttttctcattcctttgttcatgcattcaactacttattcattcatttatgctattatgcatctactttacaatagtagctgctatataaattctggggatagaaaggcaaacaaaacaagtttcctgcctttgtggattattattctaatgattaatacaaaacaaataataaaatagtgtataatgtctgatcttaaaaatgtcataaagaaaaataaactcaggtaagtagatagagaataacaagagaatattttaaataggtgcagtaaaggcagtaattgaggcctac

SEQ ID NO: 695216 - DNA, 1229 bp, Homo sapiens
tcatttctatgtattgctctatctatattatataactgatttactaccattaaattataaaatattacatgttcagtgtattgtccttctgcagttactgatttataactttaatagtaacagatgtagctttattactaggaagcttattgagatcatgggacatttagacccattgttttgattaaactttgaggacatttttgtactatctttataaatatggatatttaaatcagaattacagtaacattgatttttattgagaagacatttctagagtatatattattaattcactttaatcccttcaacatatagcacagttaaaatatttctagtttgctacgagtttcagatatagctaaaattttcatacgactaaaatctttgtgtatgtcaaagatttgtgtatgaaggcttaacttattgattagttttttaacataccaaattgcagtaactaaaccatctactattgtgagttatttttcctctcacgtttacttttccttggccttattttacagctaaattttataaaaaagatttgattcatttttgaatcaaatcaaatttattctaatatgtaataaactttattgcgtgcagtttggctgttttcagttttgttttcaatttttcctacttttcttaacttttcctaggtcaatatttttagttctgagagtttctaaaaagaaaatataataataatggttaacatttgagtgtttactagttttcagaactcattaagtcctactttgtcccaaattgagtataactttgagcaagaatcttaatctctctgaatttcagccccttcatctgccaaatacagaaaatatattttggtgaggatcatattggataatgaatgtgagagctctttttataggaagtgccacacaaatgtaagttatgaatgttttcgcagctgctacttatagagcagtgacccaaattaaaaaaaaaaaagtgtggaatgctaagtaaaaaatgtgatgtagtgtagttgcaaaggcgttagctgtattctaattccagatttgccacttactcgttgrattgactttgggcaatccacttaacctttacgacaacttctttatctgtaccacgaaggacttcgctacgtcagtgtttctccaggtgtggtccaagggccaccttgcatctgagtcacctgggacacttgtttaaaggctgatttttgggcctcagcc

SEQ ID NO: 695217 - DNA, 1324 bp, Homo sapiens
tcacctcccaaagacccaagtcctaatattgtcacattggtggttaggttttaacatataaacttttggggggtataaaaacattcagaccatagcacttacaaagtcacattattccctattctttatttattttaatgacttcattgccgaaatttacaaaacaatatggagcattcgaagtaaccatgtgcaggcatctgtatgttaaattgccttctgccataataaatgaaataattctgaaatagacttaaactataacatgaaaatttgctagatttaaaagataaatgtgaattatttaccattcaataaattttaaaaattatttctctaatgggcacataatccttctgcccaataagcaattttgtcatttagagtttatacttcaatatttgaacctttgagagtttctagtctgaacatatccttcaagaaaaaatatccatatacaatgaagaaaaaaaatccacttggaaagaatatttatatgaagattaagatattccccatcttgcaaagtctgtgggaactattactgaagtaagttctaaagaaatgtgttaaggcttagggtgccctatgtgctgatagagataggcatcattcatattacttgagaattctyatttccatatacagcaagccaaggaaatgaacacaactttgattgattgttccaggaaaagaatgtgcaatagggtacaagcacattttgttgtgttttgtttttttctttttctaaatagaaagcttctgagaaagctacaatgagagagaattctgggattttcttttttttattataattattatactttaagttctgggatacaggtacagaacatgcagatttgttacatagatatacacgtgccatggtggtttgctgcatctatcaacctgtcttctacattaggtatttctcctaatgctatccctccactatcccccaacccccgacagactgtggtgtgtgatattcccctccctgtgtctatgtgttctcacagttcacctcccacttatgagtgagaacatgcggtgtttggttttgtgttcctgtgttagtttaccaagaatgatggtttccagcttcatccatggccctgcaaagaacatgaactcatccttttttatggctgcatagtattccatggtgtgtatgtgccacattttctttatccagtctttcattgataggcatttgggttggttccaagtctttgctattgtgaacagtgctgcaataaacatacatgtgcatgtgtctttatagtacaatgatttataatcctctgggtatatacccagtaat

SEQ ID NO: 695218 - DNA, 1324 bp, Homo sapiens
tcacctcccaaagacccaagtcctaatattgtcacattggtggttaggttttaacatataaacttttggggggtataaaaacattcagaccatagcacttacaaagtcacattattccctattctttatttattttaatgacttcattgccgaaatttacaaaacaatatggagcattcgaagtaaccatgtgcaggcatctgtatgttaaattgccttctgccataataaatgaaataattctgaaatagacttaaactataacatgaaaatttgctagatttaaaagataaatgtgaattatttaccattcaataaattttaaaaattatttctctaatgggcacataatccttctgcccaataagcaattttgtcatttagagtttatacttcaatatttgaacctttgagagtttctagtctgaacatatccttcaagaaaaaatatccatatacaatgaagaaaaaaaatccacttggaaagaatatttatatgaagattaagatattccccatcttgcaaagtctgtgggaactattactgaagtaagttctaaagaaatgtgttaaggcttagggtgccctatgtgctgatagagataggcatcattcatattacttgagaattcttatttccatatacagcaagccaaggaaatgaacacaactttgattgattgttccaggaaaagaatgtgcaatakggtacaagcacattttgttgtgttttgtttttttctttttctaaatagaaagcttctgagaaagctacaatgagagagaattctgggattttcttttttttattataattattatactttaagttctgggatacaggtacagaacatgcagatttgttacatagatatacacgtgccatggtggtttgctgcatctatcaacctgtcttctacattaggtatttctcctaatgctatccctccactatcccccaacccccgacagactgtggtgtgtgatattcccctccctgtgtctatgtgttctcacagttcacctcccacttatgagtgagaacatgcggtgtttggttttgtgttcctgtgttagtttaccaagaatgatggtttccagcttcatccatggccctgcaaagaacatgaactcatccttttttatggctgcatagtattccatggtgtgtatgtgccacattttctttatccagtctttcattgataggcatttgggttggttccaagtctttgctattgtgaacagtgctgcaataaacatacatgtgcatgtgtctttatagtacaatgatttataatcctctgggtatatacccagtaat

SEQ ID NO: 695219 - DNA, 1509 bp, Homo sapiens
agaatacatcagatctcagtcaaattatatgtctaacataactcagcagacagaacaataaacatycactactactcccataagaccaagttctttctacatgggaaacaccctacaatagaggcatttcctggaagggctattcatttttcagtgagctgtaacagttttcaaatgtctgtagatgcctctgattgcaaaaaatagtcagatcttttcattgtgaagacccctttgtcctctaaacttgctcactatctggctagagccctcctactcaaggttataccactgactgggtcaaatctgttttctggcttcaggaatgaaacataatgagccaatgtatttatctctgatgggcaaagctccaccttcaagcccttaagtgaccttgtagactctactatagtgacatcctgttgatgacaagaagtcaggggatctgagttctggccccacattttgccttccaaggccagatgctgttggccaggtcacctctcttgagactcagggattcagtatctaccctcctgttcacagaacacagacaggatcatggggatgaatgaccatgtacacttgagttgtgaaatcctctgcagacccaagaatggcagttcatacagggctacccatagtctcatctagagcatctcaggccaacccagttgccctcatgctcaggagctccctccctttttaggccctgtctgttctgctcatggccaacttaaattcctctggctcttgggttgggggtggggagtagatgaccacccttgcccttaatctggagtgggctaagcctagtccctcccactattcatgtgatgtaggaattagcccttggctaagaacagactccatgccattccaggactcgctgccttagaatgagcaaagagtgggagggcaggaagagaaaggaaatgtttaccatctgttcaatctgggggccactgggagatcgaatttttgacacaaaatgttaccatgtgataacgacaatttttaatagtagacaaaactctagaccaggagacaagggacccaagttttccttttgacttggtctctagctacgtgtcccttgaaaatgtaaattcacctctgttttcttacctacaaaatagagtgattggatcaggtaaattgttctccttctgtctctaatatttgatgatatggaagcctgtgcacaggaaggagtgcagtggcagagaagagggatatagacactctgtgtagatctgtggttcctgacattggccatgaacccctaggagagaggacacagaattttttcaaagggttctcaaacttacacatgagccaagaattatctgcagacagaattaaaaaaaaaatttcacacatatatgtactactttcaaatctacatgtgtgctactgggattaattaaatgtgaattcattttaaaaagaaattttttacattataaaatactttcaatccacggatgccaaaagaactaccatcat

SEQ ID NO: 695220 - DNA, 1509 bp, Homo sapiens
agaatacatcagatctcagtcaaattatatgtctaacataactcagcagacagaacaataaacattcactactactcccataagaccaagttctttctacrtgggaaacaccctacaatagaggcatttcctggaagggctattcatttttcagtgagctgtaacagttttcaaatgtctgtagatgcctctgattgcaaaaaatagtcagatcttttcattgtgaagacccctttgtcctctaaacttgctcactatctggctagagccctcctactcaaggttataccactgactgggtcaaatctgttttctggcttcaggaatgaaacataatgagccaatgtatttatctctgatgggcaaagctccaccttcaagcccttaagtgaccttgtagactctactatagtgacatcctgttgatgacaagaagtcaggggatctgagttctggccccacattttgccttccaaggccagatgctgttggccaggtcacctctcttgagactcagggattcagtatctaccctcctgttcacagaacacagacaggatcatggggatgaatgaccatgtacacttgagttgtgaaatcctctgcagacccaagaatggcagttcatacagggctacccatagtctcatctagagcatctcaggccaacccagttgccctcatgctcaggagctccctccctttttaggccctgtctgttctgctcatggccaacttaaattcctctggctcttgggttgggggtggggagtagatgaccacccttgcccttaatctggagtgggctaagcctagtccctcccactattcatgtgatgtaggaattagcccttggctaagaacagactccatgccattccaggactcgctgccttagaatgagcaaagagtgggagggcaggaagagaaaggaaatgtttaccatctgttcaatctgggggccactgggagatcgaatttttgacacaaaatgttaccatgtgataacgacaatttttaatagtagacaaaactctagaccaggagacaagggacccaagttttccttttgacttggtctctagctacgtgtcccttgaaaatgtaaattcacctctgttttcttacctacaaaatagagtgattggatcaggtaaattgttctccttctgtctctaatatttgatgatatggaagcctgtgcacaggaaggagtgcagtggcagagaagagggatatagacactctgtgtagatctgtggttcctgacattggccatgaacccctaggagagaggacacagaattttttcaaagggttctcaaacttacacatgagccaagaattatctgcagacagaattaaaaaaaaaatttcacacatatatgtactactttcaaatctacatgtgtgctactgggattaattaaatgtgaattcattttaaaaagaaattttttacattataaaatactttcaatccacggatgccaaaagaactaccatcat

SEQ ID NO: 695221 - DNA, 1509 bp, Homo sapiens
agaatacatcagatctcagtcaaattatatgtctaacataactcagcagacagaacaataaacattcactactactcccataagaccaagttctttctacatgggaaacaccctacaatagaggcatttcctggaagggctattcatttttcagtgagctgtaacagttttcaaatgtctgtagatgcctctgattgcaaaaaatagtcagatcttttcattgtgaagacccctttgtcctctaaacttgctcactatctggctagagccctcctactcaaggttataccactgactgggtcaaatctgttttctggcttcagraatgaaacataatgagccaatgtatttatctctgatgggcaaagctccaccttcaagcccttaagtgaccttgtagactctactatagtgacatcctgttgatgacaagaagtcaggggatctgagttctggccccacattttgccttccaaggccagatgctgttggccaggtcacctctcttgagactcagggattcagtatctaccctcctgttcacagaacacagacaggatcatggggatgaatgaccatgtacacttgagttgtgaaatcctctgcagacccaagaatggcagttcatacagggctacccatagtctcatctagagcatctcaggccaacccagttgccctcatgctcaggagctccctccctttttaggccctgtctgttctgctcatggccaacttaaattcctctggctcttgggttgggggtggggagtagatgaccacccttgcccttaatctggagtgggctaagcctagtccctcccactattcatgtgatgtaggaattagcccttggctaagaacagactccatgccattccaggactcgctgccttagaatgagcaaagagtgggagggcaggaagagaaaggaaatgtttaccatctgttcaatctgggggccactgggagatcgaatttttgacacaaaatgttaccatgtgataacgacaatttttaatagtagacaaaactctagaccaggagacaagggacccaagttttccttttgacttggtctctagctacgtgtcccttgaaaatgtaaattcacctctgttttcttacctacaaaatagagtgattggatcaggtaaattgttctccttctgtctctaatatttgatgatatggaagcctgtgcacaggaaggagtgcagtggcagagaagagggatatagacactctgtgtagatctgtggttcctgacattggccatgaacccctaggagagaggacacagaattttttcaaagggttctcaaacttacacatgagccaagaattatctgcagacagaattaaaaaaaaaatttcacacatatatgtactactttcaaatctacatgtgtgctactgggattaattaaatgtgaattcattttaaaaagaaattttttacattataaaatactttcaatccacggatgccaaaagaactaccatcat

SEQ ID NO: 695222 - DNA, 1509 bp, Homo sapiens
agaatacatcagatctcagtcaaattatatgtctaacataactcagcagacagaacaataaacattcactactactcccataagaccaagttctttctacatgggaaacaccctacaatagaggcatttcctggaagggctattcatttttcagtgagctgtaacagttttcaaatgtctgtagatgcctctgattgcaaaaaatagtcagatcttttcattgtgaagacccctttgtcctctaaacttgctcactatctggctagagccctcctactcaaggttataccactgactgggtcaaatctgttttctggcttcaggaatgaaacataatgagccaatgtatttatctctgatgggcaaagctccaccttcaagcccttaagtgaccttgtagactctactatagtgacatcctgttgatgacaagaagtcaggggatctgagttctggccccacattttgccttccaaggccagatgctgttggccaggtcacctctcttgagactcagggattcagtatctaccctcctgttcacagaacacagacaggatcatggggatgaatgaccatgtacacttgagttgtgaaatcctctgcagacccaagaatggcagttcatacagggctacccatagtctcatctagagcatctcaggccaacccagttgccctcatgctcaggagctccctccctttttaggccctgtctgttctgctcatggccaacttaaattcctctggctcttgggttgggggtggggagtagatgaccacccttgcccttaatctggagtgggctaagcctagtccctcccactattcatgtgatgtaggaattagcccttggctaagaacagactccatgccattccaggactcgctgccttagaatgagcaaagagtgggagggcaggaagagaaaggaaatgtttaccatctgttcaatctgggggccactgggagatcgaatttttgacacaaaatrttaccatgtgataacgacaatttttaatagtagacaaaactctagaccaggagacaagggacccaagttttccttttgacttggtctctagctacgtgtcccttgaaaatgtaaattcacctctgttttcttacctacaaaatagagtgattggatcaggtaaattgttctccttctgtctctaatatttgatgatatggaagcctgtgcacaggaaggagtgcagtggcagagaagagggatatagacactctgtgtagatctgtggttcctgacattggccatgaacccctaggagagaggacacagaattttttcaaagggttctcaaacttacacatgagccaagaattatctgcagacagaattaaaaaaaaaatttcacacatatatgtactactttcaaatctacatgtgtgctactgggattaattaaatgtgaattcattttaaaaagaaattttttacattataaaatactttcaatccacggatgccaaaagaactaccatcat

SEQ ID NO: 695223 - DNA, 1509 bp, Homo sapiens
agaatacatcagatctcagtcaaattatatgtctaacataactcagcagacagaacaataaacattcactactactcccataagaccaagttctttctacatgggaaacaccctacaatagaggcatttcctggaagggctattcatttttcagtgagctgtaacagttttcaaatgtctgtagatgcctctgattgcaaaaaatagtcagatcttttcattgtgaagacccctttgtcctctaaacttgctcactatctggctagagccctcctactcaaggttataccactgactgggtcaaatctgttttctggcttcaggaatgaaacataatgagccaatgtatttatctctgatgggcaaagctccaccttcaagcccttaagtgaccttgtagactctactatagtgacatcctgttgatgacaagaagtcaggggatctgagttctggccccacattttgccttccaaggccagatgctgttggccaggtcacctctcttgagactcagggattcagtatctaccctcctgttcacagaacacagacaggatcatggggatgaatgaccatgtacacttgagttgtgaaatcctctgcagacccaagaatggcagttcatacagggctacccatagtctcatctagagcatctcaggccaacccagttgccctcatgctcaggagctccctccctttttaggccctgtctgttctgctcatggccaacttaaattcctctggctcttgggttgggggtggggagtagatgaccacccttgcccttaatctggagtgggctaagcctagtccctcccactattcatgtgatgtaggaattagcccttggctaagaacagactccatgccattccaggactcgctgccttagaatgagcaaagagtgggagggcaggaagagaaaggaaatgtttaccatctgttcaatctgggggccactgggagatcgaatttttgacacaaaatgttaccatgtgataacgacaatttttaatagtagacaaaactctagaccaggagacaagggacccaagttttccttttgacttggtctctagctacgtgtcccttgaaaatgtaaattcacctctgttttcttayctacaaaatagagtgattggatcaggtaaattgttctccttctgtctctaatatttgatgatatggaagcctgtgcacaggaaggagtgcagtggcagagaagagggatatagacactctgtgtagatctgtggttcctgacattggccatgaacccctaggagagaggacacagaattttttcaaagggttctcaaacttacacatgagccaagaattatctgcagacagaattaaaaaaaaaatttcacacatatatgtactactttcaaatctacatgtgtgctactgggattaattaaatgtgaattcattttaaaaagaaattttttacattataaaatactttcaatccacggatgccaaaagaactaccatcat

SEQ ID NO: 695224 - DNA, 1348 bp, Homo sapiens
ctttcttgaatggtcaaattgatgttaaattataacctacatttcaccatcagtgccatgagtattaaaatgtcaagtaaagaagatgtcattgtgtgaagatgcttgtctttgtagacacattttgggtgggatagtttgagaatcaaataaacattttaagagtcacaattaattttgtaattttagcacatagtttattagagtggaggactaggttttttttttaacttgtatccatgactttcagtaaagtggtaaagaattattgcttgtagaaaggaaacatgaatgtttcagcatcattagtggttaagaaagtagtaacagctacctcatcaaaatatacagatggcagataaaatcatgaaaatatactaccattatacgtaactaggaaactacaaatcaaaacaactatgagataccactacacacctattaaaatggcaaagtccggaacactgacaacaccaaatgctggtgaggatgtggagcaacaggaactcatccattgcaggtgggaatgcaaaatgttgcagtcactgtggaagacagtttggcagtttcttacaaaactaaacatactcttagtatatgatccagcaattgcactccttggtatttacccaaataagttaaaaacttaagttcccacaaaaccttgaacatgaatgcttatagcagttttttttttcgtaattgctagaacttggaaacacccagctgttcttcagtaggcgaataaaccttgctacatccagacaatagaatagtatttagcactaaatataaattagctatcaaaccatgaaaatacatggagaagacttaaatgcatatgactaagtgacagaaaaagctcaactggaaaggctacataatttatgattctgactatatgacattctggggaaggcaaaacttgaagacagtaaaacgtaagtggttcaaagggttgggggaagaaaagcatgaataggagagccacagaggagttttagggcagtgaaaaatactctgtatggtactgcaatgatggtaaaaagtcattatacatttgttaaaacccatagaatgtataacaccaacagtgcaccctcatgtaagccatagtccttgggcggcaatggcaggtcaatgtaaagtcactgattgcaacaaatgtactactctggttcaggattttgatagtggaagaggttatatatgtattcagggtcaaggggcatagaaaaactctctttaccttctgctcaattttgccatgaacctcaaacttctctaaaaataaagtctattttttraaaaagcacaagttatataaaaatattcatgctgttattaa

SEQ ID NO: 695225 - DNA, 2209 bp, Homo sapiens
tcttgtttttataatttctgcctcttcgtttttatggtctacactctgggaagttttttttcagatatagtcaccagttcactaacgttgcttaaatttatacatacacctggttttaaagtgaattgatacagtctctttttaaactcagtgatttcctatttgtaaaatttttctaacttctttttcaagtctgtcattttagtagcatcttactctttgcccacatttttattttttagcatttatgtatttatgtatttatttatttttgttttttgagacagagtctctctctgtcacccaggctagagtgcaatggcctgatctcagctyactgcaacctccgcctcccaggttcaagcgtttctcctacctcagccccctgattaactgagattataggcatgtgccatcacacccggctaatttttttcaaatttttagtagagacgaggtttcaccatgtggccaggctggtcttgaactcctgacctcaagcgatctgcctgcctcgacctcccaaagtactgggattacaggcatgagccccctcgcctggccttgcccacatttttaacatccacactttcgtaccttctgatgtgcctttggtatatttatatcacaaatttaaaatattctcagtttttggatgactgatactttgcatctcttcatgtagcttggaggtccttccatcaggattgaatttgtgactgctgtttcgaggtgtctatgctatacacagttctaaaccagaactatattgccttgcattttccatttatccacacacatgatgtgaattctaactcctcccgcaactgaatcccagcttgaggtcatgggcttttcctctgtgccactcagagccaagactaagagaagcaagcctcccaaaagtctccattttcatttcccctgttgtttatccactcaagatgtcacttttcaggtgtctcatatgtaattgctacaggggatggtggcggggtggcactgaactcactgcccttggacataaaccctaggccatgtctcctaccctggcctctcccgtgctgttgggtgactgatgatactttcatcagcagatcttggcctcagtgccttctacctcttgaaattcacggtctctcaacattgttgagaagactgaagactgttcttactacctgccaacagcgtgatatcttagaagagatctttttaaaatacaattcattatattcacctttctttttcaaatacatttctttttccctcccttcctgcctttctttttctcatttatacatatacataatgcacaattatatactcaatatttaagtatgtactttctttgaatctttcaatgaacttaaaataaattcagcacatttcaataacatccagtgacatttttgttaaattctcctaaatatgatttttgcagaccatagttattgtgtgaaacaatatattcattacgcacatctggatttcatatttccttatccacttttcaaaaaaatttctccggcacaaaatagaaatgacagtagctattgcatgtgttgaaattactacatgaacactcaaagatctttgcaattattatcacagtagattatgattttacattaaatttacatcaaaataatctagaaactgtgttctcgattatattagataatagcaccagagtatatattaataataacattaatatcaataatcagcaccagagtatatattctattgcatgtgtttctccactgcatgcacgtacaagcttatgctttatctaatgtacttctgttattctagactatatggatataaaactttcattttttttacgattgctgaagcattctaaccatgccaaaaatgcagaaaataatatcatacatgcttatgtgtcacccactaagattgaacacttgccaacagtttgtgtcatttctctcatgtgtgtgaaaacagcctctttctgtccatctgtgtttctctgtctttacgtcttttaacaaataaacctgaaaatatacaattaaagcttcacttgatcttttcattcctcataataccccaaataaccatcattttgaattatatttttacccctactctatttgtttctatacttctaaaacacaaataagcatccatagctaatacacaatgcagcttcaaaacatttctatacattgtgttatcc

SEQ ID NO: 695226 - DNA, 439 bp, Homo sapiens
gccctctgttttcaccagttaatttacaaattcaaccaaccttggatcaaaaataatcggaaaaaaattaaaataatacaaatagaaggcaatacagtgtaacgactgtttacatagcatttgctttcattaggtagtataagtaatctagaaatggtctaaagtrcaaggcaggatgtgtatgtacgttgtatgcaaatactacaccttttgatataagggacttatcatcctggatttggtatctgagagggttctgaaaccaatcacctgtgaatgccatcagatgactgtggtatttacagtgccatttaatacaaaaaaaaagcctgcaatttgataaaacatcatagttttcaaaaatcatgcaggtaaagttcaaatagaacatttgacttaaaaaaaaagtgattttataaacctaatataccaaaatggt

SEQ ID NO: 695227 - DNA, 1864 bp, Homo sapiens
ttaatttatttccttaaataactaaggttgtcrtaaatgtaaaatgatcaggaaatctttgaattgcacatttctgggaagtcaggtgaccagtattttctagttaattggaaaattttgctttttgacacatcttgtacttaagacattataatttaattttgggcatgcaggttaaaataatccaaaacaaaatgtcattctggggagccttatacttacaacaatctttacaattaataagaaaatatttgtgctaacctatgatgacttaataagttgtttgtttactctcctttatttaaaaaaaaaatactgtcttacagcagaggaaagacaataatgtacatttgaaacatctgagagagaatttaagcctggcatggtggctcatgcctgtaatcctagcactttgggaggctgaggcaggaagattacttgagcttaagagttcaagaccagacggggcaacatagtaagtccccatctctattatgttaattttgttttaattttataaaaagaaatcatggaatttaaaattcaggaaaaggcataaaccaaggcaccatcaagcagcatttctcagtttgcagagtatgttccgtgaggtactgcttctgcaagagtatctcgtacacacgctatgcacacacacatacatgcacacacaccacactataccccaaacacactcacacaggagtgcactttctgagacaggtaaacctgggaaatatttcagtttgtatgcttagagaagcctttaaaggtgccgaaacctcccgcagcagtaaaaataaaatgacggaaagaccaaagttgacgttcaattacatttaatctgcaatttcccaaactcattacacttcagagaattgttctcttgagtaatacctaagaattatgccccaggattagttttctgacccactgtggtacatggtgctttataatattatagatattaatcacagctaacccttgaacaatgtggggacaggagccctgagcaacgtcgcagtcagaaatccacgtgaaagttgtgattcctcaaaaacacagtagcctgctcttggccagaagccttactgataacatcaatagtcaattcacagatatttatgtatatatactacattcttacaataaagtaagctagaggaaaaaaaggttattaagacagtaatgaggaggaaaaaccatatttacaattcattaaatggaagtgggtcatcacaaagggcttcatcctcaccatcctctcattgagcaggctgaggaggaggaggaagaggaggggttggtcatgctgcctcaggtgtggcagaggtggaagaaaattctttcagtgacctgtacagtttaaacctatattgttcaacaatcaactgtaatttgcttaatgcttcacagcagctggcataaaagggagatctgattgattgattaaattatatatcgggtcagtaaagaaaaaaatagcctttctaaaataggaactatggtttcttgtaaataataagggggaggttgcagcttgttggaacattaccctcctgaattagagttgaatgagtaccataaggtaaaaaatacatagctggaatattacagtcaattactttacagataatgtagtcaatctaacttttggaaactaattactcaagagagcatttttcctgtttctttgccttggtgaaatgtagtacatgcttattcataatatgtaaagatctgtataagtagaaaaaataaaaccactttaagtttcatcacatagatgagtatgttgatatgcaccaatgaaagtcattctgtgtgaatacaaatcaggtactaaggaagaagagtgttatta

SEQ ID NO: 695228 - DNA, 1864 bp, Homo sapiens
ttaatttatttccttaaataactaaggttgtcataaatgtaaaatgatcaggaaatctttgaattgcacatttctgggaagtcaggtgaccagtattttctagttaattggaaaattttgctttttgacacatcttgtacttaagacattataatttaattttgggcatgcaggttaaaataatccaaaacaaaatgtcattctggggagmcttatacttacaacaatctttacaattaataagaaaatatttgtgctaacctatgatgacttaataagttgtttgtttactctcctttatttaaaaaaaaaatactgtcttacagcagaggaaagacaataatgtacatttgaaacatctgagagagaatttaagcctggcatggtggctcatgcctgtaatcctagcactttgggaggctgaggcaggaagattacttgagcttaagagttcaagaccagacggggcaacatagtaagtccccatctctattatgttaattttgttttaattttataaaaagaaatcatggaatttaaaattcaggaaaaggcataaaccaaggcaccatcaagcagcatttctcagtttgcagagtatgttccgtgaggtactgcttctgcaagagtatctcgtacacacgctatgcacacacacatacatgcacacacaccacactataccccaaacacactcacacaggagtgcactttctgagacaggtaaacctgggaaatatttcagtttgtatgcttagagaagcctttaaaggtgccgaaacctcccgcagcagtaaaaataaaatgacggaaagaccaaagttgacgttcaattacatttaatctgcaatttcccaaactcattacacttcagagaattgttctcttgagtaatacctaagaattatgccccaggattagttttctgacccactgtggtacatggtgctttataatattatagatattaatcacagctaacccttgaacaatgtggggacaggagccctgagcaacgtcgcagtcagaaatccacgtgaaagttgtgattcctcaaaaacacagtagcctgctcttggccagaagccttactgataacatcaatagtcaattcacagatatttatgtatatatactacattcttacaataaagtaagctagaggaaaaaaaggttattaagacagtaatgaggaggaaaaaccatatttacaattcattaaatggaagtgggtcatcacaaagggcttcatcctcaccatcctctcattgagcaggctgaggaggaggaggaagaggaggggttggtcatgctgcctcaggtgtggcagaggtggaagaaaattctttcagtgacctgtacagtttaaacctatattgttcaacaatcaactgtaatttgcttaatgcttcacagcagctggcataaaagggagatctgattgattgattaaattatatatcgggtcagtaaagaaaaaaatagcctttctaaaataggaactatggtttcttgtaaataataagggggaggttgcagcttgttggaacattaccctcctgaattagagttgaatgagtaccataaggtaaaaaatacatagctggaatattacagtcaattactttacagataatgtagtcaatctaacttttggaaactaattactcaagagagcatttttcctgtttctttgccttggtgaaatgtagtacatgcttattcataatatgtaaagatctgtataagtagaaaaaataaaaccactttaagtttcatcacatagatgagtatgttgatatgcaccaatgaaagtcattctgtgtgaatacaaatcaggtactaaggaagaagagtgttatta

SEQ ID NO: 695229 - DNA, 1864 bp, Homo sapiens
ttaatttatttccttaaataactaaggttgtcataaatgtaaaatgatcaggaaatctttgaattgcacatttctgggaagtcaggtgaccagtattttctagttaattggaaaattttgctttttgacacatcttgtacttaagacattataatttaattttgggcatgcaggttaaaataatccaaaacaaaatgtcattctggggagccttatacttacaacaatctttacaattaataagaaaatatttgtgctaacctatgatgacttaataagttgtttgtttactctcctttatttaaaaaaaaaatactgtcttacagcagaggaaagacaataatgtacatttgaaacatctgagagagaatttaagcctggcatggtggctcatgcctgtaatcctagcactttgggaggctgaggcaggaagattacttgagcttaagagttcaagaccagacggggcaacatagtaagtccccatctctattatgttaattttgttttaattttataaaaagaaatcatggaatttaaaattcaggaaaaggcataaaccaaggcaccatcaagcagcatttctcagtttgcagagtatgttccgtgaggtactgcttctgcaagagtatctcgtacacacgctatgcacacacacatacatgcacacacaccacactataccccaaacacactcacacaggagtgcactttctgagacaggtaaacctgggaaatatttcagtttgtatgcttagagaagcctttaaaggtgccgaaacctcccgcagcagtaaaaataaaatgacggaaagaccaaagttgacgttcaattacatttaatctgcaatttcccaaactcattacacttcagagaattgttctcttgagtaatacctaagaattatgccccaggattagttttctgacccactgtggtacatggtgctttataatattatagatattaatcacagctaacccttgaacaatgtggggacaggagccctgagcaacgtcgcagtcagaaatccacgtgaaagttgtgattcctcaaaaacacagtagcctgctcttggccagaagccttactsataacatcaatagtcaattcacagatatttatgtatatatactacattcttacaataaagtaagctagaggaaaaaaaggttattaagacagtaatgaggaggaaaaaccatatttacaattcattaaatggaagtgggtcatcacaaagggcttcatcctcaccatcctctcattgagcaggctgaggaggaggaggaagaggaggggttggtcatgctgcctcaggtgtggcagaggtggaagaaaattctttcagtgacctgtacagtttaaacctatattgttcaacaatcaactgtaatttgcttaatgcttcacagcagctggcataaaagggagatctgattgattgattaaattatatatcgggtcagtaaagaaaaaaatagcctttctaaaataggaactatggtttcttgtaaataataagggggaggttgcagcttgttggaacattaccctcctgaattagagttgaatgagtaccataaggtaaaaaatacatagctggaatattacagtcaattactttacagataatgtagtcaatctaacttttggaaactaattactcaagagagcatttttcctgtttctttgccttggtgaaatgtagtacatgcttattcataatatgtaaagatctgtataagtagaaaaaataaaaccactttaagtttcatcacatagatgagtatgttgatatgcaccaatgaaagtcattctgtgtgaatacaaatcaggtactaaggaagaagagtgttatta

SEQ ID NO: 695230 - DNA, 465 bp, Homo sapiens
gcgaaagttttatacaaattaaaatttaatttaaaaagagaagaaacacagactcactctattcccagaactcacaatatgggggaggaaacagacaagggaaccagcaatatcaacagaagtagaaagctgaacacaagaagaaaggcatctctttttttgtttgttttttttttttttgagatggagtttcrctcttgttacccaggctggagtgcaatggcgtgatctcggctcactgcaacctctaccttccgggttcaagtgactctcctgcctaagcctcctgagtagctgggactacaggcatgcgccaccacgcccggctaattttttgtacttttagtagagaggaggtttcaccatgttggccaggctggtcgcgaactcctgacctcaggtgatccacctgcctcggcctcccaaagtgctgggattacagctaccgcgcccagctgaaaggca

SEQ ID NO: 695231 - DNA, 465 bp, Homo sapiens
gcgaaagttttatacaaattaaaatttaatttaaaaagagaagaaacacagactcactctattcccagaactcacaatatgggggaggaaacagacaagggaaccagcaatatcaacagaagtagaaagctgaacacaagaagaaaggcatctctttttttgtttgttttttttttttttgagatggagtttcgctcttgttacccaggctggagtgcaatggcgtgatctcggctcactgcaacctctaccttccgggttcaagtgactctcctgcctaagcctcctgagtagctgggactacaggcatgcgccaccacgcccggctaattttttgtacttttagtagagaggrggtttcaccatgttggccaggctggtcgcgaactcctgacctcaggtgatccacctgcctcggcctcccaaagtgctgggattacagctaccgcgcccagctgaaaggca

SEQ ID NO: 695232 - DNA, 773 bp, Homo sapiens
tgagagtcttccaggaaaacctgtatctgaggaatatatgcctatatttgcttaagttgaaagaaaagatgggggaggggattagagccattgttggctgtgrgtagtatctcggagacaagccaggctgatttccttaaaataactagattgaaaaattggaaaaattaataccaaatcaaaacttgttagacattaatgattttgatatatacaaaatgctgttaaatgtgtttcctcctcactgtagaacctctactataaatagttgattgtaatcaatctttagatacacatttcaaaattattattataactgaaaaccagatctaacaataataggaaagtaatattgacattcaggagagaactagataccaattgaacctttccttcttgtcaattcttgttaaaatatatgttctggtagttactttcttctggacagtttaaatgacttcattttcaccaagtatatctctgttggtgcctgctaagtgataatctctttgaaattttaattttatgggtctcaaggattgaaaatgtattaacagcagctgccttgtcattgttattgctttagcttgaagctggctaattgctgtaatatcgcagcactggaaaagacaaaagagaaaggggagacctgtaataaaagaccattttctgtaatgtgtgctatttgctgtgcaaattgatggttttaagggttggaagactgcaggagtcttcccattagctgtactttaaaatgtagttaaaatatcact

SEQ ID NO: 695233 - DNA, 773 bp, Homo sapiens
tgagagtcttccaggaaaacctgtatctgaggaatatatgcctatatttgcttaagttgaaagaaaagatgggggaggggattagagccattgttggctgtgagtagtatctcggagacaagccaggctgatttccttaaaataactagattgaaaaattggaaaaattaataccaaatcaaaacttgttagacattaatgattttgatatatacaaaatgctgttaaatgtgtttcctcctcactgtagaacctctactataaatagttgattgtaatcaatctttagatacacatttcaaaattattattataactgaaaaccagatctaacaataataggaaagtaatattgacattcaggagagaactagataccaattgaacctttccttcttgtcaattcttgttaaaatatatgttctggtagttactttcttctggacagtttaaatgacttcattttcaccaagtatatctctgttggtgcctgctaagtgataatctctttgaaattttaattttrtgggtctcaaggattgaaaatgtattaacagcagctgccttgtcattgttattgctttagcttgaagctggctaattgctgtaatatcgcagcactggaaaagacaaaagagaaaggggagacctgtaataaaagaccattttctgtaatgtgtgctatttgctgtgcaaattgatggttttaagggttggaagactgcaggagtcttcccattagctgtactttaaaatgtagttaaaatatcact

SEQ ID NO: 695234 - DNA, 645 bp, Homo sapiens
taagctgataggcaacttcagcaaagtctcagaatacacaatcaatgtgcaaaaatcacaakcattcttatacaccaataacagacaaacagagagccaaatcatgagtgaactcccattcacaattgcttcaaagagaataaaatacctaggaatccaacttacaagggaggtgaaggacttcttcaaggagaactacaaaccactgctcgatgaaataaaagagaatacaaacaaatggaagaacattccatggtcatgggtaggaagaatcgatattgtgaaaatggctatactgcccaaggtaatttatagattcaatgccatccccatcaagctaccaatgagtttcttcaaagaattggaaaaaactattttaaagttcatatggaaccaaaaaagaacccgcattgccaagtcaatcctaagccaaaagaacaaagctggaggcatcacgctacctgacttcaaactatagtacaaggctacagtaaccaaaacagcatggtactggtaccaaaacagagatatagaccaatggaacagatatctcttttaaatagggatgtcatgtattgagggcctgctgatatatatcccagagctgggctagaaagtaaggaataatgtgatctaatattatta

SEQ ID NO: 695235 - DNA, 645 bp, Homo sapiens
taagctgataggcaacttcagcaaagtctcagaatacacaatcaatgtgcaaaaatcacaatcattcttatacaccaataacagacaaacagagagccaaatcatgagtgaactcccattcacaattgcttcaaagagaataaaatacctaggaatccaacttacaagggaggtgaaggacttcttcaaggagaactacaaaccactgctcratgaaataaaagagaatacaaacaaatggaagaacattccatggtcatgggtaggaagaatcgatattgtgaaaatggctatactgcccaaggtaatttatagattcaatgccatccccatcaagctaccaatgagtttcttcaaagaattggaaaaaactattttaaagttcatatggaaccaaaaaagaacccgcattgccaagtcaatcctaagccaaaagaacaaagctggaggcatcacgctacctgacttcaaactatagtacaaggctacagtaaccaaaacagcatggtactggtaccaaaacagagatatagaccaatggaacagatatctcttttaaatagggatgtcatgtattgagggcctgctgatatatatcccagagctgggctagaaagtaaggaataatgtgatctaatattatta

SEQ ID NO: 695236 - DNA, 645 bp, Homo sapiens
taagctgataggcaacttcagcaaagtctcagaatacacaatcaatgtgcaaaaatcacaatcattcttatacaccaataacagacaaacagagagccaaatcatgagtgaactcccattcacaattgcttcaaagagaataaaatacctaggaatccaacttacaagggaggtgaaggacttcttcaaggagaactacaaaccactgctcgatgaaataaaagagaatacaaacaaatggaagaacattccatggtcatgggtaggaagaatygatattgtgaaaatggctatactgcccaaggtaatttatagattcaatgccatccccatcaagctaccaatgagtttcttcaaagaattggaaaaaactattttaaagttcatatggaaccaaaaaagaacccgcattgccaagtcaatcctaagccaaaagaacaaagctggaggcatcacgctacctgacttcaaactatagtacaaggctacagtaaccaaaacagcatggtactggtaccaaaacagagatatagaccaatggaacagatatctcttttaaatagggatgtcatgtattgagggcctgctgatatatatcccagagctgggctagaaagtaaggaataatgtgatctaatattatta

SEQ ID NO: 695237 - DNA, 645 bp, Homo sapiens
taagctgataggcaacttcagcaaagtctcagaatacacaatcaatgtgcaaaaatcacaatcattcttatacaccaataacagacaaacagagagccaaatcatgagtgaactcccattcacaattgcttcaaagagaataaaatacctaggaatccaacttacaagggaggtgaaggacttcttcaaggagaactacaaaccactgctcgatgaaataaaagagaatacaaacaaatggaagaacattccatggtcatgggtaggaagaatcgatattgtgaaaatggctatactgcccaaggtaatttatagattcaatgccatccccatcaagctaccaatgagtttcttcaaagaattggaaaaaactattttaaagttcatatggaaccaaaaaagaacccgcattgccaagtcaatcctaagccaaaagaacaaagctggaggcatcacgctacctgacttcaaactatagtacaaggctacagtaaccaaaacagcatggtactggtaccaaaacagagatatagaccaatggaacagatatctcttttaaatagggatgtcatgtattgagggcctgctgwtatatatcccagagctgggctagaaagtaaggaataatgtgatctaatattatta

SEQ ID NO: 695238 - DNA, 598 bp, Homo sapiens
atgccagatgttaatgtaagctgggatggagagggcccaaagcaactgccatttattgacatttcagtggctgtggcaacagataaaggcttacttactccaatcataaaagatgctgctgctaaaggtatccaggaaattgctgactctgtaaaggtatgtcttaagaaagagtgtgctttcaaaatgttagcatatacttttggataattactttctgataaagttgtgacgtaatctagtcagactgtgatttttgtgtgtgtgaaggggagagttatttcatcaagtgattgtcacatatatataggtttttaaagtttttatccaagtatgacccattgtwagaaaatttaatattcaaaaattaagagataatatataaacaaattagggaacaacttcatgctaaagacaagctttattttccaaagtccagaattcagccataaagatgctatatcaggtaggttttaaagttgaagttaagctgaaactgtatttctatggacctcaatattaataacattttattcttaaagtgtatttacttcttctctaaaattgagaccattaaaagaacttagcggccaggcgc

SEQ ID NO: 695239 - DNA, 598 bp, Homo sapiens
atgccagatgttaatgtaagctgggatggagagggcccaaagcaactgccatttattgacatttcagtggctgtggcaacagataaaggcttacttactccaatcataaaagatgctgctgctaaaggtatccaggaaattgctgactctgtaaaggtatgtcttaagaaagagtgtgctttcaaaatgttagcatatacttttggataattactttctgataaagttgtgacgtaatctagtcagactgtgatttttgtgtgtgtgaaggggagagttatttcatcaagtgattgtcacatatatataggtttttaaagtttttatccaagtatgacccattgtaagaaaatttaatattcaaaaattaagagataatatataaacaaattagggaacaacttcatgctaaagacaagctttattttccaaagtccagaattcagccataaagatgctatatcaggtaggttttaaagttgaagttaagctgaaactgtatttctatggacctcaatattaataacattttattcttaaagtgtatttacttcttctctaaaattgagaccattaaaagaacttagcrgccaggcgc

SEQ ID NO: 695240 - DNA, 615 bp, Homo sapiens
ccctaactcatcacaaaaccaaagttctatctttcaataatcaaacatcatgtaaatgccaaaagaaaactctgagagcaaataatgagccatgaatatttcaaatctactgagtttcagctgtgatcaaaaatttagtgctataacttagaaagactccttggcagagtagttacaaggaacctctcctaattcaaatatgagtttgattccaagctctgacagttactagtgatcttgaccaagttacttaatctctctgactctcaggaaaattttaaatgtatagatatatattttttaagtcatggggctggaagtgttaatgcttcacatacatctttatgtaacactttacaacatctctaggtaaaaataaaatgttagctatacaaccatttwgaatcaagacacatttattccatattctgtcatgtctacctgaatcaagatacggtttttttccatattctgtcatttctaccagaatcaggacacatttattccatattctgtcatttctaccagatcatccaacaaacattaatgtataaggcactgtactaagcactgggtatgaaaacaacaaaaagagaaggttctgtccacaaagag

SEQ ID NO: 695241 - DNA, 615 bp, Homo sapiens
ccctaactcatcacaaaaccaaagttctatctttcaataatcaaacatcatgtaaatgccaaaagaaaactctgagagcaaataatgagccatgaatatttcaaatctactgagtttcagctgtgatcaaaaatttagtgctataacttagaaagactccttggcagagtagttacaaggaacctctcctaattcaaatatgagtttgattccaagctctgacagttactagtgatcttgaccaagttacttaatctctctgactctcaggaaaattttaaatgtatagatatatattttttaagtcatggggctggaagtgttaatgcttcacatacatctttatgtaacactttacaacatctctaggtaaaaataaaatgttagctatacaaccattttgaatcaagacacatttattccatattctgtcatgtctacctgaatcaagatacggtttttttccatattctgtcatttctaccagaatcaggacacatttattccatattctgtcatttctaccagatcatycaacaaacattaatgtataaggcactgtactaagcactgggtatgaaaacaacaaaaagagaaggttctgtccacaaagag

SEQ ID NO: 695242 - DNA, 602 bp, Homo sapiens
ttggcagctctggttctagatatggtctaggtgttgccagacaactgcaccaccatgagaagtttgcaccatgaagaagcaatcatacacacagttgggctatttttgctgacacaacggcccaagtgtgggcttctgggagaatgctggttgaaattattgtgtacattcccagtatcgtaggtgctaagtgacattaggctgtggcagtagggtaaatgtaaagatgaaaaggtcatgtggatatgtgcactattgtgggacaaattttaatattgaacaaaattcaaggcaaaaatcatcatgaaaaaacatatatacayatctctagatatagaatgatatatactcctttagaggaaaaaaacagatcaaaatgttttaataatcacaaacatatatgtatctgataatatagcctttatttatgttcaatgagatttaacatgttcatctcagaaagggatagatcaagctgcaaaaagtttgcatacatagaagatctaaatagcatgactaataagtttgaaatattagataaatgtagaatcttaaaaatataattttttcaagcacacataatatttgtaaaaattgaccag

SEQ ID NO: 695243 - DNA, 1630 bp, Homo sapiens
ttcttttgttcacttttcggagtcattttcctaccattcatttgtgcatgcagtgtctgaatttcagataacaaactcctatgtgctttctggaggcattccatagctgcttgatattcaacagcactattcacagtagcaaagacatagaatcaacctaaatgcccatcaacaacaaattggataaagaaaattgggtacatttataccatggaataccgtgcagccacaaaaaagaatgagttcatgtatttcgtgggaacacggatggtgctggaggctattatcgttagcaaactaacacagaaacagaaaaccaaataccacatgttctcacttataagtggaagctaaatgatgagaacttacaaatgygaagaaggagacaacagacactggggtctacttgagggtggagggtgggaggagggagaggagaagaaaagatagctattgggtactgggcttaatacctgggtgatgaagtaatctgtacaacaaacccccatgacatgagtttacctatgtaacaaaccttcacatgtacccccaaacctaaaataacagttttttaaaaataatcaatattgtcccagtcctccattttacagatatggaagttgtgattaaaatgtgattaatgtcacagaaatactaggaaagccaagcttctaacagtcattccagggtcattgccagggtgtcaaatcctatgtcactgcacagtattactataacaacaaagtgtccctttcctgacttcctattccccattcttgatccagcatctttgggatccacttccaggcattttctctggggtcctgctggcttaagtcagccagatcctgcagtgcctttgccatatgatcctcccctcccttaacagacactgtacttacccagttggattatactgaaacttagtcctcatactgtctggtatcggggagagaagtgggggtagattctgagcaggaccaacattgttttgtaagacacttgacttactcgaagcttatagttttcaagcaaggagaaggtcttccatcttccagcaagggagtgggccacctctgtaggcccagatattccggagaagctgggaggccaaggtccttaagtgtgtctaataagtttccccattccaattctcatgttcccacttttttccaatcaggaccctgattctcttgaaggagacttacacaggctgagaattaaccttctctggcgttctgccactcataagtacaggctgcacctgggcttcagttcagttggccttctggctgccagtgatgagggactttttaaaggcttccatggaggccctttgactctcacacttgggtttaaattggtggttaatagatttgatcctggcatctatacttagtgcatcaatggtgcttaccaataccctcccaattcaacaatctttcaagttacttttccacctgtactctcaaatactagatacatcacagaagttaatgcattcgcttctacttatatgctgtcctggttcactacaagtaaaagtgttagcaatttcactgcaggagcacatctgagactatcttcagggaagagattctgatgggaccactggtgagtgagcaaactc

SEQ ID NO: 695244 - DNA, 592 bp, Homo sapiens
gattgaaatcagagcaggaatatcagtgtgaactcatggatatacatgcagtgagatcccagtagcaatgagcacaactagtttccagatcttggtttctaaataccattctcgatgaaaggaaccagagctccctggggaaatgactgagtccagactagagcaggaggaatgcaagatgagcttagaccatttaaagtgccagaaagtaaagacatgttcacaaaataatgggggccaagtstacaagacatcggagccaacttaaaggagctactaatgcccaaatctggacaatttgaacaacatgatcaactgtgtgaaaggcaagtacagaagtgtatctagaatatattactcttcatggggttgttttacagttaacttttttttaataagtagaaggagtacactctagaataatgataaaaagtatagtatagtaaatacataaaccagtaacatagtcacttattatcattaagtattatgtactgtacataattgtatgtgccatacttttacatagctgacagtgcagtaggtttgtctgcatcgcatcactataatcctgtgagcaatacgctgtgtt

SEQ ID NO: 695245 - DNA, 592 bp, Homo sapiens
gattgaaatcagagcaggaatatcagtgtgaactcatggatatacatgcagtgagatcccagtagcaatgagcacaactagtttccagatcttggtttctaaataccattctcgatgaaaggaaccagagctccctggggaaatgactgagtccagactagagcaggaggaatgcaagatgagcttagaccatttaaagtgccagaaagtaaagacatgttcacaaaataatgggggccaagtctacaagayatcggagccaacttaaaggagctactaatgcccaaatctggacaatttgaacaacatgatcaactgtgtgaaaggcaagtacagaagtgtatctagaatatattactcttcatggggttgttttacagttaacttttttttaataagtagaaggagtacactctagaataatgataaaaagtatagtatagtaaatacataaaccagtaacatagtcacttattatcattaagtattatgtactgtacataattgtatgtgccatacttttacatagctgacagtgcagtaggtttgtctgcatcgcatcactataatcctgtgagcaatacgctgtgtt

SEQ ID NO: 695246 - DNA, 671 bp, Homo sapiens
atctttcctgcttgattttcctctgttgtactcatccctacccacatactttgtattcctcttttttaatttgtttattgccttttttcctcctttagaccacaagctccatgaggacagaaattttgstctgctttatcccctgatctctccccagcacctagcacattgtacctggtgtataatacatttttttaagatctctccccagtacctagcacattgtacctggtgcataatacattttttttttttaagagacagggtcttgttctatcacccaggctagagtgcagtggcatgatcatagctcactgcagcctcaaactcctgggctcaagcaattctcctgccccaacctcctaagtagacgggaccacaagtgtgtgccaccatacctggctaattttttttttttttttttttgagatggagtctccgctctgttgcccaggctggagtgcagtggcatgatcttggctcactgcaagctccgcctcccgggttcatgccattctcctgcctcagcctcccgagtagctgggactacaagcgcccaccaccatgcccggctaatttttatatttttagtagagacggggtttcatcgtgttatacctggctaattttttaaaaccatctgtagatatggggtcttgccatgttgccca

SEQ ID NO: 695247 - DNA, 671 bp, Homo sapiens
atctttcctgcttgattttcctctgttgtactcatccctacccacatactttgtattcctcttttttaatttgtttattgccttttttcctcctttagaccacaagctccatgaggacagaaattttgctctgctttatcccctgatctctccccagcacctagcacattgtacctggtgtataatacatttttttaagatctctccccagtacctagcacattgtacctggtgcataatacattttttttttttaagagacagggtcttgttctatcacccaggctagagtgcagtggcatgatcatagctcactgcagcctcaaactcctgggctcaagcaattctcctgccccaacctcctaartagacgggaccacaagtgtgtgccaccatacctggctaattttttttttttttttttttgagatggagtctccgctctgttgcccaggctggagtgcagtggcatgatcttggctcactgcaagctccgcctcccgggttcatgccattctcctgcctcagcctcccgagtagctgggactacaagcgcccaccaccatgcccggctaatttttatatttttagtagagacggggtttcatcgtgttatacctggctaattttttaaaaccatctgtagatatggggtcttgccatgttgccca

SEQ ID NO: 695248 - DNA, 671 bp, Homo sapiens
atctttcctgcttgattttcctctgttgtactcatccctacccacatactttgtattcctcttttttaatttgtttattgccttttttcctcctttagaccacaagctccatgaggacagaaattttgctctgctttatcccctgatctctccccagcacctagcacattgtacctggtgtataatacatttttttaagatctctccccagtacctagcacattgtacctggtgcataatacattttttttttttaagagacagggtcttgttctatcacccaggctagagtgcagtggcatgatcatagctcactgcagcctcaaactcctgggctcaagcaattctcctgccccaacctcctaagtagacgggaccacaagtgtgtgccaccatacctggctaattttytttttttttttttttgagatggagtctccgctctgttgcccaggctggagtgcagtggcatgatcttggctcactgcaagctccgcctcccgggttcatgccattctcctgcctcagcctcccgagtagctgggactacaagcgcccaccaccatgcccggctaatttttatatttttagtagagacggggtttcatcgtgttatacctggctaattttttaaaaccatctgtagatatggggtcttgccatgttgccca

SEQ ID NO: 695249 - DNA, 2566 bp, Homo sapiens
acctttcctttgtccatttatctgttgatggacacttaggttgcttccaaatcttggctattgtgaatagtgctgcaataaacatgggcgtgcaaaactggagaattttgaagtaatacatttactcctacagagatcctgaataatcatagttcttgattacacccacctcctcttcattattttaagtatttttgttaattactaagttgatccttctagtaaaaaggctgccacaacttcgtttcctttggaggactgagaccttcccaccttagcaagagctttccatgttgaggtttgcagtgagagtcacattacccagagaactgaggggactgcagttatgcccttgcagatacgggaacacgagggctgaattaatgagccagagccatagacaatactgccaaaaagtcccaagttcccccgagcaaatacccaggaaggatttgtctggatatcaccttcacctcctacttagaacagggttgccctgaaagtccctccacccatcgcaggagaagaccttggagagtggctagcagaattcaggcaaattctttgtttctgcattctatttgagcagcctggccacaggccaaggaaaactctcttggagaatagacattacctgtggagaatgatttgagaaactctgatccaggaatatccaacactacagtggcctcctggggtccctactaaccggtcccctattaatctccctgccctgatttcctaccatcctctccctcactcactctgctccagccactctggccttcctcaaaaacagacagacttctaccttgaggcttttacatttgcctagaacactctctagcttgctcgtttacctgcgtcatgtcttggctttcatgccactgtttgaacaaggcccacccttattaaccccaatcaatattgcaaacttccccttcaccactcaccctcaccaccctcattattcagctctttttttaaaaaggtacctattatgttctaatacatatcactggggtatgttttatatttattgtatattgtctatctcctcccactagaacacagctccacaaagggtgaaatgtttgcctgtttcttggttgactgctgttacccctgggcctgcatcagcacctggcgtatagtagactctcaagaacagctgtcgattaaatgactgaatatagcacatctgggaaaacaaaggcttgatttggtccctgttttcaacactagctctccctcccccaggactggtcctctcctagcactgccagcctctgccagtccttagtgggacatgacctgcccttgcccacacacctactcgatcctcactcagtagtcagcatccatatcccactgtgactgacccaggcacacagtgccagcagctcgtccaaactggaaactcttcaagtctcaaagtcttttatcagtctattacttgtccctgcattctctcttctgtccccctcactgtagaccttcagacactcaccaatttcctgttccctctctcagtccctgggaagaccggcagtggggtaggacgccaatctccccagctgctcttccaggctcccctgccagaggaggcctttggtctgtgatttttctgccaattattagaaagaaataggcctgggataataaaaacaaccaaggaggaatttaaaaggttatgaaatcttttaaaattctgttttctcaattgtattttctcatttgtacttctcggctcttttttgagacgtttacatagaatcatcatctttccttatatactcccttttggaggaaaaagtactttcagagtttctcaattatgtcaaataacagaaaacatttattgaacaattactatgtgctcagcaccataatgcatttctatgaaaatgagctcatttaatcctcacaacctctcggtgaagtggatgctgtcaatcttcccatttcatggaggaaaactgaggcccagagaagttatatgactcccgagtttacacagctacctagtggaggactctaagttacaacttatctaatttgagagttcarattttcaactgctataaaatatctctgatacatgagagaagctggaaagtgagatcataaccaccagaaaaatactacttgttagtgcctcagaagaactaccactggtgtgagtagaattacaacactggcaacccaaaagagatacgcatgtcatgttgtctgattttggagacattcttaattttcagtggcaggtgccatacatttattcattgagcaaatgttttactgagtacctttaatgtgacaaaaagcctggccactgcagaaacaggtgagcaaaagcaaacacagcccttgcattcatacaacatatatttcttcttgaaatcaagttcctggcactaggtatcaatagacttgaaaatatgcataaccagctaggtgcagtggctcacgcttgtaatcccagcactttgggaggccaaggcaggcagatctcttgaggtcaggagtttgagagaccagcctggccaacatggtgaaactgtgt

SEQ ID NO: 695250 - DNA, 2566 bp, Homo sapiens
acctttcctttgtccatttatctgttgatggacacttaggttgcttccaaatcttggctattgtgaatagtgctgcaataaacatgggcgtgcaaaactggagaattttgaagtaatacatttactcctacagagatcctgaataatcatagttcttgattacacccacctcctcttcattattttaagtatttttgttaattactaagttgatccttctagtaaaaaggctgccacaacttcgtttcctttggaggactgagaccttcccaccttagcaagagctttccatgttgaggtttgcagtgagagtcacattacccagagaactgaggggactgcagttatgcccttgcagatacgggaacacgagggctgaattaatgagccagagccatagacaatactgccaaaaagtcccaagttcccccgagcaaatacccaggaaggatttgtctggatatcaccttcacctcctacttagaacagggttgccctgaaagtccctccacccatcgcaggagaagaccttggagagtggctagcagaattcaggcaaattctttgtttctgcattctatttgagcagcctggccacaggccaaggaaaactctcttggagaatagacattacctgtggagaatgatttgagaaactctgatccaggaatatccaacactacagtggcctcctggggtccctactaaccggtcccctattaatctccctgccctgatttcctaccatcctctccctcactcactctgctccagccactctggccttcctcaaaaacagacagacttctaccttgaggcttttacatttgcctagaacactctctagcttgctcgtttacctgcgtcatgtcttggctttcatgccactgtttgaacaaggcccacccttattaaccccaatcaatattgcaaacttccccttcaccactcaccctcaccaccctcattattcagctctttttttaaaaaggtacctattatgttctaatacatatcactggggtatgttttatatttattgtatattgtctatctcctcccactagaacacagctccacaaagggtgaaatgtttgcctgtttcttggttgactgctgttacccctgggcctgcatcagcacctggcgtatagtagactctcaagaacagctgtcgattaaatgactgaatatagcacatctgggaaaacaaaggcttgatttggtccctgttttcaacactagctctccctcccccaggactggtcctctcctagcactgccagcctctgccagtccttagtgggacatgacctgcccttgcccacacacctactcgatcctcactcagtagtcagcatccatatcccactgtgactgacccaggcacacagtgccagcagctcgtccaaactggaaactcttcaagtctcaaagtcttttatcagtctattacttgtccctgcattctctcttctgtccccctcactgtagaccttcagacactcaccaatttcctgttccctctctcagtccctgggaagaccggcagtggggtaggacgccaatctccccagctgctcttccaggctcccctgccagaggaggcctttggtctgtgatttttctgccaattattagaaagaaataggcctgggataataaaaacaaccaaggaggaatttaaaaggttatgaaatcttttaaaattctgttttctcaattgtattttctcatttgtacttctcggctcttttttgagacgtttacatagaatcatcatctttccttatatactcccttttggaggaaaaagtactttcagagtttctcaattatgtcaaataacagaaaacatttattgaacaattactatgtgctcagcaccataatgcatttctatgaaaatgagctcatttaatcctcacaacctctcggtgaagtggatgctgtcaatcttcccatttcatggaggaaaactgaggcccagagaagttatatgactcccgagtttacacagctacctagtggaggactctaagttacaacttatctaatttgagagttcaaattttcaactgctataaaatatctctgatacatgagagaagctggaaagtgagatcataaccaccagaaaaatactacttgttagtgcctcagaagaactaccactggtgtgagtagaattacaacactggcaacccaaaagagatacgcatgtcatgttgtctgattttggagacattcttaattttcagtggcaggtgccatacatttattcattgagcaaatgttttactgagtacctttaatgtgacaaaaagcctggccactgcagaarcaggtgagcaaaagcaaacacagcccttgcattcatacaacatatatttcttcttgaaatcaagttcctggcactaggtatcaatagacttgaaaatatgcataaccagctaggtgcagtggctcacgcttgtaatcccagcactttgggaggccaaggcaggcagatctcttgaggtcaggagtttgagagaccagcctggccaacatggtgaaactgtgt

SEQ ID NO: 695251 - DNA, 2566 bp, Homo sapiens
acctttcctttgtccatttatctgttgatggacacttaggttgcttccaaatcttggctattgtgaatagtgctgcaataaacatgggcgtgcaaaactggagaattttgaagtaatacatttactcctacagagatcctgaataatcatagttcttgattacacccacctcctcttcattattttaagtatttttgttaattactaagttgatccttctagtaaaaaggctgccacaacttcgtttcctttggaggactgagaccttcccaccttagcaagagctttccatgttgaggtttgcagtgagagtcacattacccagagaactgaggggactgcagttatgcccttgcagatacgggaacacgagggctgaattaatgagccagagccatagacaatactgccaaaaagtcccaagttcccccgagcaaatacccaggaaggatttgtctggatatcaccttcacctcctacttagaacagggttgccctgaaagtccctccacccatcgcaggagaagaccttggagagtggctagcagaattcaggcaaattctttgtttctgcattctatttgagcagcctggccacaggccaaggaaaactctcttggagaatagacattacctgtggagaatgatttgagaaactctgatccaggaatatccaacactacagtggcctcctggggtccctactaaccggtcccctattaatctccctgccctgatttcctaccatcctctccctcactcactctgctccagccactctggccttcctcaaaaacagacagacttctaccttgaggcttttacatttgcctagaacactctctagcttgctcgtttacctgcgtcatgtcttggctttcatgccactgtttgaacaaggcccacccttattaaccccaatcaatattgcaaacttccccttcaccactcaccctcaccaccctcattattcagctctttttttaaaaaggtacctattatgttctaatacatatcactggggtatgttttatatttattgtatattgtctatctcctcccactagaacacagctccacaaagggtgaaatgtttgcctgtttcttggttgactgctgttacccctgggcctgcatcagcacctggcgtatagtagactctcaagaacagctgtcgattaaatgactgaatatagcacatctgggaaaacaaaggcttgatttggtccctgttttcaacactagctctccctcccccaggactggtcctctcctagcactgccagcctctgccagtccttagtgggacatgacctgcccttgcccacacacctactcgatcctcactcagtagtcagcatccatatcccactgtgactgacccaggcacacagtgccagcagctcgtccaaactggaaactcttcaagtctcaaagtcttttatcagtctattacttgtccctgcattctctcttctgtccccctcactgtagaccttcagacactcaccaatttcctgttccctctctcagtccctgggaagaccggcagtggggtaggacgccaatctccccagctgctcttccaggctcccctgccagaggaggcctttggtctgtgatttttctgccaattattagaaagaaataggcctgggataataaaaacaaccaaggaggaatttaaaaggttatgaaatcttttaaaattctgttttctcaattgtattttctcatttgtacttctcggctcttttttgagacgtttacatagaatcatcatctttccttatatactcccttttggaggaaaaagtactttcagagtttctcaattatgtcaaataacagaaaacatttattgaacaattactatgtgctcagcaccataatgcatttctatgaaaatgagctcatttaatcctcacaacctctcggtgaagtggatgctgtcaatcttcccatttcatggaggaaaactgaggcccagagaagttatatgactcccgagtttacacagctacctagtggaggactctaagttacaacttatctaatttgagagttcaaattttcaactgctataaaatatctctgatacatgagagaagctggaaagtgagatcataaccaccagaaaaatactacttgttagtgcctcagaagaactaccactggtgtgagtagaattacaacactggcaacccaaaagagatacgcatgtcatgttgtctgattttggagacattcttaattttcagtggcaggtgccatacatttattcattgagcaaatgttttactgagtacctttaatgtgacaaaaagcctggccactgcagaaacaggtgagcaaaagcaaacacagcccttgcattcatacaacatatatttcttcttgaaatcaagttcctggcactaggtatcaatagacttgaaaatatgyataaccagctaggtgcagtggctcacgcttgtaatcccagcactttgggaggccaaggcaggcagatctcttgaggtcaggagtttgagagaccagcctggccaacatggtgaaactgtgt

SEQ ID NO: 695252 - DNA, 1341 bp, Homo sapiens
tgatagtttcacaatttggaaaggtcacaagctgtgtccccaccttgagctccccatctccaccctgcccacacaccttgtaggccatttgcctaaataaaagatgcgatccgcatgcctcatgatcttcacgttccctgttttgctgattcccgtcttttatcatctcttctcctagccctgcagcactactcaacacttttatggatgtgtcacattgatacggggagggggacagggaagtgctgggtagaaaaggcaggtccctggtgagggctctacccccaggactgtgcccacggacgtaggtgaggacaagcatttttgttttcttgcccaaatgttgcatttcccagaccatcctggcctgtcaagcccccatcctgtgcgtataaaaaccccgagaccctagcagacagacatgcaggcagctggacgtcgagaggaacactctggtggaagaacacccaaacagacatcagcagaagccggtagacgctggcaggctgaccagctgaacgatgcggagtttggccagggtggttggaggggagcccagccactgggcagccctactccggaggaaaaccactttcccaatccattcccttctggctcccccgtcttctgagagctaccaccactcaataaaaacccttgcagccatcctccaagcccacgtgtgatccaatttttccagtacaccaaggcaagaatccaggaaacagaaagccctctgtctttgccatgaggcagagggtctaatggagctgaataacacaagctgcctacagacagctaaactgaaagagcacactataacacacgcccactgagacgctgtaaaaactcaaccctagacactgccatggggtcggatccccacaacttgcctgtctgcgtgctccccctagaggtttgggcagcggggcatcgacggagcaagccccacacacccattgcatgctctgcaagagcaataaagggacttttcccatttcaacatttttcttaactcttggatttgcttttgaatccctttctcattgrccagaacctttgctaactccagaaccagactgaccacttctctgcacgtcactgtgcattgtgcattttaccatgagggtgtctagtactttctctccttgcaataaaatatttttccaactagattgctctatatgcaaactcactctactttccttattaaattctctcagacatataatctcttgggttgaaaatgaattgcagtactgctgtctttgtgattgcccttagcaaccacctagcaacttgcttcttaaatatttttcagacaattaaaagttgacaacc

SEQ ID NO: 695253 - DNA, 1341 bp, Homo sapiens
tgatagtttcacaatttggaaaggtcacaagctgtgtccccaccttgagctccccatctccaccctgcccacacaccttgtaggccatttgcctaaataaaagatgcgatccgcatgcctcatgatcttcacgttccctgttttgctgattcccgtcttttatcatctcttctcctagccctgcagcactactcaacacttttatggatgtgtcacattgatacggggagggggacagggaagtgctgggtagaaaaggcaggtccctggtgagggctctacccccaggactgtgcccacggacgtaggtgaggacaagcatttttgttttcttgcccaaatgttgcatttcccagaccatcctggcctgtcaagcccccatcctgtgcgtataaaaaccccgagaccctagcagacagacatgcaggcagctggacgtcgagaggaacactctggtggaagaacacccaaacagacatcagcagaagccggtagacgctggcaggctgaccagctgaacgatgcggagtttggccagggtggttggaggggagcccagccactgggcagccctactccggaggaaaaccactttcccaatccattcccttctggctcccccgtcttctgagagctaccaccactcaataaaaacccttgcagccatcctccaagcccacgtgtgatccaatttttccagtacaccaaggcaagaatccaggaaacagaaagccctctgtctttgccatgaggcagagggtctaatggagctgaataacacaagctgcctacagacagctaaactgaaagagcacactataacacacgcccactgagacgctgtaaaaactcaaccctagacactgccatggggtcggatccccacaacttgcctgtctgcgtgctccccctagaggtttgggcagcggggcatcgacggagcaagccccacacacccattgcatgctctgcaagagcaataaagggacttttcccatttcaacatttttcttaactcttggatttgcttttgaatccctttctcattgaccagaacctttgctaactccrgaaccagactgaccacttctctgcacgtcactgtgcattgtgcattttaccatgagggtgtctagtactttctctccttgcaataaaatatttttccaactagattgctctatatgcaaactcactctactttccttattaaattctctcagacatataatctcttgggttgaaaatgaattgcagtactgctgtctttgtgattgcccttagcaaccacctagcaacttgcttcttaaatatttttcagacaattaaaagttgacaacc

SEQ ID NO: 695254 - DNA, 1318 bp, Homo sapiens
tactgatttgttcaacaaaacatatctgtgataagaggacaatgagggcaaagtcagaaaagagagcaaggaggaaatgagaggaaacaaactgcaaaactcaaggatccagggaatcagtcaagtctcctgtgaaattggcttgctcctcaaagccctcactttccctgggatgcagcctcctggccccctggacacttcctctgcctttgcttcctcctccatgaaattgcctaggccccttcagtaaaccttgtttctattccgcctggccaagaaccatgtgccgctgcctagtagcaattgcatggcagttgcctcaacatcccaggtctctccagcccgatgtcccaatgaggtcatgtgggcgggaacatccccatcactctcgctccaagactctgtgctgacacaaggaacgcagtccttgaggagatctgttccttagttatatctgacaatcccaagtaaatgatctatgagcccgagcagctactccccactggtattgattcctttgattcgtgccaccatctcagctaatacgctctgggagagtagtttgaaggtctgggcaggccaggaaactgcaggcatgtttcctactaggatgtgctttgctggatggaggatgagcactggaaagcaccacattggccaggtctgtcctgcggactcccagctcaccaaagagccagagcggaaactccaggcaagcagttagtgctggtatgacacatggtcagtgatggtcagtgatgaataagtagaatattctgtctcgtggaaattactgtgggatttgtttttcaagggttgcatagatgatgtgctcactttctaggatttaataattatggacaaacgtctaggcattagtgcgaagttggcaatttgagtgccaaagtttacatgtatgcttgcatgtagaacatgcaagacaattgaatgaaataataatttaatagtacagtggatttgtcataactagagtgatcctggccaggcacggtggctcaygcctgtaatcccagcactttgggaggcagaggtgggcggatcacttggagtcaggagttcaagtccagcctggtcaatgtgatgaaaccccatctctgctaaaaatacaaaaattagctgggcctgatggcggacgcctgtaatcccagctactcgggaggctgaggcaggagaattgcttgaacacgggaggaggctgcagtgagctgagattgcaccacgagctagactccatctcaaaaagtaaaatataaaaaataaaaaaactagagtgatcgtatatcctgcttgtcctgaa

SEQ ID NO: 695255 - DNA, 1318 bp, Homo sapiens
tactgatttgttcaacaaaacatatctgtgataagaggacaatgagggcaaagtcagaaaagagagcaaggaggaaatgagaggaaacaaactgcaaaactcaaggatccagggaatcagtcaagtctcctgtgaaattggcttgctcctcaaagccctcactttccctgggatgcagcctcctggccccctggacacttcctctgcctttgcttcctcctccatgaaattgcctaggccccttcagtaaaccttgtttctattccgcctggccaagaaccatgtgccgctgcctagtagcaattgcatggcagttgcctcaacatcccaggtctctccagcccgatgtcccaatgaggtcatgtgggcgggaacatccccatcactctcgctccaagactctgtgctgacacaaggaacgcagtccttgaggagatctgttccttagttatatctgacaatcccaagtaaatgatctatgagcccgagcagctactccccactggtattgattcctttgattcgtgccaccatctcagctaatacgctctgggagagtagtttgaaggtctgggcaggccaggaaactgcaggcatgtttcctactaggatgtgctttgctggatggaggatgagcactggaaagcaccacattggccaggtctgtcctgcggactcccagctcaccaaagagccagagcggaaactccaggcaagcagttagtgctggtatgacacatggtcagtgatggtcagtgatgaataagtagaatattctgtctcgtggaaattactgtgggatttgtttttcaagggttgcatagatgatgtgctcactttctaggatttaataattatggacaaacgtctaggcattagtgcgaagttggcaatttgagtgccaaagtttacatgtatgcttgcatgtagaacatgcaagacaattgaatgaaataataatttaatagtacagtggatttgtcataactagagtgatcctggccaggcacggtggctcacgcctgtaatcccagcactttgggaggcagaggtgggcggatcacttggagtcaggagttcaagtccagcctggtcaatgtgatgaaaccccatctctrctaaaaatacaaaaattagctgggcctgatggcggacgcctgtaatcccagctactcgggaggctgaggcaggagaattgcttgaacacgggaggaggctgcagtgagctgagattgcaccacgagctagactccatctcaaaaagtaaaatataaaaaataaaaaaactagagtgatcgtatatcctgcttgtcctgaa

SEQ ID NO: 695256 - DNA, 1114 bp, Homo sapiens
acattagtcttctctgccattagcttgggatttctttcttagccctttatcttggcacagtagaaaggaagagatatttaaattttcagcaatggcaaaatgttgcctatttagaatattttccctgtgtcccattgatttattattgcagactcactttcagaaacatctctctagccttttacatgctgaattaaaatctgaagcagattctgattctgactttagctcttgaaattgcgaaagccaatcaagtgcatggctgtgcagcctcattgcagctgccgctccttctcccagcctcccaactgtgctgagcgcattcttttgtaaggaagcaaaagcagtgagtctttttcagcgtgcctgtttttattattttccagtctgttctgattcttgtgcatttccaaaggtcttacatcctatactaactagggccacaaaagcrctcaggatgattgaggtgtttgtttgttttgagatggagtctcactctgtccctgaggctggaatgcagtggcacaatctcggctcactgcaaactccacctcctgagttcaagtgattctcctgcctcagactcctgagtagctgggattataggtgtgcaccaccatgcctggctaatttttttgtatatttttagtacagatggggtttcaccatgttggccaggctggtcttgaactcctgacctcaggtgatctgccctcctcggcctcccaaagtgttgggataacaggtgtgagccactgctcctagccagatgactgagttttgtgtgaggataatttcgtggaatcagatgcttctgaggatatgtatttttgctctccaatggaggtagaataactaattatatcatattaagagtaaccatttaatgactgcttacactgtgtcaggtactttcatatgcattcacaataatcctgttgacattattcccatcttacagataaggaaactgagtctcagaggattaagaaaatgccagagagacatgcaactactatgtgtcacactgggttgaaatacctgtctcaaaaagtctgtatttttttttcctactctacaactctatctgtagaactaaaattattggaagacc

SEQ ID NO: 695257 - DNA, 671 bp, Homo sapiens
tctgatgtcctggttccttggtggcaggtgttcctcctggttgcatctagtcagccatcttgccgagaaaacccctaaaaccagtaatggttatcatgctagcattatgtgtgtcactgtgtttcttgtcatttaaccatgtattaaatttttttatttgatggttttatttaacaactctattgaggttttagataacaaaaatcacatcattaaaaacattcagtttrgctgggagcagtggctcatgcctgtaatcccagaactttggggggctgaaacaggcgaatcacttgagctcaggagtttgagatcagtctggccaacatggtgaaactccgtctctactaaaaatacaaaaattagccaggtatgttggtgagtgcctgtaatcccagctactagggaggctgagggaggagaatcacttgaactcggaaggcggagtttgaagtgaatggagatcatgccactgcactccagcctgggcaaaagatgagactctctctgaaaaaaaaaattcagtgatacgagtttcagtaaatatgtgctgttgtgcaaccatcaagttggacaacaaaccacaatcaagttttaaagtatttacttcatctcaaaaagttgcccttttactctctgacattcaatccatgctttcactccttatccca

SEQ ID NO: 695258 - DNA, 649 bp, Homo sapiens
ggctcatttcagcattgtttgcaatcaagaaaattttcaaataactatcagtaggggaacgtatggatacattatagaatattcctgtgggggcattaaacagcagttaaaagagacagatttatatacatcaacatgtctatatttcaaaaccattgagtgaaagaagttgcagagtaatatgtcagtgtgacatttataaacacaaaacagtatatttgaacttctaagtttccttctaattctgaaattattgaatttcacagtagtaagctatgttcctgtgactatatgcatttgagtgtgtgaagaattgtgcccagaaacagtgtatttcagcaaatacactgactgttattaagagcaattggcatatcctaaataatggacacacctggaatagcagaaagctgtcattctctgatcaagtaatcggtggaattaaatagtaactactcaacagtgtgctctrtgctatagaatgagcatatgtgcaaaaataatttctcctttcccccagttgcttacaagtaaaaagatgaggcataaaaagaggcacaggtgtatcctgagaagaaaaaatgagatgtctggagggagatgttagttaagcaataacttagcactagactatagagtacaggcaagc

SEQ ID NO: 695259 - DNA, 1322 bp, Homo sapiens
ctattacaataagaattggttactagtctgcataacttgaagaagataaagaaggtcaaaggaagatgtggaaaagagacttagaggtgacatttgatttatgacttagacaatatgaaggagatggccatgagacctgggagatgagaattccaaggaaaagcatcagcaagtgggaaatgttctgttagtggcaaacaaaaagaaatgggtgaccttgagcaaattactttgcctctctgggacccactgtcttcatttgtaaaattagagagttggattcagtgagccctaaggaatttttcagctccaaagttcaataaaataaagatgacttaaagtaggccaaatgaarttgttgattgtttttaaagatggcaaccctaggccaggcagggtggctcacgcctgtgatcccagcactttgggaggccgaggcaggcagatcacgaggtcaggagatcaagaccatcctggctaacatggtgaaaccctgtctctaccaaaaatacaaaaaaattagccgggtgtggtggcgggcacctgtagtcccagctacttgggaggctgaggcaggagaatggcgtgaaccagggaggcggagcttacagtgagctgagattgtgccactgggtgacagagcaagactctgtctcaaaaaaaaaaaaaaagatggcaaccctaaggttggcttaggtgtgatggctcacacctgtaatcccagcactttgggaggctgaggtgggcagatcgcctgagctgaagagttcaagaccagcctgggcaacatggcaagacctcgtctctacaaaaatttaaaaagttagatgagtgtggtggcatgcacctatggtcccagctacttgggaggctgaggaaggaggatcgcttgagcccgcaaccctagggatgtttgaatgttcagaatagggtgtaatcattgaaggggagaaaatgttggcaagagaaaaatgtcaaatgaaacagggttcaagtaagtggaaggggatggtgttgagagaacacttcttccccacttctcatgtttccttccttgttggagttcagtcagtgtaacactcctggtgcctttatcctaagggaggtggggtgacatagtctgataaatttgggaagaagaaactggatgtgctctgctcatctcctcccttttgcttttgggcagcactcctgaccacagagaaccatttttctctcttcctccaggccttaagtcttacctgagggaggctaccccccgttctggaagctttaacttgatccagcattgcctgtgaccatgtggataaacctaattttgt

SEQ ID NO: 695260 - DNA, 1046 bp, Homo sapiens
cttttagaatagccatcttccttaaaaagttcctttattttttagcaatcagaatmactgatatttggctatgaagtcacatctcatctttagacctgacaaagtaagtaaattgctctcagtcaaaaattcagaaaaaatatccttacttaatttaaaagctttgtctaaactgttccataattcttggagcatacattattgggaattaaaatattgactttgaatattaataatgaaggcatcttaaaattccttttagtgttttctttgcctatttcttgtggaatgcaaagagatgattcccatttggttccctgtgagccgcagagtcatagaaataagaatatcagctgtaagttggcaagtaaatctgcatgtaaaccactttcaacagaatctctcaatcctataccactgggagttatccttactaagaataaagctcactttgaattcgagtcagaatctatgccttgctatggggaatgactggaagtgtctggacatcaggtctgttgtcaaaggatggtgcgacatagacgaacttccctgacccaactttaggaagttgtatgacaacaactagaaggctcaccagggacattgctgtgagcacttatttttttttttgagacagagtctcggtctgtcccccaggctgtcacccaggctggagttcagtggcgctgtcttggctcactgtaacctctgcctcctgggttcaagcgattcttctgcctcagcctcccaagtagctggagctacaggcacccaccaccacacccggctaatttttgtatttgtagtagagacagggtttcactatgttggccaggctggtctctaacttctgaccttgtgatctgcctgcctcagcctcccaaagtgctgggattacaggcgtgagccaccgcgcccagctgtgagcacttattaaagggtgagaaaaaggagatatatggaactgctggcttggatgacatgaatagttaaaggaggtgaggaataccaccactatgaaggctgaggctgatattgtcttg

SEQ ID NO: 695261 - DNA, 2001 bp, Homo sapiens
caatagcaatcagcaggcggcagaggggctgactgcactcctgcatgctggtgaggcaacaaaagcaaaacctgccctgtgcagccacatgccagcaaaacaatgtgaggagttgccaggggcccagaggaagccgcagtattggaagggaatgtgtggactggtgtgtgtccataggcactgcccactggagctctccatctgtcaggcgtgatccaccattgcaaaagctatggtgtgggccctcagggcaccaaaggctgccctgcaactatgtgtggccaggctgtggccccaggagagtctagcagaccaaggggtgctcaggttgtactggtcccatctgatggacaagaccaccctacagaattcagaactgacagttcccctatggctaaagtctcctatgggtgcaaatcgagcctagggggatggccaggcttgcccggggctcctttgcctctgctttagagttgaatgccccaacccactcagcagagaggtgtggtggtgattcccctccaaaactctttcttctcccttcctggcttctttgaagtgttgaaagagagtattcaacaagtatttttgtttcattacttgcttaaataacacctttgtctcatactggaagtccacagtatctggttcttagttcccaataaataaaaccaagaggctgaatagatgagtggttttcaaattgtgattaaagtccttaggaataaagaggcactttggggggcactgttgtaaacaaacaaaacaaaataaaaaacaaaacagccccatcttcccaacagccttgtaaaaccgctgaagcaggtaatgctccaatgctagtcacactaggtcaagtataagtttaattaattagaaggtttttttcccacccttggaccttggccactcctttcttcagtgaccttagggtgagtcacttgctagtccatgggagtttgcagtgctcctgcctgattcccaagaagaaatccatgatcctaccccattacaagagaggatgttaggaccatgtactttctttcctttatgattaaaccactcttcaaaatctactaatttactgagtctgttaagtattgttgacaaagaacctgtaagttttgtgccaaaaagttaaatcaaatgaaatagaatgaaaaacaggaggtcacctggaatggaaaaatgtttatacctggaatccttttatggtcaactttctcggattttaaaaaaattcacttagttattctcaaaaaggtcagcataagcattaatgataaaccttggaattaacctatagcttagagatcttcctcaataacttctacctcatctagaaaaagccaactgaagcaaaagagatgtatttttttcataaagactactcgatttgcaagttaaaatcatttcctaaatagtttcttcaatgacatagatataatagagtagtctgtcgctaagcatattgacatttttggtattgtaaaacccaataagcccaaattaacagcttattcctgtttgaattataaaatagggctctttagagattttagcaagtcgtttgctaaagtactctagaaatttaatttgatttaaaagtttaaaagtttgagggtccttrtataccatgcaaaataatttggagaacacttagtaatctttaaagattaatagtaatattaatttttaaaaacgaatgacaaagttttagtttgagcagttgagtgaataccagcagcaagaaaacgagaccccttgttctctttagtggggactgatattaggggctaaaatctgggcaccaagtgtgttcaatgctactgtggtatttctgcctctaggtctttttgtggtctgagataagaaatatatacaggtatatagacatataaacacctaaatatatacttactacatgtatttttatatacacataaattagatacatatacatgtacacatatatacatgcatataaatgtatacgtgtgt

SEQ ID NO: 695262 - DNA, 2279 bp, Homo sapiens
tgagctgtggtgggctccacccagttcgagcttcctggccgctttgtttacctaatcaaacaactaacttggcaatggcaggcgcccctcccccagcctcactgcagccttgcagtttgatctctgactgctgtgctagcaatgagtgagactccgtgggcataggaccctctgagtcatgtgcgggatataatctcctggtgtgccgttttttaagcccgttggaaaagcgcagtattagggtgggagtgaccmgattttccaggtgccgtctgtcactgctttctttgactaggaaagggaattccttgaccccttgcagttcctaggtgaggtgatgcctggccctgcttcagctcacgcacggtgcactgcacccactgtcctgcacctactgtctggcactccccactgagatgaacctggtacctcacctggaaatgcagaaatcacccgtcttctgcatcactcacgctgagagctgtagaccagagctgttcctatttggccatcttggttcctccccctttttcttttttctaattacaaacataattcataaaaatagttacttcaactttttatggtatttaaaaatttacataaaatattttaaataatgttttaaatccattcatatatttatttggcaactatccatgaaatcccagctaagtgctagagtgtatatttcttaaagaaatagacatggcccttgctcttgtaagtgttgtagtccagtcctaggtatattctaactttcattaggactttttatttgatcctttaattatttaacaaagtaggtttatgattttccccaaatctattttcttgtaataattatttttactgatttcaaatataatggcactaaggacatacaacatggtctgaatgatgcttactgaaatttactgagagtttttttatggactgatgtgtgaccaatttttataaagatttcatttatgctggaaaagaaagtatattctcttatcattagaaatgtagggtttgatttgtgcccattagatgaattattaattaatctgttcaaatattctttattcctatcataattttgttttatctgttcatcttgtagaaagcatgttaaaattcagcttattgatggtgaattttatcatcttttcctggcagctttgttaattttttttgctgtatatattatgaggctatgttgatatgtatatacatatttaaaatttgtatatgatcctggtgaattgaactagtcaagttctagataactgcagcattggctgacagtatgacaacctcatgtgagagcctgcattaaaactactcggataagctccttctagattcctcacactctgaaaccatgagaaacaacttatgcttgttgttttaagcagctacattttggggtaatttgttacatggcagtagataactaacacaatctcattttctctattttatctttttggaactctaattgtacaattattagacatttttcaatctatctcccttgtctttaaacatatcattcccaatgctttttctgtctgtgaattagtaagtataatttattcagatcttgctcatagtttaccaattcttctttgtttcattataacctggtatttagattatgtatttattattatctatttataactgaaattctatttatttactttctcacatccttttctcatttttgacaaattctaattcctcatatttggctgatcataattttgttttactactaaatggatgatgataagaatgccctaagttccagaaggatttgtgtttctttttgacaagacccggggtgttatcaacctagaagtgcattcaatttattacattggcttcagagttccaggacttttcagacataggaatgaaccctctacctcccaaccttcttgatgggaagcttagaatttcaaaattcttaagggagtattattcttcactgagtaaaggcttaatacagacaagttacaaattacatttgctcacactctagtcagggttaggtgcatgctggtagcagagatgtgaaggtggcattttttccacagcctctgtatctctaagaagactgtgtcaaccctttttcacccaggccagagaggaaaggcagttcttgcagttggtctaatattaaataatatatataaatattatttatatttatatattatatttatatattatttatatttatatattatatttatatattatttatatttatatattatattagg

SEQ ID NO: 695263 - DNA, 1233 bp, Homo sapiens
aggtgcatccacattttcaggtatctttatggcaatgccccactacttggtactaattttctgtattagtccattcttgccttgctataaataaatgcctgaaagtgggtaatttataaagaaaagaggtttaattggttcatagttcttcaggctttacaggaagcatgatgcgggcatcttctcagcttctggggagacctctggaaacctttactcatggtggaaggtgaagggggagccagcacttcaaatggctggagcaggagaaagagagagatgggggaggtgccacacacttttaaataaccagatcttacaataactcactcactatcatgagaacagcaccaggaaatgataccaaagtattcattagaactttgaccccatgatcaaatcacctcccaccaggcccaccttcaaacttgaagatcataattcaacacgagttttgtattgggacagatatataagccatatcaatcactgaggatcttttgtatttctgtgagattggtagtaatatcacttttgttgtttttgattatgcttatttggatcttctttctttttttgtgatataaaattgtttattaggagcatgacaatttatattacctggaaagtaggaatggatttttaatacagtttaaattaatgcatcaggagtagctgaaggcacaaattaaaaatcayttgcttttttatacttaaaatatagaaaaagaagaaaaactttaattttaaaaagtactctgataatccatagacttcatgttgtactttttaaaagaaaatctgattaaaaaaacatatttacccttgttgaacatccacaataataatgtttgaaaaaaaacttacctcttaaggctattagacacagggaaagcattgtgaatatacaaatattttagttccaaaactaaactctgccacgtgtatacctatgtaacaatactgcacattctgcacatgtaccccagaacttaaagtataataataataaaagatcccaaggagtaaagcaggtgaattggtttaaatgcctgaatcttgatgactcttttatccattttacatagcatccaaaacatgtcagtgttgtgaattcctttgctaatctttttttgaatttcccagtgaaaaacataccaaagaaacaaaattcaatttacaactagctgcagagagccatggatgtgaccagttatgttaaaattcctgccc

SEQ ID NO: 695264 - DNA, 631 bp, Homo sapiens
ggctttgtacatactgaggttgaggtgattatggagcacacagggtgaaaatgtataatcaatagctgtcattatgtgtaaaaattcaggaggaagattggaggcagaaataaagatttggtctttttgtcatcaaaaatcttttcattggaaaattcctataccaatgttagttattgttgycatcaccacagcagttgttattttgaagacaaacattacattgtagagttattcttccttatatttaatttgaaaatatttactttctaaaatgcataagcttggggtagaatgataattttcaggctctgtgaagcttcatgtatgagcaaagaaggaaatgctgtcaaaagggaaagaaatatttttcctaatccaaaatgacttcatttccagcagttccagagaattttattttaactttcattcacaaatgctttaacaaggttaaactgaagcaatgaagacagctttattaattcgaatctttcaatactgtcacgctttctttgctaggaagtcaggagcttatgttttaaaaaattcattaaaatgccagtgtgcatcagtcagagaaatcattttaaaaacattttaatcttaaatgtagggtgaaaaaaaccttcac

SEQ ID NO: 695265 - DNA, 1268 bp, Homo sapiens
catgagccaccacrctcggccctcatttttttctgatatggaacacttcatgaatttgtctgtcatccatgtaaaggggccataatagtcttctctgcatgatcccaattttatatgtgctgccaaagggagtgcgagattaccatcttctaagtctgtggttctattaataaaacctttttttcttctaccccagcatatctgaggaatatgacacaaccccattaggtggctcaccacaggtggtgattctcaaaaaataatcactattctaggacagcacggtagctcacgcctataatcccagcactttgggagccagaggagggcggatcacgttaggtcaggagttcgagaccagcctggccaacatcgtgaaacccagtctctaccaaatgatataaaaaattagtggggcgtggtggcaggcgcctgtaataccagctactagggaggttgaagcaggagaatcgcttgagccggggaggtggaggttgcagggagccgagatcatgccactgcactccagcttgggtgacagagcaagactctgtctcaaaaaaaaaaaaaaatcactattctaaacatggtattactatgccctaaatgcattttagtgatttattgttcacacagatgcctaaaatcttcctgcaacttacttcttttcactatttaaaacagatgtagcccgtctgttgtaccctcattctgtcagaacccatataagaactattaaacacaccatcctgaagttatccctgggggactcccacgttgctatcactgggaccacttggccctccctttaggttcctgactttaggctgatataccgaggtcaaaatagtcttcctagtccaatcaactaaaggttctgcaggatggatgaccttccctgactctacgttaggcaagcccgtatcaccttacagaagtactgggagagcaaaggtcttaaatgatgctggctttcagccccgcgtcaaatgtgactttagggaaattactttccgagcctcaacttactcctctacgttaacgactacttcgtagggctgccgcgatgactaccacagtgcctggcacacagtcaacactcaataaacagcagttattgccactattgtgaccgccccaggaagtagctagggtaactcaacagccgtgcacgagaccaggatgggactgggaaactgcattcggtggggctatcacgccagcggcgcggcagacgcgctggtgagagctgtgaacgcggtaaactg

SEQ ID NO: 695266 - DNA, 1487 bp, Homo sapiens
ggagcaaccagggcccaacacgaaacggccctggtccttccaagccgggtcctgcaatgaactccacagccacacacgccccactcagcccatccccacacgcttgaactccacagccccacacgccccactccgcccatccccatacggcttgtgagccactgtgaccccaggcttcctcctagatgtacccaccctggaatcccatacatcagggcagcacgtgtgaggcctcgggccacgagactgcggcctgatttcagtccccacctcatccagctgcctcggcccacctcagggccacaccgtccagcccagctgcctcggcccacctctggggcacctcgtccagcctcggcccacctccgggtcacaccgtccagcccagccgcctcggcccacctcaggatcacaccgtccagcccagccgcctcggcccacctgcgggtcacacygcgaaacacgtctcctaacgggactgttgtgtcacgtcacagcggtggagaacgctgggggaggcaggaagggccgtggaagaaaaaataatccaaggccaggcagacccgaaccgcacgccggagagacacggggagaggagacgcggagccatgttaaaccagaattattcaaccagtgcaatgtgtccaaagagtcgtcttgattaaaaatactacatgagcttttttcttaacaatgacatacaggtatcgaaactctcaagtttgtttaaaagtccgtttttccttcttatcttataacctagtgaccaagtaagaaaaaaaaaaaaacccagagccagcaacaaacctacggtacaaggagtattttttaaatttttaaacttttcttactttacctgaatataaaaaatcattaatatcatttctaaaagccaaatggaaaaaaaacctcacaccaaataaatgttaacagagtttatttatcatgtttcactctccccaaaggtaaagttatattaacgagcttgatgaaagaaatatttcctattcataaaacacaccgttttagcagcttcgcgagacccccgaatttgaggcggacggcgcagtcctgcgggaatgctgaccgtggcagtagcagtgacatgcggtgaagcatcggggagtcctctgtggaaggatcattatgaaaaacctgcgcaatcttaggcttccctcgaatttagcaggatagggttttgtctctcgtgatgatgacaatctcctgtctttcccaattcctcacgaggcaccggtttggaagcaccccattgtttgaaggaatggctgccccggcacccagagaccgaggcggcatcaggctctgacctccgcacacgctccagcgcctccctgggtgtagcggctcccaccttggcgcgggcacaaagagggtaaacaggcaaacagcaaaaaggcagttctgcacccccatccgctgccacccgcaggaacctgattcctgtcatctgccaccgcggaaatcac

SEQ ID NO: 695267 - DNA, 1177 bp, Homo sapiens
gaacggccagggaagtcttcactgagaagatgagttttaagtaaagacctaaagaaaggaagggagcaagtcatatggtcatttgagatgtgagctttccaggcagagaaacagcaagtacaagggacccaaggtagggttgtgtcttgcgtgttagaggaaaagcagtatgtcagtacagctggagggtaatgaatgaggaggaagagaataggtgttaatgcaagagaggttacaatgatgaagggttctttaagacatcaccggaactctggcttttaaacaaagagaaatgaaaaccattggaaaatttgagcagaggtggaatatgatttcactaaggtgctttctacagatttcctcctttaatctttaaaacacctagaggtaattgcaaatgaggaaactaaggcttagagagattagtttacttgtccaaggtcatacaactatttgcaaggaaaaggggacacaaaacctctcatctgcctaaccccaaaacacgatattctttctattgcttggagagacttaattttctcactaaggagagacaagacttctttgcccagatccacagaattacctgaggatccaagacagagggagaactagaccctttctctaactcccacttcaaccagctgctaattgtcaatcacaacatccctttctcatgcctttctctctggggaaatagtgcttctgtcaatctctgaaagaaataatacatgaagaagagcccctaggctgctgagaactgactttcattgtcatttgagacccattaaaaccataatagtggactaaagacttgaatagacatttctccaaagaagaccaataaatggccaatatctacatgaagaggcggtcaatgtcactaaccatcagggaaatgcaaatcaaaaccaccataagacgtcactttatacctgttaggatgaccattatcaaaaacaaaagacaagaagtgttggtgmggatgaagagaaaataaagcccttatatactgttggtgggaatgggtgcagccaccatggaaacagtacagaggttcctccaaaacttaaaaacagaacgaatgtatgacttagcaatcccacttctgggtatttatccaaaagagttgaaatcatgatccaaaaagatattagtacccccatgttcactgaag

SEQ ID NO: 695268 - DNA, 679 bp, Homo sapiens
gggcagtgaggagactggttagtggaaactggaagaacaataagaaaattcccataggaggtgggaagatgggggtcctgtttataatcatgaaacaatcagtaacactgtctcctgtggtaacttggaagatagaaatgtttctaaacttatagatctaagatttcccactagtacggtggatgtgtcagttggtctctttagctatgtgtgataaggtacttactctttaaaaacggcatctcaacatcaatttcccattcattcactcatttattttgtcagtgcacatttattgacagrcactagacatagtaaaaaataatgatttttcagaaagcttagtggaaaagtcaggcaagaaaaacccaatggtagtagtgtgaggattgctacaacagagctaagcacaggtgccatcaggagcacaagcagggacattcattcatccaatattcattaattctctactacataccaagtttcggtctaggttttagaaatacagtggtaagacaaagagcttacattctagagggataagtgaataatacacaagtcaacaaataataggatttctgatgaggataataagaaagtaaaagagaagtatagagtgttgtagttgaacacagttttggagagggcaatcagagaagagctctctgaaaagtggaca

SEQ ID NO: 695269 - DNA, 3636 bp, Homo sapiens
aataaattccttctatctctgttcatccagactcaatttatgttgcttataaccagtcctaactgacacagtgattttcctgatgcttagatacatttactttggaatgtagcaaaatattcaaagcaattgtcaatttaaaaaggcatcgtaagacaggacatagtggctcatgcctggaatcctagcactttgggaggcataggcaggaggagctcttgatgccaggagttcaagatcagcctaggcaacatagggagactctgtttctattaaaaaaaagaaattttttaaagaaaggcaacatagaaaaataaggaggaatttaactataatttcctattactaaaacccaagtagaaaagcaaaacagagacttcacctaactttacatttaaaaataaaactaacccacatatgtctaaaacacatgcacacacacagtcacacacacacacaataataataataataataataataataataaggtagactttatgagcagcaacaactctttgttctatctccacctccattctagtccctggaagtaacatcttttaatcattttgttttttagatttttcattgtgttcttatttttacataagttactaattttactgttcctgttttttattgtaaatattattatcaccttcctattatgacatgtaaagacttagattctttgcatcagcatttttaattttcactttattttaaagctacacacttacatccttttttcttatctcatgaactgaagagaaaatatctgatctcccacaatataaaaatgaggattttattttccctaaattttctttcagctcttagtatgtggcatctgtttatgtacttttacatttttaagtttgatacgttttatatttaattcagcaactttacagttattgcattttgcccattgaatttaaatgttgaaagttaatatagagcattttcaatattatcactctttcttctttccttcctttctactttccccaagctcttaaacagcattttccctttctgttctaggagttgaggcacagtggtaaattctgtccattacacagacaggtgatatgcattatatatcttctgcaatatttttattttcctgaaaatgctaatccttttaatccactcacaccaacgtaagatttttttccttttctttttctttcgtttttaaattctctgcttaccatgttcttaattgtgcaaagtattagttttctaactgcccctcttctctcagccccactgtttctccatggagaccctccttctgaagcctccaccttttggttctaagctggaactgttagacatctatcatcctggggcaacccttcataaatgtgctgattagatctgcctctaaccggaccccatgacttcattctttacttaatcccttttcatgctgtagcatatcctcaataaactttctaagataatatgcaggaaatacagccgtgtctagaaagtctttcttttgtccttatatgcgatttgatgatttagttcaatataggatatctagtctaaaattattagtcctcataattttaaaggtatttctctgttactttctagcatttaatattgctgataatgtccgatgccagtctgattttgctctttttgtaagataaagaaatattttatctccttccttcttccttccttccttccttcatttcttcctttcttcccttctcctttccttttttctttatctccttcccttctttctttctctttctggaaatgtttgaggtttctctttatttttagtgtcttaaaattttacaatgatttatttgttttttaaaattcgtatttcacgatttgtttattattatatttttcctgtgatcagcattctctgggaccctgtgacctttccattctgggataatttcattgactatttatatgataattgaattccatctattgatttttttttcaaattctagaattcttaatacttggataatgggcctagtggatagaatattcacatctctatatgttttactttcttatcttcttattctaatattaaatttatttctctgacaatcagaaagcctgtctctgcaatcagggactgatgaacttccactgcctcataagggctgcacagggaaacagagggtacccgaacaaatgtgaaaatctttaaggaagaaggaatggaaccatgaatactaaaaaggcaaccaaaatatccattatacttgcaatctatttatatcaaccagtcagttaatgacaatatattcaagttactgtgccatagaaggtgtttgatagactctagtaaataaaccattataatggagatatttatgctaagatgatgagcctggagagagaggcagggtccagataaaggagagtcttacaagccgtcaaaaggaatttggacattagttttatgcatcagaaattgttaaagggttttatatagaagagtcacttaataccacctttaaataatatctcctggggacagctgtttggtggctggacttacagagagcagggctagagtcggagaagctgtttaggatgccctttgtatggcctcctgtcagaattctgaaatttttaatccctttgcatctgttattctgattattgtttttgaatgttaattgccaaaatgtaagcatagatgaggtgaattctctcaagtctactgttaaacaactgcaggcatccttttcataacttgttttctcatcacagatatgctaaatatcacatcactgccatctaatttactttgaggaatgttttagaaattataacccccttccctttgcttctgtttcatgggacatgaaacagatgtttcatgttaattkatgttaattgatgtttaaatctacaatatgattagttcacacacagtatatgatacttgtttattctacttttaatcaattttttgtcaaagttatttacaagttgatttacacttctaaattcaggggttttgtttgcaaagtatctataatgtggtaattaaatatagcttttaataacggaaaactcaaaagcaaatctaaactaacataagtatgtctacctaaaattatgaaagtttttttttttaactttcactctgaactttacccgttttgcctaatcctgattattttttaaagtacatctgctaagaattctgcagtatttctacaagctggcattttcatttttgaaaggattatttgaaatttagatttggcatctgtcagaaaaaaaaaaaaaacactgtcatcctattggatgttatcatacagcaggtaatgattgctgaaatttaaccaatcacacagaatgacagtggaaaaacaccctgacaagaattttatgtcaaaaccatagaggaaaaagcaaaagagctgcaagttaatgccgtcctagtataatagattttattctgattagcctatgcaaagttgatggtgccagataatccacaaacagagtcaatataatatttttttgtaaagtcctgtcagaaacttttacgctggtaccagtattgtgatcctcagttcgagggcctgtctgacagtctaggacacagagagctgtcaa

SEQ ID NO: 695270 - DNA, 1031 bp, Homo sapiens
tataaagtcttaatcctcaattcctcgaattgtgactgtatttagagatagggccttcagagaggtgattatgttaaaatgaggctgttagggtgggcccaaatctaacctgcctgctgttgttataaggagatacatgtgacagcaggcatgcctgcacacagaagaaagaccacgtgaggatacagtaggaaggcagtcagtcatctgcaagccaaggagagaggcctcaggggaaaccaaacctaccaacaccttgatcttagacttctagcctccaaagctgtgagaaaatgcatttctgttgcttaagccactcagtctatggtattttgttataagagctctaggaaactaatatatacgtatttattggagtgtaagctagttgttcaaaacatttttttctttctctctttatcatgtattttgcttattcatatcttttctttttttctaaccttgctagagayttttctgtcttattaagagtgaaccagaccttcctggttcagatcctggctctgctattactggtagtgtgaactttgacaagctactcaacttctcttagcttctttttcctcttttgtaaaatggggataaatatcctcatgtatatatctttaatatataaataaataggaaaaacagaaaatctactcaaacctataaatttcctctgccttagcgacttccagtaaattttgatatgagatactttcgttatcattcacctgtgggtattttgtattttccttttaaattatcatttactgcaagggttaactggcaccctgtattccattttattttgtttccagagatagggagtgttttgtctcccttccattatatcttagcttcactctagtccttactggatacatctgtctccatgcagctcctggttcatagacaccatatcttcttgtacttttctgaggatgccagactatttcttaaatatttttctggatcccagactagctggttttcacatgtgtattcttcctcaaaaaccatctcga

SEQ ID NO: 695271 - DNA, 1031 bp, Homo sapiens
tataaagtcttaatcctcaattcctcgaattgtgactgtatttagagatagggccttcagagaggtgattatgttaaaatgaggctgttagggtgggcccaaatctaacctgcctgctgttgttataaggagatacatgtgacagcaggcatgcctgcacacagaagaaagaccacgtgaggatacagtaggaaggcagtcagtcatctgcaagccaaggagagaggcctcaggggaaaccaaacctaccaacaccttgatcttagacttctagcctccaaagctgtgagaaaatgcatttctgttgcttaagccactcagtctatggtattttgttataagagctctaggaaactaatatatacgtatttattggagtgtaagctagttgttcaaaacatttttttctttctctctttatcatgtattttgcttattcatatcttttctttttttctaaccttgctagagatttttctgtcttattaagagtgaaccagaccttcctggttcagatcctggctctgctattactggtagtgtgaactttgacaagctactcaacttctcttagcttctttttcctcttttgtaaaatggggataaatatcctcatgtatatatctttaatatataaataaataggaaaaacagaaaatctactcaaacctataaatttcctctgccttagcgacttccagtaaattttgatatgagatactttcgttatcattcacctgtgggtattttgtattttccttttaaattatcatttactgcaagggttaactggcaccctgtattccattttattttgtttccagagatagggagtgttttgtctcccttccattatatyttagcttcactctagtccttactggatacatctgtctccatgcagctcctggttcatagacaccatatcttcttgtacttttctgaggatgccagactatttcttaaatatttttctggatcccagactagctggttttcacatgtgtattcttcctcaaaaaccatctcga

SEQ ID NO: 695272 - DNA, 609 bp, Homo sapiens
cgctctctttgtacagtccacaatagaataaatattgaccagaatgtaggaaaaccttggacgtgtgacaacactgacttgaaagcaaatcattagtttaaaaaacaagtgtgtgataaacgaactcttttttaaaaaaaaaagtgtgggaggcatgtatatgtaacaaaattcccaaatgatgttagtaaattagattttaaaatctagaagtaaaatattttgttaattctattaaataagagcttataaggaatttcatgtcccctgattacacaaatattaagctcctactatgggccaagtaatctgggaactaggggtatcgcaatagtagcytagtggacggatacaaacacacaataaaaaagtgtaaaggccaggcacagtgactggtgcttttaatcccagcactttggaaggccgaggcaagaggatctcttgaagctaggggttcgagaccagcctgggcaatgtaacaagaccctacctctacaaaaaatttaaaattaccctgcagtgatctatgactgtgccactgcactccagcctagacaacagagcaagactttatctcaaaaaaaaaaggagagaagggaaaaaattaaa

SEQ ID NO: 695273 - DNA, 799 bp, Homo sapiens
ggagaatgacttttacaaaatcataataaaaaacctacctaatcagtgaaatttagtgaagtttctctcatctattctcaaactatactattatctgagataatcaactgtatgatatcatttgcatattcagcccatggctatttaaaaagcgatttcagtcattatgtgaattttccatttgttttaacacaaattccaaaggcagctttaaaattattaggaattgttctttacaacataattgtgtttgtttatagaaaaggggattttaaaaattttatttagaaaataaacttctcagaaactgagaatttattggcagaaacagagcatttatcatcgttcccaccttgaaatattccaggaattcttaaatgatagaaatggcaattaagggagctgggcctggactgatgacgatggggagtagttgaaaatatcagctatttcacctgcttttaatcaaggttttctctggtcctgaactcctgagtctattttccaggtaattgctgtgttgtggagttctrtcctcttcctccactaatatccatctttaatacatctacatcataatcatcttgagttagttgctcaaaacgaatttagacccagacaattgaaataagttttcacttcctgatcattgttagatgagaagatcctgacctaatacctaatagtaactcctttttttctaacttgtttttattgtcttacatatttccattttgtgtgtaaaagatattccatacaccaaaattgtctagcattctagttaaatatccataaagaa

SEQ ID NO: 695274 - DNA, 1540 bp, Homo sapiens
cctttctcttaaaaatcctaaacttaaactcagcagggaggtagatttgaggtttcctcaaccttcctcatttttctgccattcaattattaaactctttctctactgcaatacctgctgttttggtatattggtgtgttactgtgcaataaraacaactctggtgagcctaaaataactttttctggttgcctctctaattttgttcccaatatctacttgtaggcctacctcctcaatttccatggttctcctattcctaggtcttttttaaagacttaatttcttccactgaattgtggtctcctgaacattcacttgagcacaacttcacctgcagccttgctttaggaaatattccataactggacataagaaactcttgctttcttaatatctatgactacccaaaagatgagtataattctgattaaaactaaattagactgtcagaatgtggataactattgaaccaaagcatattattttgaagaagactaagaatttggagaagagaattaggaagtctttaaggaaaaaaaaaagtgaaagctatcttttgggaattttgttttctttcttaatagtactagctttcacagctagtaagaggacttcagaattatttggagcataaatataagaactttcttactgatttgccccagtaacctaaatggaaggacacatggctaggatgatttggaattcaattaatgaaaatcaagcatgggtttgttagaagaggaatatttattttttcccatagaaataaaatgtaaattgttaaaaaaaagttggctcattttaattaattcaattacttagagtcattcatattttcattcagatataaatgaaacactcttccttctttatttttatttcctctccccagcttttcattctctttcagtcttcctttctgtttttcgtttgtttgttttgttttatttggtttttttgagccaggatctcactctttctccctggctagagtacagtggcacaatctcagctcactgtagcctccacctccaaggctcaatcaatcatcctgagtaactgggactacaggcacgtgccatcatacccagctaatttttgtggggtttgttttgttctttcttattttttttttttttttttgcagtggagatggggtttcatcatgttgcccaggctagttttcctttctatatacagaaaaatttaaagtgaatgtgatgttggagagagtgggaaggaaaagtaatggcaagtatgcttgctcattaccaggcactgtgctaagctctgtgaatacacagataagtaaaatccacgctgtttctcaaagaactcacaatctgtttaagaagcagatgtctatacaataattttataactattattcaatgtgattagtactcacatagctctatatagagtgttatagaagaataaattagagaatatctcatttttcctccagtggtttaaaaagatgtcacagaaactgaattgtaaatggtacggaaatatggaggggtggtttgca

SEQ ID NO: 695275 - DNA, 438 bp, Homo sapiens
  misc_feature 143: n = A,T,C or G
gtttaagtacattatatcaacccatgctaaccagtgaagctatttcctattcttagaagtccatgttaacagtgatttatttagagacagtataacaacagattctaatttataaaagaaataatcatactgaactatacacntgaaaaagggataaactgacagattttacyttttgtaggttttatcacaataaaaaattcagaagtcttcatttttatgatagtccatctgtttaccccaaattttgtgatttaacatttgtacacttcaatggcatttaaacagctacacaatgttaaatattgtcagtacaatttgaaaacttctatgaaaggatttgtgtcacaagtgtgcgtgatacatttttgggcagattttcactgtggttgaggggatggggatggacataaattctccaaagagagcatcactgtg

SEQ ID NO: 695276 - DNA, 612 bp, Homo sapiens
cctcaggccccaccactggatattctgggataggcccaggaacttctatctttactaagcacccttcatgccactctatagttgggcaagcttggaaactacactggaaattaaagcattaacggtagatctcacatgtaaacaaacacacaaggagtaacctaggtgcttattacaatgtatattcctatcccaccaccctcccacccccaaccctgccccggcccaaccaaagaaagattctgcttcaaaagccctgggcaggaccttaggaatctgcattttaacaaagtgatagagtggtccatgaacttcaatttaagaaacattattttagagagaaacctcatttagtttcagaatctctatctagagccagtgtgatctggkagtagccctttttcttttcatttcttttttttttttttttcctgagacaagagcttgctctgttgtccaagccagagtgcagtggcacaatcacagctcactgcagcctccatctccctggctcaagtgattctcccacctcagcctcccaagtagctgggactacaggcgcatgccaccatgcccagctaatatttttattttttgtagagatggggtctc

SEQ ID NO: 695277 - DNA, 605 bp, Homo sapiens
tggtgttccacagcagttacgccatttttcattcatgtttaatttartattttaatttttatttttttgaaagagtctcgctgtgttgcccagcctggagtgcagtagcatgatctcagttcactgcaatctctgcctcctaagttcaagcaattctcctgcctcagcctcctgagtagctgggaccacaggcgcacacccccacatctggctaatttttgtattttttggtagagacaagattttgccatgttggcccagctggtctcgaactcttggcctccagcaatccacttgccttggcctcccaaagggctatgattacaggcgtgagccacagcgcccagcctcatgtttaattttataaccggtattaactagcatgaggggccattgtgggatcaagcaatagcttctccttatcatccaggcccagctcactgaccacctcctgagacagaaccttttggtcaagcaagttgcaaagctcctcctcccaccccaggcactttgctgacatcattgtttcaatctcttcacagcactttcagattcccccaaattatttaatcattcactagttaattgtctacttctcttccttt

SEQ ID NO: 695278 - DNA, 605 bp, Homo sapiens
tggtgttccacagcagttacgccatttttcattcatgtttaatttagtattttaatttttatttttttgaaagagtctcgctgtgttgcccagcctggagtgcagtagcatgatctcagttcactgcaatctctgcctcctaagttcaagcaattctcctgcctcagcctcctgagtagctgggaccacaggcgcacacccccacatctggctaatttttgtattttttggtagagacaagattttgccatgttggcccagctggtctcgaactcttggcctccagcaatccacttgccttggcctcccaaagggctatgattacaggcgtgagccacagcgcccagcctcatgtttaattttataaccggtattaactagcatgaggggccattgtgggatcaagcaatagcttctccttatcatccaggcccagctcactgaccacctcctgagacagaaccttttggtcaagcaagttgcaaagcwcctcctcccaccccaggcactttgctgacatcattgtttcaatctcttcacagcactttcagattcccccaaattatttaatcattcactagttaattgtctacttctcttccttt

SEQ ID NO: 695279 - DNA, 630 bp, Homo sapiens
tatatatmtcttaaatgtagtgggtagaaaacaagctagatgatgctgtagtttccccttgatatagttctcttaagtgtatgactaaataatgttttagcaatttcctgggtttttttcatgtgtttatcagtaattgaaatagcctgactcacatgttaggtattaagagccttgaaatcactcttttaggccattcaaaattcatactagaacttagtttctttttaacttaaaaagaaaaaaaaaagatcaggtgcagtggctcatgcttgtaatctcaggactttgggaggccaagttggaaggattgcttgaaacaaggaatttgagaccagcctgcgtaacacaaggagacctcatctctacaaaaaattttaaaaattagctgggtgtggtggtggcatgtgcctgtagtcccagctactcaggaggctgaagtgggaggattgcttgagcctgcaagtttgaggctgcagtgagcaatgatcgtgccactgcactccagcttgggtgacagagtgagaccctatcttaaaaaaaaaaaaaaaacaactgttactaggtagtgaaattgaacatgattcctaaccttggaataattaattaagctaaataagacttggaaac

SEQ ID NO: 695280 - DNA, 2029 bp, Homo sapiens
taaattaattagtaggctttaaaatgtaaaaagaatactatggaattttagagcaggaggagatctatgcattttggttgaacagaattgagtattttagttgaaatgctctcattttacaaaagatgaaaccaagtactagaaagaagaaaggacacactcaagccctagggagagtaactggcttgcttgggggcatcttagtaactaaagtgagaayatattactggtatccaggtagccatttgttcatttatttaaaatttttatcaccatggagttaagattcagaaaacatgattttccatataagccattttaagaatggaaaatacgtagaattttttcttctgcaactacaggggaaatattagcatctgagttttggcttaatgagacaataagagttcagttccaaaatgtttttgtatcagcaaggaaactctactagaaacgttcatttcgagcaatgataagttggaatttgggtgatcctggtagcaggggtggttcatttgcacttgttttttcaggtgttgctctcttgccattcgtggatgagcgaaggctacgagctgccctagaagaggtatacccagacctcactccagaagagagtaagaattatacttcttagttaacattgatctgtgtaatatacactttatatttctgtataaaattagaccttccttctcctgtttgtcagatttcccataaaggggatataaatcattgattttattttcttattacagacgttgactttgcttcttaattcattatctgtaagttgagtagtagttaaataaaatgttttaacttacaagtatttcttaaattttttaaaaagcaatacttcaacaatatcctttgacattttgattcttatatgacatgcacacacgaaagtatcttttgcctgttgggaagatattattcattttctccatctaccttcttccctactcctcctttctccccagtaataactactttgtttaaaaggttagggtgaaacaaaagcatatgctcttagagtgctaacttgaaatatgacataaaaggaggcaatttgtaatcaatactgacagtaaaaagtattcatattcggaaattgcaaagctgggctctattgaaaaatttaataccattataataagcctctagaaacaatttctgtatcaaaaagattgtcttttagaacaatcttttcatcaaatgacactgtatatgtttccttagggaatgattatgtatttcttatactaagaaaatgagtttattataaaaagaaaatattgccctttatcttgcagtatattcatacgtatttcagtgggttttttttcctgataactattgatctttttgaaacttttttgttaaaatatttttttccccatagaggcacatcacgcatttagatctatcactataattaaaaaattttttttaaattgatatgtaatagttacacatgtattttgggtccatgtgatattttgatacctatatacaatatgtgatcaaaatagggtaattgggatatccatcacctcacatttatcttttctttgtgttgggaacattacagtttctttcttctattttgaaatatgtaataaattactaacttctccacagtactatcaaatactagaacttactcttgtctaacctatcactttaaaattatttttcataaattttataattaagttcttaacacttagatgctttcccttgttttatgctcataaaaattggtcttgcaggtacaatttttttatgtgtaggtcttattcttttctttctccctagccagaagaaacagccttggaggtgatgtcttatttgtggggaaacatcacccactccatgacttcattttagagctgtaccagacaggttccacagaggtatgttacgcaatttggttaattagaaatgcactttttaaaattttggtaaaatatgcataacataaaatttaccattataaccatttttaagtggttattctgtg

SEQ ID NO: 695281 - DNA, 1097 bp, Homo sapiens
ttaccrtgggttgaccacctttttaaggctggcaagagaaatcaagacagaggcagtgctggtgacatgaggaagaaggcgagtgtctcactagaagaaatatcataaagctacatcctgagaaaaagcaaaggccttgatggcagaccagataacagagaggcatttcagagttcagaatattcacaaaataattcacattcttgtaaaatacaagccctgtgagggcagaaactgtgactgtctcactgactattttgccatagcacccagtgcaaggcttggaacacactgataaataaatcataaataaagacagcaaaacaaaaacaaaatctaaataataactgctgagttacttgaaactttcggaaaagaaacacccgaaggaatttctaggaagttttgtagtaatatggtgacaaaattcactcttttggttcctctgcaagaaagtacaagcaacaactgaggctgttgaagccaaatctgtagttcttcttggtgtgtgtgtacatgtctgtgtgcaggtttacattaaggagaccaagcagttacagatgtattcatttataacactcataaacacacaccattactcttatccctacactccatatttacattataattatatctgtgcaattgaaaaatgaggaaaaggcacatttgcaaaaattactgctttcccatttcacacctctgtcactcattaccactgtgtgatcaaaggaacttgaaaaattaaaaggacacaattccaaaaataattatctaatgcccaaaggggtctgggatagcttaattttgactagaactaagcagatttggctgaatcaaatattgcttccttggtgtcacaaggccattcttgatgatcttcatagtgtgtataaggtaactcagatgttttgtgggtgacaaagactctttggatggaaatcagatgctatgacaacatcacaaataagagagaaggcagaattttaaagacgtaaagactatcgtctctgactcaatatacctgtacttagtttatggtcttatcccaaagctttatacatctaggtagagagtaagtgtaaactcctcaatgc

SEQ ID NO: 695282 - DNA, 1097 bp, Homo sapiens
ttaccgtgggttgaccacctttttaaggctggcaagagaaatcaagacagaggcagtgctggtgacatgaggaagaaggcgagtgtctcactagaagaaatatcataaagctacatcctgagaaaaagcaaaggccttgatggcagaccagataacagagaggcatttcagagttcagaatattcacaaaataattcacattcttgtaaaatacaagccctgtgagggcagaaactgtgactgtctcactgactattttgccatagcacccagtgcaaggcttggaacacactgataaataaatcataaataaagacagcaaaacaaaaacaaaatctaaataataactgctgagttacttgaaactttcggaaaagaaacacccgaaggaatttctaggaagttttgyagtaatatggtgacaaaattcactcttttggttcctctgcaagaaagtacaagcaacaactgaggctgttgaagccaaatctgtagttcttcttggtgtgtgtgtacatgtctgtgtgcaggtttacattaaggagaccaagcagttacagatgtattcatttataacactcataaacacacaccattactcttatccctacactccatatttacattataattatatctgtgcaattgaaaaatgaggaaaaggcacatttgcaaaaattactgctttcccatttcacacctctgtcactcattaccactgtgtgatcaaaggaacttgaaaaattaaaaggacacaattccaaaaataattatctaatgcccaaaggggtctgggatagcttaattttgactagaactaagcagatttggctgaatcaaatattgcttccttggtgtcacaaggccattcttgatgatcttcatagtgtgtataaggtaactcagatgttttgtgggtgacaaagactctttggatggaaatcagatgctatgacaacatcacaaataagagagaaggcagaattttaaagacgtaaagactatcgtctctgactcaatatacctgtacttagtttatggtcttatcccaaagctttatacatctaggtagagagtaagtgtaaactcctcaatgc

SEQ ID NO: 695283 - DNA, 1097 bp, Homo sapiens
ttaccgtgggttgaccacctttttaaggctggcaagagaaatcaagacagaggcagtgctggtgacatgaggaagaaggcgagtgtctcactagaagaaatatcataaagctacatcctgagaaaaagcaaaggccttgatggcagaccagataacagagaggcatttcagagttcagaatattcacaaaataattcacattcttgtaaaatacaagccctgtgagggcagaaactgtgactgtctcactgactattttgccatagcacccagtgcaaggcttggaacacactgataaataaatcataaataaagacagcaaaacaaaaacaaaatctaaataataactgctgagttacttgaaactttcggaaaagaaacacccgaaggaatttctaggaagttttgtagtaatatggtgacaaaattcactcttttggttcctctgcaagaaagtacaagsaacaactgaggctgttgaagccaaatctgtagttcttcttggtgtgtgtgtacatgtctgtgtgcaggtttacattaaggagaccaagcagttacagatgtattcatttataacactcataaacacacaccattactcttatccctacactccatatttacattataattatatctgtgcaattgaaaaatgaggaaaaggcacatttgcaaaaattactgctttcccatttcacacctctgtcactcattaccactgtgtgatcaaaggaacttgaaaaattaaaaggacacaattccaaaaataattatctaatgcccaaaggggtctgggatagcttaattttgactagaactaagcagatttggctgaatcaaatattgcttccttggtgtcacaaggccattcttgatgatcttcatagtgtgtataaggtaactcagatgttttgtgggtgacaaagactctttggatggaaatcagatgctatgacaacatcacaaataagagagaaggcagaattttaaagacgtaaagactatcgtctctgactcaatatacctgtacttagtttatggtcttatcccaaagctttatacatctaggtagagagtaagtgtaaactcctcaatgc

SEQ ID NO: 695284 - DNA, 1097 bp, Homo sapiens
ttaccgtgggttgaccacctttttaaggctggcaagagaaatcaagacagaggcagtgctggtgacatgaggaagaaggcgagtgtctcactagaagaaatatcataaagctacatcctgagaaaaagcaaaggccttgatggcagaccagataacagagaggcatttcagagttcagaatattcacaaaataattcacattcttgtaaaatacaagccctgtgagggcagaaactgtgactgtctcactgactattttgccatagcacccagtgcaaggcttggaacacactgataaataaatcataaataaagacagcaaaacaaaaacaaaatctaaataataactgctgagttacttgaaactttcggaaaagaaacacccgaaggaatttctaggaagttttgtagtaatatggtgacaaaattcactcttttggttcctctgcaagaaagtacaagcaacaactgaggctgttgaagccaaatctgtagttcttcttggtgtgtgtgtacatgtctgtgtgcaggtttacattaaggagaccaagcagttacagatgtattcatttataacactcataaacacacaccattactcttatccctacactccatatttacattataattatatctgtgcaattgaaaaatgaggaaaaggcacatttgcaaaaattactgctttcccatttcacacctctgtcactcattaccacygtgtgatcaaaggaacttgaaaaattaaaaggacacaattccaaaaataattatctaatgcccaaaggggtctgggatagcttaattttgactagaactaagcagatttggctgaatcaaatattgcttccttggtgtcacaaggccattcttgatgatcttcatagtgtgtataaggtaactcagatgttttgtgggtgacaaagactctttggatggaaatcagatgctatgacaacatcacaaataagagagaaggcagaattttaaagacgtaaagactatcgtctctgactcaatatacctgtacttagtttatggtcttatcccaaagctttatacatctaggtagagagtaagtgtaaactcctcaatgc

SEQ ID NO: 695285 - DNA, 1097 bp, Homo sapiens
ttaccgtgggttgaccacctttttaaggctggcaagagaaatcaagacagaggcagtgctggtgacatgaggaagaaggcgagtgtctcactagaagaaatatcataaagctacatcctgagaaaaagcaaaggccttgatggcagaccagataacagagaggcatttcagagttcagaatattcacaaaataattcacattcttgtaaaatacaagccctgtgagggcagaaactgtgactgtctcactgactattttgccatagcacccagtgcaaggcttggaacacactgataaataaatcataaataaagacagcaaaacaaaaacaaaatctaaataataactgctgagttacttgaaactttcggaaaagaaacacccgaaggaatttctaggaagttttgtagtaatatggtgacaaaattcactcttttggttcctctgcaagaaagtacaagcaacaactgaggctgttgaagccaaatctgtagttcttcttggtgtgtgtgtacatgtctgtgtgcaggtttacattaaggagaccaagcagttacagatgtattcatttataacactcataaacacacaccattactcttatccctacactccatatttacattataattatatctgtgcaattgaaaaatgaggaaaaggcacatttgcaaaaattactgctttcccatttcacacctctgtcactcattaccactgtgtgatcaaagraacttgaaaaattaaaaggacacaattccaaaaataattatctaatgcccaaaggggtctgggatagcttaattttgactagaactaagcagatttggctgaatcaaatattgcttccttggtgtcacaaggccattcttgatgatcttcatagtgtgtataaggtaactcagatgttttgtgggtgacaaagactctttggatggaaatcagatgctatgacaacatcacaaataagagagaaggcagaattttaaagacgtaaagactatcgtctctgactcaatatacctgtacttagtttatggtcttatcccaaagctttatacatctaggtagagagtaagtgtaaactcctcaatgc

SEQ ID NO: 695286 - DNA, 1022 bp, Homo sapiens
gcactgtgggaggctaaggcaggaggatcccttgaggcccagaatttgagattagcctggacaacatagcaagacccatttctgcaaaaaaataaatagccaggcttggtggtatgtacctgtagtccttgctactcaggaggctggggtgagacaattgcttgaggccaggagtttgaggctgcagtgagctatgatcacamcaacctggtccctggaatgctctccttagaccccatccatgctttctaaattcctactatccttctagaacactgcactccagtctgggcaacagagtgagaccctgactcaaacaaaaaatattatgtatagtcatatgctgcttaatgacatttggttgacaggccacataaacaactgctatctcacaagattataatactgtgtttttactgtaacttttctatttttagatatatttacatacacagacacttaccattgtcttacagttgcttctagtatccagtacagtaacaggctgtatagatttgtagcctaggagcagtaggctataccgtatagcctaagtgtacagtaggttacaccatctaggtttgtgtaagtatgctctatgatgttcacacaatcactaattgcctaatgacacatttctcaaaacatctccccattgttaagcaacacatacctgtttgtcattacttgtccaaacatggcactcaggcatgtacaataataatcaaatttagtactttttgttgttttgccaactttcaatcatacaaaattttgaatttaaatatttaaaacattgttattcagactacatacttgtcaaaatagaaagatcaaatatatttcatttaatgaaatgttagttgaacttataactgtaacatatttagacataggatctgtggatgtctatttgtgtgttgggtgggaagaaagatgatggacaagtaaaattgtttttgaaccttctgtagattttaatatagcagtgtggatgttgatatcctggtgggaaagaagcg

SEQ ID NO: 695287 - DNA, 1445 bp, Homo sapiens
ggaaatcttatcctaaagcaaacttcatctcaaaagatgagcttgtgcatgatttgatatatactccctcattcactttagaagaagccaaaggcaaatgtaaatagagataaaaatgaagaggcatttaaggcagacaaaggccaaatggccagcttttgtgttctgtattggaagggtggagtttcctggtattcaataaaaagactatttttattgaacaaatccacccaacagtgtagcctgcatcaattgaatccttccaatgaagagattagaattttatgctgtatctatattctagtgtgtatccatagggtgggattatcaaccactactgacattttggactggataaccgttggatacatggggagggagtgaggggctgtcctgtgtattgtaggatgcttagcagcatctctggtttatgtccactagattccagaagctcctaccaaccactagtcaggacaccaaatttatctcacagacctttccaactgtcttttgggtctaaaatcactcctggttgagaaacatggttgtagaggatattgagagatgtttgggcagccaaaccccaatttatttttaagaaattgactttggccatcaagataaattcatgaacctgttatttcattgcaagagaagaagggatccttgaaggttcatttagctaatgtcatagtctcatcaaccttagtagggacctgagaaggtcagaagatctaaccttagtcaatttggttatttgctagactctgaatcttaactggagttgtaccatgaatgaagaaatggtttgagctcaggactattgaatgagtcctcatgtttatgcctggttcttccaagtctggtttgatggctttcccttccaacttacgagccccgtcttattttattttaataagttgcaactaaggaaactttactgaaacagaccctttactttcagtttctcattgaatttagtaaaaacaatttaaaaactaaacaactaaaaatcaaatacaacaatagaaaatcaaaccattacgatcattttacacaatttaaaaaaccaaataaacwgctgttttaatcaaacaataatcagttaagcctcatttgttaagctccaatgatttagttacttaaaacaacaaaaatatttacattatactaatgaaagtatttacttccaggatgctcaaattttaggtaacgaaactgaaagtttaaacaaaatcctttgccgaacctcaaaatacaaaaatgaattaaatatagcatttaattagtctacacttttgatttcacttatataatatttatacatttctaattacagcaatgctaacactaagcccttttgatacccaaacatatttaaaattttaaatttaaatagtttaattgatatttagggactttaattttcttcaacacccaaattt

SEQ ID NO: 695288 - DNA, 678 bp, Homo sapiens
acaagagtgagccatcgcgcccggcccctatgtactttaaaattacaaaggatctttactcttagaggctcactattttcagctttaagtgtgatctcatttgtcttttgtgtgtagcttcgatgcaggtacatgatcaagtataattgctcagtgctttaggtcacacgctattatgtactgaactgagaattctggtcttttgattctctggacactgactcacctatttagctaggctgattcaccctccacaattcaaactcccagaatgcgtttatagagatgctgaggatgtccacataactgaacctgatggggacaaattccatataaatagaaagcaatagaagtataatatactctcatcaattgaaaaaaatatcaagcattctcttcytcagtagcaaatgaaataagaaatagcaaacttcttcatttaataaaatgtttggacagcatttgtattactataatttagtgggagatggctcagtgttgggggagagtctcacagaattaaaataacaatagtcatcacttgtatcaaaacctctcacatgtggaagaaagaacacagattaatcaatagtaaatctgggaatgagaaacaaagcattcaatggtttccaattacatctgctcagccaaatttggtaaacatcaattcagaaaaat

SEQ ID NO: 695289 - DNA, 652 bp, Homo sapiens
caggaaatgaaatctagcagatttttaaagatctgaactgcatcattcatcccagaattcaagtcaagatgctgcctacgttggccgggtatggtggctcacacatgtaatctgacaacttcgggaggccgaggtgggcggattgcctgagctcaggcatttgaggccagcctgggcgacatggtgaagccccatctctactaaaatacaaagaattmgctgggtgcggttgtgtgcgcaagtagtcccaggtactcgggaagctgaggcaggagaatcccttgaacccacagggcagaggttacagtgagctgagattgtgccactgcattgtagcctgggccacagagcaagactctgtcttcaaaaaagaaaaaaaaaagatgctgcctatgttgatcattgctaagacatagtctccttgactgcctggcaacccctcctaaatgtaacccaaacctttcatttacatttttaagttgatttgaagtcagagaaaacataagagaaatttttaggaatttccccctgcctacaatagtctctatatttttaaatccctaggtttatctttcatactcttccaaggacactaagtattttagaatgtatgctgaaacgactcaggtctcagaaacatgggtcatatcca

SEQ ID NO: 695290 - DNA, 664 bp, Homo sapiens
ttttctgtctgaggttccatgcagtctccaagcccttctccagcagggctcagagacccaccccacggtctcaaggaagagggaaaccttcccgggctgcaaagcgaggagcgctcagggtctttctgacttgaatgctttttcacttcaacctcctgggggcagaaagaccctggaagccctcagttacctcatctggaagatggggatgaggctcctctttgccttcccacgctgctgttagactaaaggagacacgagatgcaaaacacacactcagccgatgacaccgagcctgcgggagggacgcatgtgtagaggctggcacagtgactgggaggttcctgggtctgtccttactgtgtcttccctcccttcycccctaggctggaaggggcagccaagatgtcctgggctccatcagacactgatgattccattccgtgtcatgctcactcgaaccctgcaaggtaaaaaataataataataaggaaagagtaataaacacacagagcacttccacctcctatgggcatgcatctcctaaggatttcacatatatgaactcatttaaccctcataggcaccttaagaagtagatactattagttccccattttgtggatgagaaaaactaaagcacagagagggtgagccacttgca

SEQ ID NO: 695291 - DNA, 664 bp, Homo sapiens
ttttctgtctgaggttccatgcagtctccaagcccttctccagcagggctcagagacccaccccacggtctcaaggaagagggaaaccttcccgggctgcaaagcgaggagcgctcagggtctttctgacttgaatgctttttcacttcaacctcctgggggcagaaagaccctggaagccctcagttacctcatctggaagatggggatgaggctcctctttgccttcccacgctgctgttagactaaaggagacacgagatgcaaaacacacactcagccgatgacaccgagcctgcgggagggacgcatgtgtagaggctggcacagtgactgggaggttcctgggtctgtccttactgtgtcttccctcccttctcccctaggctggaaggggcagccaagatgtcctgggctccatcagacactgmtgattccattccgtgtcatgctcactcgaaccctgcaaggtaaaaaataataataataaggaaagagtaataaacacacagagcacttccacctcctatgggcatgcatctcctaaggatttcacatatatgaactcatttaaccctcataggcaccttaagaagtagatactattagttccccattttgtggatgagaaaaactaaagcacagagagggtgagccacttgca

SEQ ID NO: 695292 - DNA, 664 bp, Homo sapiens
ttttctgtctgaggttccatgcagtctccaagcccttctccagcagggctcagagacccaccccacggtctcaaggaagagggaaaccttcccgggctgcaaagcgaggagcgctcagggtctttctgacttgaatgctttttcacttcaacctcctgggggcagaaagaccctggaagccctcagttacctcatctggaagatggggatgaggctcctctttgccttcccacgctgctgttagactaaaggagacacgagatgcaaaacacacactcagccgatgacaccgagcctgcgggagggacgcatgtgtagaggctggcacagtgactgggaggttcctgggtctgtccttactgtgtcttccctcccttctcccctaggctggaaggggcagccaagatgtcctgggctccatcagacactgatgattccattccgtgtcatgctcactcraaccctgcaaggtaaaaaataataataataaggaaagagtaataaacacacagagcacttccacctcctatgggcatgcatctcctaaggatttcacatatatgaactcatttaaccctcataggcaccttaagaagtagatactattagttccccattttgtggatgagaaaaactaaagcacagagagggtgagccacttgca

SEQ ID NO: 695293 - DNA, 664 bp, Homo sapiens
ttttctgtctgaggttccatgcagtctccaagcccttctccagcagggctcagagacccaccccacggtctcaaggaagagggaaaccttcccgggctgcaaagcgaggagcgctcagggtctttctgacttgaatgctttttcacttcaacctcctgggggcagaaagaccctggaagccctcagttacctcatctggaagatggggatgaggctcctctttgccttcccacgctgctgttagactaaaggagacacgagatgcaaaacacacactcagccgatgacaccgagcctgcgggagggacgcatgtgtagaggctggcacagtgactgggaggttcctgggtctgtccttactgtgtcttccctcccttctcccctaggctggaaggggcagccaagatgtcctgggctccatcagacactgatgattccattccgtgtcatgctcactcgaaccctgcaaggtaaaaaataataataataaggaaagagtaataaacacacagagcacttccacctcctatgggcatgcatctcctaaggatttcacatatatgaactcatttaaccctcataggcaccttaagaagtagatactattagttccccattttgtggatgagaaaaactaaagcacagagarggtgagccacttgca

SEQ ID NO: 695294 - DNA, 1629 bp, Homo sapiens
ttcccatgctcttcttgtgatagtgaataagtctcatgagatctgatgattttacaaagggcagttcccctgcacacgctctcttgcctgccgccatgtaagacatgcctttgctgatcttctgcattccactatgattttgaggcctccccagccatgtggaaatgagagtccattaaacctctttttctttataaattacccagtctcaggtatttcttcacaacagtatgaaaatggactaatacataggcaatggggcaagtatctcctttaacttacctagtatgaattcttgaaaagatgaggkcttgtccttttcacacccagaaatcaccatccaagtgaaataataataggttgaaattacaaagatacctttgacctattattttgataatataaaagtaactatatattaaatgtgtgagcaacccaaaaatatctgcaaataggaaaaaaataatctgggagatggctatcctgcaattaaataatttttacatagtcaatcatggaaaacatacaactaactacctttcactcctttcactctgccattatgaaaaagataaaaatcacacaaaagtaaactaacaaccaggaatgttttcaagaaaacaattcaatctggaattaatgtaattccttaacttaaaaatctcctggcccacaatatctacatctaaaaccagattatggctaaaaaatggtgtctatgaggatatgtcattttgaaaagttatattcagtatatactattttataaagtagagaacaatacaccttaccaagaaattaaaaatgatgaaaacataaaagaatgtgcatctatcatttggaaaatgtatttaaatagccaaactattagtttccacacaactttaatataaataaagagaaaattcaatacactgttccagtttcatgtttcaagtcatattttagaatgcagcatgtatcattttaagttagatcaggtcagtacacaaaggagaaccgccaaatcaggcaggaaaagcttcccagaggtgggaaaagcacgtgacctggtaaaataagaaaagttctggaggcacaggaagcagcccatgtgacggtgtgaaggtataaacacaacaaagaagtgaatgtgagctgtaaaaagatgaatccaaagtataaaggtgaaacaagttcatctcataaatgagaaagggcgaagagtcaaagagaaggcttaaccctcatacctgttctagaaaacaccatgtgcccagaaactgaatcaaaggcaatgagaatatttatgacaaaacacattatacaatgagtttgaggaattataaaaagaatatcaaagtagtaggccttgggttatgtgaaattcagtatctgactacctgtgttctctctaagccttgtgctagtacctggagaacatgacttttaaagtgtgacacccattagtgagtggtgaggtctttgcagtggaccactaccatcttctttttcagtaaaacagatcagacacacatctttattaggagtaaacaaagtcttctgaaacttttgtttcaatatgtaagtatgtatgtatgtattgggtttcatattatttatcactctaagttgaaattttttaaattt

SEQ ID NO: 695295 - DNA, 702 bp, Homo sapiens
tctagagcatccttgtgtctaggtttttacatgatcataaaaggaacatttcaaatgaagacccctgaggcagtgtctgaggacttcattttgaggaatacaaaattgattttgagaaacaccagactgtgtaacttttacttctctgtagcttacatgtaaattccggcctgatctggctagcctacctctgccatactatctcttgtcaccctacccacttttctacaaaattgatgtgttttccttaaacatatcatgtcctctttttttctctctgagttgtctgtgttccctcttctttttcaccagactttttgagactcaggtcagttatcttgtagtgttgctgtatcttccatcgtacagtggaatggcatcttacagaaggggtttcggtcctatggttagcttaatgttgaagtcagggaaagtcaaaatcaccattggaactcccttcaactgtctataaaatacactatgcacagtaccttggtttacgtatatttgcataaatacatactttgtatagtcacatgttgtatgacaacttactgagttgttcgatgaacaactctatgtgctaataataatyttgatgtattaaaatgggaaagcatttgcttaactgagtggagaggcacaggttgctgagtcagacgtatctcctgttgcacacgtaccttcaggatggacttgctg

SEQ ID NO: 695296 - DNA, 788 bp, Homo sapiens
tattctcactcataggtgggaattgaacaatgagatcacaaggacacaggaaggggaatatcacactctggggactgtggtggggtcgggggaggggggagggatagcagtgggagataacctaatgatagatgacacgttggtgggtgcagcgcaccagcatggcacatgtatacatatgtaactaacctgcacaatgtgcacatgtaccctaaaacttaaagtataaaaaaaaaaaaaaaaaaaaactaacgataaaccaagggctatgggaattaagaactatggctaaaaaagaaatgtttagagtgatgcaraatggccgattaaaagcagctgcactccccagcactcaaggagaggaatgaaaaggggcaggtgaattcagcaccttcaactgagatacccaggttctcccattgggactgactggaagaacagctcgccccatggagaatgaagaaaagtggagagagggtgtgatggcccagccgagagcagcgtggagccaaaggaacccccactcccagccaagggaagcagtgagtgattgtccaatcgtgctcaggaaacagtgcttctcctattgatctttgcaacccatggatcaggggatccccttgtaagcccatgccaccagggccttgtgtctgatacacagagctgtggagtctcagcagatcagctgctcaggcacacacagaaacccagacgttttacgtactctggccccgagaacctcagcaaggtgggaaatctgtccatacatattttggaaaggggctgaa

SEQ ID NO: 695297 - DNA, 788 bp, Homo sapiens
tattctcactcataggtgggaattgaacaatgagatcacaaggacacaggaaggggaatatcacactctggggactgtggtggggtcgggggaggggggagggatagcagtgggagataacctaatgatagatgacacgttggtgggtgcagcgcaccagcatggcacatgtatacatatgtaactaacctgcacaatgtgcacatgtaccctaaaacttaaagtataaaaaaaaaaaaaaaaaaaaactaacgataaaccaagggctatgggaattaagaactatggctaaaaaagaaatgtttagagtgatgcaaaatggccgattaaaagcagctgcactccccagcactcaaggagaggaatgaaaaggggcaggtgaattcagcaccttcaactgagatacccaggttctcccattgggactgactggaagaacagctcgccccatggagaatgaagaaaagtggagagagggtgtgatggcccagcygagagcagcgtggagccaaaggaacccccactcccagccaagggaagcagtgagtgattgtccaatcgtgctcaggaaacagtgcttctcctattgatctttgcaacccatggatcaggggatccccttgtaagcccatgccaccagggccttgtgtctgatacacagagctgtggagtctcagcagatcagctgctcaggcacacacagaaacccagacgttttacgtactctggccccgagaacctcagcaaggtgggaaatctgtccatacatattttggaaaggggctgaa

SEQ ID NO: 695298 - DNA, 788 bp, Homo sapiens
tattctcactcataggtgggaattgaacaatgagatcacaaggacacaggaaggggaatatcacactctggggactgtggtggggtcgggggaggggggagggatagcagtgggagataacctaatgatagatgacacgttggtgggtgcagcgcaccagcatggcacatgtatacatatgtaactaacctgcacaatgtgcacatgtaccctaaaacttaaagtataaaaaaaaaaaaaaaaaaaaactaacgataaaccaagggctatgggaattaagaactatggctaaaaaagaaatgtttagagtgatgcaaaatggccgattaaaagcagctgcactccccagcactcaaggagaggaatgaaaaggggcaggtgaattcagcaccttcaactgagatacccaggttctcccattgggactgactggaagaacagctcgccccatggagaatgaagaaaagtggagagagggtgtgatggcccagccgagagcagcgtggagccaaaggaacccccackcccagccaagggaagcagtgagtgattgtccaatcgtgctcaggaaacagtgcttctcctattgatctttgcaacccatggatcaggggatccccttgtaagcccatgccaccagggccttgtgtctgatacacagagctgtggagtctcagcagatcagctgctcaggcacacacagaaacccagacgttttacgtactctggccccgagaacctcagcaaggtgggaaatctgtccatacatattttggaaaggggctgaa

SEQ ID NO: 695299 - DNA, 788 bp, Homo sapiens
tattctcactcataggtgggaattgaacaatgagatcacaaggacacaggaaggggaatatcacactctggggactgtggtggggtcgggggaggggggagggatagcagtgggagataacctaatgatagatgacacgttggtgggtgcagcgcaccagcatggcacatgtatacatatgtaactaacctgcacaatgtgcacatgtaccctaaaacttaaagtataaaaaaaaaaaaaaaaaaaaactaacgataaaccaagggctatgggaattaagaactatggctaaaaaagaaatgtttagagtgatgcaaaatggccgattaaaagcagctgcactccccagcactcaaggagaggaatgaaaaggggcaggtgaattcagcaccttcaactgagatacccaggttctcccattgggactgactggaagaacagctcgccccatggagaatgaagaaaagtggagagagggtgtgatggcccagccgagagcagcgtggagccaaaggaacccccactcccagccaagggaagcagtgagtgattgtccaatcstgctcaggaaacagtgcttctcctattgatctttgcaacccatggatcaggggatccccttgtaagcccatgccaccagggccttgtgtctgatacacagagctgtggagtctcagcagatcagctgctcaggcacacacagaaacccagacgttttacgtactctggccccgagaacctcagcaaggtgggaaatctgtccatacatattttggaaaggggctgaa

SEQ ID NO: 695300 - DNA, 1424 bp, Homo sapiens
tctttacagggacatggaagaagctggaggccatcattctcagcagacaaacacaggaacagaaaaccaaacaccacatgttctcacttataagtgggaggtgaacatttagaacacrtggtcacagagaggggaacaacacactccagggcctggtagggtgtgggatgaggggcgggaacttagaggacaggataataggtgcggcaaaccaccatggcacacgtatacctatgtaacaaacctgcacgttttgcacgtgtatctcttttttttttttttttagaagaaataaattaaaaaaaaagaaatgtaacaggcaggtcaccttcatttaaaaacaaaagcctccctatttcttgcacagaatgcttgaatttagtcaaattacatactgctaaaaatgaagactgatgggtacatttgtaattaatttatttactagtatgaaagatggtacttttttccttaaaatgtatcctttaaaagtattaaaaggtctagtacacatagaggatgaaattgtcaggtgtgtcttgaaagctgtcatgtatcagtcaccaccctaataatccacaagaaattaattgcattctacatattgtagttaatttattattattttattaaactttgtctagttcctcaaaactcccagaatccatttttaagagcaataagcaaatgcaagggaaataagcagaaagcaaaaacatatgacaggcataggatgcactcagtatgtctaaagaaatgtaattttatgtaatttgcctacctcattcatagacactcagtagtctaaaggggctccagaattaacaatctatattactttgttttcttcaggagagtagaacaacccactcattttttctttagagaagactaatggatttctatgctaaatagttatgatgtttatagtccattgaaaccaatataaaatatggacaaaagtattgtaaaggccaaattttaaaggtatgtaagactgacctactgctataggctacggcagaaatatcctaccatattacttcattacatttcttcatagagatgagagagatatgaagaatctatacatctgaaacaaaaacgaaggatgatattcatttgcaccttacaatttggcagccagaatgatagtaactgtcacatatgtttcatatttaattctaaaaaggagtgagatatttgtgagcataggcattttgaatatcaataaactgaggctcaaaaatgtgaagtaatttgctcatatttaatattttatctgtaaaagcagcaacagaaaaatagaaaagcttcaatatctgagtttttctcacatcatttggattaaacttttaatgatgcctgcagaatacattaaggtgtggtgtagatgtcggtgcttaaacatatagtaagtatattta

SEQ ID NO: 695301 - DNA, 1424 bp, Homo sapiens
tctttacagggacatggaagaagctggaggccatcattctcagcagacaaacacaggaacagaaaaccaaacaccacatgttctcacttataagtgggaggtgaacatttagaacacatggtcacagagaggggaacaacacactccagggcctggtagggtgtgggatgaggggcgggaacttagaggacaggataataggtgcggcaaaccaccatggcacacgtatacctatgtaacaaacctgcacgttttgcacgtgtatctcttttttttttttttttagaagaaataaattaaaaaaaaagaaatgtaacaggcaggtcaccttcatttaaaaacaaaagcctccctatttcttgcacagaatgcttgaatttagtcaaattacatactgctaaaaatgaagactgatgggtacatttgtaattaatttatttactagtatgaaagatggtacttttttccttaaaatgtatcctttaaaagtattaaaaggtctagtacacatagaggatgaaattgtcaggtgtgtcttgaaagctgtcatgtatcagtcaccaccctaataatccacaagaaattaattgcattctacatattgtagttaatttattattattttattaaactttgtctagttcctcaaaactcccagaatccatttttaagagcaataagcaaatgcaagggaaataagcagaaagcaaaaacatatgacaggcataggatgcactcagtatgtctaaagaaatgtaattttatgtaatttgcctacctcattcatagacactcagtagtctaaaggggctccagaattaacaatctatattactttgttttcttcaggagagtagaacaacccactcattttttctttagagaagactaatggatttctatgctaaatagttatgatgtttatagtccattgaaaccaatataaaatatgracaaaagtattgtaaaggccaaattttaaaggtatgtaagactgacctactgctataggctacggcagaaatatcctaccatattacttcattacatttcttcatagagatgagagagatatgaagaatctatacatctgaaacaaaaacgaaggatgatattcatttgcaccttacaatttggcagccagaatgatagtaactgtcacatatgtttcatatttaattctaaaaaggagtgagatatttgtgagcataggcattttgaatatcaataaactgaggctcaaaaatgtgaagtaatttgctcatatttaatattttatctgtaaaagcagcaacagaaaaatagaaaagcttcaatatctgagtttttctcacatcatttggattaaacttttaatgatgcctgcagaatacattaaggtgtggtgtagatgtcggtgcttaaacatatagtaagtatattta

SEQ ID NO: 695302 - DNA, 826 bp, Homo sapiens
acaaaggccttaaacaagaaaaacaaatgtctgacctaaggaatgaaaatgaaaagccaatgttgtaccatttttcaactaccaaattagtaaagctttaaagatgtgatagccaatactggaaaagtgtgctgcatattagtctcacacttttggtgagggtataaactagaataacccagtaatttgaaagaaagttggtaatgtatgtcaagagcctcaaaaaggttaatactctttgattctgtacatctagctctgaaacttcaccttgcagaattaatgtctatgctcccatttgtatgcaaaaggaaagaaaaagtcattttgtgtgtagacgtttatgtaagcctgcacagaggggcaggagaacacactacatattgttaacatcagggacctcaggcagtgggattgggaggggagctaataggaggaacattaatgttttctttataaaccgctgtattgttagatttggtacaaacagcatgcattattttgtgattttaaaaactcagcaaagtagataartaagaaaaaatgactgagatagcatttattcgtaaaaaagaatcgttctgaaacagacttatgaacaaagaatatcatcacagtattatttataatagcaaaatgttggaagtaacataaatgtcaataggggactagttaaataaattacattacattcatgtgatggaatattgtacactcatcaagaatgatgtttatgaatatttaattacatgaagagatagtgtaacaagtttaaaagagcagggtaaaaaacagtatgatttcaactatgtaaaaatatatagtc

SEQ ID NO: 695303 - DNA, 1253 bp, Homo sapiens
ggcgggatctctcaccytctttcagattgtccttgaaaatgcacagctcagtgtttctcttcaaggacttaagctctgggttcctccactatagctggctggcaaccttcagatcacagatccactggccccgtctggaaactcttactgacaatgccatctgatgctgtccctcagtcactgcagtccctttcaagtatcaccttttttcctctgtagcagttatcaccatttggaataatttttgtttatttgctcattgtctccatcctcccactaaaatataagctctgtgatgacaaggtcctgtctctcttgctcacagctatgtgctcagtgtccccaagaggtgtttgccacgttgtaggtgctgggttagtttgtgttgtatgaagcagtgagcttaaacaaagggtttgaattaccttccctaagtagggctgtccttggtgcttggtctacaatgtcattggagataacccatcagcgagaataaaggaatacttcccagtgttagagcagcctcagagcagaaccagcccagatatgtgaggctggacatgggatctttgaacccgtggcaatgctggtgctgagtttccaccccataagaaaatctaccaacccaaggcgggaaggctgggagcaacagtatgatattctttactattttcctagggttgattctatggccatgacacatctttgagtccatatgacttttaggaggggtgtgctgaaaggttagtgacagcactcagccttctttgatgaccctgaatggaagatcccatcctattggcctgactatcttgctcccgggcaaagagagggtccatgtttgtgttcacgtctgtcaccaaacgggacccaggctggagcttcagcacctcactccaggtgagggaaatgtaaaaattcaaatgtatttagggttctttgatttttctttaactttcaacagattttggtgtacctgctcgattcattatttggcagcactttgaaaaaggtttttcagtgttcttgggttcccccaaaacaacatgaaacaaaaaagtgatactgccacacaggggccctcagaggtcagcagggtttctgctcctactccttctcttccagcggcactatttgatacaacagagtctgtggtctggggcagataaagtcactctaaaatagttgtgttagctgggcgcagtggctcacgcctgtaatcctagcactttaggaggctgaggtgggtggat

SEQ ID NO: 695304 - DNA, 609 bp, Homo sapiens
catttcactttacttttcccattgagtcaactactagttcattagtccatgaccagatggaccactaagagtccgtcctttctgtccctctctttgctacctttatggttctgtccatatttttacccatcttttctcccctttttttttctggtagccagggaatcagaacaaaattggttcaaattccagctattttctgcctcaggagctacagctctagttcctgagctctgtcccagggtgctctggggcacagcagcaaattcacagaagcaccatttcaatgaaagttttaaacttttgaggaaaacaggacagcttctgttggacatcatgtgaaygactgtttgaatatcagagagtgctatgttgttttcagtgaagtggtatcttagcaaagttgggcatttgagagttctatgataaaaaaaagttagcaccctcaaaaatcaatgtgcaatagaaatgagggtggctatgcccaatctaattccaagggtgagaacttgcacagtgcccaataggcacacgtatcccattagctaagcaatcatggtaagtttactcttaagagtaaatttaaactattttttctttcaatttata

SEQ ID NO: 695305 - DNA, 645 bp, Homo sapiens
aaatataaaaaagaaagaaacttaagaaaaaatctaatatattattctcttctagactaaatattcttttggaagctctccagtgattatgaaattgtttcactctgatatttaggagaagctatccacccatctgtgggttactcttactcacaaatccaagaaacaagtgaattagaaaacattaaccaagttaaaatattggattgcacagcagtaagtttgtatgaatatatacctttgttatttattgtgctaactctattatcatcattttcttaacaacataaagtttttacagtattgccatttgatctatattttatttcttcatttaacaaatgtcataaaacaactaccacatgccaaaacctagaccctattgaattctatatctctaatgtccatcacaacacctaacattaaaattcaattcagtttcttgttttcttcaaagtgtagaaagtagacatacattgaatgccyactcctcaaaatgattgacagaaaaacttatcaaggaaagcaaagtctctctgactagctacagtaagaaagaatactatcctgatagggtcttaataatgtgcgagaggaaggaagtcagtggagaatattgatagggctttaggacctgagttggat

SEQ ID NO: 695306 - DNA, 1518 bp, Homo sapiens
aaggctttttcagaagtcaacatgaatgtttaaaggataagtaatatggagagaagaaaaaatatataatatcattctttaaaaaattgagtcttgcagagaaacagtgaataaagacaataaagcttccttttatttcttacttttttttgcttcattttgttttcctttgtttttaagacagagttacccaggctgacgtacagtggcacaatcccagctcactaaagactcccaatctccagcactcctcccacctcaaccccctgagtgtgtgagactacaggcgtgcgccaccgtgcccagctaatttttaaactttttgtacagacggggtttcaccatgttgcccaggctggtctcaaactcctgggctcaagtgatctctctgccgtggtctcctaaagggctgggattacaggcaggagccactgcacctggccttattccttatactgctatccatgctgcatttaaagcaagaaaaaagaaataatgtgttgaaatgaaagcatacctataatgagaaacaaattgtctgtagaacaaaagtacttctgatatgttgatatatattaaacccattaaaggagagaattagagccaagtgattgtatacattaatagatttgttggtaagctattttctcattttctttttaagctatggactactaaaaatatccacattcacctaagagacacactcacacaatactttgaccaaaaaagccactctatgacatctcatttgtaatgaataaaaatggtagataaactgttctccagtagttacatgacgaaatatttctatgagaaatactaattgaaattagactatcaccaggtgtggttgctcacacatgtaatcccagctacttggaagcctgaggcaggagaatcgtttgaggccaagagtttgagaccagcctgggcagcatagtgagactccgtctctaaaaatataaawacatacatacatacatacatacatacatacatacatactataacctatgtggagtaaatagacaccagaggtcactgaatcacactttgcaattagattctagctgaaatggaagagacccctaatgttaccttaccaactcataattacagtaactcaaaatgttttctctcaacattaatataagaaatggaagtagactatcattaagtgggtaagtggaacattttatttgactgaaattatctggaaaatgggccacatattaaattagcattacaatggccaacacacagttagcctaaccattaaatgtaataggtaaccttattaaaatgtgaatcatgtgattaggggtaacatcttgctacatgatttctggtatgtttagaacctaagttccaagaggacaggaatgagataaatctagtttataagacataaccaatgctgggttctaacatgaaaactagagacttggaagtttatttgttcaccaacattttgaactgtgtcttagctcataaaaaggtcaataaatactcctt

SEQ ID NO: 695307 - DNA, 1518 bp, Homo sapiens
aaggctttttcagaagtcaacatgaatgtttaaaggataagtaatatggagagaagaaaaaatatataatatcattctttaaaaaattgagtcttgcagagaaacagtgaataaagacaataaagcttccttttatttcttacttttttttgcttcattttgttttcctttgtttttaagacagagttacccaggctgacgtacagtggcacaatcccagctcactaaagactcccaatctccagcactcctcccacctcaaccccctgagtgtgtgagactacaggcgtgcgccaccgtgcccagctaatttttaaactttttgtacagacggggtttcaccatgttgcccaggctggtctcaaactcctgggctcaagtgatctctctgccgtggtctcctaaagggctgggattacaggcaggagccactgcacctggccttattccttatactgctatccatgctgcatttaaagcaagaaaaaagaaataatgtgttgaaatgaaagcatacctataatgagaaacaaattgtctgtagaacaaaagtacttctgatatgttgatatatattaaacccattaaaggagagaattagagccaagtgattgtatacattaatagatttgttggtaagctattttctcattttctttttaagctatggactactaaaaatatccacattcacctaagagacacactcacacaatactttgaccaaaaaagccactctatgacatctcatttgtaatgaataaaaatggtagataaactgttctccagtagttacatgacgaaatatttctatgagaaatactaattgaaattagactatcaccaggtgtggttgctcacacatgtaatcccagctacttggaagcctgaggcaggagaatcgtttgaggccaagagtttgagaccagcctgggcagcatagtgagactccgtctctaaaaatataaatayatacatacatacatacatacatacatacatacatactataacctatgtggagtaaatagacaccagaggtcactgaatcacactttgcaattagattctagctgaaatggaagagacccctaatgttaccttaccaactcataattacagtaactcaaaatgttttctctcaacattaatataagaaatggaagtagactatcattaagtgggtaagtggaacattttatttgactgaaattatctggaaaatgggccacatattaaattagcattacaatggccaacacacagttagcctaaccattaaatgtaataggtaaccttattaaaatgtgaatcatgtgattaggggtaacatcttgctacatgatttctggtatgtttagaacctaagttccaagaggacaggaatgagataaatctagtttataagacataaccaatgctgggttctaacatgaaaactagagacttggaagtttatttgttcaccaacattttgaactgtgtcttagctcataaaaaggtcaataaatactcctt

SEQ ID NO: 695308 - DNA, 1518 bp, Homo sapiens
aaggctttttcagaagtcaacatgaatgtttaaaggataagtaatatggagagaagaaaaaatatataatatcattctttaaaaaattgagtcttgcagagaaacagtgaataaagacaataaagcttccttttatttcttacttttttttgcttcattttgttttcctttgtttttaagacagagttacccaggctgacgtacagtggcacaatcccagctcactaaagactcccaatctccagcactcctcccacctcaaccccctgagtgtgtgagactacaggcgtgcgccaccgtgcccagctaatttttaaactttttgtacagacggggtttcaccatgttgcccaggctggtctcaaactcctgggctcaagtgatctctctgccgtggtctcctaaagggctgggattacaggcaggagccactgcacctggccttattccttatactgctatccatgctgcatttaaagcaagaaaaaagaaataatgtgttgaaatgaaagcatacctataatgagaaacaaattgtctgtagaacaaaagtacttctgatatgttgatatatattaaacccattaaaggagagaattagagccaagtgattgtatacattaatagatttgttggtaagctattttctcattttctttttaagctatggactactaaaaatatccacattcacctaagagacacactcacacaatactttgaccaaaaaagccactctatgacatctcatttgtaatgaataaaaatggtagataaactgttctccagtagttacatgacgaaatatttctatgagaaatactaattgaaattagactatcaccaggtgtggttgctcacacatgtaatcccagctacttggaagcctgaggcaggagaatcgtttgaggccaagagtttgagaccagcctgggcagcatagtgagactccgtctctaaaaatataaatacatamatacatacatacatacatacatacatacatactataacctatgtggagtaaatagacaccagaggtcactgaatcacactttgcaattagattctagctgaaatggaagagacccctaatgttaccttaccaactcataattacagtaactcaaaatgttttctctcaacattaatataagaaatggaagtagactatcattaagtgggtaagtggaacattttatttgactgaaattatctggaaaatgggccacatattaaattagcattacaatggccaacacacagttagcctaaccattaaatgtaataggtaaccttattaaaatgtgaatcatgtgattaggggtaacatcttgctacatgatttctggtatgtttagaacctaagttccaagaggacaggaatgagataaatctagtttataagacataaccaatgctgggttctaacatgaaaactagagacttggaagtttatttgttcaccaacattttgaactgtgtcttagctcataaaaaggtcaataaatactcctt

SEQ ID NO: 695309 - DNA, 1518 bp, Homo sapiens
aaggctttttcagaagtcaacatgaatgtttaaaggataagtaatatggagagaagaaaaaatatataatatcattctttaaaaaattgagtcttgcagagaaacagtgaataaagacaataaagcttccttttatttcttacttttttttgcttcattttgttttcctttgtttttaagacagagttacccaggctgacgtacagtggcacaatcccagctcactaaagactcccaatctccagcactcctcccacctcaaccccctgagtgtgtgagactacaggcgtgcgccaccgtgcccagctaatttttaaactttttgtacagacggggtttcaccatgttgcccaggctggtctcaaactcctgggctcaagtgatctctctgccgtggtctcctaaagggctgggattacaggcaggagccactgcacctggccttattccttatactgctatccatgctgcatttaaagcaagaaaaaagaaataatgtgttgaaatgaaagcatacctataatgagaaacaaattgtctgtagaacaaaagtacttctgatatgttgatatatattaaacccattaaaggagagaattagagccaagtgattgtatacattaatagatttgttggtaagctattttctcattttctttttaagctatggactactaaaaatatccacattcacctaagagacacactcacacaatactttgaccaaaaaagccactctatgacatctcatttgtaatgaataaaaatggtagataaactgttctccagtagttacatgacgaaatatttctatgagaaatactaattgaaattagactatcaccaggtgtggttgctcacacatgtaatcccagctacttggaagcctgaggcaggagaatcgtttgaggccaagagtttgagaccagcctgggcagcatagtgagactccgtctctaaaaatataaatacatacatacatacatacatacatacatacatacatactataacctatgtggagtaaatagacaccagaggtcactgaatcacactttgcaattagattctagctgaaatggaagagacccctaatgttaccttaccaactcataattacagtaactcaaaatgttttctctcaacattaatataagaaatggaagtagactatcattaagtgggtaagtggaacattttatttgactgaaattatctggaaaatgggccacatattaaattagcattacaatggccaacacacagttagcctaaccattaaatgtaataggtaaccttattaaaatgtgaatcatgtgattaggggtaacatcttgctacatgatttctggtatgtttagaacctaagttccaagaggacaggaatgagataaatctagtttataagacataaccaatgctgggttctaacatgaaaactagagacttggaagtttatttgttcaccaacattttgaactgtgtcttagctcataaaaagrtcaataaatactcctt

SEQ ID NO: 695310 - DNA, 1148 bp, Homo sapiens
taatctttttcattggtagctaaacaaagttgtaaaaatcagagccccttgacagttttctctgcgtcactcttatttctctcctgaagagagaaatgctgccatagcctgtgatttctgaaatataaatgtgatcatgctactcttaggtttaacatgtatcacctgcaaaaagtccacaattattatcaaagagataaaggtccactgtaacatagttcctatctcttttgccaatctcacttccactacagcacactcatacccttcccttggccactctttgttttctaaacatactatgctctttctttattcccaccttttcttaaccctgcagcaagataatcctgttgaaacttaacttagattctgtcactcttgasttcaaaatgtccagcgtcctcccatctcacttagagtaaaagtaaaagtacttgcaaaggccctcaccttaagccttctctaatttaggagtccattatatcttcttcagcttgtttgcctactctcttctaggtgctctttgccatctttctgttctttgaacatgcaagatactctccaactccagggtctttgtactgctagttctttcatctagaatgctctttcttagatatgtttcctgtcatatcacctgttaagcaaggttttccctggctaccttatctgaaattatgatctcccttcccttaaccaactcaagtactccttatctcacttcattatttccagcacatatcactttatcatcccatgtaatttacattgttcatgatctaactctttcaacccttccaaatataagcctcattataaaaacagattttgcctcttttgttctgtgctgcttcttctagaaaaatgtctgccacatagtaagtgctcaataaatattcattactattgactaactttcccatatttatgatgaattcttgccttgaatattgaataactctatgaagactactcataactatgtcccacttcgacaaaaattcataaacacagtgcttccataacacttggtatgtattcaatatatattttagcaaaaacagattatcagatgataagtgaaatttaaaatcatatacaatttctaacagaatacttattatttttctcaacagagatctgtg

SEQ ID NO: 695311 - DNA, 667 bp, Homo sapiens
aaacataattatcaataatacagactttgaggcaaggccaaactacgagctgaaatcctgcctgccccacatacttcttgactttaggccttatctgtaaaaaggaaataacactcctatctctatctcaccatgtcatcttgctaattaaattcactagtgtgaacccacagggcagtgtgtagcatctaggctagaactgaagggacattattcttttcatcattgtggtggtaagtgctctgtgctaccttagaaatttttatttacttgatgcacacacttccaaatgtggcccaaaggagacccacattgctacygaatttgcataataagtagtgtgatattataagcaatatatgtgtgtgcagggttagcagtgtgctagcaatctataacgtgttccatcaccctcttgcctcatagtggaagcagcgagataaaacagctggttgctatgagcattcacattaatgaaatctcaccactgccacgccgcactccagctgaaaagcactttcagatccattatgccattacctcatcatagcaagtcaggaaaactctgttctctctaggggggcagtgacaaatgcctgtgtgcagatggcatcattcataatcctagtggtatccagcacagcccaccgctgcagtcaagcgaaca

SEQ ID NO: 695312 - DNA, 1412 bp, Homo sapiens
tccttaaatattttacagagtttgactcttttcatcgacatcagcatatacacctcctcaaagcctcagaggccaaggaaacgcaggtttccatcatggttcttatgcctgactgtcagaggcgtttgaaccagagcaactccatcttgaataggagctgggtaaaataaggctgagacctactgggctgcattcccagatggttaaggcattccaagtcacagaataagataggagattggcacaaaacacaggtcataaagaccttgctgataaaccaggttgcagtaaagaagccggctggccaaaacccaccaaaaccaagatggcgatgacagtgacctctggttgtcctcactgctacactcccgccagcgccatgacagwttacaaatgccatggtaacgacaggaagttaccctatatggtctaaaaagggggggcatgaataatctgtcccttgtttagcatatcatccagaaagaaccataaaaatgggaaaccaggctgggcacagtggctcatgcctataatcccagaactctgggaggccaaagtggctggatcacttgaggtcaaaagttcgagaccatcctggccaacatggtgaaactccgtctctactgaaaatacaaaaattagccgggcatggtggtaggtgcctataatcccagctactcaggaggctgaggcaggagaatcgcttgaacccggggagcggaggctgtagtgagccaagatcactccactttactccagcctgggcaaaagaacgagactccgtctcaaaaataaaaaaaaaaataaaataaaataggaaaccagcagtcctcagggctgctctatggaatagccattcttttattcctttaccttccgaagaaacttgctttcactttactctataaactcaccctgaattctttcttgtgtgagatccaagaaccctctcttggggtctggatcaggacccctttcctgtaacacgactatacgagcacaacacatggttcgtgccttcgtgaaggtcatcacgacactatattgcaactacaagcttctatccttgtttctgtcccctcctgtgtcaccgcagagattctcagaatggaggcaacataggttagccctctctgtttgaccatggtacctggtgtagagtgagcacccatcatatctgttccatgaatactgaatacattttacaaataggcaaaccccgagaagatctgccgcacataaacgtctttcctcctcgagtcagtttcactactgaggcttcacatctttgaatctgttttccagagtccttagatacatggataaatatatttctgagagctcagtatttttgctactgctgtgagttcatatgtagatggaataaagaaaatggctcaaaattgatggga

SEQ ID NO: 695313 - DNA, 1412 bp, Homo sapiens
tccttaaatattttacagagtttgactcttttcatcgacatcagcatatacacctcctcaaagcctcagaggccaaggaaacgcaggtttccatcatggttcttatgcctgactgtcagaggcgtttgaaccagagcaactccatcttgaataggagctgggtaaaataaggctgagacctactgggctgcattcccagatggttaaggcattccaagtcacagaataagataggagattggcacaaaacacaggtcataaagaccttgctgataaaccaggttgcagtaaagaagccggctggccaaaacccaccaaaaccaagatggcgatgacagtgacctctggttgtcctcactgctacactcccgccagcgccatgacagattacaaatgccatggtaacgacaggaagttaccctatatggtctaaaaagggggggcatgaataatctgtcccttgtttagcatatcatccagaaagaaccataaaaatgggaaaccaggctgggcacagtggctcatgcctataatcccagaactctgggaggccaaagtggctggatcacttgaggtcaaaagttcgagaccatcctggccaacatggtgaaactccgtctctactgaaaatacaaaaattagccgggcatggtggtaggtgcctataatcccagctactcaggaggctgaggcaggagaatcgcttgaacccggggagcggaggctgtagtgagccaagatcactccactttactccagcctgggcaaaagaacgagactccgtctcaaaaataaaaaaaaaaataaaataaaataggaaaccagcagtcctcagggctgctctatggaatagccattcttttattcctttaccttccgaagaaacttgctttcactttactctataaactcaccctgaattctttcttgtgtgagatccaagaaccctctcttggggtctggatcaggacccctttcctgtaacacgactatacgagcacaacacatggttcgtgccttcgtgaaggtcatcacgacactatattgcaactacaagcttctatccttgtttctgtcccctcctgtgtcaycgcagagattctcagaatggaggcaacataggttagccctctctgtttgaccatggtacctggtgtagagtgagcacccatcatatctgttccatgaatactgaatacattttacaaataggcaaaccccgagaagatctgccgcacataaacgtctttcctcctcgagtcagtttcactactgaggcttcacatctttgaatctgttttccagagtccttagatacatggataaatatatttctgagagctcagtatttttgctactgctgtgagttcatatgtagatggaataaagaaaatggctcaaaattgatggga

SEQ ID NO: 695314 - DNA, 1354 bp, Homo sapiens
agaccagcctgggcaagatggtgaaaacccatctctaaaaaaaatacaaaaactagccaggcctgtcgcatatgcctgtagtcccagctacctgcgaggctgaggcagaaggatcacttcagcccagcagatagaggctgcagtgagccgaggtcgcaccactgcactccagccccggtgacagattgtgagactctgtctccgaaagaaaacaaaaattaatgtaagtcatatgtgacatgagagmcttcagaaatgaagtccaaacaacccaggaaaaactgtctatttttatggacagtcatgctgacgtatgattggaggacgaaagggtatcatttaatggtaataaacaaggagaaacttagcaagggctgctttttcaaattcttcctggcctctgggaatagggcacaaccccactggaatgagggtcttatgaccgactttcaggcaagccagagaattctttttggcccactttaggggaaaagggttagagaaggttagagagtgacctccctgcttctgcagtttcctccatttccttcagcctgaaatattcagtatgccaagatgctgtattttcaggtagcatttcctgcatcccatcatatatacagatcatttttgattatgaagcctacaggacaggaaccatgttttatcacctgtgtgttgcccaaggcctgagcactgcacctggcatacaccgtatctcatatactttattgaggtataatttatccacaataaactgcattcatttaaagtgtgccactgagttcaacttccgtcacaccaaattaaacaaaaaaataggtatctggctgggcatggtggctcacacctgtaatcccagcactttgggaggccgaggcgggcggatcacctgaggtcaggagttcgagaccagcctggccaacatggcgaaaccccatctctactaaaagtacaaaaattagccaggtgtggtggcgtccacctgtagtcccagctactcaggaggctgaggcagaagaattgcctcctgcctccggaaggcggaggctgtagtgagccaagatcatgccactgcattccagcctgggtgacagaaggagactccgtctcaaaaaaaaaaaaaaatccaaaaagactaacgtatagttggaatggcaggaaaaagacctactgtttcataattacaacataatgcaagtaagacttttatgaagagtttcaaggaaatgaatcccaggccaaacccacatctgcctttctctgacttagacaatctgctgctagaaagtaagacaagtgatatggtttggctgtgtccccacccaaatctcaccttgaattacagttccca

SEQ ID NO: 695315 - DNA, 1354 bp, Homo sapiens
agaccagcctgggcaagatggtgaaaacccatctctaaaaaaaatacaaaaactagccaggcctgtcgcatatgcctgtagtcccagctacctgcgaggctgaggcagaaggatcacttcagcccagcagatagaggctgcagtgagccgaggtcgcaccactgcactccagccccggtgacagattgtgagactctgtctccgaaagaaaacaaaaattaatgtaagtcatatgtgacatgagagacttcagaaatgaagtccaaacaacccaggaaaaactgtctatttttatggacagtcatgctgacgtatgattggaggacgaaagggtatcatttaatggtaataaacaaggagaaacttagcaagggctgctttttcaaattcttcctggcctctgggaatagggcacaaccccactggaatgagggtcttatgacygactttcaggcaagccagagaattctttttggcccactttaggggaaaagggttagagaaggttagagagtgacctccctgcttctgcagtttcctccatttccttcagcctgaaatattcagtatgccaagatgctgtattttcaggtagcatttcctgcatcccatcatatatacagatcatttttgattatgaagcctacaggacaggaaccatgttttatcacctgtgtgttgcccaaggcctgagcactgcacctggcatacaccgtatctcatatactttattgaggtataatttatccacaataaactgcattcatttaaagtgtgccactgagttcaacttccgtcacaccaaattaaacaaaaaaataggtatctggctgggcatggtggctcacacctgtaatcccagcactttgggaggccgaggcgggcggatcacctgaggtcaggagttcgagaccagcctggccaacatggcgaaaccccatctctactaaaagtacaaaaattagccaggtgtggtggcgtccacctgtagtcccagctactcaggaggctgaggcagaagaattgcctcctgcctccggaaggcggaggctgtagtgagccaagatcatgccactgcattccagcctgggtgacagaaggagactccgtctcaaaaaaaaaaaaaaatccaaaaagactaacgtatagttggaatggcaggaaaaagacctactgtttcataattacaacataatgcaagtaagacttttatgaagagtttcaaggaaatgaatcccaggccaaacccacatctgcctttctctgacttagacaatctgctgctagaaagtaagacaagtgatatggtttggctgtgtccccacccaaatctcaccttgaattacagttccca

SEQ ID NO: 695316 - DNA, 1354 bp, Homo sapiens
agaccagcctgggcaagatggtgaaaacccatctctaaaaaaaatacaaaaactagccaggcctgtcgcatatgcctgtagtcccagctacctgcgaggctgaggcagaaggatcacttcagcccagcagatagaggctgcagtgagccgaggtcgcaccactgcactccagccccggtgacagattgtgagactctgtctccgaaagaaaacaaaaattaatgtaagtcatatgtgacatgagagacttcagaaatgaagtccaaacaacccaggaaaaactgtctatttttatggacagtcatgctgacgtatgattggaggacgaaagggtatcatttaatggtaataaacaaggagaaacttagcaagggctgctttttcaaattcttcctggcctctgggaatagggcacaaccccactggaatgagggtcttatgaccgactttcaggcaagccagagaattctttttggcccactttaggggaaaagggttagagaaggttagagagtgacctccctgcttctgcagtttcctccatttccttcagcctgaaatattcagtatgccaagatgctgtattttcaggtagcatttcctgcatcccatcatatatacagatcatttttgattatgaagcctacaggacaggaaccatgttttatcacctgtgtgttgcccaaggcctgagcactgcacctggcatacaccgtatctcatatactttattgaggtataatttatccacaataaactgcattcatttaaagtgtgccactgagttcaacttccgtcacaccaaattaaacaaaaaaataggtatctggctgggcatggtggctcacacctgtaatcccagcactttgggaggccgaggcgggcggatcacctgaggtcaggagttcragaccagcctggccaacatggcgaaaccccatctctactaaaagtacaaaaattagccaggtgtggtggcgtccacctgtagtcccagctactcaggaggctgaggcagaagaattgcctcctgcctccggaaggcggaggctgtagtgagccaagatcatgccactgcattccagcctgggtgacagaaggagactccgtctcaaaaaaaaaaaaaaatccaaaaagactaacgtatagttggaatggcaggaaaaagacctactgtttcataattacaacataatgcaagtaagacttttatgaagagtttcaaggaaatgaatcccaggccaaacccacatctgcctttctctgacttagacaatctgctgctagaaagtaagacaagtgatatggtttggctgtgtccccacccaaatctcaccttgaattacagttccca

SEQ ID NO: 695317 - DNA, 1017 bp, Homo sapiens
gacacaaactcttttgaaagtcaacttttatttcttcacttcttattttatcctttttaccattggctactttatgaatgcctatggctttacccatcattgagaaatgacataaamttacatctctaccccagtattatcctctaagtctcaaattggtatagtcagccattaattcttctctccttctaagtgattaaaaagtaatccaaactcagcttgtctcaaattgaacatattttcatcctcttctgtgatggacaggctcctaaggtttttgttaaatagctcaggaaattaaaaggtatctgtgctgaatgcccacccccctcaatatttaatccattaaagctcaattttaccacccatgtatctttcaaatctgtttagttctctctattcccatggtagccacggttatgttcgtaatacaaatctagtcatctgaccaccatccccattccccgcacagcccatgcttaaaatatcaaatgtcatgtcactgttactaggacaaaggtcactaaccttaaaattgtctaaaagataattcatgtgtagacctgccctgtgtgatatggtggctagtaggcatatgtggtaatagaattgggactagtccaaattgagatttgctatgtgtgtatttcagaaactctgtatgaaaaaagaagcatataaaatatcctattaatatttttatactgactatatgccaaaatggtaatattgtacaaatattgggttaaataaaataaattcttaaaattaatttaacctgtttctttttacattttaatctagctaatggaaaatttaaaatgatgtgaatttctggcatggtatttttattagacagggctggtctaaagtagaattatgctcccacatgctttctgttctccaattttactgtacttctttcattgcctataaagtgctacacttgggcttttcatgtactttcttttgtctggagcacttctttttcttcaactctatgcaacgatcttccta

SEQ ID NO: 695318 - DNA, 1017 bp, Homo sapiens
gacacaaactcttttgaaagtcaacttttatttcttcacttcttattttatcctttttaccattggctactttatgaatgcctatggctttacccatcattgagaaatgacataaacttacatctctaccccagtattatcctctaagtctcaaattggtatagtcagccattaattcttctctccttctaagtgattaaaaagtaatccaaactcagcttgtctcaaattgaacatattttcatcctcttctgtgatggacagsctcctaaggtttttgttaaatagctcaggaaattaaaaggtatctgtgctgaatgcccacccccctcaatatttaatccattaaagctcaattttaccacccatgtatctttcaaatctgtttagttctctctattcccatggtagccacggttatgttcgtaatacaaatctagtcatctgaccaccatccccattccccgcacagcccatgcttaaaatatcaaatgtcatgtcactgttactaggacaaaggtcactaaccttaaaattgtctaaaagataattcatgtgtagacctgccctgtgtgatatggtggctagtaggcatatgtggtaatagaattgggactagtccaaattgagatttgctatgtgtgtatttcagaaactctgtatgaaaaaagaagcatataaaatatcctattaatatttttatactgactatatgccaaaatggtaatattgtacaaatattgggttaaataaaataaattcttaaaattaatttaacctgtttctttttacattttaatctagctaatggaaaatttaaaatgatgtgaatttctggcatggtatttttattagacagggctggtctaaagtagaattatgctcccacatgctttctgttctccaattttactgtacttctttcattgcctataaagtgctacacttgggcttttcatgtactttcttttgtctggagcacttctttttcttcaactctatgcaacgatcttccta

SEQ ID NO: 695319 - DNA, 646 bp, Homo sapiens
actgttagtgggaaatgaattcagtcctttgctgagactatatgaaccaacaagatttaaaaaccatttctcttaaccattttaaaataaaattggtctaaatgaaaataattagataatatatttttaatttttaagaaatataatattgagaattgaaaattttattactagatgtttctaaactgaaaactaaatagatttagtaatgtccaaagctatcactccttccacatcttagagatgacttgacatatatccagttcataatgtaatcaatgtatagaggctacctgtcattcaagctgaaaacatccagacagttactatttttgacccttaaataaatgtagaaacaaaagtatacatcaccgctatatggccatccacatatttaatggcagtcatagcctaagtaagcatgcagagaaaaaccttcagatagagcatgaattaaaaatgagacattcacatctacttctgaattttcctcttattagcatggaagtcatgggcaatacctactttttrgggctattataactataaaatgaaataatgtgaaagcactaaagaaacgttagaaatgcagacaatatgaggcattactatttatattctgtgattaaaatatgtcaaatgaaca

SEQ ID NO: 695320 - DNA, 491 bp, Homo sapiens
cagtacatttttccatattgtttcccataagtaattttatttttaagtactttataatcaagtgaaatattacrcatttttccggatgttattaattactagctggatggcattagctcttcgaaaactctgggacatcttttgtgaaattaccatcacaatgcatcattcacatcttagtaacatgagaatattaatgtgtttctgaatgcctcttacctgagaaaccaattattcagaaatacaagctacaaacttaaacacatgacatcggtaccatcgaacgcgtttttttctgggaaaaaaatccatgccattcagatcaaagctggttttaaatgtaaaatcttgagaaataaagagtaatcactagcatgctttccgaatattacctcaactagcataaaatacactgtgatttttgagaatatatgacctgtaagtattcctggaacctaacatcttttcacattctattttctactttttat

SEQ ID NO: 695321 - DNA, 491 bp, Homo sapiens
cagtacatttttccatattgtttcccataagtaattttatttttaagtactttataatcaagtgaaatattacgcatttttcyggatgttattaattactagctggatggcattagctcttcgaaaactctgggacatcttttgtgaaattaccatcacaatgcatcattcacatcttagtaacatgagaatattaatgtgtttctgaatgcctcttacctgagaaaccaattattcagaaatacaagctacaaacttaaacacatgacatcggtaccatcgaacgcgtttttttctgggaaaaaaatccatgccattcagatcaaagctggttttaaatgtaaaatcttgagaaataaagagtaatcactagcatgctttccgaatattacctcaactagcataaaatacactgtgatttttgagaatatatgacctgtaagtattcctggaacctaacatcttttcacattctattttctactttttat

SEQ ID NO: 695322 - DNA, 826 bp, Homo sapiens
tgggttgttgttggatctacttctgttaacagtttttgctcttgattatgggtaacgttttcctgtcctttcatatgtctcataaatttttattgtttgctattgattgtccatgaaagaacaatagtgaatgaagtagataatattcagaaatatcttgtgcttttatctggtagctggagtgaaaacgtatctttctgatctaatggtgagttgagctaaatctggtttgagttaatgattttcagttcacctttggttttaaacgtctcagaggtagcattaggctgcctccacttgcaccctaagactataagatttccttctgtccaattcttctcttggtatccttcaatatcacttattccataaatgtcttgtggagtaaaattagtgaaaatagacgacaaactctgaaatttcttcagattgttagtcgtcataccagaaaatgtatagctattaaaattctacttcctccctttacaagcaaaagttttctgtttaaagatggctaactccttctggatgcacagtcagatttagcaataccccatgcttaaaagtagcctccgttgctctaaaagatatcatctyttactgtagttctttgcatccacagttcttcagtggcttgatgctggcaaggcactggaaaaaagggaatgcttatacaccgatggtaggaatgtaaattagttcagcccctgtgaaaatgagtttggagatttctcagaaaacttaaaactaaactaccatttaacccagcattctcattactgggtatatatccaaaagacaatacattattttaccaaaaagactc

SEQ ID NO: 695323 - DNA, 971 bp, Homo sapiens
ttactgtcacacaacttcgttcttgttcttgttcttgttatactgctgtaagtgatttaccattcctgttcataatctgaaatttatgagaatttattgcctttgatttttatttaagatattaacagtgcatttattattggctatcctaattgatttgtttgttttccaggaggaattttggggaaattaaaacctgcctttctgccaggatcacatcactggaagctccatgactctctttttgtaaaagaaaaaaaaatcacagaaacacccacctcccaaactattctcttttacttcttcccccaagcccacccccaaatataactgttatccagaagctgttatgtcctgtttccatacatgtttttgtacttttactatatctacatacatcaattaaacttatgtcctattgttttgtgaatttatatttgcgtatacattatcrtatgtaaaatttgcatttttttattgaaaattatgtttcttgagatttatccacattgaaacatggagctctaaatcgttaattttaaccgctatagagtattccataatttgaataaagcataatttgtttgtacaatctcccgccaagggaaaattatttccacactcatcatgacaaggagcactgcaaaaataaaaataaaaattacattcatacatgtttgcctgcacccatctgcctgattttctctaaaataaatatctaggagtgaaagtgccaggtcaaagagcatgtgcatcttcttatgcccacatatatgagagttttccccaagtatatctacatcaacgtctatgatgttttaattttctacatccttctctgtattcatttgttttcatgctgctatgaagaaatacccaaaactgggtagtttataaagacaagaagattaattggctcacagttctgcatggctgggaaggtttcataaaacttacaatcatggtggaag

SEQ ID NO: 695324 - DNA, 3018 bp, Homo sapiens
ataaggggctttttccccttttgctcagcacttctccttactgctgccatgtgaagaaggacatgtttgctttgccttctgccatgattgtaagtttcctgaggcctcctcagccctgtggaactgtgagtcaattaaacctctttcctttataaattactcagtctcagatatgtctttattagcaacatgagaatgaactaatacaggaaggaaaaagagagaggcttgrctagcaaaggtggtcttgttatatagatgaagccttacaggtagaattccttagagagaatagatggaaaactcttcagacttaaaggtgtcagactctcaatcactcctaaatctgggaaagtcctagaaagagaaggcctggctgcactaatgaggattctctatgaatacaaattttccccacctcagtctactggccctgcagcagccatttcaaaatatgtcaaggaaatatattttggggtgaaatattttgatttccttcactgcccaatggttgccctctattctgaacaggtagaatccttacttcctctgcaacccccctccacaatgtccgctttgactctctttatcctcctcatccttccaggcccgacctaagtcctgtttggtctggtaagccatcctgagagattctcctttctcggatacttagttttcaaatggccctggagtttgaggtttctggggagtgtgtcttagaggacggggagacagtgggagcagagtccttgcttctcactccagccgacactagagcagccatagtttttctgtttgatgcataggaactctgcttcagaaaagctccccatttctcattttgatgttgtgtaagcaccagggggtggtggtgtcagtagggctcctgaacatcaggttttggatagaggtgttggctcaggccagaaacatgccacaggtgactgatctataaaaatcagaatgctaattcattaatttagcttgggaaatataacaccaagaggaatggaatgccttagtcagcctggctagggcacttgttccctgaaagcaagctaactatctgggaagtcaaatgatctcctgggtatttgttggagaccacagaaacagaaccaggtgtcatttagacttagcaatgtttctgagccaacgtaaatccacacactctaaactagtggtcctcaaatcttagtttagatcacaatcatgttgatttgggtcccactcccagagtgcaacatgtgtgtgtggggtgtgtgtatgtgtttgagaaggataagaatgagcatttataagaagttcccagacgatgctgttgctgttggtctggggtcacactttgagaagcattgctctctttcattatagggaaacatagtgcttgtatgtacaaagccaatatcatcccctctcctctgggtattcctgatggaccttgtcaactttgaactattttttcacgtgatctaagatttactagcttgtaattccattacctttcttcaaacctctacattgagtcaatataatggattattttctcttgaccacgttacaattgcaccttagacctgcatctctgaaattacttccagtccacctatctgcctcagaagagtgttgggtgttctctaactcctttgttgcacacttatacattatctttttttctctctcccactccttccacatacacacacacaccctgagggctaaatcttgcagtatgcatattttactaatttttgtgggaagccatatttcttttggaggagagatgtccaggtttattttccttcatgtttctttaattccattttcccaccacagccagtagccagtaaatgtgaacaatgatgctctttttctgcctatttttgtcatgaggtaataaagtggaagacacttggtagtaatttaccaccgatagtgatttcctgcctaaaaattcaacaagagcgtgagtcacagtgtcatggacatatgaaaataagctgtgacccatatcttgagagtaattggacccaggctaatgaggaccaagtggttgttgtacacagcctaaatgcagtcattgatgctttctgctttgcttctattatcttttaaggcttcctggattgctgactcagctccccagggaatccaggcagaatttaactatgggatccattatgggaatgttggacttgggggactggcgtagatacagctggtgactatattttaagatgagatcaaatactcaaaatattagagaagaatttttatttttcagtttaattgttttaaatggtttcctcgagcccaggctaaaattttatcatatacttacttggcatgtggttttgggtgacattataagatctccagtgtcagtaaatatgataaggcaggtaactaggaccctaggatcctctatttctcactggatgaccttagtttaatgggcatggtatagtagattgggagtggagatttgtaggcattgtagcaaccttttagttaagatgttctgtgcaaatttgtgtttgttccaagcccagacaactaattagctatgattattttatcattttcttgtgttgtgagaagccaagaggctcttcctctttcttcttgtttctaatacactgggtagtcacttccttcttaattcttgctcccatctcttctatcctcactcctgtttcctgccagtctttgtgtttttctactctcattgctcctaaagtgatctgcctgtcatatggcacagaagacaattaagtgaagccagcttggtgggtgacaggtggatactagaaaatcaatcaagttggggtggatttgtactgtgtcaacttggcatgactgaaattgcattcctcagaatttccttccttgcatggttctgagttaaaatgagacacaagagacattttgtgaaagatttggaaggcaaaagtgaagcaacagccaaattatttttatccttgggaggtctatggatggcacctggagcagttgcca

SEQ ID NO: 695325 - DNA, 3018 bp, Homo sapiens
ataaggggctttttccccttttgctcagcacttctccttactgctgccatgtgaagaaggacatgtttgctttgccttctgccatgattgtaagtttcctgaggcctcctcagccctgtggaactgtgagtcaattaaacctctttcctttataaattactcagtctcagatatgtctttattagcaacatgagaatgaactaatacaggaaggaaaaagagagaggcttgactagcaaaggtggtcttgttatatagatgaagccttacaggtagaattccttagagagaatagatggaaaactcttcagacttaaaggtgtcagactctcaatcactcctaaatctgggaaagtcctagaaagagaaggcctggctgcactaatgaggattctctatgaatacaaattttccccacctcagtctactggccctgcagcagccatttcaaaatatgtcaaggaaatatattttggggtgaaatattttgatttccttcactgcccaatggttgccctctattctgaacaggtagaatccttacttcctctgcaacccccctccacaatgtccgctttgactctctttatcctcctcatccttccaggcccgacctaagtcctgtttggtctggtaagccatcctgagagattctcctttctcggatacttagttttcaaatggccctggagtttgaggtttctggggagtgtgtcttagaggacggggagacagtgggagcagagtccttgcttctcactccagccgacactagagcagccatagtttttctgtttgatgcataggaactctgcttcagaaaagctccccatttctcattttgatgttgtgtaagcaccagggggtggtggtgtcagtagggctcctgaacatcaggttttggatagaggtgttggctcaggccagaaacatgccacaggtgactgatctataaaaatcagaatgctaattcattaatttagcttgggaaatataacaccaagaggaatggaatgccttagtcagcctggctagggcacttgttccctgaaagcaagctaactatctgggaagtcaaatgatctcctgggtatttgttggagaccacagaaacagaaccaggtgtcatttagacttagcaatgtttctgagccaacgtaaatccacacactctaaactagtggtcctcaaatcttagtttagatcacaatcatgttgatttgggtcccactcccagagtgcaacatgtgtgtgtggggtgtgtgtatgtgtttgagaaggataagaatgagcatttataagaagttcccagacgatgctgttgctgktggtctggggtcacactttgagaagcattgctctctttcattatagggaaacatagtgcttgtatgtacaaagccaatatcatcccctctcctctgggtattcctgatggaccttgtcaactttgaactattttttcacgtgatctaagatttactagcttgtaattccattacctttcttcaaacctctacattgagtcaatataatggattattttctcttgaccacgttacaattgcaccttagacctgcatctctgaaattacttccagtccacctatctgcctcagaagagtgttgggtgttctctaactcctttgttgcacacttatacattatctttttttctctctcccactccttccacatacacacacacaccctgagggctaaatcttgcagtatgcatattttactaatttttgtgggaagccatatttcttttggaggagagatgtccaggtttattttccttcatgtttctttaattccattttcccaccacagccagtagccagtaaatgtgaacaatgatgctctttttctgcctatttttgtcatgaggtaataaagtggaagacacttggtagtaatttaccaccgatagtgatttcctgcctaaaaattcaacaagagcgtgagtcacagtgtcatggacatatgaaaataagctgtgacccatatcttgagagtaattggacccaggctaatgaggaccaagtggttgttgtacacagcctaaatgcagtcattgatgctttctgctttgcttctattatcttttaaggcttcctggattgctgactcagctccccagggaatccaggcagaatttaactatgggatccattatgggaatgttggacttgggggactggcgtagatacagctggtgactatattttaagatgagatcaaatactcaaaatattagagaagaatttttatttttcagtttaattgttttaaatggtttcctcgagcccaggctaaaattttatcatatacttacttggcatgtggttttgggtgacattataagatctccagtgtcagtaaatatgataaggcaggtaactaggaccctaggatcctctatttctcactggatgaccttagtttaatgggcatggtatagtagattgggagtggagatttgtaggcattgtagcaaccttttagttaagatgttctgtgcaaatttgtgtttgttccaagcccagacaactaattagctatgattattttatcattttcttgtgttgtgagaagccaagaggctcttcctctttcttcttgtttctaatacactgggtagtcacttccttcttaattcttgctcccatctcttctatcctcactcctgtttcctgccagtctttgtgtttttctactctcattgctcctaaagtgatctgcctgtcatatggcacagaagacaattaagtgaagccagcttggtgggtgacaggtggatactagaaaatcaatcaagttggggtggatttgtactgtgtcaacttggcatgactgaaattgcattcctcagaatttccttccttgcatggttctgagttaaaatgagacacaagagacattttgtgaaagatttggaaggcaaaagtgaagcaacagccaaattatttttatccttgggaggtctatggatggcacctggagcagttgcca

SEQ ID NO: 695326 - DNA, 1395 bp, Homo sapiens
aagcatttatcaagcgtatttctttacaaaactcttctagagaattaaacaggaaaattaaactaggggattaaattaatgtgctgtggaacacacttcggaaaatgggtaagggattcagagaaaggcaatatttatgaatataagaaaagtcaacaaaggctttaattgtgaaattttactgggcattaaaatgtgggagaatctagcagaaaagaaggaagtaggcatgtcagatagagaaacaatattggctcagagtcactggaggagaaatgaaagaattaaatcttttttaaaacaaaggggataaatgtcactgtacatgagattggtattttgaaaagtagtagttttgttcattatacaagtaatttttgtggaaatacacataacataatttcagcaccaaaaaagcatttaaaaatatgtttgacaatttatggttttgccrttttggcaatttaaacaaatagagaagaaaggagtaggtggagtaaatgtgcatgcagagaagatagacttcgatgagccatgcagtcaagtatttgccaggatctttgcagccatgccagcctgtgacctctgatgaatggtgctcatgttctgtaagagtgccccaaacagtagctactcctcatatttttctgcacagtaaggctaccatttcatttcatgtttctcattaagctgcctttggccccacttctattggattttgtcatgtgtttgcatctctcctgatctggacatcacctgaatcagttcagcttcggatacttaggggggactgctcagttttgttagcattccaccaaccgttttaagaaaaaaactaaaaactccttgatgaaggcacggtgtgctgactagtgtctgtggaatcaagcactctcatctgctttgggattttaattacctaggggtgctgggtacattcaaatgacctccctcttccatgagctcatcctggcagtacaaagcaagccacccaagaaagccaatcgcagataattgccacgggaacctgaaggcaacaaacctgctcctgtgggactgggctttgcattgacttagcactggtcagtgttccttcattgtggacgcacccagctcaagtggaggtgaagtcaccactgctctgctatggacttcactgttcttttggtagctgaatatgcccataaaaatgataatttttggagaaatgactgggctccccagatgtttttcaatatctatggttaagcatgatataatttccacgctgtaatgtggcagtgaatgctgaccttttttctcttttcttcagaattgtgaaaatttcaggtatgacatatcttgtattttgtctctagaattttcatatttagatttagatgacatttattgaat

SEQ ID NO: 695327 - DNA, 1410 bp, Homo sapiens
tattttatataatatattataaattataaattatatattatatattataaattatatattatataatatatattaattatatttttcatatatatatatataaaggggagtttatttagtattatttagtattaactcacacgatcagaggtcccacaataggccatctgcaggctgaggagcaaggagagccagtccaagctccaaacttgaagaattcagagtccgatgttcaagggcaggaagcattcagcatgggagaaagatgtaggctgggaggctaggccagtctctcttttcacatttttctgcctgcttacattctagccatgctggcagctgattagattgtgcccattcgggttaagggcgggtcttcctttcccagcccactgactcaaatgttaatctcctttggcagcaccctsacagacacacccaggatcaatactttgtatccttcagtccaatcaagttgacactcagtattaaccatcacagtaacgtacaaaaagcaacatatattagtaagatatctgatggctttttaaaaattctaaaactttgtttttaatattactatgggacctttcattaaaaagaaatggcaacatctgattcacccattatcctaaatgtgccatttggtggtccattacttcagacctttgttttttttgagggtaggcacttaagcttaacaattttttatctttaatcaatttttctccccatagatctctgtggtaagaagtgctactttagagacaaaacctgaatcaaaatatgtatcactcatcacgtcataccagccattttccttagaaaaggaggtggtctgtgaagagccgttgtctccagcaacagttccaggcatgcataccgaagacaatccaggaaaagtggaacatacagaagaactttctagtataacagaagtggtgactactgaagaaaatattcctgacgtggtcccgggcagccatctgactccaatagagagagagagttcttcacctttaagtagtaaccagtctgaacctggcagcatcgctttaaactcgtatcactccagaaattgttctgagagtgatcactccagaaatggttttgatactgattccagctgtctggaatcacatagctccttatctgactcagaatttcccccaaataataaaggtgaaataaaaacagaaggacaagagctcataaccgtaataaaagcccccacctcctttggttatgataaaccacatgtgctagtggatctacttgtggatgatagcggtaaagagtccttgattggttatagaccaacagaagattccaaagaattttcatgagatcagctaagttgcaccaactttgaagtctgattttcctggacagttttctgctttaatttca

SEQ ID NO: 695328 - DNA, 653 bp, Homo sapiens
ttttagtagagacggggtttcatcatgttggccaggctggtcttgaactcctgacctcaggcaatctgcctgccttggcctcccaaagtgctgggattacaggcaggagccactgccctggccagaagtgttttatatcatatttgggaaagtttttatttgaatatttgcatttgtgaacaattattaaattgtatatttcaacttgcatttagctgcataatatttaccttaatttaataaacaatagcaaaaattcatctgcttaacatttcccttgatttaataaacaaagaaaaaactaacatcaatcttctgttaaaaatgccatgatcttgcagcaaaccaccatggcacatgtatacctgtgtagcaaacctgcaagttctgcacawgtatcccagaactcaaagtaaaaaaaaaaaaaaaaaaaaaaaaaaaaaaaatgctatgatggctccccatttcatccagtcaaagccaaacaaaataaataataattatcttgacaactctgctctggtatatttactaaaaaacaaaacaaagcaaacaaatctttctccaataagatttaagagaaaattgtttcctttaattacacatgcgggggggaccacttggaagaagaaaaggaagaatcaacaatagca

SEQ ID NO: 695329 - DNA, 615 bp, Homo sapiens
atggctaaatagcttttgccatgatgtaccatttagatcaaagaattaatgaccactgagaagaactttttctgaggaatgtgaaatttaatattaagagtttggggctgctgtttctattacatattccttcatgaaaatgtagaatgtgctaaacattgatttttttcaaccaaaacttttattatgctttctgtttaaaaactgatcattacttttaaacatgtctgggtccatccatactaggagaaaaatgcccaaaatttaactttatttaacctaatcatccattctagaaatgtctcttcttttctctatcaatcttctctcatgtttaatctttatcatctgtcctccattttctcaccaccgaaactctgctgtattctttgaakctggtttagcatcccacaagtctactgcaaaccattatctctaatatcatcagattcaacagacctttttctgctctcaatatctaatcagcagttgatagtttgaggtaattcatattcttttctttggctttcttgaggctactttatctttgggagattaccccactttatattttgtgcaaaaattgtttcctgtttaaaatgtgttggaaacata

SEQ ID NO: 695330 - DNA, 1019 bp, Homo sapiens
tactatccccaatttgccacaaaaacaacgaagctccagtcactctgctccaggtgacactgaacctcctgtgagatggggtggcttcccccaaaccacccagaaacaggctgattgattgagctgaawtcatttttcctcctgactacagggacaagtgcttacaaattgaatgaaattgatgcaccgtctgcaagtggagttattcaattttcagcggccgcattctgagcctttagcatgctcctcacagttttagggcaaataatatttgttttcttcctgcacaaatatgaaaatgtttccggcattctgaaagctcctcttttgggtatttgcactgaattccatttctgtaagcgtttgctgaggctattggtccaaaagccagcagttggctggcgatccttgagtgctgtatgccaggcattttaacatgtttgatctcatttgaccccctacaagaaccctctgaaggggactatttcccctgcttcccagatggggaaaccgggacttggagaaatggcttgcccaaggacacacagccagtcaatactggatctgcctccaaagccaagccctgttgtgggactcctctcaaccatgaggtggtgcaggtccataaaaggcgttggccagctccaacttgagtggatggtgagtcatcagagcccagcttaggcatctgcagaaaacatttatgaatgaatgaatgagtgggtgaataaatagacaactgagggaatctctaggacaaggctcccatctcctcccttccgtgcatcataattctgcttttctgacactgccctgggagccctggacccaagagatcctcccaagtcacatcttcacctcataggccaccatgtggttgtacatcacacagggcccaaacatcaacagccctgtgaggagaaaatggctgaagagctgtctccactcctggaagagctcatttctgtgtgtgctgaagggcactgcctggaacaaccgtgactgtgcagctgccatgg

SEQ ID NO: 695331 - DNA, 1019 bp, Homo sapiens
tactatccccaatttgccacaaaaacaacgaagctccagtcactctgctccaggtgacactgaacctcctgtgagatggggtggcttcccccaaaccacccagaaacaggctgattgattgagctgaattcatttttcctcctgactacagggacaagtgcttacaaattgaatgaaattgatgcaccgtctgcaagtggagttattcaattttcagcggccgcattctgagcctttagcatgctcctcacagttttagggcaaataatatttgttttcttcctgcacaaatatgaaaatgtttccggcattctgaaagctcctcttttgggtatttgcactgaattccatttctgtaagcgtttgctgaggctattggtccaaaagccagcagttggctggcgatccttgagtgctgtatgccaggcattttaacatgtttgatctcatttgaccccctacaagaaccctctgaaggggactatttcmcctgcttcccagatggggaaaccgggacttggagaaatggcttgcccaaggacacacagccagtcaatactggatctgcctccaaagccaagccctgttgtgggactcctctcaaccatgaggtggtgcaggtccataaaaggcgttggccagctccaacttgagtggatggtgagtcatcagagcccagcttaggcatctgcagaaaacatttatgaatgaatgaatgagtgggtgaataaatagacaactgagggaatctctaggacaaggctcccatctcctcccttccgtgcatcataattctgcttttctgacactgccctgggagccctggacccaagagatcctcccaagtcacatcttcacctcataggccaccatgtggttgtacatcacacagggcccaaacatcaacagccctgtgaggagaaaatggctgaagagctgtctccactcctggaagagctcatttctgtgtgtgctgaagggcactgcctggaacaaccgtgactgtgcagctgccatgg

SEQ ID NO: 695332 - DNA, 1056 bp, Homo sapiens
ggttgaaagcagtcaaggaaagccttcatttattcatttgttcattcattttacaaatatttgttaactatgacatgccagatattgggatttgtagaagagagatatacaggtatagaagataaggttttaaattggtcaattaagttctatgtgtttggccttataatatcagatttaagaatcatcttacaggacaccactctctgtcccacgacttcatcaggagagaagggcccagatcctctttacctagaatgacaacgtctgcttttcactccgagcgaaagccctgcccctaactcatctcctagtcctgcaatgttgccatgaaagcaattctggccagcggggaggaggaggaaagagaaagctggcacctgcatcagttaagatgtgttcagctgtaatgaacgggaacagcagcccaagctggcctctgcaatgaggacattgattggatcccataactggaagtcagaagtacagcagactcctgggtagatggatttggagggtcagccttgccatcaaatattcaagagctttctctgtctgttggaaataggatactcactaaccgatttcctctttttccagagcacacaccttccagagcaccagcctcccttgcaggtagatgtggccatgtgactcagttctaactaatagaatgttggtacaagggcatcacctccaagcctggtgtgcagagaccacccacacgcacgtctccattgtgccttccctcatctgccaaccagatccagaggaccccaaggtccaaggggattgcagaaccacccrtctggaggaaggtaatgccctaaattaccacgtgttcggttgccagggctgccataacaaaataccacagactgtgtggtttaaataacacatttcttccctagtggcctggagggtagaagcccaaagatcaaaacgtctgcagtttggttttgccttgtcttgcacatggctaccttctcgctttgtcctcagagtcttttcctctgtgtgtgtatgtccctggtgtctctttgtgtgtcataattt

SEQ ID NO: 695333 - DNA, 630 bp, Homo sapiens
aaatgtgcataatcactgaatctcatgacattttgtagagaagaagatgacagattagttttggttttgtttttggtttttttaaagccaggttatcactatgctgcccaggctggtctcaaactcctgggctcaagtgatcctcctgcctcagcttcccaaagtgctgggattacaggtgtgagccaccttatctggccatgttagttcttaaaaaccttaaccaggtgtaccatgccattgttctctagctgaccccaccttaaatgtccctcatgtcaaatatatttctctttgtaagtacataaaaatcatggaagtctatgyaccaaaaaggttggtaatggaagttgataacggtggttacctctgaggagaaacaggttggccagggagggatgggggctggagggtggaggtgaactgctgttcagggtggatatctataatactggatttttattaaacaagggcctaaacatgcatgactagtgaactttaaaaggagaagaattaatctcacaccttgagtaatttcttgttttttgggggggaagtgatcattattacagctacagttaaaactatacatttaaggatttgacatgcttattgctgaatgtcaagtga

SEQ ID NO: 695334 - DNA, 653 bp, Homo sapiens
gaggtgacacttctggctttctttcctgcccaatgccttgtccagctcaatgcctgctcagagggtgacagtggcacccaaagggaaggaggtacgtctggggaagggatttctgagccctcagaggatggaagatgatacgggacaggtgtgaaagagctgagctgcagaagcaggagttattgccactttaagaaggacccatatcaaactatttacccggtgaccagactgaggaggcattgccccgggatattattatttatttatttatttacattttctttttttttgagacagagtctcactctgtcactcaggctgtactgcaggagtgtaatcatggctcaytgcaacctcaacctcctaggctcaagacatcctcccgcctcagcctcccgagcagctgcccagctaatttttgtaatttttgcagagacgaggtcttgctctgctgcccaggctagtctcgaattcctggtttcaagcgatcctcccacctctgcctcccaagtccctgggattacagatgtgaacaggaaatgcccaagaaagtgaaaatctgtcatctctatgggacagtttgcatgctgggacatctaaatagaaatctttttaccttcaaggattaatgaattaaaaattgagctgta

SEQ ID NO: 695335 - DNA, 653 bp, Homo sapiens
gaggtgacacttctggctttctttcctgcccaatgccttgtccagctcaatgcctgctcagagggtgacagtggcacccaaagggaaggaggtacgtctggggaagggatttctgagccctcagaggatggaagatgatacgggacaggtgtgaaagagctgagctgcagaagcaggagttattgccactttaagaaggacccatatcaaactatttacccggtgaccagactgaggaggcattgccccgggatattattatttatttatttatttacattttctttttttttgagacagagtctcactctgtcactcaggctgtactgcaggagtgtaatcatggctcattgcaacctcaacctcctaggctcaagacatcctcccgcctcagcctcccgagcagctgcccagctaatttttgtaatttttgcagagacraggtcttgctctgctgcccaggctagtctcgaattcctggtttcaagcgatcctcccacctctgcctcccaagtccctgggattacagatgtgaacaggaaatgcccaagaaagtgaaaatctgtcatctctatgggacagtttgcatgctgggacatctaaatagaaatctttttaccttcaaggattaatgaattaaaaattgagctgta

SEQ ID NO: 695336 - DNA, 1226 bp, Homo sapiens
cataaatgcttcctctttcccactcatctccggaaccctcaaattaaccagtctataaaaccatttgttatctatatattttcttgcttgatagtattcatttttatctttcatttagatgaatttcatggttttttgtttttgagacggagtctcgctctgttgcccaggctggagtgcaatggtgtgatctcagctcactgcaacctctgcctcctaggttcaagtgattctccttgcctcagcctcccaagtagctgggattacaggctcctgccaccacaaccagttaattttttgtatttttagtggagacggggtctcaccgtgttggccaggctggtctcaaactcctggccttgggatccgcccgcctcggcctcccaaagtgctgggattacaggtgtgagccaccgtgtctggctgaatttcatgtttttaatcccccatttttgctatttttttttaaacgttcatacctctttgcaacacttgtcttccacatgagtcagatattgattagattttggttttttgttttgccgaacaacatgttcttgtcctttaaccaattttcttaaatatatttcctattaatgattaacacattctttggttgggacttaaagccttttattttagtgatttattcctatttttaatcttttcatattttgcattatttttcagaagtatttttgttaagggattctgtttcttcataacatttggatgatttgagagtgttagaagtgtctctgttaccatggctctgtccttcaagttccactttctttgtgtttccaaatgtatcattaatttggtttgaatttatttatgtctaataaagtatggtttatgtactcatcttttctaaatgcaaaaggacctgtttaccagtaaccatgtattttaattattacctatagattctgacaattgtatataatgaatgcagtttccattgtgtttctgtttcttttagtaattcttaaactatgataggtaatttatatatatacttttaatgaataaggcgaaaaaaatgtttttcctttaacatttaagcatataaatgaggctaacatgtctaaagtactggcattgttaattccttcatagttcagccaaatcttggtctttatgtaaaggccctacatgatgattcccaaaccctgattttgctaattcttcatttatttyaaaggctatcacaaattatttta

SEQ ID NO: 695337 - DNA, 1012 bp, Homo sapiens
tttttttttttaattagaagaaagaatgtaattcttctagtgtctgtatttgcatggatagttgaattacttatagaacatgtttgactagtaaaacctttactttgccctctatgacctcacccatatgtacagaggaaaacatcatccttgtcctcaatagtttcacttctgtttgcccctgatatgcttaatatctgctctgagacagtcccactccccactaccaatactaaacataataccaacggagcataaatagtggaggaaaatcatctaggacacaacctgatctctctttgattctaaactatattcttactgtatgactggtttaaaatggcagaagtacatacatgcacgcacacatgcacatacaatatatgtatgtgtttatgtacgtatgcatacacacacatgtgcatatatttttaacctggactcactcatgattctatggccagataacaactgtgtaagaaattatttggagacgaaaaacagtggcactactccccaacttacctccttcccatcctttatgtcgactctttatggcattagcaattaaaatatcaccttaagctttttaacttaggtttagtgataatggttgtgttattaatagaatgtagtctttttttctattggttttgattcttcttgcttcctcattcttgtcttttttaaggtgcatgatttgtataagagggacactttaggcatacagtaataaagctttgtggcatttctttatggatttttacaaccagattwtctttttaatgaatttacatattctgtttataggaacgagtgaagtctgtatttcatgccagagagtttggaaaaataattaacttcaagaccccagaggatgccagggtaaatataataaatcttttatttaaataggagctgctcacttcaaaatcatgtaagtggactattttttaatgcagataagttttgtttgggggtttttgtttgtttgttttgcttttgtgttttg

SEQ ID NO: 695338 - DNA, 3343 bp, Homo sapiens
gcacaaatgtattttttccaaactgttctaagaattttgaaaaacttatgaaaatgccaagctctgcccgagatccctattaatgtcattcaaataaatttttattttattgaaactctgcattaaaagaaatgtatgacttggcacttactcggaggcatacagtacaatcatagtatccaaaaatgcccaaatttttcaatttcatgaaacttgagagttaattacccaggcactgcaagataagtgctaatataaacacaaagacagatttcaatgctttagtattactttagaaaataaagttgtttttaaagcgttcttacttctgggcagaactgatgaaagttctgtttctgttaagagggagatgaacttctaccctgaagaagaaaatgtatccagttagtttcaaaaccaccatagttcattatatctgggggagttgttgatactgagaattcttttaagcttctgctattaaaaagttttacaaccttatgctttcttaattttttcagaagcattgtaacaagttataaccttgagctaggactatgaaattggaaaaagtccaagcaaatcttttaaaatctataatttcagagaaaatatttacagttttaagtactgggaagaattctctgagaccaagagacattgtaaagagggaaatattcagctaacaagaaatttctaaatcggctaattcacgcaccccaaaggaaataggtctggaggcagagggtctgtggcatcaaagccacagatcttttaactttggtgtcaatgctgtattgacacacaaagatcaggccaccaaatgatcgtgtgacataaatgaaaacccacccacctgttttgctactttaaggttaccattctgcatgtaaccacatcctggctctatcacccaccagctatgccacttggggatgttatttaacctctgtgtctcggttctgtcatccctaaaatggcaataataacagtgtgtacctcacagaattgaattaatatctgtaaagtgttgaacatgtctggcacaaagtctgtgttagataaactgcaatttacacaactcctgccacccaactccgtgacaagcctgtagcgcagataatccagccaaattagcatcaagtgtagccaccatgccgatgagggtgttcagggggctcccgcgtgagaatgaaaagaaatgatccggaatgactccaagtggatgcaccacagcgaagcacacattaaaatcagccagagtatcttggctctgggctgccctgaggctacacgggcaaatgctttgtttgtcctgaggctttagttgtctctgggaggttcatcccaatgcagaccagtgaactatattcagagtcctgccttaacattagagtagagtgaaatagaaagagcaactagtacttgctgagctctgacacaggctagacactaggtcagatgtctctgcatcatgatgtaggatgattatctgcttttaacggtagagaatattttgccatcatgaagctattaggttttgcaaggtaggaggaggttatagaactcacacccagatccctgattgcaatttatgggctttctcctacacagccctctctcttgttcataaaacctaatatagagtacttcaaagagaatggggaaacttattcaattctttaattcaaccaaataatgaatcagacaatcaggagttactaaatttgcgcaaagttccctgttaaaagctggacctgcaaaaaaagatagactgactgtcctcccggaactttaaaagcagtaggaaaaggttttggagaaggaatcagtatatgtagccagtgggaggataattttagtacaaccattttgaaacacaaaatagcatcacatcctagaaatgttgaacatgcatagagaacgagccaatccactcctaggtatatcttctagagttggaactcttgcacatgtacacccatattgtcatgtcaaaagaactcgatatattctacattagaatattacacaacagtgaaattgacagcagtgatggattgcaacattaaagctgtatggatgcatctcaaaagcaaaatactgcgagaaagaaagcaaatcacaaaatcgtccacatgcagattaactataaaagaaagcaaggaaattataaccacaaaattcaggatggtggttcatccaggagggaggaggtgtggtcagggagggctccatgcagtacagctaatccctttcttaagctcggagtcaaagacaaaagtgctcattttatgattctttaaactgtgcattcaatttaaagctttttgcatatatgatatatttatcaaataaagtattatttaaaaaaacaggtagaaaagtcaagtttactccattaaatgccaaaagcaaaatagtcatatatacaagtggccacaaaataagataaaacaagtggttaagctgagatttctgggtgcctatgtcccagatcttatgccgggctttcacatctaaaatcttatttaaaataacagagaggttatatggggtttcagagaaaagggagatgacacctggttgggagaacagtctcccgggaagggttgctctttgacttttggcggtaaggcagagtaatgtgtgtaagtagtattaatagcagggagatgcagcatctcaggtaaaacaaaaaagcaagatgtggaaaacaggcatcaaagggaccttgcacatatcaaagaaacaccaagcaacaccgagaaaaaccatttgggacctttatcttaactgtgtgtcactagaggtaaaggttactacaaactagttttcaaatctgaaattctgttaagaatctaaatgatacctaatagccaatgaaattcctttttttttttttttttttttttttgagacggggtctggctctgtcgcccaggctggagtgcagtagcgtgaacttggctcacggcaacctctgcctccgaggctcgagcaatcctcccacctcagcttcctgaacagctgggactacaggagygcaccagcacacccagcttatttttgtattttttgtatattttttatagagacagaattttgccatgttgcccaggctggtctcaaactcctgagctcaagccatcagcccgccttggtctcccaaagtgagccactgcacctggccctgatctgttaatttattcataacttaacatgacatgaaaaggatatttaaagccagacttatttttgcatttccgaatttcatcagtaaatcatataatcgtgaacaccagcttactccaccatcaaaagggaaagttctgactttcca

SEQ ID NO: 695339 - DNA, 2030 bp, Homo sapiens
cacagatttacaattcttcactgagctaactcctacttactcttcagacctcagcttagaggtctgggaaggcttttcctaattattcaaaagcctttctgcataccacctcctctgtgttcccacttaaaacttcccctaacagaacacttatcatgctattattagacttggcaggttagttgtctgactctctcatttaaaggtaatgggaaaacaggaacccttctgcctttttcacagttgtattctagtacttaggacaatacttagcacatataacacttatatttattgaaagaacaataaatacttgctaatttggctttatctgccattctagacagcaatttttactctataaataactctaaacataatattatgaaccttttattgagcacaaaataaatgctcaataaatactggtttaataacatgataaatgaacaataaacaaggtttcatctcatgcatggagttcccctatatcctacttaaaattaactccaggtcactcaaattttgacatgaatacctaaaaatgacaagatttcaattgtatttcccattatttattaagatgtaaaggcttcttattcttttaaataaaaagaaagagctctcccacctaaatcatgtaaacctatatatttttgcagtttaagagtttaaaaaggagctttcaaagttagaagaccaaaagattggtccaaagaatgasaaaacacccacaattaacatgctcaaaagaatgttattgtttacagagaaatggaaaagcacacctttaagcagcacaagtgaacctgaggtaggggatagaggctaacggctgtccacaaaaataaaatgttctacacttgtccatttaactagaattatgtcaagagtccacaactcatagcatcttcaaattcattcattcaactttttccctccttggtaaggaagcaaaataaaatattttggaaagacatggagagacatgggactgatttattttatatagcagcaaatgggagttttttaggaaacctgcattacttcttatgggaaagcaaaagactttacgtgtaatttacattctaggaaaacaagagtttagagcaaagaactgaaaattcctgtttacccaatccacaatataaaccataattgggattacagctctcttgtacaacacttcaactcaccatatgcataaactgcaaaattcttcaccaaagtctcacagttaaaaggcaggatagggaagaggggatttaaaagtctcaaaagtactaagatataatggtaaacgtcaaatggtaaatgaccaaacattatctgaaaagttttaaatgccacacaaacactaccaaaaaaaaaaaaaaagatttactcgtgaatatttgcttaaattgcctttcttgccaaggaactccaaacatgtcatacacaacttaagtattcccaagatatactttacttttcatttcccatgcaaactggcaattttaaaaaaaaggctatttaattaccagtgtaaagcaaaagagaaaatataactgctacatacactaagatgactacaatattcaatatagtattttcaaagaaaaaaagattttcagaccttttaaactaaaaactgttaattaaatttaactactacttttttgtacatataaagccacatatttcttcactaagtctatctcattataaatcctttccattactcactctatttaaactatcggaaactgtcagaaaaaaaacaaaaataaatgcgctctcaataacaagactaggagtgtgtggtctcaaggtatcttatatttgagtatcagtcagtatttagtaagttgccatgattataaaacaactggcgtttcttacatttatatggtccatttctgagactttaaaagacctctatgttcaactatttatctaccattctgacagtttggtttattaaatagaacttttataatttgggttttaaaaatataatctcattatctctgtattacattttaaaa

SEQ ID NO: 695340 - DNA, 1146 bp, Homo sapiens
cctaacaaatggtattttgtgaaagaaaaatatgtaatgtaagtgattctcattctatccaatctggtttccctgttaatttattttattgtttagacatattattttcagtttacattaaatgtaggaaatatatttgtaactctcttttattttgtaaatcttttagaaattagtcttgacaaacaaccagttgaccactcttcccagaggcattggtcaccttactaatctcacacatctgggccttggagagaacctacttactcaccttcctgaagaaattggtatgaaccctgtgaatgcttgactctgtactaataatttgctcttgtgcattcaagcaatatttcagataaatatgacaaatctattgttttttaaactgaggttatatcaggcttaagatttttttttttaatagagcaccgatggttgattgttgattggttttggttaggtttcctaaaggctgttaggattggttttaaaattagtactgtatttgagaatgttttggaatacttacatttccaataggttttatgtataacctcattttagaagttattttatattccttctaaatttaaaattacacaggcttgaattagtaatgttttatgccaaaagaacatttatgagattttagaattaatattaatatttaaccaatattaacatttgggaatacttaacattttccaggtgttttcatttccattattttatgtaatatacatgaccacctggaattttagacagtgcaagttgtaatcttgctttataaagagaattacttgattaaggtaattaaatgttagcttttaaattagtaattctatgcattaatgttttcccatctatagtgcactgtcccacaggaactataggttagtaaacaccgcatgttctcctcataggtgggaattgaacaatgagaacacttggatacagggtggggaacatcacacaccggggcctgtcgtggggtagcgggaggggggaaggatagcattaggagatatacytaatgtaaatgactagttaacgggtgcagcacaccaccatggcacatgtatacatatgtaacaaacctgcacgttgtgtacatgtaccctagaacttaaagtataataaaaaaaa

SEQ ID NO: 695341 - DNA, 657 bp, Homo sapiens
tgtctgggaacaagaccgccactgcaaagtcagcatcgtgctggtgagcctgtcaaggcaacagaagggaggcatgtcggccagagacagtgcaccttccagtccatcccgctgtcagctcacctcataaggcatggggcagtcacacggcgcctggccatcaatgactagrttgccaatgacgctgctgcatggattaagacacaaatgtgctctcacagcatcctcctgtctgctccacctgggagatgggcttgggggagacttttgtaaccattttcagaggaagaagcaagaggctcagtgaactgctcaggctcattcagttctcaagcggagaggctgagactggagctcagctatcccagctctggttcagtgacctcaggccaccctgatgcccttcagtcactcctgcctgcttgtttgcagacaaaggtgagtctcaccaaggagagagtgggactcactccacctgccaccctcccccacacgccttaagtctcttgtataaatgagttcacatggatggggtccatgaccccacaggctttaaactaatagggcccccacccctccccatgctcctcactggatgctaaacacatgcctacagccactccacaggcactgcccctcagagttccctaagtgcaa

SEQ ID NO: 695342 - DNA, 657 bp, Homo sapiens
tgtctgggaacaagaccgccactgcaaagtcagcatcgtgctggtgagcctgtcaaggcaacagaagggaggcatgtcggccagagacagtgcaccttccagtccatcccgctgtcagctcacctcataaggcatggggcagtcacacggcgcctggccatcaatgactaggttgccaatgacgctgctgcatggattaagacacaaatgtgctctcacagcatcctcctgtctgctccacctgggagatgggcttgggggagacttttgtaaccattttcagaggaagaagcaagaggctcagtgaactgctcaggctcattcagttctcaagcggagaggctgagactggagctcagctatcccagctctggttcagtgacctcaggccaccctgatgcccttcagtcactcctgcctgcttgtttgcagacaaaggtgagtctcaccaaggagagagtgggactcactccacctgccaccctcccccacacgccttaagtctcttgtataaatgarttcacatggatggggtccatgaccccacaggctttaaactaatagggcccccacccctccccatgctcctcactggatgctaaacacatgcctacagccactccacaggcactgcccctcagagttccctaagtgcaa

SEQ ID NO: 695343 - DNA, 1844 bp, Homo sapiens
tatttaactgaactgaacttctgtaagagacttagaggaaggtataaaagaatgagtcctgaaaaaggccatttctgacaaagcaaggactgaccaatagatctccaattccaaggctagaagagaaaaaagtatcctactatgataagaggggaccaagtagagataaagacccacatacgtgccaggtttggtcgctcaagcctgtagtcccagcagtttgggaggccaagaggggcagattgcttgagccaaggagtttgagaccagcctgggcaacatggtgaaaccccatctctacaaaaaataaaaaattagctgggccaggcacgggctcatggctgtaatcccacactttgggaggcagaggtgggtggatcatttgaggccaggagttcaagaccagcctggccaacatggtgaaaccccatctctactaaaaatacaaaaattagccgggcatggtggtgcgtgcctgtagccccagctacttgggaggctgaggtgagaggactgcctgagcctgggaggtcaaggcttcagtgagccatcatcacaccactgtactccagcctgggtgatagagtgagaccctatctcaacaaaaaaaaaaaaaaaaaaaaaaagaccttcatatgagtctttcaaatagatgactaggtcatcaagtttgtaagtcttctgtagggggttttgaaggcagtacagtgtttctttcatctttctggaatgatttagagtatgctccagggcaaggtgagctctagggcaacctctcctgctaaccatgcatagatgtgcctatgaagtcacaatttaaattgccagagttaagcagacgtaagtacctcaaatggaaaaagcattttttctcctaaaatgaggtagtgcatatctgagagcagacttacattctacatctgtcactagttagtatacttacccacagttaacaacggaagtgtgtgttttggggcgatgggggtgtatgctcaaattctggcaaaccagatactagataccaaaagccaagactcacatgctgaaactcacacttcaccttttctgtccatgtgataaaaacagcaggaaacaaaatcaaacataaaggatgaattcaactactgtgaagggcagactgtcaaaagattaagattcaactaaaacttctctttggaggaacagagctaaactgggtgaaactattggacattcctactcctccttggcctgcctttggtgttcatgccccattagtggcttggcttagggcttggtactacacagaggagctttgcaatccatgtacgtgctcaccaccattctccaagaaggccccgtggggcactatgtgttacttttcagggtttgtaaaaacaacgtaaatgatcccaagaactgtggtatggaagatcctsgtaaactattgcggtatcaatgagaaaaactaaactatgttgtttttcctagttctgagtagtggttaaatgactaagaaccagggaaaggagctggaaacaaaggagaaattaagaaaagggagccttcggtaagagccatgaaaatctatgaatggtaatactgccaaaacaaaaacactcaaaggtctacagagtccctgaaatcatttaaatgtattaatatgtaatggtgggtcccagtgttggaaataaacccaaggagcacgactttctttgcaggagcacctgggtgcaaggttaccttctatgtttcttacgtacagtatcttctaacagcagagaacctccaaagaagggcagtagtggggagaaggcgaaattctgtgctcctctctgaactttctgcttgaaataactggtgca

SEQ ID NO: 695344 - DNA, 636 bp, Homo sapiens
ttgctaccataattgcattcttccctgttccacactggaatagggaagaggtaactgtgggttgagaccttagattcaagtcagtaattgattttggyttgatttttgtatatggtgagagatgggggtctagcttcacccttctgcataaccagttttcccagcaccatttattgaagggtctgtctttctcccaatgtatgttcttggcacctttgtggaaaataagttcacaataggtgtgtggatttgtttttgggttctctattctgttccattggtctatatgtctgtttttatgctagtaccaagctgttttgtttactataagctctagtttgcaaattttttatttgtgcattaccgtactttgcactgtgattaagtttttcatgcaaggctgtaaacttcttgaaggcagagacaatgatttatatatacctatatccttccatgatatatggttaaatctgcagggaatacacccagtgggttctggatgaaggcaactataaaggatttgtgggtatacccaggtttcttttcaaattaattatcaaactcctcaggtagaggccacttaagttcgtgtggtgcttttaaaaacagccattaatttgtctgtgaggttggaaa

SEQ ID NO: 695345 - DNA, 1792 bp, Homo sapiens
caagttgggacttgaggggagtggagaaaaacagtgcaagagtttcctaaaagcttacccagttcatgcattcactcattcattcatttgtacattcattcatttggtaattcactcaatagcctcctactgaacccatttaccagaaataagtcctgcctcaagatgatagcatatgcctttcttatgccttcctgggcattttcttgaattacttttttgtggttgtttttaatgtgtaaatatacatccccaataactcagactcattaatttatgtttgtaataattgttgaaataagtttgacagaaggtgacctttctgaatttgcaaagaaagtgattgccaggcaaatttaaacataagtccattgtggggaagatgttgtgtccaaagccacacacttttcaacgagctttaagcactttctccatagtgttgagggcacaactgtggagtcagaccttccccagtatgatcctgggtcagctacttcccagcagggtgacttaggattgtctccttgtctctttaattctcctttccctgactgtaaagtgcaaataatatgacccaccttgcaggctgcttgtgagggtccatgagatattatgaagcttctagcacagtgcttggcaggrcactgatgggagctcttacctttattattaattcattcaaagggagatttactgatactctctttagtgctgtaagagatgtgacgatatcaaagctagtgcctgtcctcttggagaatgtaactctttggggaagctaggacagatgcagattattactatgtaagatgggaagtaataaaagacctgggaaaacaagtgaatggcagacgcaggtcagaaaggagaccaatccctccagcttgggcatgcttgctggcatgcgggtgccccagggactcgagatcctgttgctgaatgatcagatggtggcatctggggtggacactgaaggacgaggctggctgtgtgtgtgacagcagacctttctccctgctgcctgtgctgtgctttcatactgcagacacccagcaagtgagcgctgagttagattccagagagagagttcaagaaaatgcatagcagcagacaaacccctctatcgttaatagcaaagatttcttatttgttcatttgcaagatcctttgtcaaattcttctggccttgggccctttgatcacttctgtgtcctgtgcacttaagtctggtggattccttcttgcccctcagcactcagctctggcagccgtgcctcccccgagtccggtctgaccgttccctgcagctttacctggttctctgtgagcctgagcacttgggctgctccatctttcaacagccccaggagttggtctgagtcatcttggacctcctagctcaataaatgtgtaaacttgccatagcccagatcttgctctgatttatcagcatttagccattagtccaaatacgtgaggcttttcaaaaaatacagaaacagccgggcgcggtggctcacgcctgtaatcccagcactttgggaggccgaggtgggcggatcactaggtcaggagatcaagaccatcctaacatggtgaaaccccgtctctactaaaaatacaaaaaaaattagccgggcgtggtggtggtcacctgtagtcccagctactcaggaggctgaggcaggagaatggcgtgaacccgggaggcagagcttgcaatgagctgagatagcaccactgcagtccagcctgggccaaagacccagactttgtcaaaaaaaaaaaaaaa

SEQ ID NO: 695346 - DNA, 1792 bp, Homo sapiens
caagttgggacttgaggggagtggagaaaaacagtgcaagagtttcctaaaagcttacccagttcatgcattcactcattcattcatttgtacattcattcatttggtaattcactcaatagcctcctactgaacccatttaccagaaataagtcctgcctcaagatgatagcatatgcctttcttatgccttcctgggcattttcttgaattacttttttgtggttgtttttaatgtgtaaatatacatccccaataactcagactcattaatttatgtttgtaataattgttgaaataagtttgacagaaggtgacctttctgaatttgcaaagaaagtgattgccaggcaaatttaaacataagtccattgtggggaagatgttgtgtccaaagccacacacttttcaacgagctttaagcactttctccatagtgttgagggcacaactgtggagtcagaccttccccagtatgatcctgggtcagctacttcccagcagggtgacttaggattgtctccttgtctctttaattctcctttccctgactgtaaagtgcaaataatatgacccaccttgcaggctgcttgtgagggtccatgagatattatgaagcttctagcacagtgcttggcagggcactgatgggagctcttacctttattattaattcattcaaagggagatttactgatactctctttagtgctgtaagagatgtgacgatatcaaagctagtgcctgtcctcttggagaatgtaactctttggggaagctaggacagatgcagattattactatgtaagatgggaagtaataaaagacctgggaaaacaagtgaatggcagacgcaggtcagaaaggagaccaatccctccagcttgggcatgcttgctggcatgcgggtgccccagggactcgagatcctgttgctgaatgatcagatggtggcatctggggtggacactgaaggacgaggctggctgtgtgtgtgacagcagacctttctccctgctgcctgtgctgtgctttcatactgcagacacccagcaagtgagcgctgagttagattccagagagagagttcaagaaaatgcatagcagcagacaaacccctctatcgttaatagcaaagatttcttatttgttcatttgcaagatcctttgtcaaattcttctggccttgggccctttgatcacttctgtgtcctgtgcacttaagtctggtggattccttcttgcccctcagcactcagctctggcagccgtgcctcccccgagtccggtctgaccgttccctgcagctttacctggttctctgtgagcctgagcacttgggctgctccatctttcaacagccccaggagttggtctgagtcatcttggacctcctagctcaataaatgtgtaaacttgccatagcccagatcttgctctgatttatcagcatttagccattagtccaaatacgtgaggcttttcaaaaaatacagaaacagccgggcgcggtggctcacgcctgtaatcccagcactttgggaggccgaggtgggcggatcactaggtcaggagatcaagaccatcctaacatggtgaaaccccgtctctactaaaaatacaaaaaaaattagccgggcgtggtggtggtcacctgtagtcccagctactcrggaggctgaggcaggagaatggcgtgaacccgggaggcagagcttgcaatgagctgagatagcaccactgcagtccagcctgggccaaagacccagactttgtcaaaaaaaaaaaaaaa

SEQ ID NO: 695347 - DNA, 587 bp, Homo sapiens
gaaggctgctgctgctagcgcatccgctttcaaactacatctgagcactccacaccttcttctaggaggttccccagattgctgctagcgcatctgctttcaaattacttctgagcactactcaacttattctagcaggtcccccaccttttctgccttcctaaggcattttccttggctaagaagtctccrtggatcaatgtgatcctaaggcctcgcgctgacacagggaaggactcggagagccccgagtcaagaccatcctagagattctcttccccgatgcctttcctcctcactatggcaaaccacttcccttcactgacccacgagagagaacttcctgattcaggagggacaggaagagagtggagatggggacagttcattttcttaacccctggaatgatgggagttgacagaggaaaggcgccttcccttcctttccagcagcacaaaaccaggtctgcactgggaagatttggtttaagctatgaacgtggacttctccatcatctaagtgatgaatctgtctttcacaggattcttctataaagccttcatagccagaagtgatttcgaggtcc

SEQ ID NO: 695348 - DNA, 587 bp, Homo sapiens
gaaggctgctgctgctagcgcatccgctttcaaactacatctgagcactccacaccttcttctaggaggttccccagattgctgctagcgcatctgctttcaaattacttctgagcactactcaacttattctagcaggtcccccaccttttctgccttcctaaggcattttccttggctaagaagtctccatggatcaatgtgatcctaaggcctcgcgctgacacagggaaggactcggagagccccgagtcaagwccatcctagagattctcttccccgatgcctttcctcctcactatggcaaaccacttcccttcactgacccacgagagagaacttcctgattcaggagggacaggaagagagtggagatggggacagttcattttcttaacccctggaatgatgggagttgacagaggaaaggcgccttcccttcctttccagcagcacaaaaccaggtctgcactgggaagatttggtttaagctatgaacgtggacttctccatcatctaagtgatgaatctgtctttcacaggattcttctataaagccttcatagccagaagtgatttcgaggtcc

SEQ ID NO: 695349 - DNA, 587 bp, Homo sapiens
gaaggctgctgctgctagcgcatccgctttcaaactacatctgagcactccacaccttcttctaggaggttccccagattgctgctagcgcatctgctttcaaattacttctgagcactactcaacttattctagcaggtcccccaccttttctgccttcctaaggcattttccttggctaagaagtctccatggatcaatgtgatcctaaggcctcgcgctgacacagggaaggactcggagagccccgagtcaagaccatcctagagattctcttccccratgcctttcctcctcactatggcaaaccacttcccttcactgacccacgagagagaacttcctgattcaggagggacaggaagagagtggagatggggacagttcattttcttaacccctggaatgatgggagttgacagaggaaaggcgccttcccttcctttccagcagcacaaaaccaggtctgcactgggaagatttggtttaagctatgaacgtggacttctccatcatctaagtgatgaatctgtctttcacaggattcttctataaagccttcatagccagaagtgatttcgaggtcc

SEQ ID NO: 695350 - DNA, 606 bp, Homo sapiens
aaaaaaaatatatatattgtctgattgcctgagtctgaatcccagctctgcccacactagttgtctgatcttgggcaagttcctcagtttcctcatatgtwaaacagggatgataacactatggcttaggcactatcatgaggatgaaatcaattaaatgctagtaaagcacttagaacagtgcctggtacacagtaagtgctatttaagtgcttattttccaggttaaaaatgagacaggaagaagacagacaattttaacatcattttgactaatccacttattctaccctccctaaataatccttttacactatacgtaatgaactgaattgagttacaattcatctccctaccactgcctgtcttccaggaaaggtaataccagcatgttaaagccaggaatagagtggagagggtagagatgcacaaggtctgaagttctaaagaaaaacaaagccgaacctaaatagtcctcaaatatctgtgtttgctctaagcctaatctgaaaactgctggatactgtaagtcctgtctttgaggaaataatacaggaagagaaaaaaaatggtttatatcacaatgcttacctgaaggatagtttt

SEQ ID NO: 695351 - DNA, 633 bp, Homo sapiens
tgtgtgtgtgtgtgtgtgtgtgtrtgttatacgctacatacatagtaagacatctggtaatgtttgtgagccaaataattttctatcatttgtttagtttagatcttttaaactcttatttttattttatttgatagcaaatcaattttccaataaaataattttgcctttggggtattataatgaaaaagcaatttaaaacatatttctataactactgaaaagtactttcacactagatatgcagtaactaaatgaagaaatattcacacgagttgcacttcctttcttgttatcaaaaaaacaatgagccttaatttacatatttctccatcaaccccttaagcccttattaaggtcaaagcttgaatataatatatttgttattctacagaattttatattttgaattttaaagtactatttagtgctccgatttcactttctatattaaaaaaatataaatgacatcaatgaagactttttaaatgaatttccttatattcttcagtgacctttttaaataaactgtccctgctttcctctgaacttcaatacatctttggcctgtcattgtcattcttaatcattgatgtctcaattcaatctctgacaacaaccacgatgaagctc

SEQ ID NO: 695352 - DNA, 633 bp, Homo sapiens
tgtgtgtgtgtgtgtgtgtgtgtgtgttatacgctacatacatagtaagacatctggtaatgtttgtgagccaaataawtttctatcatttgtttagtttagatcttttaaactcttatttttattttatttgatagcaaatcaattttccaataaaataattttgcctttggggtattataatgaaaaagcaatttaaaacatatttctataactactgaaaagtactttcacactagatatgcagtaactaaatgaagaaatattcacacgagttgcacttcctttcttgttatcaaaaaaacaatgagccttaatttacatatttctccatcaaccccttaagcccttattaaggtcaaagcttgaatataatatatttgttattctacagaattttatattttgaattttaaagtactatttagtgctccgatttcactttctatattaaaaaaatataaatgacatcaatgaagactttttaaatgaatttccttatattcttcagtgacctttttaaataaactgtccctgctttcctctgaacttcaatacatctttggcctgtcattgtcattcttaatcattgatgtctcaattcaatctctgacaacaaccacgatgaagctc

SEQ ID NO: 695353 - DNA, 2514 bp, Homo sapiens
caggctgaccacctgaggccaaggagcagctggctgctttggacagggcacaggctctccagccagccacagcccctgctgtgccctgtggccacttgactctgcaaacccacattggatcccaccaacaaatgaagacactaagctgaaagcaatcagagggattttccaaggtcatgcagcatggttcagtggaaagagaacataatttggagttcagacaagcctgcgtttaaatcctaaatctaccatttattagcttagtgatgttgagccagacacttaaatctccctaagccttacttttcttacctaataaaatggaactaataccccctacctcatgtgttattgtgacaagagaacctaagtgttcttacttgggttcccctgaaagcagaacctgagataaagacttaggacaggtggtttctttggaaggtgaccgtgggacatgcaaatgatggcgtataaagagcaggacaaggaagggaaggaagaacgaatgtgttaaaaactagttaataccctgggcaactggggcccgatcttgctggggatatgagggaccatggagaacatgtctcacagttgtctgctgaaggacagagaagctaggggatctgctccccggctcccttgcccatgagtgagggcagcccaagtagtgtcaactcccagtgcttcagggttgcacctgtgtacggataggcagccttctcctgctctgaagttggaggcagcaaagtcaagagagataaaattatttaaataaaacagtgagagagagaatggggcacatttgatgaggcatgctagcaatgatgggtgaaaccatccaccacagctgcactgaaaacaagcaggctgagatctggcttggggcatctggagagtccactatgagtaatcgagacaacactagagatcatactgagcctagtgcactgtttgacacaaagtagccatttatcccacaaatatttactgggcacctactattggtcatgtactattctagggctaggatacagaagtgaacagagttcttgccctcaaggatcttacattcttagtggacacagataatatgaaaataaataaatacgtatgtaggagtatgtttaaaatgaggttctgactgagaagctacaatacaatagatctatacttcttttttttttagacggagtcttgctcttgtcacccaggctggagtacagtggcatgatctcagctcactgcaacctccgcctcccgggttcaagccattctcctgcctcagcctcctgagtagctgggattacaggcacccaccaccacacctggctaatttttgtacttttagtagagatggggttttgctatgttggccaggctggtctcaaactcctgacctcaggtgatctgcctgcctcggcctcccaaagtgttctgattacagatatgagccaccgagcctggcctagatgtatatttctaaaatgaaatctcaactctcaaaaaagcactgagtaaggaccttgtgaggaagtcctttggaaagggtcattgtaagactgtgagtccccaggctgaacgagggaattcaaagggactagtttctgctacaggaaactgaaaacctatttctattatccactgctaccaaacaaaacaccccaaaacttagtggtttaaaacatcaaccactttactgcccatacttctgtgggtcaagaatatggtcaatgctctgcagggacgkttcatctctgctccacatggtgtcagttgagccatctcaaatagggctatgggatccaagattatttcatccacaaggctaaggcctcagcgaagatggcacaaactactgggagctgtctgggatggctcagccttcacctgcactcattcaaatgtctggagtctttgggttgggtgctggctcaggtgctctgttcttcttcatgtggcatctcttctaattcagtaatctatactgaacttctttacacagtgctgacttcctagagagttaagtggaagctttcagctctcgtaaggcctaggcccagaactatcacggtgtctcttctatcactctctatgtcaaagcaagtcacaaggtcagtccagattccaaaggaagagaaacagcctcttcctcctaaggacaggagggatgtgaggagtgattctggtcatctctgcagacaatctaccacaggtctgataccacatttatatctggaagacttcagtcagactgtgggctgggttttgactcccactaaggacatccagagggcaaagaagatctgggaatgaccaacttctggcatggcagcctagggatttgagtggacctactccccagtaaaattgttagagtaggtagctagggagacatgagcagggcaggaaaggctcccccaacccccagaaatgtcaggtgaccatcaggtgatggtcaggcagttgttaaactttctctaaaataacaattggctgcagctggtgccaggggac

SEQ ID NO: 695354 - DNA, 1395 bp, Homo sapiens
ggcaggaacacccacgttcccttaatggcatgtctccttgcctagtgctgtcacggtcctcagcaaacctgaagtcccactcccatcagtcttctatagcaccccagctctggggcagcaagcaaaggaaaaatccattctacatacatcttggaaataaagaacttgaagtggataaagagtgttccctctggcagacaaggtgacctgtctacgttatacctattcctcacttcttcggtgctaacagaaccccagttttcctatgatgtgacaaggtggccagctaacatacttttctctctagcttctcctgcaactcagggtggctattagacatagttttggccagtgagaagaaggmagaaggaggtatggagatcaattttgatttcctgataaaaggaagcacttagggctggtgctatcctcttctggtttcctagctcagaagccatcatgatatctgaagtgcagccgccatcttgtgaccatgcagtgctggcttgagggaatgagaagcgttacagaagtgctagccctgatgtcacctacccattgaatcatagccagtagcagtttacctccagaagtctcatctgtcatgtgagaaaactaaacttctatttacttagtccactattagttgggttctcttttaccaaaagttaaagcattcttaacttgattctaccaagccaagtttagcagatgttctttccccactggaatagctcagccagatctggaattggtgaggctaagaacacatacagtaagaaaataaattatcagccttcctccttgcaagttgaaaagttgtcacatattgtaaaccaagaacctttcttggccctgaatttaactgttacatccatagacctcgtcagtccatctctcaaaaccaaccttcaacatcctatcaccatattaagaagttttgactgttttcattggttgtagctgtttaatgatgataataataattcatgtcccattacatctttattgtagggtcctgattcagggtcctgatgagtacctctttggcctgtctgaacaggaaatgaacttgtatagacagtgtgatcacatccacataaatgccaaaattaaacaagtaaacaaacaaaaaaccttggaagagtaatgtaccaaaacgttaagtacaggtatctttgggaaatggaaagttttctatatttcttcagctacctatattattcatgctttttaaaaatggattttttaaaacacaaaatgaaataatattttaagtgataataataaatcattaaaatcttaggcaatttcctcacatctcaactacaaaaataagtacaatttgtacactggtgccagaagtctggaagagattgttacaccctgtgtcag

SEQ ID NO: 695355 - DNA, 1395 bp, Homo sapiens
ggcaggaacacccacgttcccttaatggcatgtctccttgcctagtgctgtcacggtcctcagcaaacctgaagtcccactcccatcagtcttctatagcaccccagctctggggcagcaagcaaaggaaaaatccattctacatacatcttggaaataaagaacttgaagtggataaagagtgttccctctggcagacaaggtgacctgtctacgttatacctattcctcacttcttcggtgctaacagaaccccagttttcctatgatgtgacaaggtggccagctaacatacttttctctctagcttctcctgcaactcagggtggctattagacatagttttggccagtgagaagaaggcagaaggaggtatggagatcaattttgatttcctgataaaaggaagcacttagggctggtgctatcctcttctggtttcctagctcagaagccwtcatgatatctgaagtgcagccgccatcttgtgaccatgcagtgctggcttgagggaatgagaagcgttacagaagtgctagccctgatgtcacctacccattgaatcatagccagtagcagtttacctccagaagtctcatctgtcatgtgagaaaactaaacttctatttacttagtccactattagttgggttctcttttaccaaaagttaaagcattcttaacttgattctaccaagccaagtttagcagatgttctttccccactggaatagctcagccagatctggaattggtgaggctaagaacacatacagtaagaaaataaattatcagccttcctccttgcaagttgaaaagttgtcacatattgtaaaccaagaacctttcttggccctgaatttaactgttacatccatagacctcgtcagtccatctctcaaaaccaaccttcaacatcctatcaccatattaagaagttttgactgttttcattggttgtagctgtttaatgatgataataataattcatgtcccattacatctttattgtagggtcctgattcagggtcctgatgagtacctctttggcctgtctgaacaggaaatgaacttgtatagacagtgtgatcacatccacataaatgccaaaattaaacaagtaaacaaacaaaaaaccttggaagagtaatgtaccaaaacgttaagtacaggtatctttgggaaatggaaagttttctatatttcttcagctacctatattattcatgctttttaaaaatggattttttaaaacacaaaatgaaataatattttaagtgataataataaatcattaaaatcttaggcaatttcctcacatctcaactacaaaaataagtacaatttgtacactggtgccagaagtctggaagagattgttacaccctgtgtcag

SEQ ID NO: 695356 - DNA, 1395 bp, Homo sapiens
ggcaggaacacccacgttcccttaatggcatgtctccttgcctagtgctgtcacggtcctcagcaaacctgaagtcccactcccatcagtcttctatagcaccccagctctggggcagcaagcaaaggaaaaatccattctacatacatcttggaaataaagaacttgaagtggataaagagtgttccctctggcagacaaggtgacctgtctacgttatacctattcctcacttcttcggtgctaacagaaccccagttttcctatgatgtgacaaggtggccagctaacatacttttctctctagcttctcctgcaactcagggtggctattagacatagttttggccagtgagaagaaggcagaaggaggtatggagatcaattttgatttcctgataaaaggaagcacttagggctggtgctatcctcttctggtttcctagctcagaagccatcatgatatctgaagtgcagccgccatcttgtgaccatgcagtgctggcttgagggaatgagaagcgttacagaagtgctagccctgatgtcacctacccattgaatcatagccagtagcagtttacctccagaagtctcatctgtcatgtgagaaaactaaacttctatttacttagtccactattagttgggttctcttttaccaaaagttaaagcattcttaacttgattctaccaagccaagtttagcagatgttctttccccactggaatagctcagccagatctggaattggtgaggctaagaacacatacagtaagaaaataaattatcagccttcctccttgcaagttgaaaagttgtcacatattgtaaaccaagaacctttcttggccctgaatttaaytgttacatccatagacctcgtcagtccatctctcaaaaccaaccttcaacatcctatcaccatattaagaagttttgactgttttcattggttgtagctgtttaatgatgataataataattcatgtcccattacatctttattgtagggtcctgattcagggtcctgatgagtacctctttggcctgtctgaacaggaaatgaacttgtatagacagtgtgatcacatccacataaatgccaaaattaaacaagtaaacaaacaaaaaaccttggaagagtaatgtaccaaaacgttaagtacaggtatctttgggaaatggaaagttttctatatttcttcagctacctatattattcatgctttttaaaaatggattttttaaaacacaaaatgaaataatattttaagtgataataataaatcattaaaatcttaggcaatttcctcacatctcaactacaaaaataagtacaatttgtacactggtgccagaagtctggaagagattgttacaccctgtgtcag

SEQ ID NO: 695357 - DNA, 429 bp, Homo sapiens
taactgtaggccctaccacagagccttgcccataatagatgctcagtaagtatgacatcactgattgggcctatatgcattgtgttattttcctgatgttcagtgaatgccacagtgcactttaaagttcctttgttgttgtcgttgttttgttttgctttyttctgtttcgtaactccagttacacgcagccagatatgatagcaggttctttcttgaccaatcttaaactgcccccaccaaacctttttccaaaaagatacctttctttaaatacatcaccatctgtgatgttaaactacaagaatgcattcatccagtcgatcatcatatagtcagcacttatcatacaccaagccgtgtgcaaggaaagggaatacaaccatgaacatgatagatggatggttagtccctgtcctcccagaactt

SEQ ID NO: 695358 - DNA, 1002 bp, Homo sapiens
tcttatacagagtgtcatgatttccacgtacttcactggtgtaatatgctatctcccttcccctctccagggatctaaaatttagagaaatcttagaatatagcttaaatgaagaatttcaggtgttattaacatatcctaagtataacaagatttttttgaacctttgacccaataatagctatgtgtctgactattccacctgttagtaatatttccactaaatagcagaagggtatgctaaggaaaactaattccttcaacaagtatgttgcacgaagtattttctgctattaatatttgccacacatttgttattaacatcaataagtatttaatttgctgatctttagtacattatgtgatacaatatagacttagatttttaatttaagtattttatgtaaaataaaaattaaagtatttctctttattccttgcagtgtctaaaactgctgagtagatttggcaacctgaggaaatactgggaatcaaaatcttttttttgaaaataagggaacatccactgatacaatcaatattcagtactggtagatggtctgttcatttgggatactatttatggcaaagacttatacttgaatttaaactaattttaatatctaagtaagtaattatgaaagtaaaagtatttcttttaccttaagttacaatactgcccaaataaatttcagagtgattaccctttttctgccttgtgttatgttttctataatatccatatatcaaaagctattacttactatgaccgctccccccaaaaaaaatctcataaaggtaatctttttgtatcacacttagaacaacatcattcttgggtatttaaaaatgcttttcatactgatagttatctattcctgcctggctataaagaatagccaatattcttagatcccaaatwtctttagcttttctgaaattctttcttagctataacctttatagcttcagtatctccctgacttagaaactagccgcttg

SEQ ID NO: 695359 - DNA, 914 bp, Homo sapiens
tgctgtgcccttctaggcatagtcctcaactagcctggcattccacttaggccttttagaacacttgctctcaagacttccttgttcaaccagccactacatggtgaggarcccaagacaacggagaggccacagccaacagccagcatcaaccaccaactatgtgagtgcaccatcttggatgtccagccccagttgacccttcagctcactgcagccccagccaacccctgaccaaaactgcatgagagactcccaagttaggctacaggccatgagagataataataaattgctgtttttaatgctactaaattttgaagtgctttgttagttcctcaatacttatttgttgaatttatgactgaattcagtgcagctcagaatgtttaaggcaaataataaaataaagaacaaagaaagatattgataccgtatgttaagtggcagggttatctatttgaatgtttttggcttcaggtaatagatgacccctccaccccctgcaaatggcttaaattaggggttggcaaacttttttcttttttttttgtaaagggccagatagaaaatattttaggctttgcctttgtagcagctacacaactctgccactgtaacaaaggcagctatggtcaatcgtaaacaaatgagcatggctgtgttttaataaaactatttataaaaagagatagcaggcctatttggcccatacaccatagtttgctgactcttgactcaaacaatgagaaaacattattttgtaacaagaagtgaaagcggttaattcaatagatcgacaatatcagcatgaacatgaattctttccacctttctgctctgtcatctccaattttgcaggttttgtcctcaggctagtcccctcatggtcatgagatggctgctgcagctcc

SEQ ID NO: 695360 - DNA, 875 bp, Homo sapiens
tacgccctctagacagatccactgttgaaacctctattttctatgtgttctattctatgtaaaatttgtatgtttttctaaggttcagctggacatgactttcacatgatcattccagaaataaacagacaaggatttagtgactctgtcaaagcatgttgttttgttaacttataaatgttgacactgactgttgacaggtagttaggaactgtttataagaattgtaggcaaaaaaaattgtaggcattttcaagtgtgtatttactcaacctttaaaaaattaaacttagactttctataatgtgtaggaacacatctattttgaacttaatatgacacataaacgtgtttataagaattgtattcctttctgaaaagttgttttaatcccagtcaaagaatttttatgtgttttggagcaagtatttatttaatcaaaggtttaaaagttttaagaagtatcaaaatggctgaaccatgtgaaggaattctgagaaaccatggatgagatgctaatgaaataytggagaagaagttcaataaatcccaagactaaaataaaattctaggatgataaagacagtgaaggaacatttgagaaaaagaagaacacttggaaagaagaggaaaaaccatagataaaatcaaagagaaatacccaaagcaaataattttttggagaagtacttcaaagaaaatatatgagttaaaatatgcacaagacaatgcagataatgtcaacaagagttatacacataaaataaatacagtcacattctgttaataattgctaagagctgatagatgacagtacattatgtcagagatggctagcatacaacaatgtgagatgatcacatgctactacttat

SEQ ID NO: 695361 - DNA, 910 bp, Homo sapiens
atcagtggatatgttacaacaatccaagaaagtaataatgtgggtctgacttaaacagtggggaataaaaaggaatagaaaatttgagaaatatttagtagataaaataagaattggctgattgacttgggaggacagggagtgtgtctgaggcggtgggggaggagttaaatggttagattagatgatggagactggaggcagtgtcactagtttaggtgaataatataaaagaaggaataggttttgagggaaatggagaattcagctttgggctcatggcacttgaagaacatagcctgtagtccagtttatagagagaaagaaaactgcaaattgctattaccattaygactctcctttttttgcagaagaaattcatagctaaggccatgaaaggtgagagtgtcagggttccttttatttggtgcctgatagagaccaggtgctcctggtgggagcagccaatcaaaagtacttaatagggaatctattgaggccaggagttcaaggccagcctaggcaacatagcaaaatccagtatctgggaaaaaaaaaatttttgttttaattagcaaagggtggtggaacatgcctgtagtcctagctactcgggaggctgaagcaggagaattgctcgagcccaggagttcgaagctgccatgagctatgattgcaccactgcactttagccttggtgacagtgagactctgtctcttttttttttttttttttttttgagatggagtctcgctcttgttgcccaggctggagtacagaggcacgatctcggctcactgcaacctccgcctcctgggttcaacgaaagagtacttaataggactttacactacccatctcttacacccaggatttgcctgggaataattaagaaacatgtttcttaac

SEQ ID NO: 695362 - DNA, 910 bp, Homo sapiens
atcagtggatatgttacaacaatccaagaaagtaataatgtgggtctgacttaaacagtggggaataaaaaggaatagaaaatttgagaaatatttagtagataaaataagaattggctgattgacttgggaggacagggagtgtgtctgaggcggtgggggaggagttaaatggttagattagatgatggagactggaggcagtgtcactagtttaggtgaataatataaaagaaggaataggttttgagggaaatggagaattcagctttgggctcatggcacttgaagaacatagcctgtagtccagtttatagagagaaagaaaactgcaaattgctattaccattatgactctcctttttttgcagaagaaattcatagctaaggccatgaaaggtgagagtgtcagggttccttttatttggtgcctgatagagaccaggtgctcctggtgggagcagccaatcaaaagtacttaatagggaatctattgaggccaggagttcaaggccagcctaggcaacatagcaaaatccagtatctgggaaaaaaaaaatttttgttttaattagcaaagggtggtggaacatgcctgtagtcctagctactcgggaggctgaagcaggagaattgctcgagcccaggagttcgaagctgccatgagctatgattgcaccactgcactttagccttggtgacagtgagactctgtctcttttttttttttttttttttttgagatggagtctcgctcttgttgcccaggytggagtacagaggcacgatctcggctcactgcaacctccgcctcctgggttcaacgaaagagtacttaataggactttacactacccatctcttacacccaggatttgcctgggaataattaagaaacatgtttcttaac

SEQ ID NO: 695363 - DNA, 1653 bp, Homo sapiens
aagaagaatcactggaacccgggaagcagaggtttcagtgagccgagagagcgccaccgcaccgcagcctgggtgacagagcgagagagactcagtccaaaaaaaaaaaagaaagaaaagaagaagaagaagaaaaaagaacgggcccaaatactgcattgtcgctcaacgttctcccaaaaggccagaaaccccctgactcaggtcaaggaggtggtgtttcgttttctctctccctcctctctctctctctctctctctgtctctctctgtctctctctctctctctctctcctctctcccccctaacttttatttgtcgttcaagcatacatgtgcaagattgtgacataggtaaacttgtgacgggggtgttcagtgtgcagatgatttcatcacccgggtagtcagtgctgtgtccgacagtattcgtgttttgttttttcctgaagctgtctctccttccacccctcctccctcaagcaggcttccgcgtccccggtccccctcgttctgcccatgcaagaactgtcatttgtaagttcccacttctagatgagaacacgcggtatttagccgatccttgctgtcatcttcggtggtggtggtggtgaaagaggcatgacactaaatcgacccttaggacgctcccctccgtccccaccccgcaccccctccccacacacaccctcattcccgcaccccctcctcaaacgcaagaaaggaagaaatgaaagtaagagatgagcctgcaaggcggtggaggcgggggatctcagagggcgagcaagcgatggcggtcgggggatgtgtcggctgaggtatcaaaaataggggacccagttttcagccccaacacaccccctaatcctcagccgcagccagcctctgggtggggttgcgcctgtcaaagcttccgaatggagagaagcccaaggctacggaaggcatcagctccaactccaggaagggaataaggctstgtgcatacgaatggggctttgaaaggcgttgccgcggcttccaaagcgatgcgctgtgcctcgcctcgcctcgccccgccccgcccagagcgagactccgtctgaaaataagtacacaaataaatcataagataattcatcaataaatgaaagaaagaaagaaagaaagaaagaaagaaagaaagaaagaaagaaagaaagaaagaaagaaaggatcagtagagcgatggtggtcgtgaatcattccccggagtccaggcgcagtggctcacgcccgtcacgccagcactttgagacgccgggcaggagggttgcaaagaaatgatgagaccccgtctgtgggaaaacatttaaaaatgaaggccgggcgcggtggctcacgcctgtcatcccagcacttccggaggccggggagggcggatcacctgaggtcgggagttcgaaaccagcccgatcgacatggagaagccccgtctccactaaaaatacgaaatcagccagacgtggcagcgcatgcccgcaatcccggctactcaggaggccgatgcaggagaatcgcttgaaaccgggaggcagaggttgcggtgagccaagatcgcgccaccgcactgcagtctaggccacgagagtgaaactctgtctcgggggaaaaaaaaacaattaaaaacgg

SEQ ID NO: 695364 - DNA, 3477 bp, Homo sapiens
ggtcacggccgaccgaagcctcgacctgtggggcctcaagtgatcttctcctcgtctcagcctcccgagtagccgcgactacaggcggccatcaccgcgcacaactcatcttataataacatcatgattctctcgagacggggtctcgctccgtcatccaggccgcatcgccacggcacgatctcagctcatcgcaacctcggcctccccggttggaacaagtcgcccgccccagtctcccgagcggtcgtgattccaagcccacgccaccaggcccggctaatcgttctatttttcagagagacggggtttcgccacgtcggccagcctggtctcgaactcccggccccaagcgatccacccgcctcggcctcccaaagtgccggagtgacaggcgtgagctagcgtgcccggcccagatcatctttttcataaattgtagagaaggggtttcgtcagccaacgggtggagggtggggcgggttttactcagcctgcgtactgtgaaaaggggaagtgagtgtgctctgtgaagtagatatggaaattgtgtgtgtgtgtgcgcgcgtgcgcgtgcgagagagagagagagagagagagagagaccaatcccaccacgaggacccggaaatagtgtttgatctgtgtccctgcctagtcacctgtcttgtgtgtcgatgactgaggattccacaaatgaaggtcagcggtatctattgagctgtttctccctctcgtgcgtctcatctgtgtgctggagaaagggaagagaagaggttccgatgggaagttgtcttcacgcctgaggcagctgaaggcagaccgaagggaaggagggcatcctaggtgacatttccatacccacgcaccctttacaatgctggggctgccagtccaccctgtacgtcaacccacccccaagaacagcacggtccggggtggtccagtctgatcccaaccggcccacccggggcatccggtggaagtcttcgccggaggatccgaaggcagcatcaacgcggttcccctggggtcgcccggcaaaggccagccgggggagggtagcgggacgtgacgggggggtgggggtcgcatccgcctcagagctccctggaaggtggcaggtagccggtggggcacgccgagccagagacgtccggcaggatatagatctggaaggcgtgtcagtcctctcccatacctctcctatggaaaatgccagggcggcggtgggagcctcggctgggggagaagcggggacaagggggagagggaaggaggccctcgggaggtttcggcaccgaaaacccactcagccaagctccctccgtgtttccgggtccaaggtacaccccgggagacggcaagagaaacgttcacaccgtgctttccgtcttcgtgtttatttctttcatcttttccattttacgagagatgctcatttcaacaaccagacggcggatgtgacgggagaagcgtcaaggccaggagtttgagaccagcgtgagcaacagagcaacacacgtaggagagcccagctgaaagaaatgaaagaggaggaggaggaggaggaggaggaggaggaggaggaggaggaggaggaggaggacgacgacaagggggggtggggggggaggagaaggaaagaaaagaaaagaaaaaaaagaaaaaggaaaacaaccaccaccaagaaagttaagattctccaacggtcggaagttgaagaccagcctgaccaagatggagaaaccccatctgtagtaaaaatagaaaaattagccgggcacgatggctcatctctgtcattccagctactcgggaaggctgaggcaggagaatcacttgaacctgggaggcggagggtgcggtgagccgagagccgccatcgtactccaccctgggcgacaagagtgaaactccgtctaaagagaataaaaagaaagaacgaaaaggcggatcggtgagatgcgtctggaaattttcttcgttcgcagtccccgtattaaaaacggaaagaaccgacccacgacaaacacgaccagagcgtaccgtgcccacgcgtgtcatcacagcactccgggaggccgatgcgggaggatctctggagcctaaaagttcgagatcacctcgacacgtgagatgacgcctacaataataataatcatagaagtttgaaaagagaccacgtgtgcccagagcatggacaataaagcgagagcacatccgtactaaaaagaagacgattgataggcaggcaggcaggcaggcaggcaggcaggcaggcaggcaggcaggcaaatgtagaaggagccaggcgcagcgtctcacgcctgtaatagcagcagtgtgggcggccgaggcaggcaggcggattgcttgaggacaggagttcgagaccagcgtgggcaacatgatagaaccccgaaacccatctcactcacatacatacatacatacgtacatacatagatacacacacacacacacacacacacacacacacacacacacacacacacacayacctacctacggaaaacatgagaaacaacataaaagtcagccggtgtggtggtgcgcgcctgtagtctcaggtaatggggatgggagggatcagaggcagaacgaccgtttggtcggtccaaagcgttgaggttggggtgatcctgggcggcagagacagaggaagaccctgccagtaagggagggaaggaaggaaggaaggagggaaggaaggaaggaaggaaggaaggaaggaaggaaggaaggaaataaacaggcaagcaggcaagcaaacgatgaacgtgacaatgacacagaagaacccatgagaataaacgagcaaataacagggtatgaatgaagctaaaaggcaattgagatcgcaatcaatcgttttctctgcaccccaccccaccccaccccaccccaccccaccccaccgcagcccacgtaagctggagtggaagtgtgcgatcacagcccacgttaacctctccctcccgggcttaagagatccctgtagtcccagctatttgggaggctgaggtcaccagagcgcagagacagaagaccaggcgggccggccccaaaagaaaagaaaataaataaacgaaaattattaataaataatgaatgaaggaagggaggaaggatatacatacacgtgtatgtaaatgaaatggggcttcgatacatattcatccattaaaagtaacataatataaacgtattaattatggaaatatcatttacatagttttatcactacggggggtgtgtgtgtgtgtgtgtgtgtgtgtgtgtgtgtgtgtgtgtgtgtagatgtatgttcatacacggcagcgttcagaaaataagattgaaaaaaggaaggaatcggccgggcatggtggctcacatctgtactcccagcagtctttgggaggccgaggcgggcggatcactaggtcgggagttcgagaccagcccggccaa

SEQ ID NO: 695365 - DNA, 604 bp, Homo sapiens
agatcatttgtttactcctgactgtgctaaagtcctgatttattgggccagtttgagtacctgctacaactgatagttgccaaaaaaatttaaaaagtaaaagaaaaaattatgtgttctgatgagcaatttaatacagaatgagtaccattcacttttcttggatgctgctcgattacaccactcctcaggargagaaaaacctaaatctcattttattttgcaacaacataatctaaaacactctaacctgtgaattgaaatgcctcctttaaaacctgttgaaaactattactttgctgactagttaaatcagttgcaaatgcatagtctgtaatttagggcctcagcaaattaaaactatgtcctggactgcccaaggccacagaagttgctgtaataggctctggaggcaggttgtaaggaaactagtggatgcatgaaagtctttttaaaatacacattaacttttgtttgtttctgtatcactcagggataccaaatgaaccaagatcccatgcacagaacttcacctcttgattagaatataaacacttgattcagaggtgcttttctttctttggacttacctttggtcttgaaa

SEQ ID NO: 695366 - DNA, 1224 bp, Homo sapiens
acactattcttaacctctgaattaccattggacttccatctgtaaagaaaaacagtagtctgaaaatatgatcaaatattcaagtacagaaaaaccagaaaattaatttaaatttgtatatatatatatatatatttttgtttgtttgtttgtttgtttgttttgagacagagtcttgctctgtcacccaggatgcagtgcagtggcgctactgggttcactgcaacctctgcttcctgggttcaagcgattctcctgcctcagcctcccaagtagctgggattacaggcacacaccaccatgcccggctaatttttgtatttttagtagagacagggttttgccatgttggtcaggctggtctcaaactcctgacctcaggtgatccacccaccttggcctcccaaagtgctggccaaatttgtagttaaatgaatgcaacatcttaactgtcacattcaaaatataaactctatttataaggacatggtgaaagttgcaaagtcttcaaaataaacaattacatttgataattctacttcaattctatttcaatgatattaggaagagctttttgaaaagaataaaacatgcctaaaataacacataagtaaaggggaccctagtatcaactgaagtgttggaattgctatttttattgtcttattacacatcaagaacaattaaaatataagatatttgccaggcgcggtggctcacgcctgtaatcccagcactttgggaggccaaggtggggggatcacttgagctcaggagttcgagaccagcctgggcaacagaatgagatcccatctctaccaaaaacacaaaaaattagccgggcatrgtaccacacacctgtagtcccagctactttgggggctgaggtgggaggattgattgagccaggaggtcgaggttctgtgagctaagatcatgccactgcactctggcctgggtgacaaagggagaccctgtcccaaaataaaaaataaaaaagataaataagatcataaagtttcattccgggaaatgttttatcattctttatataaaataaacaagacgtttctgaagcaattatgacacttttaaaagctggtaactttctccccctaataatttcagaacatgaaaaacaaaagacaaagagaacaaaagaaacttacatttgaaaattagtcataaaaaataattctgataaccacaattttctagccaagt

SEQ ID NO: 695367 - DNA, 1224 bp, Homo sapiens
acactattcttaacctctgaattaccattggacttccatctgtaaagaaaaacagtagtctgaaaatatgatcaaatattcaagtacagaaaaaccagaaaattaatttaaatttgtatatatatatatatatatttttgtttgtttgtttgtttgtttgttttgagacagagtcttgctctgtcacccaggatgcagtgcagtggcgctactgggttcactgcaacctctgcttcctgggttcaagcgattctcctgcctcagcctcccaagtagctgggattacaggcacacaccaccatgcccggctaatttttgtatttttagtagagacagggttttgccatgttggtcaggctggtctcaaactcctgacctcaggtgatccacccaccttggcctcccaaagtgctggccaaatttgtagttaaatgaatgcaacatcttaactgtcacattcaaaatataaactctatttataaggacatggtgaaagttgcaaagtcttcaaaataaacaattacatttgataattctacttcaattctatttcaatgatattaggaagagctttttgaaaagaataaaacatgcctaaaataacacataagtaaaggggaccctagtatcaactgaagtgttggaattgctatttttattgtcttattacacatcaagaacaattaaaatataagatatttgccaggcgcggtggctcacgcctgtaatcccagcactttgggaggccaaggtggggggatcacttgagctcaggagttcgagaccagcctgggcaacagaatgagatcccatctctaccaaaaacacaaaaaattagccgggcatggtaccacacacctgtagtcccagctactttgggggctgaggtgggaggattgattgagccaggaggtcraggttctgtgagctaagatcatgccactgcactctggcctgggtgacaaagggagaccctgtcccaaaataaaaaataaaaaagataaataagatcataaagtttcattccgggaaatgttttatcattctttatataaaataaacaagacgtttctgaagcaattatgacacttttaaaagctggtaactttctccccctaataatttcagaacatgaaaaacaaaagacaaagagaacaaaagaaacttacatttgaaaattagtcataaaaaataattctgataaccacaattttctagccaagt

SEQ ID NO: 695368 - DNA, 1224 bp, Homo sapiens
acactattcttaacctctgaattaccattggacttccatctgtaaagaaaaacagtagtctgaaaatatgatcaaatattcaagtacagaaaaaccagaaaattaatttaaatttgtatatatatatatatatatttttgtttgtttgtttgtttgtttgttttgagacagagtcttgctctgtcacccaggatgcagtgcagtggcgctactgggttcactgcaacctctgcttcctgggttcaagcgattctcctgcctcagcctcccaagtagctgggattacaggcacacaccaccatgcccggctaatttttgtatttttagtagagacagggttttgccatgttggtcaggctggtctcaaactcctgacctcaggtgatccacccaccttggcctcccaaagtgctggccaaatttgtagttaaatgaatgcaacatcttaactgtcacattcaaaatataaactctatttataaggacatggtgaaagttgcaaagtcttcaaaataaacaattacatttgataattctacttcaattctatttcaatgatattaggaagagctttttgaaaagaataaaacatgcctaaaataacacataagtaaaggggaccctagtatcaactgaagtgttggaattgctatttttattgtcttattacacatcaagaacaattaaaatataagatatttgccaggcgcggtggctcacgcctgtaatcccagcactttgggaggccaaggtggggggatcacttgagctcaggagttcgagaccagcctgggcaacagaatgagatcccatctctaccaaaaacacaaaaaattagccgggcatggtaccacacacctgtagtcccagctactttgggggctgaggtgggaggattgattgagccaggaggtcgaggttctgtgagctaagatcatgccactgcactctggcctgggtgacaaagggagaccctgtcccaaaataaaaaataaaaaagataaataagatcataaagtttcattccgggaaatgttttatcattctttatataaaataaacaagacgtttctgaagcaattatgacacttttaaaagctggtaactttctccccctaataatttcagaayatgaaaaacaaaagacaaagagaacaaaagaaacttacatttgaaaattagtcataaaaaataattctgataaccacaattttctagccaagt

SEQ ID NO: 695369 - DNA, 733 bp, Homo sapiens
tcatattacaaagagtcagtgatgggccattccaggattggttaattcagtagttcaccaaagtcatcaaggatccgtctttccatctcccttctctgccaccctcaaggtttaagacagctgttgcagttccagacattatatcaagatgcagtattcacagaaagaggactgttcatttctttaccagaagattctcccatatatcatgtgtctacatctaaaccaatcactactaaggggaaattgacctacaacatttggattagactaatcaaatttaccttctgagttaggcatagagtcaacttctatgagcayatggctgagccaaggataagcattctgccagcaagagaggacataatatgggtgtgggattggagatgggagaggaatattcaggcagtaaccaataatgtctatgatctttttagtctattttttatacttatacacatacctagaaaaagtttaaatataaaaccatgtatatactgatgatgttttttcaagtagcaatacacatggcaaatatttctccatttcaagaaatatttttctataacttttttttttttttctagacagggtctcactctgttatctaggctggagtgcagtggtgtaatctcagctcactgcacgctcgacctcccaggctcaagcaatcctcctacctcagcctcccaagtagctgggactacaggtgcgtgccaccatgcctgactaa

SEQ ID NO: 695370 - DNA, 1761 bp, Homo sapiens
aaaaccactggataggccgggcatgctggttcatgcctgtcatcccagcgctttgggaggcccaggcgggtggatcacctgaggtcaggagttgaagaccagtctggccaacgtggtgaaaccccgtctctactaaaatacaaaaattagctgatggtgcgtgcctgtaatcccagctactcaggaggctgagacaggagaattgcttgaaccgaggaggcagaggctgcagtgagccgagatcgtgccacttcattccagcccgggtgacagagcgagactccgtctcaaaaaaaaaaaaaaaaaaaaaaaaaaaaaaaaaaaaccactggatggaaactcgcccaagccagygccctaggaaccctgaagataacccataacacataacgcccagcatgcaagtgattgtcctggcaccacccacacaagtgttaaataggggtcagattcaggccacccattcctcagtgctcagtggtcccagctgccactcaggaagctcagttcccagggagcagatctgagaagcagtggtggagtcccctgagatattgtcattgtgtagccagcaacagctgcacatgactagaacacagccagcaaatggtgagcagcagggctatcaggggaggtgtctagggattttcttttttttctttttttttttttttgagacggagtctcgctctgtcacccaggctggagtgcagtggtgcgatctcagctcactgcaacctctgcctcccaggttcaagcacttctcctgcctcagcctcctgagtagctgggattacaggctcccgccaccatgcccagccaatttttgtatttttagtagagacggggtttcaccatattggtcaggctggtcttgaactcctgacctcgtgatccacatgccttggtctcccaaagtgctgggattacaggcgtgagccaccgcgcccggccagggattttcacagctgctagtcatgttacactaaatagtgggacagggagcccatctctggtccttctcctttgagctcccagtaactgaacatagggaccaacgaagaaccaggggttcttgggccacaggccaggtgaggcagagttgtctggaactcatccctgttcactaggacctcatgcagtctctagccaaggggaataagggatacagcacatgcacctcatcagtcaggacacacatcctagtttgaataataataataataggactgtcttcctatttgtgcgctactctccttcctctactgaaaaggaaaccagccttttcagagccttccactgagaaccagcaagaatccacacctgtcgcccgttcatgaggtagtataaatggaacaggagcaaattcttcacctccacagtaacacaaagtacagaggacgggccatgagctagctgacgagaggaagtgggtctgaagacctgagcttccaccaaagggcaaacaattcagaacaactcaggaaacccaggccctgtgttgcctgaacttccccattctgcccccacccctgttaaatcaaagccaacagctacctgaactgacggagaagccatctctggggaggaagctgagaggctctgggctgtggcagttgcagtggcccccagccttgcccacccagaggctgtcactacatgctctgtcacagccaacccacccaacagttttctggctgagaccacttctccccactcctctctaagaactagaaaactccagtccaaatccctctaaac

SEQ ID NO: 695371 - DNA, 651 bp, Homo sapiens
gtatccttgatgacatcataactcagaattcagtaaaacagctcatcaggtccctcacaggggatgtgctagggtggtggccactcttgagactctgtgcccagtgatgaaaaatagtatgmaggttgtttaaaaatgaaaaatagaattaccatgctattcaacaatcctacttctcagtatataacctaaagaattaaaggcaggatctcaaaaagatatttgcacacccatgtttattgcagcattattcacaatagccaagagataaaagcaatccaaatgactttggtggatgaaaggataaaatatggtgtatatatgtgtatttgtgtatatatatatgaagactaagcagccttcggaaagaaggaaaccatgtcacatgctagaacatgggtgaacctcaagaacattatgctaagtgaaataagccaatcacaaaaagacagattttttttttcatatgaagtatttaaagtagtcaaaatcacagtagtggttgccaagggctgggagtgggagtggtggtggtgggattagtgtttaatatgtacagaattttagttttggaagatgaaaaatttctaaagattaagaagtaagaatatacttaacgtgttaagtatattcacaatgatgtaaacatac

SEQ ID NO: 695372 - DNA, 588 bp, Homo sapiens
tatcttcattcctttgtcaaaaatttactgagtgcctgggcactcaagtgctgtaatcccagcactttgggaggcygaagcaggaggatagcttgaacccaggagttcaagaccagcctggacaggaggatcacttgagcccaggaactggaggctgcagcgagccatgattgcaccactgcactccagcatgggcaacgcagcaataccctgtctcaaaaacaaaaaaaaccatttattgagtgcttactcaatggtagttaggcactggcctgggcactggaaaacagagaaatataacatgtccccatctttctcagcataaagcttatcagactgtgtccattgtgtttatttaagaatatatttccaatactagtagttctgtttatagctatccatcttacctcacccccttcccccagataaaaaataagcaatgttcaattttaagacactatcaaggccgggcacggtggctcacacctgtaatcccagcactttgggaggccaaggtgggcagatcacctgaggtcaagagttcgagaccagcctggccaacatggtgaaaccccatctctactaaaa

SEQ ID NO: 695373 - DNA, 588 bp, Homo sapiens
tatcttcattcctttgtcaaaaatttactgagtgcctgggcactcaagtgctgtaatcccagcactttgggaggctgaagcaggaggatagcttgaacccaggagttcaagaccagcctggacaggaggatcacttgagcccaggaactggaggctgcagcragccatgattgcaccactgcactccagcatgggcaacgcagcaataccctgtctcaaaaacaaaaaaaaccatttattgagtgcttactcaatggtagttaggcactggcctgggcactggaaaacagagaaatataacatgtccccatctttctcagcataaagcttatcagactgtgtccattgtgtttatttaagaatatatttccaatactagtagttctgtttatagctatccatcttacctcacccccttcccccagataaaaaataagcaatgttcaattttaagacactatcaaggccgggcacggtggctcacacctgtaatcccagcactttgggaggccaaggtgggcagatcacctgaggtcaagagttcgagaccagcctggccaacatggtgaaaccccatctctactaaaa

SEQ ID NO: 695374 - DNA, 588 bp, Homo sapiens
tatcttcattcctttgtcaaaaatttactgagtgcctgggcactcaagtgctgtaatcccagcactttgggaggctgaagcaggaggatagcttgaacccaggagttcaagaccagcctggacaggaggatcacttgagcccaggaactggaggctgcagcgagccatgattgcaccactgcactccagcatgggcaacgcagcaataccctgtctcaaaaacaaaaaaaamcatttattgagtgcttactcaatggtagttaggcactggcctgggcactggaaaacagagaaatataacatgtccccatctttctcagcataaagcttatcagactgtgtccattgtgtttatttaagaatatatttccaatactagtagttctgtttatagctatccatcttacctcacccccttcccccagataaaaaataagcaatgttcaattttaagacactatcaaggccgggcacggtggctcacacctgtaatcccagcactttgggaggccaaggtgggcagatcacctgaggtcaagagttcgagaccagcctggccaacatggtgaaaccccatctctactaaaa

SEQ ID NO: 695375 - DNA, 914 bp, Homo sapiens
  misc_feature 587: n = A,T,C or G
tctctactaaaaaaataaaaattagcaggacatagtggcatgcacctgtaatctcagctacttggcaggctgaaacacaggaatcgcttgaacctgggaggtggatgttgcagtgagccaagatcacaccactgcattccagcctgggtgacagagcgagactccatttcaaacaaaacaaaacaaaacagaaaagaatgtcatttgacagtgtacaaagtttatatattttaacatacaaatgaagttgacatggtatcaaccaaagggaaagaagggccattttgtaacaggcagaaaccagttgggatttaagaagcattttaattacccttactttttttctataaaggaaaatacttttatttctttcactgatgtgccggtgagagtcttagcaggcttgcctttgtaggtaaatatgatggcacttcccaatcatcatgtattgggatgtgaagttgtgtggagtctgaggctgacccctggtagtgtgaggaccttgggggattgccttggaaaatasagggtccagcccaaggctctggctttcagggtcgggggttgagatgaatttgtcacagctncgcctgagctcaccacactgggtaagtcaaacagaggcacagcttctgtttgctaagtgttaccacatgctaggcactgtgttgagtatggtgaaggacctcttaaatcttcagaacaaccgacgtttcagcattttacagctgcaaaaactgagtcttagcaaacatggtcttagagccacgagaatggacctgggacttaaatcccaagtctagagcctggacttgaccacagcagcatccagcttctcacccatctttcgctcaattcatccctttaatcatttattttaggattcagtttgattcccccaatctcaaaacttt

SEQ ID NO: 695376 - DNA, 914 bp, Homo sapiens
  misc_feature 587: n = A,T,C or G
tctctactaaaaaaataaaaattagcaggacatagtggcatgcacctgtaatctcagctacttggcaggctgaaacacaggaatcgcttgaacctgggaggtggatgttgcagtgagccaagatcacaccactgcattccagcctgggtgacagagcgagactccatttcaaacaaaacaaaacaaaacagaaaagaatgtcatttgacagtgtacaaagtttatatattttaacatacaaatgaagttgacatggtatcaaccaaagggaaagaagggccattttgtaacaggcagaaaccagttgggatttaagaagcattttaattacccttactttttttctataaaggaaaatacttttatttctttcactgatgtgccggtgagagtcttagcaggcttgcctttgtaggtaaatatgatggcacttcccaatcatcatgtattgggatgtgaagttgtgtggagtctgaggctgacccctggtagtgtgaggaccttgggggattgccttggaaaatacagggtccagcccaaggctctggctttcagggtcgggggttgagatgaatttgtcacagctncrcctgagctcaccacactgggtaagtcaaacagaggcacagcttctgtttgctaagtgttaccacatgctaggcactgtgttgagtatggtgaaggacctcttaaatcttcagaacaaccgacgtttcagcattttacagctgcaaaaactgagtcttagcaaacatggtcttagagccacgagaatggacctgggacttaaatcccaagtctagagcctggacttgaccacagcagcatccagcttctcacccatctttcgctcaattcatccctttaatcatttattttaggattcagtttgattcccccaatctcaaaacttt

SEQ ID NO: 695377 - DNA, 1240 bp, Homo sapiens
tgctctatagaaaataatttctaaacaataaagaatattataataaacattaactttccttctgtgtttttctcaattcctgttctccctcccttttcctctttgttccttccttttgaccactgcctaactactggcatgattttggtgagcaagtctgcttaacctaaattccacaaagcaatgagtaaattatttcccgtgtttaattttaaagtactgcggtttagagtaaaaatagacacaaaatgctacaggatgcatgattcttttcatacaacattctggaataggcaaaactataggggcaaaaatcgaatcagtgatcaataggggctgagggtgaagagggtggcttgacaacagaagtaccaagagaacactgtggtgacggaaatgttctgtatcttcattttggaggtaattatatgcatgtatacatttgtcaaaacacgttgaactgtacatttgaaaagagtgaattttgccatatataaattacaccacaataaccttacttcaaaaaagaatactttgccttgggacctttgagcctttcattaggaaaaatctatgatcagtataggaaattggcagtgctcctggaaatactcatgtacataactaactataataaaagacagagattgataatttccctaagagaggtacaaagttctctgggaattcagaggcaagagaaacaacatccgtccagagaaaccaagaaatatttcatggaggaggacgcatttaaaatgggcctaaaagattacaattaatcactggttggtttttgttgttgttgctgttgttgttgttgtttgtttgcttctctactgtcaccaatatcttacattctagcacctgtttataaattgcttgcaaaatttgttacaggtttgattatttttcyaattctaaaaggtcttatattatgatggatgcatttgctggagactaaatgattcacactatcttgcaccttaaagaatcaccgttttgatgccatgttttctgagtttgtggtgattctggaattgattaatttttacatgtacacttacaaaacattctaccattctatgaaatgaagaaatgtgcaatgaagaaatgaggatacatcacatctaagtgtaagaggctgggaatagggttccaaaaatctgggttctataatgcataaatgactccatacatcaagaacaaaaagattcacaccccaaaagaagagaaggga

SEQ ID NO: 695378 - DNA, 1240 bp, Homo sapiens
tgctctatagaaaataatttctaaacaataaagaatattataataaacattaactttccttctgtgtttttctcaattcctgttctccctcccttttcctctttgttccttccttttgaccactgcctaactactggcatgattttggtgagcaagtctgcttaacctaaattccacaaagcaatgagtaaattatttcccgtgtttaattttaaagtactgcggtttagagtaaaaatagacacaaaatgctacaggatgcatgattcttttcatacaacattctggaataggcaaaactataggggcaaaaatcgaatcagtgatcaataggggctgagggtgaagagggtggcttgacaacagaagtaccaagagaacactgtggtgacggaaatgttctgtatcttcattttggaggtaattatatgcatgtatacatttgtcaaaacacgttgaactgtacatttgaaaagagtgaattttgccatatataaattacaccacaataaccttacttcaaaaaagaatactttgccttgggacctttgagcctttcattaggaaaaatctatgatcagtataggaaattggcagtgctcctggaaatactcatgtacataactaactataataaaagacagagattgataatttccctaagagaggtacaaagttctctgggaattcagaggcaagagaaacaacatccgtccagagaaaccaagaaatatttcatggaggaggacgcatttaaaatgggcctaaaagattacaattaatcactggttggtttttgttgttgttgctgttgttgttgttgtttgtttgcttctctactgtcaccaatatcttacattctagcacctgtttataaattgcttgcaaaatttgttacaggtttgattatttttctaattctaaaaggtcttatattatgatggatgcatttgctggagactaaatgattcacactatcttgcaccttaaagaatcaccgttttgatgccatgttttctgagtttgtggtgattctggaattgattaatttttacatgtacacttacaaaacwttctaccattctatgaaatgaagaaatgtgcaatgaagaaatgaggatacatcacatctaagtgtaagaggctgggaatagggttccaaaaatctgggttctataatgcataaatgactccatacatcaagaacaaaaagattcacaccccaaaagaagagaaggga

SEQ ID NO: 695379 - DNA, 1240 bp, Homo sapiens
tgctctatagaaaataatttctaaacaataaagaatattataataaacattaactttccttctgtgtttttctcaattcctgttctccctcccttttcctctttgttccttccttttgaccactgcctaactactggcatgattttggtgagcaagtctgcttaacctaaattccacaaagcaatgagtaaattatttcccgtgtttaattttaaagtactgcggtttagagtaaaaatagacacaaaatgctacaggatgcatgattcttttcatacaacattctggaataggcaaaactataggggcaaaaatcgaatcagtgatcaataggggctgagggtgaagagggtggcttgacaacagaagtaccaagagaacactgtggtgacggaaatgttctgtatcttcattttggaggtaattatatgcatgtatacatttgtcaaaacacgttgaactgtacatttgaaaagagtgaattttgccatatataaattacaccacaataaccttacttcaaaaaagaatactttgccttgggacctttgagcctttcattaggaaaaatctatgatcagtataggaaattggcagtgctcctggaaatactcatgtacataactaactataataaaagacagagattgataatttccctaagagaggtacaaagttctctgggaattcagaggcaagagaaacaacatccgtccagagaaaccaagaaatatttcatggaggaggacgcatttaaaatgggcctaaaagattacaattaatcactggttggtttttgttgttgttgctgttgttgttgttgtttgtttgcttctctactgtcaccaatatcttacattctagcacctgtttataaattgcttgcaaaatttgttacaggtttgattatttttctaattctaaaaggtcttatattatgatggatgcatttgctggagactaaatgattcacactatcttgcaccttaaagaatcaccgttttgatgccatgttttctgagtttgtggtgattctggaattgattaatttttacatgtacacttacaaaacattctaccattctatgaaatgaagaaatgtgcaatgaagaaatgaggatacatcacatctaagtgtaagaggctgggaatrgggttccaaaaatctgggttctataatgcataaatgactccatacatcaagaacaaaaagattcacaccccaaaagaagagaaggga

SEQ ID NO: 695380 - DNA, 1439 bp, Homo sapiens
tcaaacagaacatttttaagaagtcaattcaagactttttaaggcacaaataagtacccacagaaccctcaattctaaaataatcatgttggaacatccttggctgcctaattacaaagcacatattcctgccaacggaccccttcatgaagtggctttcagggggcagggctatattgaggagactcaacatgaccaagtctataatcatatccaaagtaactagatctgggtgtattcatgacacccagctttcgtttcagggttccatgraaagtaacttttcccttggctgaatcacaccattacaggttatgcatattaaccaaactctcagagagctaagctcactacaattgggatggctaaacaatagggtgaattatgctcacaagacccgagagacttgcaacctgtttcaagcactttctttaaaaactgcagacatttcacactaaaggaggcagaagccaaaaaccgagactggatgctgagaatggatttgattcaattttggaaaacaaagtgtgctacaaccaccacggactgacctgttgtttgcttttgttttctgtagctgctcgtcctgtcttgcataccattcttctagctcctttattgccttttctttccactctgcttcttgcttccgagaattggcatctttgaagggagagaagagaaagacaatacaattgaggcaaagtgcaaactgaagttcatcagtttattttggtcttgctgaacttgtggtgggtgcaggtccatgtctgtgtgcctgttgggggagaagagtagagaggggaagataaacttctgttttctctgtttgcacaaccaactctgatttcagtgcttctattcctgcctggtctttcccacagtcctattcctggtcttatcccagtccactgacatcttagtgggtcattagttttgttttgtcttgttttgggcagagcaaaagagaagggtgtatgtggaaatactgacttctattattaataggaaaaaagccttctgggcaccaattgggggagaaacaattatagatgattctttaccaatgctgccaatattagttcatagtagggtattcatcttaatcttttacctcttctcccaaactagtccatattccaggtttgacaatggttttgtggaacacaaggtggcactctcataactaaatatggtagaagcacttctgtgaggcagggtgctattaggacaattaccaaaggtagagatgattcaggaaccagagaatgatagaacacagaatattagcactagagaggaccacaaagcatctactcctacttggtctgcagtgtgtttgtggcagagccagggcagagctacaaaagaaactccactggagagaagtgcagggggtagaggtatgggatcattgctaacagttaacctaaaggttc

SEQ ID NO: 695381 - DNA, 2502 bp, Homo sapiens
ctctggtttttgcctgtgcccatcctccatagacgctttccgcaaggctggggccagtttattttcctctcatcaatctgtcatagctgactgcctatatatctctgtataatacatcagaaagagagctcccgcctaaaacctcaatttactcagtacacttcaaagcctaaaggccttgtaactcctttctcccactaatagtagctggaattcactagatacttaatataactgtaagcactttatagacactctttaatgtaatcctaaagatgccacatagcattataaattatattatgcaacttttacaaaggagaaaactgaggccgggcagtggtggtagttatatacattgtctgagatcacaaagctaaactcacactcaagcagtttaggatagcatagaatcttaaccactagagcatatctttaaaaaaaaaaaaaaagaaggaaaaagaaaactaagagagaaaaagtgtccaatcagttctctaaactccaaaggaaatgctgaccactgcatattaccaacttcaattacactgtcaggaatctggctttaagtcaccaaatgcttagttcactaagaaagtccctcctaggaactaagtcagcaaccatttctttccttccctttgccgaaggcttgatgcacaaaggaccgagcatccaactctattctctcccttttaccttccctaactgcccgtcaccaagatctgtcagttctacataggacccttggatctgacatttttgcccatttctttgtcaaacgtgagcatctactacatgtcagacacactgctaggcagtggagataaaacagtaagggtaacactgtccttgaatcaggacaatcttccaactacagatcttgggttctgcttctcccaaatctgttccacctgggacagccacagctgcctgtctgttatcgcactacacccctgctaaaacaactaaacactgcaacagaatgtggtatattctaagagtgggtagacttggggctcagctattaactcgtgcttttttaagcaagtcgtttctctctaggattgcttctcttctattaaatgaggaaggttaaactaagggtctaagaagtcaattttaaaattctcagacaaatgttagagaccacccaatgaaaatatcccctaatcacttaaggccaacttcatctcacaatcacagcctagtttagtccaacctacccgctataaagttgcatattcgggcatattacatgttcccactaagttcttattgggggactgatttgtttaggaagcaacatggtgcagtcaaaaactcaagaggctgcaaactagcagcacacccaccaacccatccatcaaaaggttccgcctggctggcacagtaacttgagactgctggatctgaatgcctttacacagagcactactatagtgcagcaaagcctcagtctccaacacttctactgtctcatgtcaagccagcttctctcgtatatgttacctacctggctccttaaggtttgaatttagggtagacactactcctatatgccccagtagtgccctattctcccttagttggaattttttaagtgaatgaaaagccgtatttcatttcttctagctaaatttcctacttctttgtattattaagtaggtcttttccactcatgatcctaagcatcacacacaggttaaggcatccaaaggtcaaactgccatcctacctgccccatttttacttgagtttggctgagaacattctctattcacctcttcatccctccctgattggtttaggctaatcttgggttctgcttaggcaatattgcctaccaaagctgttcccagaggaagagctccagaagtcctagctgtaaatcaatcgctcaacgatagcaaactcctaccgcgcttggcagttctttctccagacctagatcatctttcgagttccctactccctccttcctcctcgtaatccaacactctgtayaccttaagtgcttaaatgctgaactgcattgctacttttgtttgtatctctcaaaaacgatatttccattcttatttttttccgccctccttttctaataacgagttctgtgctcggctcagacttataagcttataagtctggaaaaactgcgccaatgcggttgcttcagagaccggactaaaggcacagcaaatgcttaatgaaaagttgctgaattgaacgggcttcttccggctccggagcctgccaccctacacttgctttctcgctccgcccgcgcccagaagcactcaaacatgctgagaaccgaacaggcttctcgagcctaggtttctgaaagaccgggccagggtctcgtttcctgtttgcactgctccctaacctcctaattcagcaaggagcacgagtcacacagaagctctcggacccactgtggaccgagtttccagacaagtcctctcgccccaaacgcgcccgcactctcacccggac

SEQ ID NO: 695382 - DNA, 3068 bp, Homo sapiens
caatatgttctctactcccatgatgttcatttcttaatgaatagatggaagtaaaagatgatagcaaatcccagtgctgtgtttctctgttcaagattctggtgaattccctaagtagccctgatacaccaggaaatcagcatatcctattgttgccttttccattggaaataggtggcattagcagatagtgactattatctaagttcttgcctgggcttccttgatgtaaacttcattcaagaacaatgactacattgagggaagagaaaaatataaaacctgccgagccttatacctcagacatttttgtttgtaaatgatgaaatttgcattttaagcttgcccctaagtatttcatatgagctaagagggtcgtgatttcatatcatgtttagccaagaaattctgttctggaacagggtagaaaaggggatcacagcctatctccccatttttgaaagcctgcagacttagccacagaaaggcaactcctctctgttgtctataccctaaaatcaaggaaaaaggtatccactgaagaatcaaatagattcatagaaaaagattcctactattggtcagaggaggtttgctgtgtaggaaatatctgagtgtatttttaggtaatctacagggagtagaacctgtgactgtttttgtgtgtgtgtcctgaaatttctgtatcaaaattattctaagaatcttaagtctttagcaaggtcttggccaagtttggcattttgaagacaggagcatttttttttctataataaatatctacttactcataayagagcacaggtaggatccctggcatattgtactatctagtggacacagcccctctattttatcttcaacgtaaattagaaaccaatacccataatttctatttcgcacataaaagagctaatgcacagatttaaacgggtttttttttttatattaagcaaattaatcaaagagtcagaatcaatacctacatggtgtgaatcctagtttatgttcttgttatactgttctggtacttatttgaattatttaaaaattattttcatttcctctgccagtttaaaaacctattaataattttgtctttgtgaccatctcccattaaatttccaaagaaaatgtttattaaatatgcctaatctttaaacaagcaatgactaacaactagaatttcaccagagattttcaaaaacatggatgctctattgttactttcacataggtttcatcacattgaggcaaagtcttgcatatatgtgtgattttcactgattccaagtttggaagtctggctgaaaccagactatgccctaaaattatattttacattaagaattaaggtgttttccttaaataaatatctactaagtaactcaagtcaatcactccctggttttctgcccctgtgcttcaattcttcccttagttgtggacccttagcctcacacagaagcatttaaaaagccagatccctgatcttcatcctcatcctaacttttctagtcttcacttcctcatttgtctattgattaggttggataaataatctttatattgtttaaggtaatactacttgctgtaacacaaaaaccccaaatatatgataggtcaaacattatagaaatgtactttttactccaataagctcaacaagcaatgttcctaattggtgagcagctcagtgatgtggggtcttttcatgttgtacttccatcattgtcaatcatgcctgtcaaagatgcctcctttatttactgaagtgcaatgggaaagaacatggatgctcatgtataaggagggttttatggctcagcctggagaggcacacactagttctggtcatgttctgctagcaagtattcagtgacttggccacaaataaagcaaggaattgtggaaaatgtatgctcagaaagaagaagaaaagttttaataagagcgaccttccatagtgtctgtgttacaggacagagaaatatgttacaggaaaggggtcccaatccagaccccaagagagggttcttgaatctagcgcaagaattcagggcaagtccgcagtgcaatgtgaaagcaagtttattaagaaagtaagggaataaagaatggctactccatagacagagcaaccctaagggctgctggttgcctatttttatggttatttcttgatgatatgctaaacaaggggtggattattcatgcctcaccttcttagaccatatagggtaacttcctgaggttgccatggcattcgtaaactgtcatggtgctggtggagtgtagcaatgaggatgaccagaggtcactcttgtggccattttggttttggtgggttttggctggctccttcactgtgagctgttttgtcagcaaggtctatgtgacctgtattttgtgctgacctcctgtctcatcctgtgacttggaatgtctcaaccgtctgggaatgcagcccagtaggcttaagcctcattttacccagcccctgtgtaagatgaagttgctctggttcacatgcctctgacatctgcacagtgccatctaatttcccatattatataactataggatatgtagggctgttgctggtatttaatgaggcataaggcttatttcagatatttataagttaatattcttttattttctttttttatattatagtcacttaaatagattagtcatcattgaaattacatatactaatgttaaatgtctaaaatagactttcttgacctaaatcaagttctatttctgcatctagccagtttagttttgttatcaccctcttagctcctgctttttgattgttctgtaactgacaaaactttgagatttctcataattcttaaaccagtttctttcggattctatagattttaaatttctaactttcccttcagcagtttctaacttactctattttatttaattcattgggccaaaagtaactgatgtgctctccagtaaagatgtcaaacttaattatatgaccatcatcctgccttagcattgtaacctcttttaatgcctctgacgacaccagtgtttta

SEQ ID NO: 695383 - DNA, 669 bp, Homo sapiens
acactccatccttgaaaggattagagatgaacacatgaattgtttctctcattcctgaagacctacttcttcaaaaagttaaagcctttttttcctattttctttctaaagtaagattaaaatatgtccacacagaaacctgtaaataattttttatttcagctttatttgtaataactctaaactgaagaaaactcaaatgtatttctttcagtggactgatggataaacaatctctggcacatccacaaaatggaacagcactcatcccatctaatacgtagatctcagaggctttatgctaagtgaaaaaaaagcatcctgaaatgttacatattgtatgagtctactcgtataacactttcaaaatgacaaaaytttaggggtacagaagagttcagtggttgccaggagttagggctatgggagagtggagagtgtgactataaagaaataacagcaggaattttctctgtagtgatggaacagttatgtatcttgattgtgttagtggttagaacaactatacatgaaataacattgcattatattatacaccaaaaataaattgcatgtaaaaatcagtgaaactttatttcacttaacataaagtccaacaagttcatccatgttgtcacaagtgacaggctttattatgttaaatgacat

SEQ ID NO: 695384 - DNA, 669 bp, Homo sapiens
acactccatccttgaaaggattagagatgaacacatgaattgtttctctcattcctgaagacctacttcttcaaaaagttaaagcctttttttcctattttctttctaaagtaagattaaaatatgtccacacagaaacctgtaaataattttttatttcagctttatttgtaataactctaaactgaagaaaactcaaatgtatttctttcagtggactgatggataaacaatctctggcacatccacaaaatggaacagcactcatcccatctaatacgtagatctcagaggctttatgctaagtgaaaaaaaagcatcctgaaatgttacatattgtatgagtctactcgtataacactttcaaaatgacaaaattttaggkgtacagaagagttcagtggttgccaggagttagggctatgggagagtggagagtgtgactataaagaaataacagcaggaattttctctgtagtgatggaacagttatgtatcttgattgtgttagtggttagaacaactatacatgaaataacattgcattatattatacaccaaaaataaattgcatgtaaaaatcagtgaaactttatttcacttaacataaagtccaacaagttcatccatgttgtcacaagtgacaggctttattatgttaaatgacat

SEQ ID NO: 695385 - DNA, 635 bp, Homo sapiens
ttaattaatatttttgtttataaaatcaatgctatataattttatcttttttgaaacaatattatgacagtgtcaaagagygtcatgaaagatttaaaataatttgctgctttactttatattagaacaaatgatgaagtacaattagtttactatctagtgatctggcaggcagatcctattcaacaattatggaataaacaaaatttctctccctctttgaagatggcaattctctcccccaagctccccctgaaaaccccttctttgtttagagttccctgccacaactttgcacaaaactaccatgttttcacttcttcctgcatgtcaaaacacacacatttttagttctgccccctcagaacctccgctagtaacagcaggtgttaagattatataaactaatccagctaatgagttaactagaaaatgcatcacattgattcaacaaaataccttaactcttaaaagcatacattaagaatggtaataataacagacttttcacgtacgttctggttggaggtaacatttttactgtgtttgttcttatggctctcaattctcacccttccaactcttacaattcaacttggccattcctatattctgggcattttaaatccattgaa

SEQ ID NO: 695386 - DNA, 553 bp, Homo sapiens
ttcctgcccatcagactccaagttcctcagcttttsgactcttggacttacaccagtggtttgccagggactctcgggcctttggccacagaccgaaagctgcactgatggcttccctacttttgaggttttgggatgtgcactgatccaccactggctccttgctcctcaacttgcagacggcctatcatgggactttaccttgtgatcacgtgagtcaattctcctgaatatgctccctttcatatatacatctattctattagttctgtccctttagagaaccctcactaatacatacaccaacttacctccctcattcatagactcctggtcctttccaccccaactctagacattacctaggggatttcatgcaaatgccccttgtaacaagttagtcccttaatttttccaacatttttgtcattgcagcccagttttgacttgtaaaatgttggagacgcacatcaaacaggtaacaaaagactcaaaatggcattaaataagtcagcaacaatttcaaaactgtcatgactacggaacatcagca

SEQ ID NO: 695387 - DNA, 759 bp, Homo sapiens
catatatggatttactttatttccatttatggcaagtgataccagttttccacatgtggtaataatgtaaacttttcttctaaaatatatttattattagtaaaaatgagtaaattaaggaaaatagtatgcactgaaatttggaaaacactagcataacaaatatgaagtatttgcttaatacttttaagcttggcaaatagtaaatacataatgaaagatagctactattttttagatacttttagttactttttagttaaattattgtgaaattctacattaacatgatttaatttaccatttaaaatttatttaacaattagatattccctgtccacaacacgccaggccctgggaattcaaagatgaaaatgaatgaaatagaccctgcttccaaagagctaccattttggtggtgagagagatactaaataaccagtaaaaatataatggttttgtttttgttttttgagacagagtttcgctctgtcacccaggctgcagtgcagtgatgcgatctcagctcactacaacctccgcctccccggttcaagtgattcttgtgcttcagcctcccgagtataggtgcgtaccactacgcctractaatttttatatttttagtagagacgggttttcgccatgtttgccaggctggtcttcagcccctgaccttaagtgatctgcccacctcggcctcccaaagtgttgggattacaggtgtgagacactgtgcccagccacaatataatgttt

SEQ ID NO: 695388 - DNA, 759 bp, Homo sapiens
catatatggatttactttatttccatttatggcaagtgataccagttttccacatgtggtaataatgtaaacttttcttctaaaatatatttattattagtaaaaatgagtaaattaaggaaaatagtatgcactgaaatttggaaaacactagcataacaaatatgaagtatttgcttaatacttttaagcttggcaaatagtaaatacataatgaaagatagctactattttttagatacttttagttactttttagttaaattattgtgaaattctacattaacatgatttaatttaccatttaaaatttatttaacaattagatattccctgtccacaacacgccaggccctgggaattcaaagatgaaaatgaatgaaatagaccctgcttccaaagagctaccattttggtggtgagagagatactaaataaccagtaaaaatataatggttttgtttttgttttttgagacagagtttcgctctgtcacccaggctgcagtgcagtgatgcgatctcagctcactacaacctccgcctccccggttcaagtgattcttgtgcttcagcctcccgagtataggtgcgtaccactacgcctgactaatttttatatttttagtagagacgggttttcgccatgttkgccaggctggtcttcagcccctgaccttaagtgatctgcccacctcggcctcccaaagtgttgggattacaggtgtgagacactgtgcccagccacaatataatgttt

SEQ ID NO: 695389 - DNA, 759 bp, Homo sapiens
catatatggatttactttatttccatttatggcaagtgataccagttttccacatgtggtaataatgtaaacttttcttctaaaatatatttattattagtaaaaatgagtaaattaaggaaaatagtatgcactgaaatttggaaaacactagcataacaaatatgaagtatttgcttaatacttttaagcttggcaaatagtaaatacataatgaaagatagctactattttttagatacttttagttactttttagttaaattattgtgaaattctacattaacatgatttaatttaccatttaaaatttatttaacaattagatattccctgtccacaacacgccaggccctgggaattcaaagatgaaaatgaatgaaatagaccctgcttccaaagagctaccattttggtggtgagagagatactaaataaccagtaaaaatataatggttttgtttttgttttttgagacagagtttcgctctgtcacccaggctgcagtgcagtgatgcgatctcagctcactacaacctccgcctccccggttcaagtgattcttgtgcttcagcctcccgagtataggtgcgtaccactacgcctgactaatttttatatttttagtagagacgggttttcgccatgtttgccaggctggtcttsagcccctgaccttaagtgatctgcccacctcggcctcccaaagtgttgggattacaggtgtgagacactgtgcccagccacaatataatgttt

SEQ ID NO: 695390 - DNA, 759 bp, Homo sapiens
catatatggatttactttatttccatttatggcaagtgataccagttttccacatgtggtaataatgtaaacttttcttctaaaatatatttattattagtaaaaatgagtaaattaaggaaaatagtatgcactgaaatttggaaaacactagcataacaaatatgaagtatttgcttaatacttttaagcttggcaaatagtaaatacataatgaaagatagctactattttttagatacttttagttactttttagttaaattattgtgaaattctacattaacatgatttaatttaccatttaaaatttatttaacaattagatattccctgtccacaacacgccaggccctgggaattcaaagatgaaaatgaatgaaatagaccctgcttccaaagagctaccattttggtggtgagagagatactaaataaccagtaaaaatataatggttttgtttttgttttttgagacagagtttcgctctgtcacccaggctgcagtgcagtgatgcgatctcagctcactacaacctccgcctccccggttcaagtgattcttgtgcttcagcctcccgagtataggtgcgtaccactacgcctgactaatttttatatttttagtagagacgggttttcgccatgtttgccaggctggtcttcagcycctgaccttaagtgatctgcccacctcggcctcccaaagtgttgggattacaggtgtgagacactgtgcccagccacaatataatgttt

SEQ ID NO: 695391 - DNA, 630 bp, Homo sapiens
agatttatgttgacttatcttaatgtagacaaagcatactcattacattgcttaatggatgatagtacccataaaaatgtcaatattatctttggatttcagatatgaaatgtaaggtaatctacaaaagtggaaatgtggttagaacagaaatgatgaagtgattgcacaacagtttaagacagaacaaatatttcaacactctcaaggccataaagagcaggggattgggacaaataaatgggcaagaagggaccacaatgatcctagtggtccacaagctaaccatgtattagggttttttttgagactcaatatttggattttagaaaagactgcatcagacaggaatttttaagtaaccattctcaacaggggaatagtgacaatagcttcaagctttgacgttttaygggccaagtgtggaattatgtttgctactttcctctctgtttcatagtggcatgttaagtttgcaaccaaaaatcacaggagctgtaacttttctttcattttacaactcagcgtaaacctgaataaaagtaaaagttaataacagggcaaagcaagccttaataaaattcaacagatccttctggatacatgtacttcttggtgattattatttgc

SEQ ID NO: 695392 - DNA, 1742 bp, Homo sapiens
tatagtgttcctggtcatttaagacagacatcaatggaaaaactcctacagagatggcctctccatttaaacatattgacctctgtgctggtagttttctgtttgcctccagatctacttattgtccttctccagactactctgctctcctacccacttgcttccagttaggtttagtccatggaagttactagcattgaacagaaaaccaggagcaaaaactggggtatttattccccctactcctctgccaggttgtcaggtggcattctccatggtgatgactcttgctgggctctggaaacagctttgtccctttgtcccttcagtgctagggtggtatcaatgttgctagtacacgggtgctttactatttctttttggctcccttgttccttcctatgcctctgtaaatggtccctgcattaaattcttatcagtcaccactttgggtgtgccatctgtttcctgtggggacttttactgagatatctttaattgccattcggaggctggaagactggcttgcaacttaacacgctaggttaggtagaattcagaagtcacccttgggattctaacacttcaaatctcagatatttcttcaagttcatgataaatccaatacactttctattgatgtgatttcccaaaatacactctaaactccaggaataagttaaattaagaattctgaattctctggcagacacctccctgagtacaggatctcgaggcagctatctttagagacacagaaagcaaaggcatttcttgagagctttactgtgagacatctggtttcctctggtgagccaaactggtctatatgtgggccatgggggtcattattgcccctctagcctaagagctcaactaaaagcaaactaggcagtctccatggtctgtttccccagactcacatccagggatggagaaaaactggggtgactctttaaaccaatatgcttgaaatgttcgttcaacacttattcagtggggtatgggttgagagttactaagaatagtttttttttttaatttcttgtctactttgacatgagtgagatcaatttatatattttgttagttatagtgaaaaaacaaaaagacatgtatagagatctgagctaattggctccttatgggtgggcacaggggacccatcaaagaatattccgattcttctctccagaaggtcagccttctagagtagatgcccaattaattgtgcctatatcagaaacttctctataggagtgaaatgagagctcatccagaaggtaaaatggaccacaatcagccttcttgctgtggggtgtattagaacaacactttttaaaaaagagatgggggtcctgctatgttgcccaggctggaatcaaactcctgggctcaagtgatactcctatctcagcctcccaagtagctgggactataggcacgcagcaccatgccaggctaataacaccattttctgtggtgggaatgacccgtcsagcattggaaactaggggctgagactgactaaagatgaacaaatgaagaaaaaggggtaaatgggacaaagactgagcagtatttttttttcccaagtcctcttctcccccgctcaatcagtgaaggagagatgagtaccatcagcaactgaatggtgggctaaagtgatagagggaaggcaagcaaattaattcagttgctttaacagcagctatgtggcattgtgagtttgtgttcaagtc

SEQ ID NO: 695393 - DNA, 626 bp, Homo sapiens
agaggcattccttggccctttggatgagattaaaaccccttgccataagctcagatagtacctccatcttgaactgtaaccatcattgtttcatgtctgtcttctttgggagactggaaacaccaagaggacagggaccctcctcatctcgtttatagctgtgatcagcagctaaagattttctgtattgaattgaattgaaataatagttttatatcatttataaattattataaggagcatacattgcttttatcatacaaaattttatttttatayatatttttttcgagatggaatctcgctttgttactcaggctggagtgcagtggtgcgatctcagctcactgtaacctccaccacccaggttcaagcgattcttttgcctcagcctcccaagtacctgggactagaggcgcacaccaccatgcccggctaatttttatatttgtagtagagacggggtttcactgtgttagtcaggctggtctcgaactcctgacctcaagtgatctgcccgccttggcctcccaaggtgctgggattacaggcgtgagccaatgtacccggccacaaatttttaaaagaaaattatcaatggctccagggagttctagacctgaaac

SEQ ID NO: 695394 - DNA, 626 bp, Homo sapiens
agaggcattccttggccctttggatgagattaaaaccccttgccataagctcagatagtacctccatcttgaactgtaaccatcattgtttcatgtctgtcttctttgggagactggaaacaccaagaggacagggaccctcctcatctcgtttatagctgtgatcagcagctaaagattttctgtattgaattgaattgaaataatagttttatatcatttataaattattataaggagcatacattgcttttatcatacaaaattttatttttatacatatttttttcgagatggaatctcrctttgttactcaggctggagtgcagtggtgcgatctcagctcactgtaacctccaccacccaggttcaagcgattcttttgcctcagcctcccaagtacctgggactagaggcgcacaccaccatgcccggctaatttttatatttgtagtagagacggggtttcactgtgttagtcaggctggtctcgaactcctgacctcaagtgatctgcccgccttggcctcccaaggtgctgggattacaggcgtgagccaatgtacccggccacaaatttttaaaagaaaattatcaatggctccagggagttctagacctgaaac

SEQ ID NO: 695395 - DNA, 626 bp, Homo sapiens
agaggcattccttggccctttggatgagattaaaaccccttgccataagctcagatagtacctccatcttgaactgtaaccatcattgtttcatgtctgtcttctttgggagactggaaacaccaagaggacagggaccctcctcatctcgtttatagctgtgatcagcagctaaagattttctgtattgaattgaattgaaataatagttttatatcatttataaattattataaggagcatacattgcttttatcatacaaaattttatttttatacatatttttttcgagatggaatctcgctttgttrctcaggctggagtgcagtggtgcgatctcagctcactgtaacctccaccacccaggttcaagcgattcttttgcctcagcctcccaagtacctgggactagaggcgcacaccaccatgcccggctaatttttatatttgtagtagagacggggtttcactgtgttagtcaggctggtctcgaactcctgacctcaagtgatctgcccgccttggcctcccaaggtgctgggattacaggcgtgagccaatgtacccggccacaaatttttaaaagaaaattatcaatggctccagggagttctagacctgaaac

SEQ ID NO: 695396 - DNA, 626 bp, Homo sapiens
agaggcattccttggccctttggatgagattaaaaccccttgccataagctcagatagtacctccatcttgaactgtaaccatcattgtttcatgtctgtcttctttgggagactggaaacaccaagaggacagggaccctcctcatctcgtttatagctgtgatcagcagctaaagattttctgtattgaattgaattgaaataatagttttatatcatttataaattattataaggagcatacattgcttttatcatacaaaattttatttttatacatatttttttcgagatggaatctcgctttgttactcaggctggagtgcagtggtgcgatctcagctcactgtaacctccaccacccaggttcaagcgattcttttgcctcagcctcccaagtacctgggactagaggcgcacaccaccatgcccggctaatttttatatttgtagtagagacggggtttcactgtgttagtcaggctggtctcgaactcctgacctcaagtgatctgcccgccttggcctcccaargtgctgggattacaggcgtgagccaatgtacccggccacaaatttttaaaagaaaattatcaatggctccagggagttctagacctgaaac

SEQ ID NO: 695397 - DNA, 1371 bp, Homo sapiens
ggttctctcaatctctttctggggaaaaaaaaaaaatctataagacagcccagaactaacatagttagacctgagtttgggctctatctttgtcactaaccagctgcatgttccttaacaagtcactttaatatcccgagcgttggtttcctcatctgtaaactaagatgaataatgcctggctgataatgtggctgtgaagattaaaatgggtcatgcctttgaatatgctttataaaattcagttcttctttcatttcctcagccgattgctcatgttcctctaatacactgtccccaccctggacaacctctagcaggtatatgcacacctgaagatactgagacagggagactgactagttgagattcactgaggctgatgtgtctagaaagttgctcactaagtattcccgcagggtgtttgaagcctcttcctggatgcctggtgagacgagacactttgaatccaccttgcaaagctcctgctccaagacagctgcagcttgtgctctgtagagcgatatgaaataattgcccgttggcacaataagcccatctcctctccgggcagcacaaaagaaagctcaaaagcatctccggttttgattgccaagtgggggaggcagtgaaagtacactaaattatgagtccaggtgcctctctacagaaatccacttccgcctcgctgccgctctgaaggcgcgcagtgggtgttgacgtcaccttcggccacaggagcttggagaggctggggccctgactccccgcgggatccgctggtagaccagggcgtgctctcagactggaagtgcaggaaggctcgcttactctcgccatagaccagactgacaggggtctgccaaggctgctgggaatgtgggaagtgaactttaggtggaaacagaaaagcttctctctccgtgggtagccttttttttttttttttagttcaggagagaaaaaaaaaatcatagaagcctgccaagccaaataaactatgctcaattaagtctttcaactgtgcaattcctcttgttgattttatgaggaaaagggcagaatagaaacatgatgggcttgtttaaaatacttcaaaagggaagaacctatattctcctgcttcccagaccgacctctttcgggctttcctttcctccagccatgctgcaggcctttcactgtcatctcctccatctgtgataaagctgtccacagaacccgtcctcagctgctttctcaccacacaccctcactcagggcatgtcctccatgtcatgcccctcatccaggcctgtgactcccaaggagctgaatcagccraaactctccctccccaaccccaactccaggcgcttatacctcactccc

SEQ ID NO: 695398 - DNA, 2571 bp, Homo sapiens
tttaagtgcaaatattcttaaatttaagccagcctagaagggtggagtggggttagggtgacatgtttttatgtaggttgaaatgcttaatttagacacttgcccatgcagaggccacttccctggttttgcataaagttggcttgaagggctaccaatgagcagaaaacaaggtttgttccaaaccaggaatatataagcagatgaggccaggtctctatgccccagaacaatgctgcaacagaaaggagaatggggaggaggaagactcataggagagatgctaaagggataatgtcttcaaaactggccactagttgactttaaaaaaaagtggcatctaggaggactctcaggttgggaaaaactttcattcaggggctcttttcttgtcattgtattgctctgagcaaatcattcyctgtccagttactgctggtaaagagaaaaggggctgctgcagcccaacactacaggaatcagctgcaagcttcaaagagggtgcctcgccagagaaaataacaagagagggactcccccgagcccacacttgaggccgagtgactgcaatcaggagcgaaggcttctgaagaggagcaatgcctgaagctgaggtataagcagtctcccagggtcagggtctccctgaggtggagaagcctgtaggctgtccaccctgagggcctgggcaagtgcttgtggtccctacacctcattcccttggtcacctgcttgtagttcagctataatggacaggtccactcatgatgcctctgcacctactcaagtgcatgctacgcttttctttattccctcaggagatttctaccaacctatggggggcagctgggaagtgtgggggaggtaacagccccagaaacagcccttagccagtagatccctatgggatggaagtggtagataaatgccccagctgttcctcccttcagtgctacaatcctgaggcatattctacagtttctcagagggcccctagtagaatgagccttagttgcccaggaagcagaagttatggaacaagaaaagtgggacagaaaaaaagtcaacaaaatctgtgttatggagtgggctattgctatgggatcatctcctaagtaagacaggtatcatgatctcaggctctgctttcacagaaacctagactaagccagcctctatcccagaattagtgaactataagattgggtcaaggaacactccccaaaaggcattaggaaggaatacagtaatggaaaatataaaagaagagttaagagatctggctgctagaagtagatttgtcactattcaaataataaaaaggaggagttccaggagcagacaagaaaatttttgtaatagttcaagttagtttgtctctgttgaactttattgagtagatagatatcaactgccttctcactatctcttatcttcaatttctcctaccttaaagctaaggaagtagaggggagacaagttcaatgggtcaggcatgttgcccttgattcatttcccttggcatctggtgatcaaagctgctcagacctcagtttgagttggtcatctctctgctctacagctaagacaccatggctattggccttcatctacctcaactcattggcttatcttcccagacatttgaattgcagcttctaatcattggggggaatgactttccaagacagtgagggtgaaaatctggatgtgcactctcctcatgaagggaagaggagcaactgtggagctgtgttgttcctggcaaggccagaggggacaatctttgctgtctaggatcagaaggagctttaggccctgccataccaatgagggtcagaaatgccaaaatgagtctagaaattacagccttcactttggtggctccttagactagcccaacatcactttcctctctccttctttctcttcctcccaatacatattgttcctctgtaactctgggtgaacatcccatcccacaaaaatggcaatgactttaggagtaatgctgagacccaagtggaggattttcccataatttttctttttttctttctttactttttgttgggcaagacagggagggcaggttttgctgcgagagatcagagacctgctttcacaggctttctgtatgagctacagcagctacctttcagccagacagatcttctctagcctctcagtggaacctgtgtgagattaatatatcaagtcccattttcctgagagaaaaactgaaacataactaataattagttaagtgtatactccctacatatatatgtcatagatacttttaaatgtattattactaatccaatataaaatttaattggaatgttttaaaatattttattaactcaaaatagggagggaaaagggaattgtaactgcaaaaactcaaaacaaaacatagaacaacaaacaggaaaatggtagactttcaaaaccatatcaataattacatataaatgacttaaaccattcaatttaaaaggcagagattgtcagaatggattttaaaaagaagatcccctttaaatatcataacagagataagttgaa

SEQ ID NO: 695399 - DNA, 2571 bp, Homo sapiens
tttaagtgcaaatattcttaaatttaagccagcctagaagggtggagtggggttagggtgacatgtttttatgtaggttgaaatgcttaatttagacacttgcccatgcagaggccacttccctggttttgcataaagttggcttgaagggctaccaatgagcagaaaacaaggtttgttccaaaccaggaatatataagcagatgaggccaggtctctatgccccagaacaatgctgcaacagaaaggagaatggggaggaggaagactcataggagagatgctaaagggataatgtcttcaaaactggccactagttgactttaaaaaaaagtggcatctaggaggactctcaggttgggaaaaactttcattcaggggctcttttcttgtcattgtattgctctgagcaaatcattccctgtccagttactgctggtaaagagaaaaggggctgctgcagcccaacactacaggaatcagctgcaagcttcaaagagggtgcctcgccagagaaaataacaagagagggactccccygagcccacacttgaggccgagtgactgcaatcaggagcgaaggcttctgaagaggagcaatgcctgaagctgaggtataagcagtctcccagggtcagggtctccctgaggtggagaagcctgtaggctgtccaccctgagggcctgggcaagtgcttgtggtccctacacctcattcccttggtcacctgcttgtagttcagctataatggacaggtccactcatgatgcctctgcacctactcaagtgcatgctacgcttttctttattccctcaggagatttctaccaacctatggggggcagctgggaagtgtgggggaggtaacagccccagaaacagcccttagccagtagatccctatgggatggaagtggtagataaatgccccagctgttcctcccttcagtgctacaatcctgaggcatattctacagtttctcagagggcccctagtagaatgagccttagttgcccaggaagcagaagttatggaacaagaaaagtgggacagaaaaaaagtcaacaaaatctgtgttatggagtgggctattgctatgggatcatctcctaagtaagacaggtatcatgatctcaggctctgctttcacagaaacctagactaagccagcctctatcccagaattagtgaactataagattgggtcaaggaacactccccaaaaggcattaggaaggaatacagtaatggaaaatataaaagaagagttaagagatctggctgctagaagtagatttgtcactattcaaataataaaaaggaggagttccaggagcagacaagaaaatttttgtaatagttcaagttagtttgtctctgttgaactttattgagtagatagatatcaactgccttctcactatctcttatcttcaatttctcctaccttaaagctaaggaagtagaggggagacaagttcaatgggtcaggcatgttgcccttgattcatttcccttggcatctggtgatcaaagctgctcagacctcagtttgagttggtcatctctctgctctacagctaagacaccatggctattggccttcatctacctcaactcattggcttatcttcccagacatttgaattgcagcttctaatcattggggggaatgactttccaagacagtgagggtgaaaatctggatgtgcactctcctcatgaagggaagaggagcaactgtggagctgtgttgttcctggcaaggccagaggggacaatctttgctgtctaggatcagaaggagctttaggccctgccataccaatgagggtcagaaatgccaaaatgagtctagaaattacagccttcactttggtggctccttagactagcccaacatcactttcctctctccttctttctcttcctcccaatacatattgttcctctgtaactctgggtgaacatcccatcccacaaaaatggcaatgactttaggagtaatgctgagacccaagtggaggattttcccataatttttctttttttctttctttactttttgttgggcaagacagggagggcaggttttgctgcgagagatcagagacctgctttcacaggctttctgtatgagctacagcagctacctttcagccagacagatcttctctagcctctcagtggaacctgtgtgagattaatatatcaagtcccattttcctgagagaaaaactgaaacataactaataattagttaagtgtatactccctacatatatatgtcatagatacttttaaatgtattattactaatccaatataaaatttaattggaatgttttaaaatattttattaactcaaaatagggagggaaaagggaattgtaactgcaaaaactcaaaacaaaacatagaacaacaaacaggaaaatggtagactttcaaaaccatatcaataattacatataaatgacttaaaccattcaatttaaaaggcagagattgtcagaatggattttaaaaagaagatcccctttaaatatcataacagagataagttgaa

SEQ ID NO: 695400 - DNA, 2571 bp, Homo sapiens
tttaagtgcaaatattcttaaatttaagccagcctagaagggtggagtggggttagggtgacatgtttttatgtaggttgaaatgcttaatttagacacttgcccatgcagaggccacttccctggttttgcataaagttggcttgaagggctaccaatgagcagaaaacaaggtttgttccaaaccaggaatatataagcagatgaggccaggtctctatgccccagaacaatgctgcaacagaaaggagaatggggaggaggaagactcataggagagatgctaaagggataatgtcttcaaaactggccactagttgactttaaaaaaaagtggcatctaggaggactctcaggttgggaaaaactttcattcaggggctcttttcttgtcattgtattgctctgagcaaatcattccctgtccagttactgctggtaaagagaaaaggggctgctgcagcccaacactacaggaatcagctgcaagcttcaaagagggtgcctcgccagagaaaataacaagagagggactcccccgagcccacacttgaggccgagtgactgcaatcaggagcgaaggcttctgaagaggagcaatgcctgaagctgaggtataagcagtctcccagggtcagggtctccctgaggtggrgaagcctgtaggctgtccaccctgagggcctgggcaagtgcttgtggtccctacacctcattcccttggtcacctgcttgtagttcagctataatggacaggtccactcatgatgcctctgcacctactcaagtgcatgctacgcttttctttattccctcaggagatttctaccaacctatggggggcagctgggaagtgtgggggaggtaacagccccagaaacagcccttagccagtagatccctatgggatggaagtggtagataaatgccccagctgttcctcccttcagtgctacaatcctgaggcatattctacagtttctcagagggcccctagtagaatgagccttagttgcccaggaagcagaagttatggaacaagaaaagtgggacagaaaaaaagtcaacaaaatctgtgttatggagtgggctattgctatgggatcatctcctaagtaagacaggtatcatgatctcaggctctgctttcacagaaacctagactaagccagcctctatcccagaattagtgaactataagattgggtcaaggaacactccccaaaaggcattaggaaggaatacagtaatggaaaatataaaagaagagttaagagatctggctgctagaagtagatttgtcactattcaaataataaaaaggaggagttccaggagcagacaagaaaatttttgtaatagttcaagttagtttgtctctgttgaactttattgagtagatagatatcaactgccttctcactatctcttatcttcaatttctcctaccttaaagctaaggaagtagaggggagacaagttcaatgggtcaggcatgttgcccttgattcatttcccttggcatctggtgatcaaagctgctcagacctcagtttgagttggtcatctctctgctctacagctaagacaccatggctattggccttcatctacctcaactcattggcttatcttcccagacatttgaattgcagcttctaatcattggggggaatgactttccaagacagtgagggtgaaaatctggatgtgcactctcctcatgaagggaagaggagcaactgtggagctgtgttgttcctggcaaggccagaggggacaatctttgctgtctaggatcagaaggagctttaggccctgccataccaatgagggtcagaaatgccaaaatgagtctagaaattacagccttcactttggtggctccttagactagcccaacatcactttcctctctccttctttctcttcctcccaatacatattgttcctctgtaactctgggtgaacatcccatcccacaaaaatggcaatgactttaggagtaatgctgagacccaagtggaggattttcccataatttttctttttttctttctttactttttgttgggcaagacagggagggcaggttttgctgcgagagatcagagacctgctttcacaggctttctgtatgagctacagcagctacctttcagccagacagatcttctctagcctctcagtggaacctgtgtgagattaatatatcaagtcccattttcctgagagaaaaactgaaacataactaataattagttaagtgtatactccctacatatatatgtcatagatacttttaaatgtattattactaatccaatataaaatttaattggaatgttttaaaatattttattaactcaaaatagggagggaaaagggaattgtaactgcaaaaactcaaaacaaaacatagaacaacaaacaggaaaatggtagactttcaaaaccatatcaataattacatataaatgacttaaaccattcaatttaaaaggcagagattgtcagaatggattttaaaaagaagatcccctttaaatatcataacagagataagttgaa

SEQ ID NO: 695401 - DNA, 1078 bp, Homo sapiens
  misc_feature 731, 736, 737, 738, 739, 740, 741, 742, 743, 744, 745, 746,747, 748, 749, 750, 751, 752, 753, 754, 755, 756, 757, 758,759, 760, 761, 762, 763, 764, 765, 766, 767, 768, 769, 770,771, 772, 773, 774, 775, 776, 777, 778, 779, 780, 781: n = A,T,C or G
  misc_feature 782, 783, 784, 785, 786, 787, 788, 789, 790, 791, 792, 793,794, 795, 796, 797, 798, 799, 800, 801, 802, 803, 804, 805,806, 807, 808, 809, 810, 811, 812, 813, 814, 815, 816, 817,818, 819, 820, 821, 822, 823, 824, 825, 826, 827, 828: n = A,T,C or G
  misc_feature 829, 830, 831, 832, 833, 834, 835, 839: n = A,T,C or G
tgaaacactaaagcaaattcacacacagattatttccttatatgtatatatttaatatattcaaacagtagtaagttttcttagagacaatactctttttagtaaatgcttacattttgattttctattttgtcttatttatttattatagacagaagaaaactctccaagtacacacacacacacacacacacacacacacacacacacacacccctttatctaggaaaaaggagcactttgtataatattttttcatttaatatttcctcaagaatgaaagaaaaaatgcttgcagcactatcattgaaagtttaatggctagcgggaattacaagttagttttttcccacaatttatttcagaacgtattttttgaatctgtcrtcttgatttgtgacacttattgaatgaccaattgatgatacatagatattaataaaatcaaaatagaagacacaattatcttatgtgctttttcaactaataagccccaattaaaattactactacattatttgcattatttaaataatatattttgagattttttaatacaaagttaaagattcattatgtggtgaaaatatacagattgaggaaataataaaattgttttttgtttaacaatttggcaatactggctgtcatttttaaaatatctgtaaaattaagataaattaaaattataggagcaccattattattagtagtagttttgttaatatgtncttannnnnnnnnnnnnnnnnnnnnnnnnnnnnnnnnnnnnnnnnnnnnnnnnnnnnnnnnnnnnnnnnnnnnnnnnnnnnnnnnnnnnnnnnnnnnnnnnnnnttgntttttttttcataattgaagtaagaataaaagaactgaatgagtccatctgtataatctgatcactaaaatacagactctgttgtatgacagggtaattcaaaagtatttccatagtattgatgaaatgtctaatactatctgtagatctatatttatttgctctaaataccaatttatgaaacaaactgctggctaattattttatttcacaggtatctttaaattatccagtccatc

SEQ ID NO: 695402 - DNA, 1078 bp, Homo sapiens
  misc_feature 731, 736, 737, 738, 739, 740, 741, 742, 743, 744, 745, 746,747, 748, 749, 750, 751, 752, 753, 754, 755, 756, 757, 758,759, 760, 761, 762, 763, 764, 765, 766, 767, 768, 769, 770,771, 772, 773, 774, 775, 776, 777, 778, 779, 780, 781: n = A,T,C or G
  misc_feature 782, 783, 784, 785, 786, 787, 788, 789, 790, 791, 792, 793,794, 795, 796, 797, 798, 799, 800, 801, 802, 803, 804, 805,806, 807, 808, 809, 810, 811, 812, 813, 814, 815, 816, 817,818, 819, 820, 821, 822, 823, 824, 825, 826, 827, 828: n = A,T,C or G
  misc_feature 829, 830, 831, 832, 833, 834, 835, 839: n = A,T,C or G
tgaaacactaaagcaaattcacacacagattatttccttatatgtatatatttaatatattcaaacagtagtaagttttcttagagacaatactctttttagtaaatgcttacattttgattttctattttgtcttatttatttattatagacagaagaaaactctccaagtacacacacacacacacacacacacacacacacacacacacacccctttatctaggaaaaaggagcactttgtataatattttttcatttaatatttcctcaagaatgaaagaaaaaatgcttgcagcactatcattgaaagtttaatggctagcgggaattacaagttagttttttcccacaatttatttcagaacgtattttttgaatctgtcgtcttgatttgtgacacttattgaatgaccaattgatgatacatagatattaataaaatcaaaatagaagacacaattatcttatgtgctttttcaactaataagccccaattaaaattactactacattatttgcattatttaaataatatattttgagattttttaatacaaagttaaagattcattatgtggtgaaaatatacagattgaggaaataataaaattgttttttgtttaacaatttggcaataytggctgtcatttttaaaatatctgtaaaattaagataaattaaaattataggagcaccattattattagtagtagttttgttaatatgtncttannnnnnnnnnnnnnnnnnnnnnnnnnnnnnnnnnnnnnnnnnnnnnnnnnnnnnnnnnnnnnnnnnnnnnnnnnnnnnnnnnnnnnnnnnnnnnnnnnnnttgntttttttttcataattgaagtaagaataaaagaactgaatgagtccatctgtataatctgatcactaaaatacagactctgttgtatgacagggtaattcaaaagtatttccatagtattgatgaaatgtctaatactatctgtagatctatatttatttgctctaaataccaatttatgaaacaaactgctggctaattattttatttcacaggtatctttaaattatccagtccatc

SEQ ID NO: 695403 - DNA, 1901 bp, Homo sapiens
cagtgtaaagttggattgaatttaaaagttcaaaaattcagcaggaaataagtagtgtcattttaactaacatttgaaacagtaaatcaagcagtcgttataaaaacatttcataaattcagccatccacaaactatattagaagacttgtattctataaaactgctttatagaaaagctttaaaaaaattctgcactctacaaatcaccattttaaatgcttagtaaggctacagattataataagggagaattgttaatctcaatattcaaatggaatttgtttctgttggctttactcactttatttcatagagtcaaacaaaaatttcaaakaaatgaattaaagaaaaattcctagaatagagatattctgagcgatacagttgacaagaaatagatgctttgggctaaataaatgatatgaatgtgttttcatagaaatttgagacagtcgagtacttatgctaatgttttcattataactaaaattgactagaattaaattaaactcattttactaaaagcatggcagccaatagtctcacctccctagttcaccaaaggtgtgctcatttttaattacctaaaatgcatgtatacctgaggcaagcactatatttacatagccagtaatttccttataagcaattacagcataggtttgccacacctactaatcaaattgtataatttattcttcaagttgtacacactttttaaaaagagcaaaataatgaagtacaatttgtcatcacataactggccacccaattttaaggaaaatacttgaaacatgctaatttactccttcatttttctgcatttgtaaagccactaaggctgtagattatatatatatatatatatctatatatatatatatctatatatgtctatatctatctcacagacattgccagaagttattaatacatcaaaagaaacttgaaaaatgaaacttatttttgaagttattgggagtatgtcaatttctgtatcaatgagagtccagtcagcaggtgaaaactatactgattatttaacaaagaaagtttaatagaaagatggtttatcgtgtatgagagaactgaaggagcaaaggggggacactgaaaaaggaagtttgaaaaggtgaaattgggtcttcgacttctaaggaggggcccccacaggctagtgctggtgtctctgacatgaagaggctgattctagttatgtggaaaaactacacactggaaacacttgctgttactgaattctagtgtcaccacagtgaagtattgctgaggaagtgcaaagagaagccaaacgtaaataaaaagagcaagtccctcttcctcctccagcccctccccaggacactcaattgttagagcctaacatggagccacttgtcaaaatggcagtgtggctaaccccagaattacaaagtagaaattagaagagttagctcacagctgaaaagctactgtttaataaccagcaagtcggtactgtgtcctgaaaacaatggacaagagaagtgttgatttttgtgactccattttgacgtcattttctccagaaagttttccttgcacctagcagagtacccagctcccaactggtacttgacgtttgtagaacaaatcatttgattttaaaagcaaacagatcgatcaattctcatcatcagaatcatgcctatataaatacaaatttttaactctaaacaatagtagaggtagagaaaatactttaatttgtctgaaaagcaatcattccatagttagctgtcttttgaagcatcaatcccaatttactttgagacatacttccaaatgagtttcttgatgaaactttaaagtacaaaatttgagattgtgaccaataaatacatacgcacaggcaaatatgca

SEQ ID NO: 695404 - DNA, 1901 bp, Homo sapiens
cagtgtaaagttggattgaatttaaaagttcaaaaattcagcaggaaataagtagtgtcattttaactaacatttgaaacagtaaatcaagcagtcgttataaaaacatttcataaattcagccatccacaaactatattagaagacttgtattctataaaactgctttatagaaaagctttaaaaaaattctgcactctacaaatcaccattttaaatgcttagtaaggctacagattataataagggagaattgttaatctcaatattcaaatggaatttgtttctgttggctttactcactttatttcatagagtcaaacaaaaatttcaaagaaatgaattaaagaaaaattcctagaatagagatattctgagcgatacagttgacaagaaatagatgctttgggctaaataaatgatatgaatgtgttttcatagaaatttgagacagtcgagtacttatgctaatgttttcattataactaaaattgactagaattaaattaaactcattttactaaaagcatggcagccaatagtctcacctccctagttcaccaaaggtgtgctcatttttaattacctaaaatgcatgtatacctgaggcaagcactatatttacatagccagtaatttccttataagcaattacagcataggtttgccacacctactaatcaaattgtataatttattcttcaagttgtacacactttttaaaaagagcaaaataatgaagtacaatttgtcatcacataactggccacccaattttaaggaaaatacttgaaacatgctaatttactccttcatttttctgcatttgtaaagccactaaggctgtagattatatatatatatatatatctatatatatatatatctatatatgtctatatctatctcacagacattgccagaagttattaatacatcaaaagaaacttgaaaaatgaaacttatttttgaagttattgggagtatgtcaatttctgtatcaatgagagtccagtcagcaggtgaaaactatactgattatttaacaaagaaagtttaatagaaagatggtttatcgtgtatgagagaactgaaggagcaaaggggggacactgaaaaaggaagtttgaaaaggtgaaattgggtcttcgacttctaaggaggggcccccacaggctagtgctggtgtctctgacatgaagaggctgattctagttatgtggaaaaactacacactggaaacacttgctgttactgaattctagtgtcaccacagtgaagtattgctgaggaagtgcaaagagaagccaaacgtaaataaaaagagcaagtccctcttcctcctccagcccctccccaggacactcaattgttagagcctaacatggagccacttgtcaaaatggcartgtggctaaccccagaattacaaagtagaaattagaagagttagctcacagctgaaaagctactgtttaataaccagcaagtcggtactgtgtcctgaaaacaatggacaagagaagtgttgatttttgtgactccattttgacgtcattttctccagaaagttttccttgcacctagcagagtacccagctcccaactggtacttgacgtttgtagaacaaatcatttgattttaaaagcaaacagatcgatcaattctcatcatcagaatcatgcctatataaatacaaatttttaactctaaacaatagtagaggtagagaaaatactttaatttgtctgaaaagcaatcattccatagttagctgtcttttgaagcatcaatcccaatttactttgagacatacttccaaatgagtttcttgatgaaactttaaagtacaaaatttgagattgtgaccaataaatacatacgcacaggcaaatatgca

SEQ ID NO: 695405 - DNA, 2854 bp, Homo sapiens
ctgaataggaaggcaaggggaatggacattagcctggggcctagtacctgtacactccccacggctcctttggtccctgacacccccagggcccaggaacagattactactaagggcttggctgtcactgactcccagcctcgtatctatctgcctgggaggggacttggcgagtgtctgggacacagggtgatggtagtaaagtggccctttctcccagggaccccagggggctgagccatggtttgtagatcagtcaccaggctcaggcccaatggccgtatcgttaatcgtggctgtctagaccgccagccaggacacccttcctccaccaaaaacacacacacatatacacactcggttggccacacctctggtggtgcttggggatggacctgggccaagtgtgcccacaggaagtggtgctaaaggagcaggatttcctgggggatggcattgccagggccagcacctctcctcttcagggttttgcaatgagtttatcaaaccatggtctccagacctcctgcatcagcatcccatggagtgtttgttcaaaatgcagatacctggacctgtctccaagcccacaggatcagaatctctggagaagagacacagccttctgcatatgtaacatggtccccaggggatccctatgcaaagtgtgagaacatctacgttctggtgatggggctggaggatgatttaggtgggggtccttctttcccaccagctaccggaggccggccccatcccagcagctccccacactctgcccacagcccctttcccgctaacctctgttcgtgtcttattctcaaacttccagccagatgtttaataataaacggagtttttttcggatccacgccagctggagaccgaggtaccccctcrcctgctcctcctgtccccactctccttgccccacccaatttgggggctggagaggggacaggatgggccaaggacaaggtgcatgtgcctgccgcctgccgtctgccttgggtgcccagtgaacccctcgcctttctgggatgcctctgctaggtctggggcatgggcccagggtgccaggaggggcacgtgcaggagccttaaggatgtgtgctggctctgctgctgatgccctctgtgatcttggccaaattgcttcccttcttggacctcagttttccgtctgtggaatgggcagattgaactagaggacctctgagggtccttctcactctgacttttgccaggccttgggcttagctttctgtctccctgctacccacctggggacctagcagatgcctgaaggagctgggtttggcacctttgccagctccaggaccccagctcttttagcggcatctccatggcattccttggtacctgccctgtgccaggacttgctctgtgcactagggacacggtgatgaataaaacatcgtcctcggagagttgcaaagagtaattgcagctcagtgtgatgagtgcaacaaagggaggaagcacaggggctgtggagcccgggtcaggcacacaacccagaggaagccctaaaagcagtgggtttcagggagggcattccaggcagtgaagcagcacggacccaagcaaggaggcaagagggagcacagtgtggggaaaaaagctggcagcccagtttggcccccctgagactggacatcagagcgaaggttgggggcagagctgggtcatgcagaacctaaaagcccagtgtgagcttcaccctgttggcatgcttggcagcctgagctcatggagtcctgggtttccaaaggtgcctctggggccctgtgggctggggtcccggagctaggagatgagtggcagggctcctggctgcccatgtgtgcttctgctgagaggtgttttttcctagaaacgtgggttctggaccacaatctagctactacccactattcgtgtgtccttgggcaaatcacctgacccctttgcacctcagtttcctcagatgtaaaatgcagatgtaaatagggtctgcttccactaaaactggacctggctccaataaatattggccttatttgatttggtatgttcagcagttaagatcttatttaccttaaaagaaaatagcttagaaaccatggctgtgggcaatggtttgagctgaagcgttgagctaaggagtctctgggtcaggcccgccattttgcaagcctcctttggctgtggagggtgtggacaggaaggacacagccatggcagaggccagtggcgaggctgtttccatagtccctgaagaggggctgtatgtggcttcagaagtcgtaggctgcctctgttcccccagtgagagtggccctgggagggcagatcatgaggccctaaagaaagtccttgtggaagtgagttcaaggggttgggaccagcagggcagcctgggcagagctcggcctccccagcagggcagccacagtccagcccaccccatctttctcccaggtaccaacagatccttagccagagtttcttgaccttggcatcattgacattagataattctttgtggattgcgactatcacatgcatggtaggatgtggaacagcacccttggcctctacctactagatgtctacctactagacattgccacatgtcccctgagtgggggaacttgctccagttgagaaccactgctctacaccctatcctgattgcttgacccagaaaaagaacatagactctgaagtcagagaaggctgggttccagttcttgctccatctcataggagctctgtgaccttggccaaatcatctcacctctttccgtgtatataaaatagggatggtaaagaccgcccaccacacaca

SEQ ID NO: 695406 - DNA, 969 bp, Homo sapiens
tcggtgagaaccactgggacaatagagttggctgaaaaatgaaaaggaaggacttttctgagttgctgagtgtgcagtggaaaagaacttccatgctcgcctggtgggagaaacttgaatgagggctcagggagggagatgacgtgagtaggagggacagaaggttgagtagcaggaaatggggttcagaaagaggatgacaacctggtaagggagatgggattcagggaggagaatgggggctccaaagagaggctagagactgggtgacagggatggaaggctcagagaccaggatttccaggtcaagcttgattaaacgcttattaaattcctcctctttgaaatattagatgtgcaaagcaagataagtgctaaataattttttaaattaaaaaaaaattttttttttgagaccagttcttgctctgtcacccaggctggaatgcagtggtgtgatcttggcttaccgcaacctctgcctcctgggttcaagcaattctctgcctcagcctctcgagtagctgagaatacaggtgtgtaccaccatgcctggctaatatttttattttttgtagagatggggtttcaccatgttggccaggctggtctcgaactcctggcctcaaagtgatctaccagccttggcttcccaaagtgctgggattacaggcatgagccaccatgcccagctgataattaaaagaaaaaaaaagtacatattcaagcaccaaaagcaagaatggggaattgtgtaagaccataagaggtaattcctggtggcaagcaggaattgaaggtgtatttctgagggggggtccagtgtccagtggggtgggagggtgggaagtatagttgccaacctcaaaaatgccagggrcaacagtaggctttctgcttaaagctgagtctggtaaagtgctgcctgccgtgaacattaaaatctctgtctgctagccacctggtccc

SEQ ID NO: 695407 - DNA, 1469 bp, Homo sapiens
gacaatgcccccaacaaaagagacacttcttcagtgcaccctaatctcaacctaagccagttttcctgtcaccatgcttcttaaactttaatatgcatacaagtcactgaggatctattaaaattcacattctggttcagtaggcctagggcggggctgagagtcagcatttctaacaagctcccacctaatactactggtacttgaatagcaaggccctatgaaattagagcacagaccatcaaaaccgaaaaaacagagcctctcactctgctaggagagaagaacaaatagctctaagagttgaaggaggaaacatattagaagcaggggagaaaatgaaatgagtgctcaagaatctggctggggccgggcgcagtggctcatgtctgtaatcccagcactttagggaggccgaggcaggtggatcacctgagctcaggagtttgagaccagcctggccaacaaggtgaaaccccgtctctactaaaaatacaaaaaaatcagccaggcatggtggtgcacacctataatcccagctacttgggaggctgagacaggagaatcacttgaacccaggaggcagaggttgcagtgagccaagatcatgctattgcactccagcctaggggacagagtgagaccctgtcttcaaaaaaaaaaaaaaaaaagaagaagaagaagaaaaaaagaatctgaactctcaagctaaaacactggttaaaaaccaacttacttgatcatgtggttggcataagctcgagaacagcaggtgctatagcgacacagagagcagtgtacgtaagtagggaaatgattagggaagtctgggatctcgaagctgcactccaggcatgtctgccggcccatgacactcctgtgggggaraaaaaaaaagaattctcattactgcctcatgggtccccaaaatgtaggattttcagacaacaaaccctgctaaaaagctaccagattgcactgtgtatcaggaataatcctggccacccagtccccacccgcccagcacttagaagaaggcgctgacattttcctaacagctctcttctggatgctgcgctggacagggggataaaggaagacaggcagagggtccattgaggaggtcagcggtgctgcctcctgcaaggcgctgggaggtgtatcattagaggatacaggaacagttcgtggctgccctcgggaagcccggattgtcacctgagaaccaagggaagtaacaatgagacatcacccacactaaatttcagaatactgaaaatctctattcctccctccctgggcctataaaagacactggcaaactctttaccttggtgcctggtttcaagccctccagctgcttgggtttacggaaggttttatggtgttgaagcttgtgttcaattttgtccttggcaaagagaaactgcagccggcatttgttgcagtgataaacatttctcttctga

SEQ ID NO: 695408 - DNA, 599 bp, Homo sapiens
ttatagagcaaatgacctgtctcctcaacagacccactgagagagacagactatggattagaaagaattaggaaacacattaaccgaaccaattacaacgcaatgcgtgacctttgttgatcctgatttgaacctatcaagagaaaaatacagtttttgagaaaactagagaaatttgaacactgactagawgtgtaatgatactaagagataatttttaatttttaggtgtgatcatggctttgggcattattaaaagagagtctttattttttagtcacattaaattatttactgtaaatacctaagtatttaaagatgatacaatataatgaatgtctgcattatattaacttagagtggggaggcatggataaaacaagatgatcggccaggcgcggtggttcacgcctctaatcccagcactttgggaggctgaagtgggcggatcacctgaggtcaggagttcaagaccagcctggtcaacatgtgaaaccccatctctactaaaaatacaaaaattagctgggcatcatggcagatgcctgtaatcccagctactcaggaggttgaggcgggagaatctcttgaccatggga

SEQ ID NO: 695409 - DNA, 1042 bp, Homo sapiens
tccccagggtgcactcagccagcaggcctcggtcctaccttgaggcaaacactccttctaaatgtttatttatgcttttgaacccaaggtccaatgggaacatgaaacatatgattccaaaagagattaccccccacggatttcttctaccacacacagagaaaaggaaaaccatgtataagccaatagttgggaacttctccagagagcttctgaccgccatgtatgaagcccttaaatatagctgyggggagagcaatgcccagggaaggcacgtggacagaatgaaggcgcaggcgtgtattttgttttaattttcttttcaccagacctatccttgacttttcacagatttccccagccgaagaatcaggatggatgataacatgggagaaaaatgttccactgtggccaatctgtgttcctccggagagtcacttatatgcacgtggatgggcagccgggagccctggttggaccatgaagcagctggggaggtcaggctgctccctgggagctgggatggagtgacctctgtcttttggttctctggctttggtcccacagcagactgtcacctcagatggcctcactgagtcagaatgagttactggcaagttagcaacagtcaagctatatgatgtcctcctgtgtccccctctgagaacactgagagtctgacactcctactgctaggctgtgaaaatgactaagaaaaatgtagtagggatggctttttaaaaagcatgacaagttttttagccttgctcaaaaaatacctctccttaaggaaaaaaagcaagaggacctgagcataggcgtgggggtgggagggagctaaaatactaatgtctctaggggaagttgccttcaaaggaatataggactgcagggtgactcatgttccctggaaatggtttatgttctaatactgaatctgtagaatcacaaaaccagattgtatgcaagcattttgcacatgttcatcatcattgttacatgtcacaagtatattacttttataacaaaagtcttataacca

SEQ ID NO: 695410 - DNA, 1042 bp, Homo sapiens
tccccagggtgcactcagccagcaggcctcggtcctaccttgaggcaaacactccttctaaatgtttatttatgcttttgaacccaaggtccaatgggaacatgaaacatatgattccaaaagagattaccccccacggatttcttctaccacacacagagaaaaggaaaaccatgtataagccaatagttgggaacttctccagagagcttctgaccgccatgtatgaagcccttaaatatagctgtggggagagcaatgcccagggaaggcacrtggacagaatgaaggcgcaggcgtgtattttgttttaattttcttttcaccagacctatccttgacttttcacagatttccccagccgaagaatcaggatggatgataacatgggagaaaaatgttccactgtggccaatctgtgttcctccggagagtcacttatatgcacgtggatgggcagccgggagccctggttggaccatgaagcagctggggaggtcaggctgctccctgggagctgggatggagtgacctctgtcttttggttctctggctttggtcccacagcagactgtcacctcagatggcctcactgagtcagaatgagttactggcaagttagcaacagtcaagctatatgatgtcctcctgtgtccccctctgagaacactgagagtctgacactcctactgctaggctgtgaaaatgactaagaaaaatgtagtagggatggctttttaaaaagcatgacaagttttttagccttgctcaaaaaatacctctccttaaggaaaaaaagcaagaggacctgagcataggcgtgggggtgggagggagctaaaatactaatgtctctaggggaagttgccttcaaaggaatataggactgcagggtgactcatgttccctggaaatggtttatgttctaatactgaatctgtagaatcacaaaaccagattgtatgcaagcattttgcacatgttcatcatcattgttacatgtcacaagtatattacttttataacaaaagtcttataacca

SEQ ID NO: 695411 - DNA, 1042 bp, Homo sapiens
tccccagggtgcactcagccagcaggcctcggtcctaccttgaggcaaacactccttctaaatgtttatttatgcttttgaacccaaggtccaatgggaacatgaaacatatgattccaaaagagattaccccccacggatttcttctaccacacacagagaaaaggaaaaccatgtataagccaatagttgggaacttctccagagagcttctgaccgccatgtatgaagcccttaaatatagctgtggggagagcaatgcccagggaaggcacgtggacagaatgaaggcgcaggcgtgtattttgttttaattttcttttcaccagacctatccttgacttttcacagatttccccagccgaagaatcaggatggatgataacatgggagaaaaatgttccactgtggccaatctgtgttcctccggagagtcacttatatgcacrtggatgggcagccgggagccctggttggaccatgaagcagctggggaggtcaggctgctccctgggagctgggatggagtgacctctgtcttttggttctctggctttggtcccacagcagactgtcacctcagatggcctcactgagtcagaatgagttactggcaagttagcaacagtcaagctatatgatgtcctcctgtgtccccctctgagaacactgagagtctgacactcctactgctaggctgtgaaaatgactaagaaaaatgtagtagggatggctttttaaaaagcatgacaagttttttagccttgctcaaaaaatacctctccttaaggaaaaaaagcaagaggacctgagcataggcgtgggggtgggagggagctaaaatactaatgtctctaggggaagttgccttcaaaggaatataggactgcagggtgactcatgttccctggaaatggtttatgttctaatactgaatctgtagaatcacaaaaccagattgtatgcaagcattttgcacatgttcatcatcattgttacatgtcacaagtatattacttttataacaaaagtcttataacca

SEQ ID NO: 695412 - DNA, 1042 bp, Homo sapiens
tccccagggtgcactcagccagcaggcctcggtcctaccttgaggcaaacactccttctaaatgtttatttatgcttttgaacccaaggtccaatgggaacatgaaacatatgattccaaaagagattaccccccacggatttcttctaccacacacagagaaaaggaaaaccatgtataagccaatagttgggaacttctccagagagcttctgaccgccatgtatgaagcccttaaatatagctgtggggagagcaatgcccagggaaggcacgtggacagaatgaaggcgcaggcgtgtattttgttttaattttcttttcaccagacctatccttgacttttcacagatttccccagccgaagaatcaggatggatgataacatgggagaaaaatgttccactgtggccaatctgtgttcctccggagagtcacttatatgcacgtggatgggcagccgggagccctggytggaccatgaagcagctggggaggtcaggctgctccctgggagctgggatggagtgacctctgtcttttggttctctggctttggtcccacagcagactgtcacctcagatggcctcactgagtcagaatgagttactggcaagttagcaacagtcaagctatatgatgtcctcctgtgtccccctctgagaacactgagagtctgacactcctactgctaggctgtgaaaatgactaagaaaaatgtagtagggatggctttttaaaaagcatgacaagttttttagccttgctcaaaaaatacctctccttaaggaaaaaaagcaagaggacctgagcataggcgtgggggtgggagggagctaaaatactaatgtctctaggggaagttgccttcaaaggaatataggactgcagggtgactcatgttccctggaaatggtttatgttctaatactgaatctgtagaatcacaaaaccagattgtatgcaagcattttgcacatgttcatcatcattgttacatgtcacaagtatattacttttataacaaaagtcttataacca

SEQ ID NO: 695413 - DNA, 1042 bp, Homo sapiens
tccccagggtgcactcagccagcaggcctcggtcctaccttgaggcaaacactccttctaaatgtttatttatgcttttgaacccaaggtccaatgggaacatgaaacatatgattccaaaagagattaccccccacggatttcttctaccacacacagagaaaaggaaaaccatgtataagccaatagttgggaacttctccagagagcttctgaccgccatgtatgaagcccttaaatatagctgtggggagagcaatgcccagggaaggcacgtggacagaatgaaggcgcaggcgtgtattttgttttaattttcttttcaccagacctatccttgacttttcacagatttccccagccgaagaatcaggatggatgataacatgggagaaaaatgttccactgtggccaatctgtgttcctccggagagtcacttatatgcacgtggatgggcagccgggagccctggttggaccatgaagcagctggggaggtcaggctgctccctgggagctgggatggagtgacctctgtcttttggttctctggctttggtcccacagcagactgtcacctcagatggcctcactgagtcagaatgagttactggcaagttagcaacagtcaagctatatgatgtcctcctgtgtycccctctgagaacactgagagtctgacactcctactgctaggctgtgaaaatgactaagaaaaatgtagtagggatggctttttaaaaagcatgacaagttttttagccttgctcaaaaaatacctctccttaaggaaaaaaagcaagaggacctgagcataggcgtgggggtgggagggagctaaaatactaatgtctctaggggaagttgccttcaaaggaatataggactgcagggtgactcatgttccctggaaatggtttatgttctaatactgaatctgtagaatcacaaaaccagattgtatgcaagcattttgcacatgttcatcatcattgttacatgtcacaagtatattacttttataacaaaagtcttataacca

SEQ ID NO: 695414 - DNA, 1042 bp, Homo sapiens
tccccagggtgcactcagccagcaggcctcggtcctaccttgaggcaaacactccttctaaatgtttatttatgcttttgaacccaaggtccaatgggaacatgaaacatatgattccaaaagagattaccccccacggatttcttctaccacacacagagaaaaggaaaaccatgtataagccaatagttgggaacttctccagagagcttctgaccgccatgtatgaagcccttaaatatagctgtggggagagcaatgcccagggaaggcacgtggacagaatgaaggcgcaggcgtgtattttgttttaattttcttttcaccagacctatccttgacttttcacagatttccccagccgaagaatcaggatggatgataacatgggagaaaaatgttccactgtggccaatctgtgttcctccggagagtcacttatatgcacgtggatgggcagccgggagccctggttggaccatgaagcagctggggaggtcaggctgctccctgggagctgggatggagtgacctctgtcttttggttctctggctttggtcccacagcagactgtcacctcagatggcctcactgagtcagaatgagttactggcaagttagcaacagtcaagctatatgatgtcctcctgtgtccccctctgagaacactgagastctgacactcctactgctaggctgtgaaaatgactaagaaaaatgtagtagggatggctttttaaaaagcatgacaagttttttagccttgctcaaaaaatacctctccttaaggaaaaaaagcaagaggacctgagcataggcgtgggggtgggagggagctaaaatactaatgtctctaggggaagttgccttcaaaggaatataggactgcagggtgactcatgttccctggaaatggtttatgttctaatactgaatctgtagaatcacaaaaccagattgtatgcaagcattttgcacatgttcatcatcattgttacatgtcacaagtatattacttttataacaaaagtcttataacca

SEQ ID NO: 695415 - DNA, 646 bp, Homo sapiens
ctgaacaggggacaagtgggctcagcacaagtttgcagggagagaggggactgagcaaattagtgaaaggatccttgaggctagaactcagtttccttgcccaatgggtaaaaatccaagctgagggaggctggggtgatgctttcctctctctttttcttcccttcttcttgccttcctcccttacttccctgcactgagaaagaacaagatacatcctgaacagtgtcaccgtttgaactcaggaacagaaatgcctagaagctatcaggcccccagacctatgaactccctggcatctacttytgtcttcccccacttccgtcccattaggatggaggggatgtctcttcccttcgctctggccccattcctttcttctagtcaggaccccagctggattgactgcccccttctctatatctgcaacctcgccctctctactcttagctcattcaagtgtcagcctttagcacataaacacacccctacatacagcatctgcacacatataccacacatacacacctacacacagtgtgcatacacccctgcatgcacaccctcatgcacacgcccctacacacacacacacacacgtcttatgcacatgcccctctcaagactccacatccccatctagcta

SEQ ID NO: 695416 - DNA, 646 bp, Homo sapiens
ctgaacaggggacaagtgggctcagcacaagtttgcagggagagaggggactgagcaaattagtgaaaggatccttgaggctagaactcagtttccttgcccaatgggtaaaaatccaagctgagggaggctggggtgatgctttcctctctctttttcttcccttcttcttgccttcctcccttacttccctgcactgagaaagaacaagatacatcctgaacagtgtcaccgtttgaactcaggaacagaaatgcctagaagctatcaggcccccagacctatgaactccctggcatctacttctgtcttcccccacttccgtcccattaggatggaggggatgtctcttcccttcgctctggccccattcctttcttctagtcaggaccccagctggattgactgcccccttctctatatctgcaacctcgccctctctactcttagctcattcaagtgtcagcctttagcacataaacacacccctacatacagcatctgcacacatataccacacatacacacctacacacagtgtgcatacacccctgcatgcacaccctcatgcacacgcccctayacacacacacacacacgtcttatgcacatgcccctctcaagactccacatccccatctagcta

SEQ ID NO: 695417 - DNA, 646 bp, Homo sapiens
ctgaacaggggacaagtgggctcagcacaagtttgcagggagagaggggactgagcaaattagtgaaaggatccttgaggctagaactcagtttccttgcccaatgggtaaaaatccaagctgagggaggctggggtgatgctttcctctctctttttcttcccttcttcttgccttcctcccttacttccctgcactgagaaagaacaagatacatcctgaacagtgtcaccgtttgaactcaggaacagaaatgcctagaagctatcaggcccccagacctatgaactccctggcatctacttctgtcttcccccacttccgtcccattaggatggaggggatgtctcttcccttcgctctggccccattcctttcttctagtcaggaccccagctggattgactgcccccttctctatatctgcaacctcgccctctctactcttagctcattcaagtgtcagcctttagcacataaacacacccctacatacagcatctgcacacatataccacacatacacacctacacacagtgtgcatacacccctgcatgcacaccctcatgcacacgcccctacacacacacacacacacgtcttatgcacatgcccctctcaagaytccacatccccatctagcta

SEQ ID NO: 695418 - DNA, 588 bp, Homo sapiens
aagtgccggctaattcgctgggcagggactgcagagcgttctggtaaacagcccccactctagagacagactacattcaaatccccaccgtgtgaccttgggcaagtcacttagacatgcggtacctcagtttccccgtcactaaaatgtgggttacacctgccaaagggtggctgagaaagcagaatctgcacacaggtraactggctggagctgcacccagcacattaggccctgtaatagaagtgcttgttccataaatcgtgagattcctcccaaacctaaggatggatgccaccgtcccagggctgcccatgtcccgggtctcatcatccctccatttacacaccacctcctggggccgactgggcgcttttgcagtggaccaatcttctacgtttcttattctcagatgatgaccttctccctggtcctgggggtgctccggatgttgccagatcagtggagctgacatggcccagggttcaggcagaaggggaagggaagtcagcacccacagtaatcctgattcactgttgcggaaccaaaaactgcccaagtgctttccatttcactcttcagccttcc

SEQ ID NO: 695419 - DNA, 588 bp, Homo sapiens
aagtgccggctaattcgctgggcagggactgcagagcgttctggtaaacagcccccactctagagacagactacattcaaatccccaccgtgtgaccttgggcaagtcacttagacatgcggtacctcagtttccccgtcactaaaatgtgggttacacctgccaaagggtggctgagaaagcagaatctgcacacaggtgaactggctggagctgcacccagcacattaggccctgtaatagaagtgcttgttccataaatcgtgagattcctcccaaacctaaggatggatgccaccgtcccagggctgcccatgtcccgggtctcatcatccctccatttacacaccacctcctggggccgactgggcgcttttgcagtggaccaatcttctacgtttcttattctcagatgatgaccttctccctggtcctgggggtgctccggatgttgccagatcagtggagctgacatggcccagggttcaggcagaaggggaagggaagtcagcasccacagtaatcctgattcactgttgcggaaccaaaaactgcccaagtgctttccatttcactcttcagccttcc

SEQ ID NO: 695420 - DNA, 604 bp, Homo sapiens
caggaatccctgggctgcctgggaggcccggccacatcaaaggagtcaagggagacatcggagtccccggcatccccggtttgccaggattccctggggtggctggcccccctggaattacgggattcccaggattcataggaagccgggtgagtgggcgtcttttacaccccttgttctgtgagctcctctcccctttgcttgtgaatggacatgctttggtctggaatttgctagggtgagagtgtcagtggcaggttcagggcagcctcaggcttggtggggttcgcacagccctggaaggagattctgcacttggacaccatgcagatgtgatgtgagtccaaccggctgccgtggcccttctgtgggcttgtgctgggtgaagcatgttgtctgcatttttcatggtggccttgagagaacaaaacttgaattttcagggatcagagctctaaaattgagcacatcagtgacaccaggcctgagagcccatggccgaaycacagcgtagacctgggcccggcagcctggcttcccatccgggccaccgttcactcagcctttgttcagcggatgtctgttgagcacttgacatgggcca

SEQ ID NO: 695421 - DNA, 2174 bp, Homo sapiens
tcttgaactcctgacctcaggtgatctgcccaccttggcctcccaaagtgctgggattacaggtgtgggccaccatgcctagccagaatgagattctttttccctttttggctaagaattattaaagtaaaaatattgtgtgttttagacaatgtttttgctagcttttactttcttgaattttatgtagttctgtcatagctattatataacatatatgttgttgttgttgttgtttttggccaatcatctagctgtcccagtgcccggggttaacattgaagaacaccttcagttacgacaagaagaaaaacggcaacgtgtaatcagaaggcacagattagaggaaggaagaggtaagatgtagctacagagaaaaagtacatgaaaatccactttcctaccctatcctgaaaccactgaaaagttcacacaataaactaatttggtaagaaatcatcaaaattaaaattagcaatattctgataactcatataatgggaaaatattcagggtattcatgcttcttctaataacatacgtttaggtatttataattgtgctaataacatacttttaattcagcagggtgtttatggcataagtcagccatattaagaactgtgccatctgcctactatcaataactattagaaatggcaactttttaaaaatagatattctcacaacttgtccttcacccggactttggactcatctatttgaccgtggaacaaaattcaatttagtctttttcatttctattttcttactcrtttatgctcattatcatttggacatagtcctgctatgctgccctccagttcagcacataactatgctttcatgtgtccttttttggaaaaacctcattctagttatttacaggaagagtaagatggcaggtctgcaggtttcatttgcaaagataggtctattgtttatcttttcctcattgtttatgagcttaaaagtttcttagcttaaaaatacatttaactggccaggcacggtggctcacgcctgtaatcccagcactttgggaagctgaggcaggcagatcacaagatcaagagatcaagaccatcctggccaacatggtgaaaccccatcactactaaaagtacaaaaaaattagctgggcgtggtggtgtgcgcctgtagtcccagctactcaggagactgaggcaggagaatcacttgaacctggcaggtggagcttgcagtgagccatgatcgcaccactgcactccagcctggcgacagagtgagactccatctcaaaagaaaacaaacaaaaaaaatttaactgtggttataattggtatttgaatacgcaaagataaatatatgtattactaaagatttccttgctcagtaaattttttttttgtaggattaagacaaattgttatggaagtctatgattttattcctccaataggcaaaattttgattagaaatgtttactgatattgcatattttaaatgcttattagaaatggcatgatatttgatgcatgaaataaaccttttacccatttaaccatcattatatttttttctagctattctttttgttaatatatggaataagtagtaaaatgtataatacacatggtgaattctaggtttactaaactttaaattgtaaaacatatacttggcacatgaagagtgttcttcatagcatctgataagtgatgttgattgataaggtgaatatttactattgtttggctttgcttgcataatgtcctttaaaggatattttaatgagattaatatagatactgtcagtatttacattatataagtatatgggaaaattgcatgttaaatatttcttacaaaacaggatagaattaagtttctgatgtggtaattaataattttttatgttgatataattttttcagattagttaccattctatctgtttgctacctgtttcttctttctttagaaatattaggttgagcgacatgaatgaacctacaaaatgcagctatttcttacatttaaactacagtatagcacatccttacacttaattattcacatttaattacttgcctaatgcggtgtatcttgttactctttttctcttccctctaaaaaagctattcttctctaggtatagtatatttgtgcatataggaaataaaggaaca

SEQ ID NO: 695422 - DNA, 589 bp, Homo sapiens
gatcttggcattgcctagaacctcttcccttttaaatcttatacttgagcatcctactcttgatcataaccttatatcagcctgctctgtcaatacatcagcttatcatgctctcagagacccctctgcctctgatctctgtctctctcccatcaattctatcaccayggttgtaccttctcttcatccagcccggttcctcctggagttccccatttttctccactgtgttaataaatccgcaagtgtcctcatcaccttgctgttgtaccacatcctcctatttcatccaaacatcggatcaatccagtgatctattttcctggatgccacacataggcagctcaatcctgatccagaaaagtcacaaaacccttctaaacagagggcagatatatggagtccaaccttcagtgcccttgtcaattcacaaattagcttcctttccaataccttgcaacagtcatgccaactttcacttatttcctcattgagaaattagtcttcagctgtgaactccctcagcttctacctccaaaccttcaaaattacccatatctgtacctgccctctgcttccttctgccttc

SEQ ID NO: 695423 - DNA, 589 bp, Homo sapiens
gatcttggcattgcctagaacctcttcccttttaaatcttatacttgagcatcctactcttgatcataaccttatatcagcctgctctgtcaatacatcagcttatcatgctctcagagacccctctgcctctgatctctgtctctctcccatcaattctatcaccatggttgtaccttctcttcatccagcccggttcctcctggagttccycatttttctccactgtgttaataaatccgcaagtgtcctcatcaccttgctgttgtaccacatcctcctatttcatccaaacatcggatcaatccagtgatctattttcctggatgccacacataggcagctcaatcctgatccagaaaagtcacaaaacccttctaaacagagggcagatatatggagtccaaccttcagtgcccttgtcaattcacaaattagcttcctttccaataccttgcaacagtcatgccaactttcacttatttcctcattgagaaattagtcttcagctgtgaactccctcagcttctacctccaaaccttcaaaattacccatatctgtacctgccctctgcttccttctgccttc

SEQ ID NO: 695424 - DNA, 588 bp, Homo sapiens
cttcctaaggtaacatttatctcaatcaatattttccttggctgtggtggtttcctgggagacaagctatagtgcacagaaatcagattacttttatattccttggacaaagatgagagcatttagcttttcaaactatgttgtaaagctagagtgattctgggaaactcatcataagaatcaatgttataggttataattagctgaaagaaaaaacatctttctgaaatatgactggcctgtctgtgatgggataaaatggttgctaggaacacagggatgctgttttgccagaaagtaagatgtatgatctaggtaataggctatttttgacagttatgtgatggctctgagaattacgtaaaacataaaatttaaaatcactagtttaccacacatcttctctagtcagagcctaatgcaaagtgtgggaatcctggattattgcaacgaccactaattgatccgcctccagatttttcccatctaatccatcacygtgcaaccaaaatgggagttatcttcctaagctaaagccattcaatggactaatatggcttctaattgctcatagaataaattccaaca

SEQ ID NO: 695425 - DNA, 925 bp, Homo sapiens
gtgtgagaaaagtcaaagcaaagaaggatgaaatatatcctgctttagaatattggagaaagagctttataaacctgtaatattcttatttagcaattgtgttcaataagtttctcattatttatcatttagacttttaagctaaagtgagataaaatttagtatagatttcttcatattctcttaaattcttttgcattttgtgaaattattttattgaactgtaaaatctttctttatataaactcttttgaaggctttactgtatcatgaaatatgattttccttatgtcttatgcccaagtggttttcagagaaagacattttggttttataatgaaaatcaatgggcaactaagactacatggaaagaaactgtacagatactatggttgggaatggaactatttcagtactccgttacacattaagaatttggagttctgcaaatttactagaaaaaaaagcaatgccatcaaaagataggtaaatgatatgaacagacacttctcaaaagaagacatttatgcggccaacaaacatgtgaaaaaaagctcatcgtcactggtcattagagaaatgcaaatcaaaaccacaatgagataccatctcacaccagttagaatgacgatcattaaaaagtcaggaaacaacagatgctggcgaggatgtggagatataggaacagttttacactgttggtaggagtgtaaattagttcaaccattgtggaagatagtgtggcgattcctcaaggatctagaaccagaaataccatttgacccagcaatcccattactggrtatatacacaaaggattataaatattctactataaagacgcatgcacctgtatgtttattgcaacacgatttacaatagcaaagacttggaaccaacccaaatgcccatcaatgagagactg

SEQ ID NO: 695426 - DNA, 1360 bp, Homo sapiens
ttaaccatcagcctgtgtcactcctccaccctcttccttatagatcccgcctcatccccttcccttcctgcatgtcccgtccacctcctctccccaggcaggatggagacaccaagagacctccagatccccatcgggtaaacccaccgagtyggactctgatagttgactgtcacataagcagactgcctgatgtaccatgccctgttctctaagctctctgacatatttagtgggtgttgatgtctctgctttgatggagaggaaactgaccccactgtgagttgttggcttgtccaaggtcacccagcacattagcaggagttccagaattggagcccaaagctcctgagtcatggccaagtgacgagctccattgcactacgtggctctttgtggctataaaaagatccatctctggagagcacctcctccaaggcttgctgagataagctagatgctggccctgtgtgtgtgccttaaccgggcagtgagccaccagtcccctgataggaagagtgactctcgtggggagaggaagaaagagaatgcttcaagaagtcggaggaggcagccttttaccttaaatggcccatgctcagatcaagacacggcacaattattgtgtctatattgtagcctgatctgccacaagttgagaaaaatctctttttccatagcataactatttatggcatttgccaattttctccgtgtaaacacttttcctgtggcctatttcaaggtacaaacaggaggtcactggacacagaatctgggggagatgtgcgcaataacagctcaggagctggtctgagcagtctccagcccaccacgtccctaaccttactcaccccacccctgccaatgtcctcatctttaggcaaggattatcatactaatcaagagttctccatctagagtttatcgtgtgtgatacctagctcagcgaagtaagattctgatgccctcgtgtatgaaatgggcttggatattatctttgttatgtaatgtcacgcctagaaataaacaggacctgtccttacaggcactaagtgtaccatcacaacatctgctgcccagttttgagattaagggcatgaccctgcctgggttcaaatcttctctttgacacttaactagctgtgtaatctcaggcatttacctaccttctctgtgacttaattttcccatctaactaatgggaatactggtaatatgaatctcataggtagttatgaagattaaattatttagaagatgtcaagcacttaaaatagtgcctactagcaattgagggcataagtgacccctaataaatgttaaatcacattattactacatgctggcaggtcaaagg

SEQ ID NO: 695427 - DNA, 611 bp, Homo sapiens
cttttagaaatacacactgaaatattaagggctgatggctgaaatgatgtgatcttgcaaattttgtgcaaataacctgggggtgaaaagggaggtgggaagcagagttgaaagattgacctaaagttgatccttgttgaagttggagagagtctatatggaaattcattgtactactttgctacttgcaattttctataataaaaatttagaaggaataaagggaggcaaggaaaggagagaaaggaaaagaaggaaggccccttttttcttttcttttcttttcttttttttttttgagacagagttacgctcttgttgcccaggctggggtgcaatggcrcgatctcggctcactgcaacctccgcctcccgggttcaagtgattctcctgactcagcctcctgagtagctgggattacaggtatgcaccaccatgcccagctgattttgtatttttagtagagatgggttttctccatgttggtcaggctggtctcaaactcctgacctcaggtgatccacctgcctcggcctcccaaagtgctgggagccatcgcacctggccggaagaccctttctttggagccagacttggattcccatcttgg

SEQ ID NO: 695428 - DNA, 771 bp, Homo sapiens
tccagcttgttggcatcctttgttccccagtagtccttgtctaagtcatgcaatgtggtcgctgtgccagggacactcttctgtcctctgcttacatcaacccattgatgaatcttgacatcactgaaagtgagacagcagatacttgtgcctctttaaggatacagtaagaggtatactgcgtcacctataaactgttcttgccaaatacattgaacctgaagtgcagtcaagacttcagatctagctacatgcttataggaaacacagcagatagagattaagtgatacaggaggagggaaacaacttgatccagaatgtgatattctgccaaagcaatgacctggtttcttcaacaaatcagtggcatgaaaaaaagagagcaggggggaaccatgattgttcaaaaatgacttatgtgacatcaaccaattgcaatgtggtcctcttttagataccgattcaaagaaactgactttaaaaatgtcgggagtttttttttgcaattttttgaggaaatttgtatatagactgggtactaagattgtcattaatttgctaggtgtgatgatggcgatgtggttatacatattcttaaaataccttttctattagaaatacgtatggaattacttactggtgaaataatctgatgtccgagatttgtgttaaacgatgtcggggtaagaggaaaatggttggtttctcatccttcaagtattggcttatgttaaccccttgggggagatatttgaagcaggtgtttyccc

SEQ ID NO: 695429 - DNA, 661 bp, Homo sapiens
tgcctctgccaattattgggctatgtggttccttcatccttctgaacttcagtttcctcttaatgccagtttgggttaacagaaagtactacctctttggcttttgagtaacagtaagacaaagtatgtaaaaaatgagtttgtatataaacgacttagtatgagaagtacgagtcagactgtaaaaatgaacagacattcttcccctccctgcatctatgcccttccactgggcttctacagctgttctcatcaagaggtggacatgattttgggtggcygtgtgacttgctttggccaatgggcaaatgtgacagaagcagaggcatggaaagcggctgcacactaaggacttgccttcctgctgctcttgggaaacctgcaaccactgccacaggaatgagcccaggttagcctgcggggtgatgaagtgtgtggcccagagccccagccaaagcaccaggcataggagcaaagccactgaccaccagccaacagtaaatgtatgggtgatcccagcctcgtccagcagaagagccgcatggctgagccaacccaaaatgcaaactcatggaattgtaagctagtaaacggttgctgttttaagctgctaaagtttgggggtggcttgttacacaacagcatgttagctatgtattca

SEQ ID NO: 695430 - DNA, 624 bp, Homo sapiens
tcaaatgttagctttatacaaatttcttaagatatcttgccttgctttctgtattaaaaagtcaattatgtgcaaaaattcaatttttccccatttattctaatacaatggatgatcaactatmgcaatatttgtatagttatccaaaaaattgggggagtcctttttttttgtgtttaaaagcagggaggtactcttttcaaaaaagttttgccatcaggtatccgctactctattgaatacaggatgaaaaccaaagcaactgttgggggaggggtttttttgttttgttttgttttttttttttgctatacagcaaatacagcaatacttcaaaactaaaataaagccagaaaaaagtgattaagctctttctgagatattttaaacataaagatatggcacatactggaagaataaaagttagcattagttttcatgtaatattacagaatacagatattaaagttccaccccaccccaaaggacacgagtccattttcataacacacacaaaacctataacaaaaggtaataaacagacatataaaacacatttatattatttcagatgtgaaacaaagcaattttaaattacatctgacaccctgttcttaccactac

SEQ ID NO: 695431 - DNA, 1004 bp, Homo sapiens
  misc_feature 904, 905, 906, 907, 908, 909, 910, 911, 912, 913, 914, 915,916, 917, 918, 919, 920, 921, 922, 923, 924, 925, 926, 927,928, 929, 930, 931, 932, 933, 934, 935, 936, 937, 938, 939,940, 941, 942, 943, 944, 945, 946, 947, 948, 949, 950: n = A,T,C or G
  misc_feature 951, 952, 953, 954, 955, 956, 957, 958, 959, 960, 961, 962,963, 964, 965, 966, 967, 968, 969, 970, 971, 972, 973, 974,975, 976, 977, 978, 979, 980, 981, 982, 983, 984, 985, 986,987, 988, 989, 990, 991, 992, 993, 994, 995, 996, 997: n = A,T,C or G
  misc_feature 998, 999, 1000, 1001, 1002, 1003: n = A,T,C or G
atcagcatccataaacctacttgtcccaaatgtacagagtgggccacggataccgtaagaacaaatctatcctccttccacttatgttgagggatctatggacgccagatatttcaccatttacctctcctcagtgtaacgaactatttgactctcagattcactcctttctgtctcatattaccagtgccaaaatttgagattttatcccctgcttcctcccacaacacactgcccatttccctattttcaggtactgtgttaaaaaaaaatgaataggagaaagcaggcaaaataatcacacttgtgcagggtaggtgtaataaaatacatttgtgtatatttcagaacatagaaaaataaaatgtgagttcttaaaggactgacaccattttaatgattattacaaaatagtgattcataaaaacaaagatttattcggttatttaatagtttttaactctaatttaactctaaattaagcattcttttataataatggcctatattacttcaactcaggagttagggtaaagttccctgtgggtgtaacttctggtgcttcagagcagagtgtctttccttgaaagctcctcagcagtgctctcaactgcamccatcctggctactccactgacaaatactcagtgtattccacatcatgtcagcagggtgcgggagaactaaagaaacagtgatgcttctggagaaagctctgtaattttgacagagtgaagactctatagctctattacaattatatctttaacaaataatttggaattttcaccaaccataactcacgtgaattagtgttaacccgttttaataacataaaatatagatataacatttcaactgtaacttataatattttatttaaagaaatttattagcaaaatannnnnnnnnnnnnnnnnnnnnnnnnnnnnnnnnnnnnnnnnnnnnnnnnnnnnnnnnnnnnnnnnnnnnnnnnnnnnnnnnnnnnnnnnnnnnnnnnnnnt

SEQ ID NO: 695432 - DNA, 1004 bp, Homo sapiens
  misc_feature 904, 905, 906, 907, 908, 909, 910, 911, 912, 913, 914, 915,916, 917, 918, 919, 920, 921, 922, 923, 924, 925, 926, 927,928, 929, 930, 931, 932, 933, 934, 935, 936, 937, 938, 939,940, 941, 942, 943, 944, 945, 946, 947, 948, 949, 950: n = A,T,C or G
  misc_feature 951, 952, 953, 954, 955, 956, 957, 958, 959, 960, 961, 962,963, 964, 965, 966, 967, 968, 969, 970, 971, 972, 973, 974,975, 976, 977, 978, 979, 980, 981, 982, 983, 984, 985, 986,987, 988, 989, 990, 991, 992, 993, 994, 995, 996, 997: n = A,T,C or G
  misc_feature 998, 999, 1000, 1001, 1002, 1003: n = A,T,C or G
atcagcatccataaacctacttgtcccaaatgtacagagtgggccacggataccgtaagaacaaatctatcctccttccacttatgttgagggatctatggacgccagatatttcaccatttacctctcctcagtgtaacgaactatttgactctcagattcactcctttctgtctcatattaccagtgccaaaatttgagattttatcccctgcttcctcccacaacacactgcccatttccctattttcaggtactgtgttaaaaaaaaatgaataggagaaagcaggcaaaataatcacacttgtgcagggtaggtgtaataaaatacatttgtgtatatttcagaacatagaaaaataaaatgtgagttcttaaaggactgacaccattttaatgattattacaaaatagtgattcataaaaacaaagatttattcggttatttaatagtttttaactctaatttaactctaaattaagcattcttttataataatggcctatattacttcaactcaggagttagggtaaagttccctgtgggtgtaacttctggtgcttcagagcagagtgtctttccttgaaagctcctcagcagtgctctcaactgcacccatcctggctactccactgacaaatactcagtgtattccacatcatgtcagcagggtgcgggagaactaaagaaacagtgatgcttctggagaaagctctgtaattttgacagagtgaagactctatagctctattacaattatatctttaacaaataatttgraattttcaccaaccataactcacgtgaattagtgttaacccgttttaataacataaaatatagatataacatttcaactgtaacttataatattttatttaaagaaatttattagcaaaatannnnnnnnnnnnnnnnnnnnnnnnnnnnnnnnnnnnnnnnnnnnnnnnnnnnnnnnnnnnnnnnnnnnnnnnnnnnnnnnnnnnnnnnnnnnnnnnnnnnt

SEQ ID NO: 695433 - DNA, 814 bp, Homo sapiens
  misc_feature 572: n = A,T,C or G
tagttaaattatatatcaatgtggaacaacagtgttgattatgaatgagaaagatataggccacatgagatgacaaaacagaggatctaagtcagagaagaccaagaaggcttctctaggatgtgacacttaaactgggatgcagaggaagggaagtcactaatgaggcaaggaggggaagaaggagcactstacaaggaagcccaggtgaaatttcaactgggagctgatggttgagtaagtcctgccacttaattaagtagaaggctttctgttcttttttatttatggcatattcattcatttattgatttaatttattaaaatctttgtgggtttgttaagggcagcagaggtatcaagaacgagaagcaaatatgccatcaaaagcacaagcaataaaagcaaaaatagacaaatgggacaacatcgaacttaaaaaacgtctgtgcatcaaaagaaacattcaacagaataaaaaaatcaacctacagaacgggagaatatatttgcaaatcacatatctgataagggttcatcttcagattacataagaaactcctacaactggnacatcaacacaaccacaattacaaccagaataaaacattggcaaaggacttgaacagacatttctctaaagaaggtatacaaatgccaacaggcatgcgaaaagatgttcaacaccactattcataagagaaatgcaaatcaaagccacaacgagccatcttctcgcaccctgtaggatggtcactgtcaaaagaacacaaaataacaagagttggcaaggatgtagagaaattggaaccct

SEQ ID NO: 695434 - DNA, 1896 bp, Homo sapiens
ttttgcaattaaaataattatattttataatttaataaaaacaaattttagaggatacarttcatcctaacaacttaggatgttttggaaagttttgttttcttgccattgaaaagtactataaaagtaatagagcgggaaaaagattcatgtttgattcaggtagggcaacagagatatatacatagaatttaaaggaaatggttccctttcaactgtctattccattcccctgcccatctataattacattattgttaacagtttatcatgtgttattttagattgttacacaattctgtgtctatttatctgtacacaaacttaaaactatttatgagcccatagtatacacattaccctgtggttatttacttaatcttgaatatctttgagttgtctttttatggcaatttcatttgatctaccactatatctagtcataaaaaggttttcaaaatattcttcacacaattaactacactggtaatatttaaaattttttttaaagctgaggggcaaaacatacctcactattgcttctatttgcatttactcaattacaagtgaggttgaaatcttctgttgattggttcttttgccatgtctgtgtactacctgtattattgttcttaaaacatgtttttcaaaatcaattttcaaaactctttagcttcatgctaattaaacatagtgatgaaattgatgtttataaagtcttaaaaaatgtataattattaaaatgttaccaaaattatctttatagttataattaatgtttattgaatacttctgactgtgtacaatctctgttctaagtgaattatttaattcttaacactgaagagtggatatggttattctcatttgtagaaaaagaaaacaaggcccagaaaggttaagtaacttgatcatgttcatgtgagagtagctgccaaagtttgagccaggcagtttgattccaactacttttttgtttttttttgtttgtttttttttttttttgagacagagtctcactcttgtcactgaggccagagtgaggtggcatgattacggttctttgtagcctcgacctcctgggcttaggtgattctcctgcctcagcgtcccgagtagctgggaccacagttgtgtgccaccacacccggctaatattttttcaattattatttgtaccagtggggtcttaatatgttgtccaggctggccttgaactcctgggctcaagcagtcctcctgccttggtctcccagagtgctgggattactgacatgagccaccatgcctggcccaggccactgttaatctcttttctgtattgctgcacaccaccagtggtttatataccacactttggaaaactctattattgaaagaataggaatttgaagtgaaaagtcttggatttattacttattagctgtaagtgtctatagaatcacattccttgaaatctcggttttctcatgtatcaaatgtgattgatgctgttgttacatggtctctttttttttgttcttaaattttcttgtgcttttggaaatgtgagaattacaaatttgggcaattgttcagatggatttttctgtaattttttattagagataaccccttgcaaagtaatttactgccttcttcagattctgtggatctttgccatgtcatttattgacaatagggattgtttctcatagttgctattaaaattgggaataaaaagagaaacactttgaatgcctatatgtaacatttatgcagtcgactttctctgctattatatagaggaactctttttatgctgtgaacaatccttggttactatttcttctggagtaaaagtagactgtggtctactaatccagataccaagaagtataaatacagaatcttact

SEQ ID NO: 695435 - DNA, 638 bp, Homo sapiens
aataggattaacaaaagataagacccaatttgcctactaacctgtagtatcttttcttctattgttacccaggtaaacacaattcctgctttgtattctgtattcccatactgtggtcttaccttcattcattccaaaagcatttactaagtcctatgctcaagggtaatgtttgaaaacctggagtcaagaatactacgggatattaggaatgccaaattctgttttatctgttttaagcatttatttatgtactcatattgctagttaaaaaaaaragagagagagagaaagacgacctgtatggattggttgcactacatccgattcgagatgcttccatcttattacaaaatatccagagaagtttttcttagatattttctgctcagttcttttaatggagccatttctctctttgagttcagactcactcaaaagggtcagaagtaatggagaaggaacaaagccttagcaagcagctgcatttcatagtcaaggtgctctgattctgatttgactttcttttttaacatttggaataggttctaagggactgtcctgcctacctcatctgttacatttgtcaagttctcaagacaaaaaaaaaaaaaaagaatggtctttgaactgcagtt

SEQ ID NO: 695436 - DNA, 631 bp, Homo sapiens
tgtagctaatctgaatggagatagtctgtaaatgtaaagtacacactgatttcaaagatttagtaagaaaggtaagaaagtatagcattgcaataattttatagtgaatacrtattgaaattatataatattttaggtatattgaataaagatagatttttaaatcattccacttatttctttttacttttgtaatgtggtttctggaaaatgtaaaattatatattggttcactttttttttttattgtttttttagaaacggtgtcttgctgggtcacccaggctggttgcagtggaacaatcacggctcactgcagcctcaaattcctgggctcaactgagcctcccaactcagctttgcaagttgttgggattacaggtgtgagccatcacactgggctcacatacttttactggaccacagtgacttagaaaactctcctttattcatttaaaaatagcatatcaacagtgtttaagggatttttttttaaagtaagttaatctattcggataataagtatttattgagtaccatgttagaactgtggtggcaaataaaacaaagtcttagctctcatgtagcttatatttgagtgcgggaagcagacaattcacaaataagccaa

SEQ ID NO: 695437 - DNA, 1013 bp, Homo sapiens
gtctttggttgttgtatgattatgagatgatgtctcactacattgcccaggatggttttgaactcctgtgctcaagaaattctcctgtctcagcatcccaagtagctgagattacacacagctcagtctcaagtatccgaggttacagccatgcactactgcacccagttctatttaggcctctttaaggttgatgtaagatatgttgaacttattaactatctatataagacatggatggatgtataaactatgagaccttaagtcaagttatttagcccctcagattctcatctataaagtggagataacaatagcacttacctcataaaattgtaatgaggattaagttggataatatgtgagcttagaacagtcatttatataatgaatactatataagttttaactattattattaagtgctttagaatgrttaataatatggctgatcagttttaggtctgtatttagttgtggcataatttaattttaagtgtgcagctttatgacttttgaaaactgtatacatctatgtactccacacctctatcaagaaatagaacatttgcattgcctcaataagttcctcgtgcctctttgcagtcaatacactgtccccagagaaaaccatttttcttatttatatcaccaaagatttcttctccctgctgtagtagagcttcagatgaatggaatcataaagtgcatgttcttttgtgtcgtgcttttatttggaaatatattttcgacattcactcatgtggttgtgtcagtagtttaatccttttcattgctgagtggtgttccattatatgactgtacaatttgtttatccattctcctgttgatgaacatgtagattgtttgcagttggggcttttatgaagaaaattgcaatacatatttttatatacaccattttgaggatatatgtttcctttcgcttgggtaacacctaggagtagaatcactggcgtgtaggatagctttgaaagaaacagtataacagt

SEQ ID NO: 695438 - DNA, 797 bp, Homo sapiens
cagatctttaagttagatagaggtttatatcaggtattttgtcttctgtcagaagttactctaaggagattttgatktgacacagttcatatgtgtcagacaaaaatgtataggaagtcccctgtgttctctttccataatgacccatttgatcaacttttattaaacatttttttgtagacaagatacatatacaactgtacatttggaatataatttaatgtttttaatggacgttgcatcctgatggtcattctataattcagcttctagatatttgtattaacatcttataatgcagtgatttataaaaagttatatcattttacgggatttgactttaaatcctgggaatatctttgaaatgaatgtatttgttaatattaaaacttaatgcaatgatctgttaatgttgaaacttaaagtattctttgcgaaattttaagttcaaaaggggagagctatttataaagtttctgtcagtttgatcttataatatataagccataattcatcccttcagtggtcaatgattcttacatccttatatagttcttcaggcagtacgtggtattggttaagaccttaaacttggctcttggatagactggggtcatatctgtgctcagccattcactccctgtttaactttactaagtcttggttctttcactggtgaaatggggataataatagtatctaccttatagagttgtggtgattaaatgggcaaggccatgcgatatgcctaatattggacacatattaggggctcaataggcgttcacctggttaga

SEQ ID NO: 695439 - DNA, 875 bp, Homo sapiens
taaaatctcagaattcaccactaaagaactcatctatgtaaccaaaaaccacctgtacycccaaaaccattgaaatttaaaaaaaaactgaaaacaaacaaacaaaaaaaaacagaagcaatgatgtctggaagccccagtactggctaaaggaacagtcacttgtcaggctccagaagtaagtctagaagactttggaactgtgtacttagtggcagtgaggaattcagtcactagaactagaactagaactgtggttcaagaaaaaacagcaacacaacagatttggtgaggactcacttcatctattgaactaaacttttaaatatccctgcagctaaagccagaactggccccaaagctaagcatgggaagttcaaattgctgagcttgtagtggggcgcatattagtccattaggaggtggctgggcaggtgcaggggcaggagatctggcaggtcacactatgagtaaccctgaagaagaacatcgatttcaagaagtaaatggagggagagacccctctggttaaaattgagacccatgatgaaagggacaccaagtttcctaaagcagaattggaacaaaagtaaatttaatttcctatttttaaaaatgggatcttagaaaaatgagagactaagataaaaaattcattgtatcctaaaccaaagaaacagtttctgggatgtatccatggctcatacttattttatgtgtttgtcatttcactgggtgaagatataagatgcaaagttatcaaagcagggcatgataaaattctgtaaagagaacaaaactctggattataaaactggactcaaaaagaatccagagaaacttaaaattaaaaacataaaaccatttatattagc

SEQ ID NO: 695440 - DNA, 875 bp, Homo sapiens
taaaatctcagaattcaccactaaagaactcatctatgtaaccaaaaaccacctgtactcccaaaaccattgaaatttaaaaaaaaactgaaaacaaacaaacaaaaaaaaacagaagcaatgatgtctggaagccccagtactggctaaaggaacagtcrcttgtcaggctccagaagtaagtctagaagactttggaactgtgtacttagtggcagtgaggaattcagtcactagaactagaactagaactgtggttcaagaaaaaacagcaacacaacagatttggtgaggactcacttcatctattgaactaaacttttaaatatccctgcagctaaagccagaactggccccaaagctaagcatgggaagttcaaattgctgagcttgtagtggggcgcatattagtccattaggaggtggctgggcaggtgcaggggcaggagatctggcaggtcacactatgagtaaccctgaagaagaacatcgatttcaagaagtaaatggagggagagacccctctggttaaaattgagacccatgatgaaagggacaccaagtttcctaaagcagaattggaacaaaagtaaatttaatttcctatttttaaaaatgggatcttagaaaaatgagagactaagataaaaaattcattgtatcctaaaccaaagaaacagtttctgggatgtatccatggctcatacttattttatgtgtttgtcatttcactgggtgaagatataagatgcaaagttatcaaagcagggcatgataaaattctgtaaagagaacaaaactctggattataaaactggactcaaaaagaatccagagaaacttaaaattaaaaacataaaaccatttatattagc

SEQ ID NO: 695441 - DNA, 1155 bp, Homo sapiens
ttcccttcgggatttctttgattttcaaaagtgacgtctgctgcttttctgtggagaaccaccatctagcactggggggtagtctaaaacctgtgacctgaccaatggggtgctggggcaggaagcccagcgccctcgcctgggacgcccactctatgttgccggctgtgggacttggcctagctcgcccctttygaggctcccgcggctgctctgtccacctccctagtcccttggtggcttcaatagtgggcacccccttagcaagtcactcccacgccaatcaaattctagggaatccactgcacatactgggtggtttcaaaccacagaaatgtattctctcccagttctacaggcttggagtcccgcaggaaggtgtacggcaggccaggctccctctgaaggctcgaggggagaagccgttccaggcctttctcttgcttctggtgttgccatcagtccttctgttccttggcttctagacgcgtccctcccgcctctgcgtctgtcttcccatggtattcttcctgtgtcctgatccctcttttcataaggacacctgccatcttggattcatggcccaccctaactctaataagtatgacctcatcttagcttgatgacatctgcaaagaccctggttccaaataaggccacagtcacaggtgcgggggcaggtattggctagggctgggaggggaaaatctgttccaggtctctctccccttggccatcttctctctatgtctcttcacatcgtcttccctctatgcatgtctgtctctgtgtccaaatgtctcctttttataaggacaccagtcatagtggattagggcccactctaatgacctcactttaatttgcctctgtaaagagtatttacaaataaggtgacattctgaggtattgggggttcaacatatgaatgggagggcacaattcaacccataacagcaacctgagacattttatgtattaatatttcatgaagatcaagaatataaacacaaaaaatagcatgcactgtatataacacagtagtcatagttgccaattgttattcaaatatcttaaaataatttttggttttttttgagatggagtctcgttctgtcacccaggctggagtgcggtgacacgatctcggctcac

SEQ ID NO: 695442 - DNA, 1155 bp, Homo sapiens
ttcccttcgggatttctttgattttcaaaagtgacgtctgctgcttttctgtggagaaccaccatctagcactggggggtagtctaaaacctgtgacctgaccaatggggtgctggggcaggaagcccagcgccctcgcctgggacgcccactctatgttgccggctgtgggacttggcctagctcgccccttttgaggctcccgcggctgctctgtccacctccctagtcccttggtggcttcaatagtgggcacccccttagcaagtcactcccacgccaatcaaattctagggaatccactgcacatactgggtggtttcaaaccacagaaatgtattctctcccagttctacaggcttggagtcccrcaggaaggtgtacggcaggccaggctccctctgaaggctcgaggggagaagccgttccaggcctttctcttgcttctggtgttgccatcagtccttctgttccttggcttctagacgcgtccctcccgcctctgcgtctgtcttcccatggtattcttcctgtgtcctgatccctcttttcataaggacacctgccatcttggattcatggcccaccctaactctaataagtatgacctcatcttagcttgatgacatctgcaaagaccctggttccaaataaggccacagtcacaggtgcgggggcaggtattggctagggctgggaggggaaaatctgttccaggtctctctccccttggccatcttctctctatgtctcttcacatcgtcttccctctatgcatgtctgtctctgtgtccaaatgtctcctttttataaggacaccagtcatagtggattagggcccactctaatgacctcactttaatttgcctctgtaaagagtatttacaaataaggtgacattctgaggtattgggggttcaacatatgaatgggagggcacaattcaacccataacagcaacctgagacattttatgtattaatatttcatgaagatcaagaatataaacacaaaaaatagcatgcactgtatataacacagtagtcatagttgccaattgttattcaaatatcttaaaataatttttggttttttttgagatggagtctcgttctgtcacccaggctggagtgcggtgacacgatctcggctcac

SEQ ID NO: 695443 - DNA, 1487 bp, Homo sapiens
tgggaatagtcaaaacttcagacccagaaatatcttaaaagtagttggaggatgaggaaaaaagtgggaagaaaacatgaaacgaattgtgttttatgtgcttattgtgttagagattctatattaatatttataaattatattatttaatactcaatccagtggggtatgtcttgctctgatcttgctcacaaggaaactcaagctctaaaactaaatcatgaggcaacccactactgagaggataaattgaggtaaattagtactggtttctgaaactaacctttctagaaaagaaagtaaaagtcttttacttttttctcatcccgtgtaataaacagagattacaatatttgtagcttcaggtcagagcccagagaatctagatgaaggaaaatgtgtcttcactgaagctgtttttgactcgtccttataagcattcttcttccttggttgccaagacacctcatcttcaactattgctttatatttctatctctccttctcaggcatcttagcttcctctttgccaactccacctctaacccaatggcctaaggatcctacaggctttgctggaccaggtgatccagtttccccaagtatctgacagcagtatgtgaggatgaaaatacacactgtgctcaggggaaagggaagggccagaatactccctctgaggagggtgatagggaaagagttacaaagtcagaagccacaaacactaggagaagatgagaaagctcaccacgagacagatagagtgttgctggctctggtaggttaaagcaagaccgtgcaactctggtgtccccaggagccttcctctgcatttagtccttggggaattcattggcacacaccccctactttaaccaccatctgggtggtgatgactccagtccatagatgctatgtctaactgacccctgggtgtctctcttttgatgtccagatggcaacacaagcttattaacttgactcccaaccccaaaagcaccttctccttcctccttcattattttctcttccaaattctgttttctgttaatggtgctatgagctactctgtcacaaaggcaagaaacatyggagtcaccctcatcaaagttttcttctattaccccacattcaagtcacccagttttcttggttttaattcaggcatggctccataaccttgcctcttctcgcccctgccactctcataatcccagccctgggctgcaatagaatctcggcctagagagctggccttctgctgcgggttcttcacattccagtcccaccatcgtccgtgccccagggtgtcctcacaacaggtacctatggccacgtccccttctgctttcgctcaaccagtggcttcccactgcatctacgctggaaggtctcagctccactttcatgtctgtcaccacctagtcctcctggctcagccctggcttctgcaaagtgccagtgtttctcaaacccaccatgacctt

SEQ ID NO: 695444 - DNA, 1487 bp, Homo sapiens
tgggaatagtcaaaacttcagacccagaaatatcttaaaagtagttggaggatgaggaaaaaagtgggaagaaaacatgaaacgaattgtgttttatgtgcttattgtgttagagattctatattaatatttataaattatattatttaatactcaatccagtggggtatgtcttgctctgatcttgctcacaaggaaactcaagctctaaaactaaatcatgaggcaacccactactgagaggataaattgaggtaaattagtactggtttctgaaactaacctttctagaaaagaaagtaaaagtcttttacttttttctcatcccgtgtaataaacagagattacaatatttgtagcttcaggtcagagcccagagaatctagatgaaggaaaatgtgtcttcactgaagctgtttttgactcgtccttataagcattcttcttccttggttgccaagacacctcatcttcaactattgctttatatttctatctctccttctcaggcatcttagcttcctctttgccaactccacctctaacccaatggcctaaggatcctacaggctttgctggaccaggtgatccagtttccccaagtatctgacagcagtatgtgaggatgaaaatacacactgtgctcaggggaaagggaagggccagaatactccctctgaggagggtgatagggaaagagttacaaagtcagaagccacaaacactaggagaagatgagaaagctcaccacgagacagatagagtgttgctggctctggtaggttaaagcaagaccgtgcaactctggtgtccccaggagccttcctctgcatttagtccttggggaattcattggcacacaccccctactttaaccaccatctgggtggtgatgactccagtccatagatgctatgtctaactgacccctgggtgtctctcttttgatgtccagatggcaacacaagcttattaacttgactcccaaccccaaaagcaccttctccttcctccttcattattttctcttccaaattctgttttctgttaatggtgctatgagctactctgtcacaaaggcaagaaacattggagtcaccctcatcaaagttttcttctattaccccacattcaagtcacccagttttcttggtttyaattcaggcatggctccataaccttgcctcttctcgcccctgccactctcataatcccagccctgggctgcaatagaatctcggcctagagagctggccttctgctgcgggttcttcacattccagtcccaccatcgtccgtgccccagggtgtcctcacaacaggtacctatggccacgtccccttctgctttcgctcaaccagtggcttcccactgcatctacgctggaaggtctcagctccactttcatgtctgtcaccacctagtcctcctggctcagccctggcttctgcaaagtgccagtgtttctcaaacccaccatgacctt

SEQ ID NO: 695445 - DNA, 1487 bp, Homo sapiens
tgggaatagtcaaaacttcagacccagaaatatcttaaaagtagttggaggatgaggaaaaaagtgggaagaaaacatgaaacgaattgtgttttatgtgcttattgtgttagagattctatattaatatttataaattatattatttaatactcaatccagtggggtatgtcttgctctgatcttgctcacaaggaaactcaagctctaaaactaaatcatgaggcaacccactactgagaggataaattgaggtaaattagtactggtttctgaaactaacctttctagaaaagaaagtaaaagtcttttacttttttctcatcccgtgtaataaacagagattacaatatttgtagcttcaggtcagagcccagagaatctagatgaaggaaaatgtgtcttcactgaagctgtttttgactcgtccttataagcattcttcttccttggttgccaagacacctcatcttcaactattgctttatatttctatctctccttctcaggcatcttagcttcctctttgccaactccacctctaacccaatggcctaaggatcctacaggctttgctggaccaggtgatccagtttccccaagtatctgacagcagtatgtgaggatgaaaatacacactgtgctcaggggaaagggaagggccagaatactccctctgaggagggtgatagggaaagagttacaaagtcagaagccacaaacactaggagaagatgagaaagctcaccacgagacagatagagtgttgctggctctggtaggttaaagcaagaccgtgcaactctggtgtccccaggagccttcctctgcatttagtccttggggaattcattggcacacaccccctactttaaccaccatctgggtggtgatgactccagtccatagatgctatgtctaactgacccctgggtgtctctcttttgatgtccagatggcaacacaagcttattaacttgactcccaaccccaaaagcaccttctccttcctccttcattattttctcttccaaattctgttttctgttaatggtgctatgagctactctgtcacaaaggcaagaaacattggagtcaccctcatcaaagttttcttctattaccccacattcaagtcacccagttttcttggttttaattcaggcatggctccataaccttgcctcttctcgcccctgccactctcataatcccagccctgggctgcaatagaatctcggcctagagagctggccttctgctgygggttcttcacattccagtcccaccatcgtccgtgccccagggtgtcctcacaacaggtacctatggccacgtccccttctgctttcgctcaaccagtggcttcccactgcatctacgctggaaggtctcagctccactttcatgtctgtcaccacctagtcctcctggctcagccctggcttctgcaaagtgccagtgtttctcaaacccaccatgacctt

SEQ ID NO: 695446 - DNA, 1487 bp, Homo sapiens
tgggaatagtcaaaacttcagacccagaaatatcttaaaagtagttggaggatgaggaaaaaagtgggaagaaaacatgaaacgaattgtgttttatgtgcttattgtgttagagattctatattaatatttataaattatattatttaatactcaatccagtggggtatgtcttgctctgatcttgctcacaaggaaactcaagctctaaaactaaatcatgaggcaacccactactgagaggataaattgaggtaaattagtactggtttctgaaactaacctttctagaaaagaaagtaaaagtcttttacttttttctcatcccgtgtaataaacagagattacaatatttgtagcttcaggtcagagcccagagaatctagatgaaggaaaatgtgtcttcactgaagctgtttttgactcgtccttataagcattcttcttccttggttgccaagacacctcatcttcaactattgctttatatttctatctctccttctcaggcatcttagcttcctctttgccaactccacctctaacccaatggcctaaggatcctacaggctttgctggaccaggtgatccagtttccccaagtatctgacagcagtatgtgaggatgaaaatacacactgtgctcaggggaaagggaagggccagaatactccctctgaggagggtgatagggaaagagttacaaagtcagaagccacaaacactaggagaagatgagaaagctcaccacgagacagatagagtgttgctggctctggtaggttaaagcaagaccgtgcaactctggtgtccccaggagccttcctctgcatttagtccttggggaattcattggcacacaccccctactttaaccaccatctgggtggtgatgactccagtccatagatgctatgtctaactgacccctgggtgtctctcttttgatgtccagatggcaacacaagcttattaacttgactcccaaccccaaaagcaccttctccttcctccttcattattttctcttccaaattctgttttctgttaatggtgctatgagctactctgtcacaaaggcaagaaacattggagtcaccctcatcaaagttttcttctattaccccacattcaagtcacccagttttcttggttttaattcaggcatggctccataaccttgcctcttctcgcccctgccactctcataatcccagccctgggctgcaatagaatctcggcctagagagctggccttctgctgcgggttcttcacrttccagtcccaccatcgtccgtgccccagggtgtcctcacaacaggtacctatggccacgtccccttctgctttcgctcaaccagtggcttcccactgcatctacgctggaaggtctcagctccactttcatgtctgtcaccacctagtcctcctggctcagccctggcttctgcaaagtgccagtgtttctcaaacccaccatgacctt

SEQ ID NO: 695447 - DNA, 1487 bp, Homo sapiens
tgggaatagtcaaaacttcagacccagaaatatcttaaaagtagttggaggatgaggaaaaaagtgggaagaaaacatgaaacgaattgtgttttatgtgcttattgtgttagagattctatattaatatttataaattatattatttaatactcaatccagtggggtatgtcttgctctgatcttgctcacaaggaaactcaagctctaaaactaaatcatgaggcaacccactactgagaggataaattgaggtaaattagtactggtttctgaaactaacctttctagaaaagaaagtaaaagtcttttacttttttctcatcccgtgtaataaacagagattacaatatttgtagcttcaggtcagagcccagagaatctagatgaaggaaaatgtgtcttcactgaagctgtttttgactcgtccttataagcattcttcttccttggttgccaagacacctcatcttcaactattgctttatatttctatctctccttctcaggcatcttagcttcctctttgccaactccacctctaacccaatggcctaaggatcctacaggctttgctggaccaggtgatccagtttccccaagtatctgacagcagtatgtgaggatgaaaatacacactgtgctcaggggaaagggaagggccagaatactccctctgaggagggtgatagggaaagagttacaaagtcagaagccacaaacactaggagaagatgagaaagctcaccacgagacagatagagtgttgctggctctggtaggttaaagcaagaccgtgcaactctggtgtccccaggagccttcctctgcatttagtccttggggaattcattggcacacaccccctactttaaccaccatctgggtggtgatgactccagtccatagatgctatgtctaactgacccctgggtgtctctcttttgatgtccagatggcaacacaagcttattaacttgactcccaaccccaaaagcaccttctccttcctccttcattattttctcttccaaattctgttttctgttaatggtgctatgagctactctgtcacaaaggcaagaaacattggagtcaccctcatcaaagttttcttctattaccccacattcaagtcacccagttttcttggttttaattcaggcatggctccataaccttgcctcttctcgcccctgccactctcataatcccagccctgggctgcaatagaatctcggcctagagagctggccttctgctgcgggttcttcacattccagtcccaccatcgtccgtgccccagggtgtcctcacaacaggtacctrtggccacgtccccttctgctttcgctcaaccagtggcttcccactgcatctacgctggaaggtctcagctccactttcatgtctgtcaccacctagtcctcctggctcagccctggcttctgcaaagtgccagtgtttctcaaacccaccatgacctt

SEQ ID NO: 695448 - DNA, 962 bp, Homo sapiens
ttgtgtgtgtgcccgtgtgtgagtgtgtgtgtctctttgcatggggcagtcgagaaacatttgcaattttctacaatccctgttactcaaatttagatgtatgcaagtctatatttacagggtatgaaaatgaattctcatagtggcaagtagatatgcttgaaattcttaattgtaagttcatcaaaaaatattatcaaatcatttttaaaaggaaagcttagttttattgaaattatttaatatatcatggtattaattaattgtaatctactttttttgttgtttgaaaacaacttcaaacaccttcaaaacatgacacatttgaaaatatgaaaaatattatcttaatttttctaattttwcatgtacttccatttataacttttatgaaaatatgctttgggtttgatatgctttgagtaattacattttgaaaaaatgttttagtgaaattcaaattatgtgaaatgcctgataattatttaattagtaattttattgaaataaagaaaattatttgtatgaataactatataattatttgtgaattacatgtcttaatgtcatcatttatttaaacatattaatagtgatttgattcaatcatctttcatgtcttgtcaaatttctattaaaaccatatttgtaaacatatttctcaatatgaaggtatatttgttcaggtaggagaaaatatttcagtgaaaaatttgttagctaagtttatagtatttaactatttaaacatatggtttgtgggtcttaacctgggctaaccaattcttgggtatataacttttgaaccgaagaagacaatatccaaaaatatttaaacttgcttacttctaacttacagtagtgacacactgataagagtatactactgttacttagatctgcagtattttgaaatatttcttttatctttgttcagttttatgcacttaaaaatatttttc

SEQ ID NO: 695449 - DNA, 1134 bp, Homo sapiens
gcctccaacattagggattatgattcagcatgagatttgagtggggacaaaccatatcaggtggcaattaatgtaataaaagaggtgagaagagcccatattaaggtgtttagtcctcagagatgcatatcaattctttacatgcacaatattcttaaatgataacatytgtacacttgtggatttggtaaaaatgcttacctgataacaggagtggtcttcagctttctatgcgttcatgtaatgcttcatttcattgatatgtatgtagactgccttatcggaaacacttgtgaaaatatgtgacctctgagagaatgtatgatgtttttcaagttgtcaatacagtatttgcaatataaattaaagaaacataaaattaaaacatggaaatgttcttaggtttctttaagaaaatgtataaaaacttgaaattgacttactactgcctgcattttacttaagaaacttaaaacaaatagctaccattaagatgttccacatgtgttttttcaaaagctcttgtaggtaagccaataaaccaattagatcaacccaaacaaattcttaactttttgagtatttcctgtgtcttgtgcatgtataaacattaatggcattataaaaactgtaggagtggagaaatgcaatttaggcagctgtttgtcaaatcaagttttcctaattttgcatttgcacaagtttcataaaattttgtctgaagaaatatcagccaattaaaagaaaacaatggtgtatcatctaccatgtgaactataaattgttatagacactaaaattctgtttatttatagtagagtcaataaatgtgtcataactcaatttgagaatgtaccatacagaaaaaagaactaatttctgtagaaaaaagaatttagttcaccaaaactcatatacaaacacacatacttgcttatacaccttcataatttttgtaaagatatacttgattaaagagtattctctctaatagagaaaaattaacaagttcagaatgaaaacatcttcaaatttaacatcatatcgccttctttgtgttctgtgctttacattttacaaaatataacaacatacataatttttggtcataatgatgacagccagcatggatat

SEQ ID NO: 695450 - DNA, 1134 bp, Homo sapiens
gcctccaacattagggattatgattcagcatgagatttgagtggggacaaaccatatcaggtggcaattaatgtaataaaagaggtgagaagagcccatattaaggtgtttagtcctcagagatgcatatcaattctttacatgcacaatattcttaaatgataacatttgtacacttgtggatttggtaaaaatgcttacctgataacaggagtggtcttcagctttctatgcgttcatgtaatgcttcatttcattgatatgtatgtagactgccttatcggaaacacttgtgaaaatatgtgacctctgagagaatgtatgatgtttttcaagttgtcaatacagtatttgcaatataaattaaagaaacataaaattaaaacatggaaatgttcttaggtttctttaagaaaatgtataaaaacttgaaattgacttactactgcctgcattttacttaagaaacttaaaacaaatagctaccattaagatgttccacatgtgttttttcaaaagctcttgtaggtaagccaataaaccaattagatcaacccaaacaaattcttaactttttgagtatttcctgtgtcttgtgcatgtataaacattaatggcattataaaaactgtaggagtggagaaatgcaatttaggcagctgtttgtcaaatcaagttttcctaattttgcatttgcacaagtttcataaaattttgtctgaagaaatatcagccaattaaaagaaaacaatggtgtatcatctaccatgtgaactataaattgttatagacactaaaattctgtttatttatagtagagtcaataaatgtgtcataactcaatttgagaatgtaccatamagaaaaaagaactaatttctgtagaaaaaagaatttagttcaccaaaactcatatacaaacacacatacttgcttatacaccttcataatttttgtaaagatatacttgattaaagagtattctctctaatagagaaaaattaacaagttcagaatgaaaacatcttcaaatttaacatcatatcgccttctttgtgttctgtgctttacattttacaaaatataacaacatacataatttttggtcataatgatgacagccagcatggatat

SEQ ID NO: 695451 - DNA, 632 bp, Homo sapiens
ataccccacaatgggatggtataaggaggtgggtctttgggaggtaattaggatgagatgaggccataagggtagagccctcatgaatgggattagtgttcttatatgagtcaagtgagagctttcttcccgtctctgatctctgccacacgaggatatgagaaggcagcagatggcaacacagaagagttctcaccagaacttgagcatgttggtaccccgatctcagactttcagcctccagaagtgtgagaaataagtttctgtcatttataatccacccagtatatagcactttgttatcgcagcccaaactaagaaatttgtttagctgtgtttcaccaaacacatcgcatagcatccatgcagagcatcttcagaagtcaggaatttgttattcaatggcatccctgggttctagataccccaaacagattatgctgcaaggattccagacagctttgtaaagaaaattaaatcagcgtgattcaaacatgtttattctttctcatttgatactgagtaatgttttacacatggccaaagggctctaagsgtttcctgcaacactttgaatctcaaaagaatccacatttggctaaatgcagatcacttaaagatccagaattttt

SEQ ID NO: 695452 - DNA, 618 bp, Homo sapiens
tcacttgaggtcaggagttcgagaccagcctggccaacatggtgaaaccccatctttactaaaaaaaatagccaagtggcatgcctgtaggagtcctagccatttgggaggctgaggagggagaatcacttgaacccaggaggcagaggttgcagtgagcccagattgcaccactgccttccagcttgggctacagagtgaaactctgtctccaaaaaaaacaaacaacaacaacaamaaaaaaaacgccttttctttgtctacctgttaagtttcaggggacatatctgattagcagcatatacaaatttggataataagctgtgccacaaggagtcccgctattccaagacagataacaaagcagaaacaactgaatatatagttgtgaatctttgggcattccactggcagctgggtgtagcgtgggatttctcaaatgtgagtcaagtacagacgtgtttttaaggaaaaaatattctcattgatcatgaaaactacatctacctgcccccagtttaagaaatgctgatgcatggttgaaaaggcaactccaaacctgaacttaggaaatcaattcttgtcccaccttcgccactacccagccagatcattatt

SEQ ID NO: 695453 - DNA, 618 bp, Homo sapiens
tcacttgaggtcaggagttcgagaccagcctggccaacatggtgaaaccccatctttactaaaaaaaatagccaagtggcatgcctgtaggagtcctagccatttgggaggctgaggagggagaatcacttgaacccaggaggcagaggttgcagtgagcccagattgcaccactgccttccagcttgggctacagagtgaaactctgtctccaaaaaaaacaaacaacaacaacaaaaaaaaaaacgccttttctttgtctacctgttaagtttcaggggacatatctgattagcagcatatacaaatttggataataagctgtgccacaaggagtccckctattccaagacagataacaaagcagaaacaactgaatatatagttgtgaatctttgggcattccactggcagctgggtgtagcgtgggatttctcaaatgtgagtcaagtacagacgtgtttttaaggaaaaaatattctcattgatcatgaaaactacatctacctgcccccagtttaagaaatgctgatgcatggttgaaaaggcaactccaaacctgaacttaggaaatcaattcttgtcccaccttcgccactacccagccagatcattatt

SEQ ID NO: 695454 - DNA, 1520 bp, Homo sapiens
tcaaatgtttctacaattatcttaccacattattaaatccctaaactgacagtgggagatttctttaggatagtctaaggaaaccgaggtggatataacagaatgaaaatgaaggaaagcaatacaaagacgttatcaggaaaatctctcgaatgtcacaagatgattcttactacagtttctcaaagagaaatgcctcatagagaatgaggtggaactgagatgaaaccattccacagattgcatttacaaagggctttatgtcgagagagcaggagaaaaaagtaaaggactatgtgatgttttctaaaacccatccatgcctctaacactcatctctacaaatccggaaatcgcaattagtgagattttccgggatttgtttcacttcctatgacccctcatccttctcttgagagggaagatgtattaattccctgcatcttctttccgtttgatccactttatcatgaggtggacactgttccagcactggtctgatattcttctgtactttagtgtctttctctctggctgagtgaagttacaagcctgcatagatgtcactaactttcctgagggtctgtccacatcatgctttgattttgtttttatttttgtttttgagacgaaacccttgcttcgtctcaaaggagattcagataaatactgtcacccaggctaaagtgcagtggcacaatctcagctcactgcaacctccccctcctgggttcaagtgatcttcctgcctcagcctcccaaatagctgggatgacaagcatgtgccaccacgcccagccagtttacgtgttttcagtagagatggggtttcaccatgttggccaggctggtctcgaactcctgacctcctgatccacccacctcggcctcccaagggctgagattacaggcgagagccaccgcacctggccaggtttttttttcttcagaggagctcatatgagtttgggaatagaaacacaacaataatgcctttgataactttctgtaagaaaatcccctcccacactgccgcacacttttcactctcaaaggctttgaactgttgtgtttctaaatgggatcaatggcatgacctttctttgctcttaacgcacacccataattacaggtagtctgcaaagcagggtctccgcctctcttttctgtctgttcaggataaacaatgctttaaatgcactattagcctgtcatgaagtggagctcaaatatgaaacatcagtggcagctctaactcaacctgcatgacttctgtgttcctgtattgtgtgctttaagtgtaaactcaagcacagacgttgctgataaaagcactattatttagatgttcattggctgaccctatatattagatgttcttttgccatttcacacaaattgatgttttgacaggtgccattttatttggttggcaggacttcaccrtttttctcttcagccctctccgaatagctacaaaggtacagatgccaagctaatataataggtagatttgttgg

SEQ ID NO: 695455 - DNA, 1520 bp, Homo sapiens
tcaaatgtttctacaattatcttaccacattattaaatccctaaactgacagtgggagatttctttaggatagtctaaggaaaccgaggtggatataacagaatgaaaatgaaggaaagcaatacaaagacgttatcaggaaaatctctcgaatgtcacaagatgattcttactacagtttctcaaagagaaatgcctcatagagaatgaggtggaactgagatgaaaccattccacagattgcatttacaaagggctttatgtcgagagagcaggagaaaaaagtaaaggactatgtgatgttttctaaaacccatccatgcctctaacactcatctctacaaatccggaaatcgcaattagtgagattttccgggatttgtttcacttcctatgacccctcatccttctcttgagagggaagatgtattaattccctgcatcttctttccgtttgatccactttatcatgaggtggacactgttccagcactggtctgatattcttctgtactttagtgtctttctctctggctgagtgaagttacaagcctgcatagatgtcactaactttcctgagggtctgtccacatcatgctttgattttgtttttatttttgtttttgagacgaaacccttgcttcgtctcaaaggagattcagataaatactgtcacccaggctaaagtgcagtggcacaatctcagctcactgcaacctccccctcctgggttcaagtgatcttcctgcctcagcctcccaaatagctgggatgacaagcatgtgccaccacgcccagccagtttacgtgttttcagtagagatggggtttcaccatgttggccaggctggtctcgaactcctgacctcctgatccacccacctcggcctcccaagggctgagattacaggcgagagccaccgcacctggccaggtttttttttcttcagaggagctcatatgagtttgggaatagaaacacaacaataatgcctttgataactttctgtaagaaaatcccctcccacactgccgcacacttttcactctcaaaggctttgaactgttgtgtttctaaatgggatcaatggcatgacctttctttgctcttaacgcacacccataattacaggtagtctgcaaagcagggtctccgcctctcttttctgtctgttcaggataaacaatgctttaaatgcactattagcctgtcatgaagtggagctcaaatatgaaacatcagtggcagctctaactcaacctgcatgacttctgtgttcctgtattgtgtgctttaagtgtaaactcaagcacagacgttgctgataaaagcactattatttagatgttcattggctgaccctatatattagatgttcttttgccatttcacacaaattgatgttttgacaggtgccattttatttggttggcaggacttcaccgtttttctcttcagccctctccgaatagctacaaaggtacagatgccaagctratataataggtagatttgttgg

SEQ ID NO: 695456 - DNA, 649 bp, Homo sapiens
tcagcctcccaaagtgctgggattacaggcgatagccaccacacctggcctgtaattatttttctcttgttttcatttctgatcttagttttagctttacctttacctctgttcatgtattcaaaatattcaaggtaaataaacaagtaaacagacaaatgtgacaatacattattcctttgctcacttgtttgcttctactctgattttattttaaactctgtacctgtcataatttctggcattgttatgacttctgtaagmatgctccctgagtgttcttaatattccaaatagctataaagctattcactaataaaaattcatgtggtgttgaggatgcaaagtgaaaatcttttttttattatactttaagttctagggtacacgtgcacaacgtgcaggtttgttacataggtatacatgtgccatgttggtttgctgcacccattaactcgtcatttacattaggtgtttctcctaatgctatccatccccctgcccgtcaccccatgacaggcccctgtgtgtgatgttccctgccctgtgtccaagtgttctcattgttcaattcccacctatgagcgagaacatgtttggttttctgtccttgtgatagtttgctcagagtgatggtttccagcttcat

SEQ ID NO: 695457 - DNA, 492 bp, Homo sapiens
ttcggcctcttggctcctcccccacattctgttcttagagtcacctgcrttcagggttgttttcaccccagcctttagggatctcctttaataaactgatgaatcccctagatgtgtttaaaccttgatagttcatcaagaactttaacttaaatctttaaaaacgtgatccctggccaggtgcactggctcacacatgtaatcccagaactttgggaggctgaggcaggtggatcacctgaggttgggagtttgagaccagcctgatcaacatggagaaacctcatctctactaaaaaatacaaaattagccgggcatggtggtggatgcctgtaatcccaactactcaggaggctaaggcagaagaattgcttgaacccaggaggcggaggttgcagtgagctgagatcgtgccattgcactccagcctgggcaacaagagcaaaattccatctcgaaaaaaaaaaaagtgatccctataacagtcttgt

SEQ ID NO: 695458 - DNA, 593 bp, Homo sapiens
ccagtaaatattggtcaaaaatattataataaaagatttctgaaacttaaagcttgtttctcaggatacttgacatacaaccaggcctagatccacatatgtttatcactgttctattagcaaaaccaagagaaagattttaataaaaggttagctcaacatcaaatagaaatttttaaaaatttcattagggagttttccaaatatactcaataataattagtacaaggtaataaatctccatccaccagcttcaaaaattattagtcattttttcacctattcctccttccattatttttgcaggattatgaaattcttcaatatgcaccccaatgacatatttgttttatatataactgtcatgccattatcacatctaacaaaattaacaataattcatctatagtatcaaattacttaatccataatctgattttcctgattatttcaaggattatcttcacaggttgtttgtrccaaacaggacatacagtccacacgttgcagttaattatgatccttaaatctcttttactcttttgtagtctgacccctgttttttcatgtcattgattccatatggaaatcag

SEQ ID NO: 695459 - DNA, 372 bp, Homo sapiens
  misc_feature 5, 6, 7, 8, 9, 10, 11, 12, 13, 14, 15, 16, 17, 18, 19, 20,21, 22, 23, 24, 25, 26, 27, 28, 29, 30, 31, 32, 33, 34,35, 36, 37, 38, 39, 40, 41, 42, 43, 44, 45, 46, 47, 48,49, 50, 51, 52, 53, 54, 55, 56, 57, 58, 59, 60, 61, 62,63: n = A,T,C or G
  misc_feature 64, 65, 66, 67, 68, 69, 70, 71, 72, 73, 74, 75, 76, 77, 78,79, 80, 81, 82, 83, 84, 85, 86, 87, 88, 89, 90, 91, 92,93, 94, 95, 96, 97, 98, 99, 100, 101, 102, 103, 104: n = A,T,C or G
tattnnnnnnnnnnnnnnnnnnnnnnnnnnnnnnnnnnnnnnnnnnnnnnnnnnnnnnnnnnnnnnnnnnnnnnnnnnnnnnnnnnnnnnnnnnnnnnnnnnnnaccacttttattatttaattttttacatttacatctttgatatatttggaatttgtcctagtgtgtggtatgaagtatggaaccaactttcttttagatggctattcagtttttccagccaatctgaggtgtcattattatgtgtacataagtcctaaatgttttggagtctaattctggacttttcattctgttccattggtttcctgcctactcttgtaccagcaccactttaattactgacgtttttcttytgttatgttttgtt

SEQ ID NO: 695460 - DNA, 677 bp, Homo sapiens
attgataaatggcactcacttttggtacaacttttaaattaaatcagaacaaggaggatatattttcacttattattcacctgtttctttgattacctattattatgcaaccaaaaattttttagcagctctcaggcattataataggatgtgagaacactgagattaaagataaagtcactgtcctcaagtattttaaagttgatgagaagtctacaaaaatttgcataaactttgtaaaattttaagatgattaaggggcagaaaattcaataagggaacaacacaaaatattaagacttagaatgaaggacatagagtgtgacagaagtaaatttcaccactcatacgattagaggaatgataagaaagatttcagtgttctttctttactttcttytgagaggaatttcaacgtcttgtggcccttggattagcagcatctgtatcacctggaagtttgttataaatgtgcaatttggaccccagcccagatctacagagtcagaacttgcatttttaacaagagcccaggaaaatttgtatgttttttacagtttgaaaagcaacatcacagagacatagaacctaatttctatgttttcagagcttcacctgcattatatttgcttattaaaactcctctttgtattcattcctgtcgttaatatttctct

SEQ ID NO: 695461 - DNA, 1026 bp, Homo sapiens
tgatttccctacaacttgcccacatctttgtgaacaatccctttgttaaattctcctaggctacccaatttttttttttggacggagtctcactctgccacccaggctggagtgcaatggcatgatctctgctcactgcaacctccgcctcccgggttcaagcaattcttctacctcagcctcccaaatagctgggactacaggcgtgtgccaccatgcccagctaatttttgtatttttagtagagacagggtttcacyatattggccaggctggtctcaaactcttgaccttgtgatctgcccgcctcggcctcccaaagtgctgggattacaggtgtgagccaccacgcctggcttaggctatccagtttgagtgtgctgtgtgtttcctccctgactcatgcaataggctttgggcactggtccaagaaacacactgtcccatgggaaaactcattcttcttacactttctttcctcccttcacttccatgtcatcattctcatttgggtgttttcctctggctcctccctccagtcactcactggctcaggttcttccacgtacacctcaaccttggcatttcccaggtctctgccctctgccatttctctccagcctgtctttggggttctcatctacctgtggtttccaccttaggttccacagtcagatctgtcagatgctctcttcttcacttctgccagggggtgcagagaaacctcaaacataagaggtcctcggttagacgtgatctctgtgttctgtcctgttctccatctcagacagtgactctgccattcatccagtcatccatgctgaagccatcggagtcacccaagagcctctttccatagctcccctgtggtatcctcctagttcctgtcccttccgctcctagagtctctgctcctatccatccctctcagtgtctcccctctcactccctcagtgggagcccttctctttcatacagcctgcttttcagactcctaagtggctcctgctcttgtccattctccaa

SEQ ID NO: 695462 - DNA, 1026 bp, Homo sapiens
tgatttccctacaacttgcccacatctttgtgaacaatccctttgttaaattctcctaggctacccaatttttttttttggacggagtctcactctgccacccaggctggagtgcaatggcatgatctctgctcactgcaacctccgcctcccgggttcaagcaattcttctacctcagcctcccaaatagctgggactacaggcgtgtgccaccatgcccagctaatttttgtatttttagtagagacagggtttcaccatattggccaggctggtctcaaactcttgaccttgtgatctgcccgcctcrgcctcccaaagtgctgggattacaggtgtgagccaccacgcctggcttaggctatccagtttgagtgtgctgtgtgtttcctccctgactcatgcaataggctttgggcactggtccaagaaacacactgtcccatgggaaaactcattcttcttacactttctttcctcccttcacttccatgtcatcattctcatttgggtgttttcctctggctcctccctccagtcactcactggctcaggttcttccacgtacacctcaaccttggcatttcccaggtctctgccctctgccatttctctccagcctgtctttggggttctcatctacctgtggtttccaccttaggttccacagtcagatctgtcagatgctctcttcttcacttctgccagggggtgcagagaaacctcaaacataagaggtcctcggttagacgtgatctctgtgttctgtcctgttctccatctcagacagtgactctgccattcatccagtcatccatgctgaagccatcggagtcacccaagagcctctttccatagctcccctgtggtatcctcctagttcctgtcccttccgctcctagagtctctgctcctatccatccctctcagtgtctcccctctcactccctcagtgggagcccttctctttcatacagcctgcttttcagactcctaagtggctcctgctcttgtccattctccaa

SEQ ID NO: 695463 - DNA, 1026 bp, Homo sapiens
tgatttccctacaacttgcccacatctttgtgaacaatccctttgttaaattctcctaggctacccaatttttttttttggacggagtctcactctgccacccaggctggagtgcaatggcatgatctctgctcactgcaacctccgcctcccgggttcaagcaattcttctacctcagcctcccaaatagctgggactacaggcgtgtgccaccatgcccagctaatttttgtatttttagtagagacagggtttcaccatattggccaggctggtctcaaactcttgaccttgtgatctgcccgcctcggcctcccaaagtgctgggattacaggtgtgagccaccacgcctggcttaggctatccagtttgagtgtgctgtgtgtttcctccctgactcatgcaataggctttgggcactggtccaagaaacacactgtcccatgggaaaactcattcttcttacactttctttcctcccttcacttccatgtcatcattctcatttgggtgttttcctctggctcctccctccagtcactcactggctcaggttcttccacgtacacctcaaccttggcatttcccaggtctctgccctctgccatttctctccagcctgtctttggggttctcatctacctgtggtttccaccttaggttccacagtcagatctgtcagatgctctcttcttcacttctgccagggggtgcagagaaacctcaaacataagaggtcctcggttagacgtgatctctgtgttctgtcctgttctccatctcagacagtgactctgccattcatccagtcatccatgctgaagccatcggagtcacccaagagcctctttccatagctcccctgtggtatcctcctagttcctgtcccttccgctcctagagtctctgctcctatccatccctctcagtgtctcccctctcactccctcagtsggagcccttctctttcatacagcctgcttttcagactcctaagtggctcctgctcttgtccattctccaa

SEQ ID NO: 695464 - DNA, 602 bp, Homo sapiens
tgcctcttctgaatgaaggactttcatgcctctagaaagtctgcactttttttttttttttaaggaaagatggggtttcaccatgttggccaggatggtctcgatctcttgaccttgtgatccacccacctcggcctcccaaagtgctgggattacaggcgtgagccaccgcgcctggtgtaagtctgtatytgtattctaaatgaaatcttaggacactgaattaaatttagtaaaaggctttgaggagggtaccaatggggatccagaactcgctaatgctctttacaaagctgacatcaggaaagtaggcatacacactaggtgttaactatgtaataatgtaaaattatttgaaatggattaatgacactaaatttgaagcaaaccaatatagtttaatgggtttttttatattttcataaatattttaaaggttttattgatcatgtttcatgttgcttctttgacttgtgagtagcatggagagtaaagtttgtggagtaatcaagtggctatgaccgaaaggccacaaacaattaagtgtgttgtgaacctgggtacactccttgttccgctttaatttccaaggacctgaccca

SEQ ID NO: 695465 - DNA, 602 bp, Homo sapiens
tgcctcttctgaatgaaggactttcatgcctctagaaagtctgcactttttttttttttttaaggaaagatggggtttcaccatgttggccaggatggtctcgatctcttgaccttgtgatccacccacctcggcctcccaaagtgctgggattacaggcgtgagccaccgcgcctggtgtaagtctgtatctgtattctaaatgaaatcttaggacactgaattaaatttagtaaaaggctttgaggagggtaycaatggggatccagaactcgctaatgctctttacaaagctgacatcaggaaagtaggcatacacactaggtgttaactatgtaataatgtaaaattatttgaaatggattaatgacactaaatttgaagcaaaccaatatagtttaatgggtttttttatattttcataaatattttaaaggttttattgatcatgtttcatgttgcttctttgacttgtgagtagcatggagagtaaagtttgtggagtaatcaagtggctatgaccgaaaggccacaaacaattaagtgtgttgtgaacctgggtacactccttgttccgctttaatttccaaggacctgaccca

SEQ ID NO: 695466 - DNA, 964 bp, Homo sapiens
agcgctgcccttacaatatgttgcgtaaatatacactctcatcatggtgacagtaggtctttcagattttgttcgacagtttcccaccttctcactgaagtgaaatgaatgactaggcagcaccttgctacatagcatgaggagaggagacccatagttctttaccatcctatgtcaggtggccgctgagagaagacttgaaaggagatgagcatagatgtatggacgctctttgttgcaccagtgtgataggtgatggagggacctattagatgagacatgggcaggggcactcctttattgcttaaaatgcaagactaaattggtgatgcctttctagaaaggaagtatgaagatacraaaatccatcattcctcccaattttgtactgggtgaacagtaattggaagcattctagaaggaactgtccattgtgaaatcttagttgcatactttagatgaaaaacaatgaattggagatacctctgttttagtcacagttgtgccacgtgtcagttctatgactgatggcaagacatcttccttgccctgtgtatttagtttatcaatgtaataaggctgttattctaactttattattatatatagatttgtaattattattcccttggccagtttaacagtgagaaaaaagttgttttcacacaattagctgtactttgtttctctctccccagtatgtcagccacctccagatgtcctgcatgctgagcgtacccaaagggacaaggacaacttttcacccgggcaggaagtgttctacagctgtgagcccggctacgacctcagaggggctgcgtctatgcgctgcacaccccagggagactggagccctgcagcccccacatgtgaaggtgactagactcttatctggcttgatatttttagcttgcgtctttattctccacatgccagtgatttctgttcatttttctttatctcc

SEQ ID NO: 695467 - DNA, 1092 bp, Homo sapiens
ttgggttcatagattgaatcttgaacccaatgtcttctacttaatggctatgaggtcttaggcaaaccgcttaatcttgctgagcctcagtttcatcttcataaagggaataatattttcctaccaggtttgcagggagaatcaaaagtagtatatgctgccacatacacagaaggcacttcataaattatacttacgattattacccttagaaaagggtaaggggacttctaagagttaaattcgattattccgctaaagtgggagtgcttgctttgcttccaagagttcattttctgctcctttgcagaactagcttggaatgagcctatgctgtcgggaatgcactggatgacctcagtgactggtgacctcagctctcctgagtgaatgtgccccggattcagcctgggacttctcatctgcatctcatgagctccatcatagtgcccacgggaccccggacagagaggagaattcctaaggttgccttttccctgttgtcaatggctttagtcagaattggaagcctaactctgtgctttctactgaagcaaaggatgatgctccaagaaagctcatatttcttacttatttttcccagacagcctgtatccatcatcacacatttgctttattaagccagcagttgttaagcaaggaagcccttgtctatgttccctgcctcatcttgtgccacttggtcccctcaccaaggtgtggccctttcccctttttcagtttcccaaagacacacatttttcccgtctatgacattccttctatgtgacgcaattttatcttcactctgacttcaattcttccttcaggcatctgctaaaatgtcactttcttatagaagccttccccagcctgcctatggccataccaccctgaacacacccaatctcatctgaagccttccctgaccctcttagggatttggaatctaaactacttccctctgccccaccctataataatttctagtcygacactttgcttttcctttcatatcaataattgtttgttattacaatttgtgctttttatctttgtgtgcttttagaagtatctatttctctcaataga

SEQ ID NO: 695468 - DNA, 1181 bp, Homo sapiens
tctcaaaaaaaaaaaaaaaaaaagaaaaaaaaaagaaatatggtcaatattggtccaaaaggaaaggaaattttcatttctgagaaaaaaaaatatacgtatatatttttgagacggagtttcgctcttgttgcccagctggagtgcaatggtgcgatcttagctcaccacaacctctgcctccagggtaggaaggaagttatggcaaccagctggtaaatgcatttccaagttaaatgtcaataaaacatagcacctatgaacaatttttggaattttaaacatgttagatcaggaagcagtctttaacacacagcatgtagcctttccaccatctgacttacttttgtcaagacattagattgtgtagtagtcttgggtttgatgctgtggctctcacaggcctgttgaatggtttgatggatttggcagaagtttgacctccagtgttccatgtaaagtgtactccatttctaagtgttgcaggatttttctcagccactttgctgactgaggacatccacagctggtgctkccccctgactgcctgggccttgcttggccctgggcctgctgctggaggcaccctgcccactcggcctgcttgtgttatgacttatacccgcattaggcagttcccgagctcttctcctgcatccaagaagaatgaggatacactgacaatttgaagggtgaagagggtgaacaagaattttattgagtgatggaaaagctttcagtggggaggggacaatgggggtggtcccccatccttgcagtcaggtggtttctctcccagtgtggctgagtccagggcttttatgggctcaaaataagggagtgtgtgctgattggtttgtgagtatgcaaagaaaggcaccactcaaaggtgggcatggcagtgtagaaaaccaattaggaaagggtaggtatatgtaaagtaggtgaagcttggggatcagagaaaagcatgtcaaatgggaagacaggttctcaatctggtccatggatttgacttgtagcttggttttcaggctttaaactgtcttctgcttggaggtagggtttcactgaggacctgtccctatctgcttaggcatttgtctgcctcctgcctctatcataagggcattctgagtcatttatgtcatgtcattaggtagtggttgaatgagagtgag

SEQ ID NO: 695469 - DNA, 1357 bp, Homo sapiens
attttctctgaacagatcttctccatgtgagtcctctacttatgcctgtcagcttcactgacaaaagtagttatgccttttgaaacagagtcaacagaaccaagaatgggtaaatccatgatttttggctttgaatatcactaataattatctgtttttgattaaaaaattattactcctggagcagagctggattttaactccccggtacattacaaaaatcactagaagggggaaagggaaaagaatagggagaaagacagtaaagagaaaaagacagacaaggaaagaggagagacaagaagagggaggatgaagttgaggttgtataaagtcatttttgcattttccttttgcagcttccttttacaactatgtaaacgtctcattaatttctacatttagaatctgattctgagcgtaaaagtaaattactcttttggatcttttttatctccacttccaccagtgacagatctgaaaaagacgaaatattttatgcaattaaactttgcatgttataatgtgactcgttgtgaatattgcctcaaaaacttaagagtgaagagagatatagaaaataaaaaggtgaagactgagcaatcaacacaggatcacaatggacaggctgttggatgcttgtttgtatttacttctcggtacacacctctctcaagcactgttcgtcatgagcttaaaagcacaggcatggtggacaaaggagcccctgacttccgtatattcgtcccaatattcacagtgctcagacttcctctcctagtcatgagaatgaggaagtggagtggtcttctggataagctcaagccaggaaaagagaggctggttttggacttaaaagcaatagatcatgacagagtaaaaaaataccatacatttactaacattttttccaagatggaaaacctataggtagttcctaatgatctatattgcagaccccctttttctagtccactctaaaatccaactaattctttttcttttcttttaggagatggagtcttgctctgttgcccaaggtactggagtgcagtggcacaatcacagctcactgcagcctcgaatttytgggctccagtgctcctcccacctcagcttccctagtagctgagactataggtgtacaccatcacacctggctaattaaaaaaaaaaagttgtagagatgggatcttgctatgatgcccaggttggtctggaactcttgacctcaagcaatcctccatcttagcttctcagagtgctggcattacaggcatgcaccactacaccaggccgagctaatttctttcttcctttctttctttcttttttttttttttttttttttttgaga

SEQ ID NO: 695470 - DNA, 636 bp, Homo sapiens
tgagcaagagggcttcagctggtcttgacttgggctgcagagctcttggtccaggcaaattctcactccacaaacaatatctgagcttttcagtgctttgagatctgcagataagaggctataaagatgtataaattattattatgctgaggacaatttcctccctggctggcagcctgcaaggctatgcccagtccaatctctgccccctaagggaggacctgartgcagggggagataaatgatgcccagagccctctggccaaggccaagcccacagtatccccaccggtggagaagccaggccaggccaggctgtctttcccaccacatcccacccatcatgcccagcacgtgccagcaaggctttttcctctggaggaggagctgctaaggtgctgagtcaccaccttgatgtcagctggtgctctccaccctgagaagagtgcccagcaagggcgcagcacatcagcctgtgccaacaaacctgcggtgaccagcctgctttggggaggagttatttcccctaggagagggcacacggtgagctgggggaatctgtccctaactcagcctggggttcctgctggggaccatctcacggggcctcagtgcacaagggtccttgttggaata

SEQ ID NO: 695471 - DNA, 609 bp, Homo sapiens
ataggaccaggggagagtgtgtaagtaccatcctagactcttctcgtggkggggccagtctctctctcaggtctcttgaccttgtcctctggacaatatagctggtcttcagattttaatagaatctgcttgtaaaaaagcatgggccttttttgctcatagaggtcttctcttcctattaattttttcacttgtaaaaaagcatgggccctttttgctcatagaagtcttctctttctattaattttttaatggtcatctgtttattttttctgtgactttttctgaccctctttggtattttatttttttccccagaaatttgccctatcaattggttttagaatgtattgtcattgtttctaatactcttttttcttttaaaatcagttaaatctgcagttatttttccgtttcctttcaatagtttttaaattttcttcgccagagattgtttttcttactaacatttcagagaagcagattttattatttatcagggttttttcctgaattttgctgattttttaaaaaacgtattttgttcccttccatttctttgtgtttactctttttttcccctcactttcagggttgcatgctgagttc

SEQ ID NO: 695472 - DNA, 670 bp, Homo sapiens
tcagcaatatgtgctaaaaaacatttactcaggagagccccagaattgtttaaataggcatatagtcatcagaatagcccccttttctcttattgtagctgcagtaagtattgtattgcacagattgtaatccattatcttgaagaggattgcaaagcacagaaggtytgtgtcatgagctactgttataccctggtccctcagagctttcagtctataccaaagacccaagttggttccaacatctcaagggtggccttgccgctgcctctggctgctatgccctcttaaacttggccatggccaggtcatgaggtagacgtggccctggagggttaaacgttattgatcatccccagggtcctgaaagcttatgtcagtgtggccaatgcattctgttgctgaattagggcctgtgtacactacttcacctttcctggctgatttggagccatttctttgtaatttgttcagcataaatgaatacagtcatttgagcactgatattgacccttttgtattatatgtatcaatattatgcattatccaagtgagcattcaaattatatttgatatatctaaaacatggaggaaatggttaagaaattacataaagtctatattctattcaaccactcgtaaatctatgttcttatggttactgatagca

SEQ ID NO: 695473 - DNA, 639 bp, Homo sapiens
tataaacacttattaaatgaatatgtacatttcttctttattctttcatcatcatgctaaaattaaaactttacccatatgtggactttatttattcttacttccaccttcttttgatgctgatatggtttggatctgtgtcctcacccaaatctcatgttcagttgcaatcctgtatgttggagttgggccttagtgggaggtgattggatcatgggggtggatccttcatgagtggtttagcgccatccccttggtgctgttctcatgatggtgagtgaattctcatgatatctggtttgtttaaaagtgtgtagcacttgtcccctccctctcttcttcctgctacggccatgtgaagtggtaactcccacttcgccctccaccacgattgtaagtttcctsaggcttccccagaagccaagcagatgccagcatttgtgcttcctgtacagcctacagaaccataggccaattaaacctctttataaattacccagtctcaggtatttctttatagtagtgcaataacagactaataccaatgctgttttcctttttttcctcttaaaatcatttcataaaggaattaactctccattatatgaaatttcttgttcagtgccataataattttct

SEQ ID NO: 695474 - DNA, 627 bp, Homo sapiens
ttctcttttttcttgtacactttgaaatattttaattgtgcctttatttttacttgatatcttacaacactgaaaccactgtcctcaggcagtgtagcaagatgtctcaaaaatcattaagcgtttctcaaactacacatcttcatcagaaaattgccaagtctgtacgggattcctccctcctcccactacccaattttattttagaattagccactattcagatgaaagcttttgggaataggtatattagaactttaaaagtaaaaagttgggaactatttggtattatagaaatgtctttcaactaagctttaattttctttgtgattagaaagccacaacctcacatwtgccagagatctttcttggttttaattctaatgtaagttcctttttaccaggaatagtgggaaatcagttgtattccatctttttttttccagaattcagaggagaagtgtttgggtcctctgacatgattccttcatttactcactcaagaaatattcattaagcacttataatgtgacaggcaccactttaggtcctgatctacagcaataaacacaaaatttgtgctttcacagaaacaaatatatatacacacacacacacacacacaca

SEQ ID NO: 695475 - DNA, 650 bp, Homo sapiens
tgacacacggctggagtcactatcatgtgatatcacagtactctctcttgaataaaggaaatatgactaaaggcgaggttggccctgactcatggggctttggagaagtgagctctgggtttaacagtaggactggggatggctcagactgcggaccttcagtgagcctctgccacctgccaggcactccgcagagcctttcacagacattcccttcgttcctcctgacgacctyataaacagagtgctgccgttacacccattttacagataaagaacttgaggtgcaggtgcacctccatatgacaggcatcatccaagagaagtggagggcttaaacaagctagtccaacccttggccatgggctatatgtggcccaggatggcttggaatagtggttacccctgggaggttactaactggttggaagccgttctgtttcttaaaacattatgagatttttttgtgtgtgatttttctttttttttttagctcatcagctatcattagtgttaatgtattttatgtgtggtccaagacaatttttcttcttccaatgtggcccagggaagccaaaacactggacaccccgatttagagttaagtaaagttgtccatgtgtccacagagtcccagtacccgctgttaa

SEQ ID NO: 695476 - DNA, 579 bp, Homo sapiens
ctctgcaaatgattgagtaaggcatccagatgatccttgtattcctttgctggggctgccatgacaaagcaccacagacatttattttgtgggctggaagtcccagatcaaggtgtcagcagggatggtctcgctccttggcttgtagatggcatcttctcttgtgtccttacatggttgcccctctgtgggtgtctgtgtcctcatctcctcttcttatgaggacatgggtcatactggatcagcacccatcttaatggcctcattttacctgaatcacctctttaaaggctctgactccaaatacagccacattctgagataatggggttgatgctggtgtggggtggggtgtgtgtatgtttgcatgttttgtgcaggtgtgtgctgcrtggtgtgtgtgtagtgtgtggtgtgtgtctgtggtatgtagggtgtgagtgtggtgtgtagagtctgtatgtgtgtagagtccctatttgtgtgtctgtatgacatggagtcatgcacatggcctgaagacatcatccctggacaaaggaggcggacatcgtcctgggccatctctatttagggaag

SEQ ID NO: 695477 - DNA, 608 bp, Homo sapiens
tgttatttctctttgtaattttatcagagttttatatttactgattctgttatatatataacataacatatcttgttgtgtgtactcctaatactataaatagcattagggcagaaactttgtgaccttaattgtcttctatttagtaaagaagtctcgtaagaaaacaggactatatacccataaaggaaatttgtgctggcttcagaaattaatcaacttactctttcattcaaaaaatataaatagacttctaaggatcactagatatttgagaaaaatcaccatcacaaataaatgtagattaacaaataaaacactgaccacaggggaaaccaaatagaagtgaacttttaaaatatttctaactagtgtgcycagagattcaaagaaatattacatccataaaacaaaaattggtgctgtaaaaataaaacattcaaagagcaaaccagagttattgcacattaaagatggagttgctaaagaaaaagatcaatagaacaactagacgacaaattcaagaaaatcctccagacccacagattaaaaggacatagggacggaaaatattagagaaaagttaagcaacatagagaatcaatgcc

SEQ ID NO: 695478 - DNA, 608 bp, Homo sapiens
tgttatttctctttgtaattttatcagagttttatatttactgattctgttatatatataacataacatatcttgttgtgtgtactcctaatactataaatagcattagggcagaaactttgtgaccttaattgtcttctatttagtaaagaagtctcgtaagaaaacaggactatatacccataaaggaaatttgtgctggcttcagaaattaatcaacttactctttcattcaaaaaatataaatagacttctaaggatcactagatatttgagaaaaatcaccatcacaaataaatgtagattaacaaataaaacactgaccacaggggaaaccaaatagaagtgaacttttaaaatatttctaactagtgtgctyagagattcaaagaaatattacatccataaaacaaaaattggtgctgtaaaaataaaacattcaaagagcaaaccagagttattgcacattaaagatggagttgctaaagaaaaagatcaatagaacaactagacgacaaattcaagaaaatcctccagacccacagattaaaaggacatagggacggaaaatattagagaaaagttaagcaacatagagaatcaatgcc

SEQ ID NO: 695479 - DNA, 597 bp, Homo sapiens
ttttttagtagagacagggttttgccatgttggtcaggctggtctcaaagtcctgacagcaggtgatccacctgcctcagcctcccaaagtctgggatgacaggcgtgagccaccacccctgccccctgccccctcctccactttttttttcctgaaatcatagggcagttctgctagcatggtatagagtgcaggtastccagggcagggtgacccagtgatatgggataaccacccagctactttgagattgttgaaatgtctgctttctgatttccctgtccaggctgtctctgtcagattagagcaattaaatgataatgaggactgtacatagggaaaattaattctggggactgtaattagcatcctccctatgggaaacttatacatgtgtgtaagcactgaggaaaaccctgaaatatctgctagtataataaaaagaggcagttttgagatagaatgctggattaatttattatgaaccggaagcatgttgttgtaagagagacaaattcgattcctttaatgtgacttcgacattacatgcttgccttccttgcttactttgaatgtgatcaagttcaaaactagat

SEQ ID NO: 695480 - DNA, 574 bp, Homo sapiens
tgcaaaataattgcacaattctgttaagagagaaagtgtttccagttctctcccctacatccttgaataaacccatatgatatgctgtttctggtggatatttaatgatgctcctaattatgtccatagtcttaccttggaattgctaacatcctttcctatttttttcttggtaaatccaccttgagagtttccaacaattcattgtctaatttcattcttattggtgtagcattattttcatctctggcgctatrcccctttcatacacacatgcacacacacacacacgcacacacacacacacgcacactatgctttccatttttatttttatttttcaccagtgacttacacaagcatcctttaactgaaacatttatctcttatctaaccttcttatatctcttccctcattgcctctcatcctgattttttatttattacattggatttttattccactgatgcacactgtgtttacaatgagtcattatggcagctatcttgttcttgtgactatctaaggccagcttttacttagaagactacagtggatgctgtagccatgatc

SEQ ID NO: 695481 - DNA, 3035 bp, Homo sapiens
caaaaccctgaatagttgtccaacgtattacaggatagaattataacactcataggtccatttgatagtgttccttggaaaactgttgctgctgcaggaatggacaaagcrtctagtcactgtcctgggatctgcaatgctcactgaactaaacacatgagattcctgcctttgggcagcttgtggtttagtagagggaaacagacaattaacatgtaactaaacaaataagatcattggggtagtgatgaatgttaagaaaaaaataaaactcagtagagggccagtgaagtcttctgagagggagcagcatttcagctgagacttggatgaaggaagaaaccccatgtggctacctgggtaggggcttccaggcagcgctgtgcccaaggcagaaacagccttggcaagttcacaggagacaagaagaccagtgtgcctggaaagggctgcaagaggaagggagacatagggatgaaatcagacaggtgtgtcggggcctgggacagtcttggccttgagactgcttatcaacgtgcaaaaaagcatgagcatgaaataaggggtaggtgaggaggcgctggggctcccggagaccttcagagggagaacggctctgccatttgaattcctaaatggcggttccataaacagttcagaagggaaggtctaaaaaactctttatgctccaggaagatgagtaaattaatttttcaaacttctgctgcgtgggagatggggaggtcctgccacagggaccagcagggctggatgtcttgcttagaggtgagagatagaaatttcacagcacctcttctaactgtggctttcctggacaaaaagcaacactgaactagagaaggaaaaattgaggccacctcagttttggggggaaactcgagcggtgaactggcatttttttggcaactactttgtgccaggcattttacccacattatcttatttacacaacagttatataaggtcccacaactagtaagtggaagaaatagcatttgatcttcatttcagacttgtttgtctagggcagatcacgtccgtgtgagttcattttgagcatcagaccaagacaattccatagtttccctaagtggtggccactgcacttgaactgcttgggttgacaatggcccagccatttgtctctcagatcctctgggccccatctgaacagatctctgattgttcggtgtgattagcaggtgtattaatgaggaagcactcccacactgtgggttcatgacagactggtgtgcaccaggagtgccactggacccaaagctacccacaccgagacgtactgaaccagaaactgccctttcacaatgtgccccagtaatttgagtttgggtttaccactgacatgggcttcttcctcatctttgacagttggcagcagacatagaatttagcagtggaggactcatgccacctgctcatgggagctgcctcttcactgtggttcgggtcccggttctcatgggttttcaggtctagctaggtctcctatatcatgcttagctctgaagtcagtgaaggctgccagagggtcactgtgggagcccccagcctcgtcactacccctgggccatcctgcccggcccctatgtgggcatcgcgatggggaagtgtctgcatcagtagccatgacctgtcaggactcctcagagaccaacctgcttctcaggctccaggcagctgggtggacgttcaagacttgcttcgttcatcatctctgccaccaatctcaccaggtggtcacctggctgccaaacatgatggctcttcagtggcacaccattccatctgacttggccctcttgggtgggaaacgggcactcctggccccctctccccggagaggaccgtggatcctgacaaagtatctcagagtcttggtagcctgtgcagctgcagcgcacctagacttctctctgctggccagctgaggcctggggctcacgcgtatctcgaccctctttaaaaagggggccacagggagtccctgcaaggcccaaccaccttctgccagggcagtagggagcgctcagcgggacccaggcctgcaggctgcatggaggacctcatttgcacttcaataacatgcttttctttcacttaactatatatcttggtgttagatttgtcagtggagagactccctagtgcaattaaacgggagtattgagccggagagaaatcagtgtgtgttgactcagatatttaagcaaccacctttcagtattgactcagaaattggccttccagctgtccctgctggcagactcttctggcatctcgtcaggccgctgttaatgtgtttttcaaatttcaacttgcttcaacttgtctcctaactgatcctcctgttgatgacaataatggtttccaggctgacctgcacacagcacttaggcaagcagcccaggcccctctctggaggcgaccccttccttataaatcacagtcagagggcgtctgcttgctgggttcatggcaggttaagtcagcttgggggacttctcaagcaactcctaattgttcctctggagaacttgagtggtgagggtctctctcctgatgaggttagactttagcggtctgctgctggaggggttgggttgctgattccctccaaatttcactcactcttccaaacaggaagaacttttccaccatttgcagtctccctgatgagtaattattggatgggtttgtggtcacttaattaccagggcccttgccccttgctttacagagtcgtgactatacgagcacctttcccagacgtggccaattagggggggcccagctggtttggagccaggcttctaaggaaggctgggtccctgttctcagctccgagccctttctgcagcctctctcagtccttcctaagtgtggctgtcaaactttgctgacctttcccccttggggctaatgagtgtcacagctatttttaaccttgggttttctagaagttgagccgttaacctagctcctacagaaggagg

SEQ ID NO: 695482 - DNA, 625 bp, Homo sapiens
ttgagtaacattactctactctgctacgtttgatggccatgtaatgagctttccatttactttctgctaagattggacacatctaaaatatttggcaatacaaatgatttctttatattttctatctgttttggggaccattggtaggcatatttttaatgtcagattatatatgttaaattcattatgtaatataaatttcatagtagtcaactcatcaaagtgtctttattaatatttttgtkatgctcaccattatatagttaagaaatttacgatagcatcattgatgacacattatatgtggacaaacttattaagtaataggaaaagaatgtgggggatgtatgtgtgagatatgtgatatatatcagttttcagcacttatcctaccaatggcctctcatagaatggtctctcctaccatttttcttttcttccttttcctttcttttctgccatccaaacttccacctcatttcttcatgagcgtttcactgttttattaggttatgcctcagttgccagttttcacctgtcttccaagcccagatcccattttgtgtggggttagcaagttccgcctcctcaacaggactatgcctgtgtggctcttcttcatgct

SEQ ID NO: 695483 - DNA, 625 bp, Homo sapiens
ttgagtaacattactctactctgctacgtttgatggccatgtaatgagctttccatttactttctgctaagattggacacatctaaaatatttggcaatacaaatgatttctttatattttctatctgttttggggaccattggtaggcatatttttaatgtcagattatatatgttaaattcattatgtaatataaatttcatagtagtcaactcatcaaagtgtctttattaatatttttgtgatgctcaccattatatagttaagaaatttacgatagcatcattgaygacacattatatgtggacaaacttattaagtaataggaaaagaatgtgggggatgtatgtgtgagatatgtgatatatatcagttttcagcacttatcctaccaatggcctctcatagaatggtctctcctaccatttttcttttcttccttttcctttcttttctgccatccaaacttccacctcatttcttcatgagcgtttcactgttttattaggttatgcctcagttgccagttttcacctgtcttccaagcccagatcccattttgtgtggggttagcaagttccgcctcctcaacaggactatgcctgtgtggctcttcttcatgct

SEQ ID NO: 695484 - DNA, 1275 bp, Homo sapiens
tgatttaactagcactcattttgtcagctactgtcctaaagatttcatgtgtattaacttacttattttcccaacaatcatgagataggtattcttaaggaaaccaaagtccgagtaaactgagtaagtggcctgaattcataaggtagtaagtggtgtgaccagaatttgaactgttgaaaaggtaaactgagggacagtaaaattttaaagtttatgtgcacaaacaattcatgaatcaggtagctccaaaccaaaagtggttctggggctccattgaagtagtgtaagaaacaggcttttatagacagaatgtggaagtcatacaaagaacttatttaacagtctatggttatacagttgccttctttggtctatcccactggagagtccctagttatataattataagtttgttggctgtttgtgattcgtttagcttatgttctgtttttcttttatataggcatttataagaattagctcaagttttgcttatgtttgcaaatctcctaagtagaagtgaggtgactgctacttaggaggcccagctggctttgtctgctcagggatttttctttaagtgaatcaaaatttatgggatggcaaagcctaacttttttccattacggtactctgccttctcctcaccaaatgctatgccttgactccactagaagagataggattgagtctcacacaaatacatttcttytttaaacttctgctacaggtgttctacctacactgaaaagtggattctaatggcagacaagtttgacttcagaaattccattcaatcatgtatgtttcctggtttgctaaagatctctctgatcctgtgaaggaaatcacaactcccctctgacattcagccctataaatatcaaattgttattttagaaacttacactatacccaaacaatgccaacatttcattatttaaatgacattgctgcatactgtccactgaatacaaagtgctattcttaaaacatactccaggttaaaacatgtattccactacatgtggaaatcctttggagaaggatgttaggactagagggtaaccagaatgcatggatggtattccagaaatagatggaccatatgccatttcatcatttaccagtgcaaattaaagacttttaccatcaaaatgacagagggcaattaataagcattgtctcaggcaggaaacacaccagatcccacacgttttaagatttaatgtttaaaatagtaacatctcactagccagaaaaaaagtatcc

SEQ ID NO: 695485 - DNA, 638 bp, Homo sapiens
tgcattttaagggcacgtgacatctcaatttccaccctcttcataaaataaacaaacacacaaactttgaaatacaataaagctattagttaaccactggcaagtttgctacaaaatggcttatcaatgatgaatttgccttttgatttatttatcattgtgaaatactgtcaaccctcatttacaaattagaattcctaaaccaaactggtaaaactragattcttaaattgaacaaaactattaaatgctatactgtagcattaaatatttacagcattttaacttttatatttttgtatgtaacactgaaaatttttataatggcttttgttctaatttgcatattgaatatacaaacgctgaacaggagagaaattaaaagaagtgatgtcttttccaagttaaaatctctctggatgggaaataccactacacactctattaatgttgttcctccgaaggtatatgctggatatgtttgctcagactcgttttaacttgaccagaaaatgatggaacattagttcatttttaatatgattgctataggaattatatttcaaaaatgaaatgacaggtgaacagacctggtaaaatgcaaatgggattaaaatactcaggcgatggctagtata

SEQ ID NO: 695486 - DNA, 1294 bp, Homo sapiens
gcactccagcctggcaacagagcaagactccatctcaaaataaataaataaataaataaacaaataataaaaactacaataattttcaagcatataaaaactgatagtaatttcttaatatcatcgaatagtagtcagtgttcaaatttcctcatttatctcatttaaaaaattgtttgctgatttgaattaggattccagtaaagttcaaatgttgcaattagttgattatttttctctctgtctctcaactgcctcacctcctctctctctctctttctctctctctccctccctccctctctccttgcaagctatatgttaaagaaactaagtcattagtcttgtagtgactctaaagaaactaagtctaagtcttgtagagttcccctcagtctgaatactggtgactgtatcccagtgttattggatacactggtggaagaaatacttaataagtgtgtatatttccatcaggagatacctaatatctggatgtctctcctttttctttttgttgagtagccattgatggtcattgcctaggtctgctaattcatgacagtcttcggtaaatgggactattagctagtggctcttgccaatatattaagtattctaggatatacaacatttagacacaggttacacactttctttttatattgtctgcaactatttccattggtattctagtttattttactgcaactgccttttaatgggtcttcctgcaccctttcatagtagtttaaagtactcttttcgatcagaaagattgtcttattttttgaactctaatttaaaaattactgtagctttctcagtttttgtcagaatattttttcacctctgtatgtaaaaagaatcttagacatagcaattaataatttgccamagaggacactgaagtagaacgttatttgtttattcactcggtctttaattcaacaaaatttattaggttcctgctctgttctcggcacgatgtcttcttcaggtttgttatagttgggacacagtcaagcagacagacaattacagtacagcatggtagatgctgaataagggaaagtacacacgtgctcggagagcacatagaaggtatgcttaacccagccttggagggtagtggaagatttcttggaggaaggagtgactataccaagatgtgatggataagtaagagtcaggctaaggaaggaatggatagccaggggaatgatgaaaatgttctaggggagggagcagcttatgggaagacccagaagtaagagagaatagttcctttggg

SEQ ID NO: 695487 - DNA, 1294 bp, Homo sapiens
gcactccagcctggcaacagagcaagactccatctcaaaataaataaataaataaataaacaaataataaaaactacaataattttcaagcatataaaaactgatagtaatttcttaatatcatcgaatagtagtcagtgttcaaatttcctcatttatctcatttaaaaaattgtttgctgatttgaattaggattccagtaaagttcaaatgttgcaattagttgattatttttctctctgtctctcaactgcctcacctcctctctctctctctttctctctctctccctccctccctctctccttgcaagctatatgttaaagaaactaagtcattagtcttgtagtgactctaaagaaactaagtctaagtcttgtagagttcccctcagtctgaatactggtgactgtatcccagtgttattggatacactggtggaagaaatacttaataagtgtgtatatttccatcaggagatacctaatatctggatgtctctcctttttctttttgttgagtagccattgatggtcattgcctaggtctgctaattcatgacagtcttcggtaaatgggactattagctagtggctcttgccaatatattaagtattctaggatatacaacatttagacacaggttacacactttctttttatattgtctgcaactatttccattggtattctagtttattttactgcaactgccttttaatgggtcttcctgcaccctttcatagtagtttaaagtactcttttcgatcagaaagattgtcttattttttgaactctaatttaaaaattactgtagctttctcagtttttgtcagaatattttttcacctctgtatgtaaaaagaatcttagacatagcaattaataatttgccaaagaggacactgaagtagaacgttatttgtttattcactcggtctttaattcaacaaaatttattaggttcctgctctgttctcggcacgatgtcttcttcaggtttgttatagttgggacacagtcaagcagacagacaattacagtacagcatggtagatgctgaataagggaaagtacacacgtgctcggagagcacatagaaggtaygcttaacccagccttggagggtagtggaagatttcttggaggaaggagtgactataccaagatgtgatggataagtaagagtcaggctaaggaaggaatggatagccaggggaatgatgaaaatgttctaggggagggagcagcttatgggaagacccagaagtaagagagaatagttcctttggg

SEQ ID NO: 695488 - DNA, 656 bp, Homo sapiens
ggtgcagggttccaccccagtccctggtggtcgcagatgccctcacccctggccctggctgacctggaggacccgcttggtgaggcccgtcttttgcgcgagctgcttcaagtccttggcgtcggggttgtggttaatggcaaagtaagacttcatggtccgaagctggtggtgcttgaaggacgtgcgcatgcgcttggtcttctggctgctcgggtatggctggtcacggtccaggtgctctgcgtcgttttcgttgcagcttagcgctagggaggagacacagagccggtgggtgaacttcctgacccgccccccatgccaaatccacactcgccccacccactgccaaacatttcaatccttaaccctgctgcatgtctgcgccacaatgaaagggggacatcatccccattttatagatggaaacactgaggctcagagacagcgatccacccaggatcacactgctaagaactgcagcactgaatcccggctctgggagaatccaaaaatcattctgagccattatgttacaataaraacaatagtagcagcagcagcagcagcagcaacaacagctacgacttgttgatggccgattgaactccaggtgatgtgttaaagggctttccaggcacattttctttaggtac

SEQ ID NO: 695489 - DNA, 1214 bp, Homo sapiens
atttaagtggccttgtttgtagcaaaatactgaacataatataaattccaccaaccaataagagaatgagtcagtaattcacggtacatacatacatacaatgaaatgctaggcagtcatcaaaaagaacaaggtagcccaatatggtgctaattaaggagcccaaaacacatcaaagaaaccaaagcaaggcacagaacatcctgcataacaaagcaaccactcatgtatcaaaccaagcaaaacagaaaaacaaaaaacttcacaaaattggtaagaggaattacacatcctcaaatttgcttgatatgcagagaatttccccaggaggatatacaagagactggtaataaccaccatggcatcttgagaagcaaactgtgccactaagggaaagtgggaatagatgactttacttttcgctatatatatttttggtactctttgaaatttttaaaacatatatggtacattatatctaaaaagtattaataaaaaaaacagaagaaaccaaagtaatccgaaaaaggcccctaagccaatggtgccttgcacattcaaagtgctcaaagacactgaatgaatgaacaaaacaacgttastgccaaagctaagcacagagttaacagcaaattcaattacaagtatggttttcgtgttttgcataagaaacatttacccaaaagaagaaaaggatttggaattcaaaccagagttgtctgtactcaacatcgactttgtgagactacactgaacgcaggctaggaatggtaaatatgctagtacaacagcagcaacgtgccgctgtgtgacgttaggagattctgacatttcaaaaggtgttactacatagagaagaagaaagaaaaatcaattcctcacagggcacaagtaagtgagggaggatggatatgatgttaaaaaaaaaatcagagccaaaataactgaagagtgtgaacacagaaaagcagtccgttctcacgccatcaccaaagtaatttaaggatctgttgggtgccttaaatttgctgtgccctccagataagctttttacaggtcaaatcattttacaatgaactccaagggactatattattacttgaaataagtgaattaaattgaggcttggaaaactgtgtttctacagaatattccagtctttaatagaatgaccgacctgttcgtgattttttaaaatattgcagcaagtaaaa

SEQ ID NO: 695490 - DNA, 589 bp, Homo sapiens
tagcacacatatcattctagccttctaccttgtttaactgtaacatcccacttcagaaatgagaaacctgattcctcctatttgtcaatcatttacttaattgttcaattccaatatgcaggtatgatttcagaatttacagttgtacctctgtgggaaataaccttatcaattagagtccagtgtttatgtccagatttatgtttgtttttgttcttatagattccactcatttccagagttacttaggtcagtaccttctgccctcaccttgagagatgttgtttcctacattgtaatgcagttagactcttttgtcatattctgcatttaaccctgggattctctgacctcctaaataattttcttaactttgtctatattaaggctcagtctttgtgctgtaaagttcgatgggtttttgacaaatgaatagtgatacatagaatcactacagtgtcatacagaatgattctagctagactgrtgattttgtgcacttgcatcatgcaatttctttagtgaatgcaatgtgcagcccacattcagggcgcaggatgcctcctttgctcaatcttgttgtcgttaa

SEQ ID NO: 695491 - DNA, 644 bp, Homo sapiens
cattttttaactctctctttttctgtctccctcttccacttttaaggacccttctaattacattgggcccacccagataagccaggataatctcccttttttatagttagctattagctccttaattctccttttaccatgcaccttaacatattcacaggtcctgggaattaggaggtcggcacttctcaggaggcattgttctgcctaccacagtgctccataagtatttgctatttattagtaggagtaggaattttaaaacaatatgaagtcactacttataaaatgattaatattgagttaataaaatcttaatattttacagctgccttgtttccacttaattcaaagcaacagttattttttttctttyttagcagtttaaatgtatgaatctgtttaaagtatttaacttagttttcataggaacaaaaactcttgtcttttcacactcacctggggcgaagaatttatacaatatttaattaaactaaataacgatagtgataattatacctgcgataaatgcatggggagaagcacaaccggctattggtaagcatagaactcagactcagctggagaagcaagagagtttgggctcatcagaggaatgccaaccagtgacagacacacagcat

SEQ ID NO: 695492 - DNA, 1879 bp, Homo sapiens
ctgtggtggattgggttgcagggtagattcctgggtggattcctggctgccagggcttggggcaagggctgcattgtaaaggaggtctgtctgaaggtcctggtggtagcagccttctaaaagggtatgttttcaaggtggtgttttgtctctaccagagctccttaccacatctgtctgtcagtatgtccagttcccagcctatggagttgaaggcgcagcagtgtctcagaggctggtctaaatgtcagaactgtttttgtcattagttttagcatggagcagcatcaaggggaaactgctgttcttagaatgtgctgaaaatgggcacagcctgtgctttattcagcccagggttctgtcagagctgagctgctgggtctgttaaagccacacagcttgaagagcatgaactttgatctgatgaagctgaggttgagtcacagcctcacccctctagcttggagacttaggacaagtcatgtattttctttatgccttgattttctcatgtgtaaagttggcggggggtggaagtcatagcttttaccttacagtgggcatgtaagaacttagcgcggtgcctgtacaaagcaagctcctagtcatgcgtggctatcatttcaccaatgtatagtttgaataggcactgtgggttatagatgggaggttgttgctcagaatattcagatgatgcctgtgccggagccagtgtcccagaggaggtgatacctgtgtagcagagtgtttaagagcatggtacctgggatccttcagagctcggttcacatcctggtgccctggatagctgggaggctgaggtctggaccaagacatacaccatggtgccctaggagccctgcaaacatcatatggggaactcactcaatcttggggttgtgacattatcactaggccttgaaggctgaaagagatcatctcttattggtgatttggggagttggggggcagttggaaagggaatttcaggcagaatgaataaccctttggaaagacaggtgatgtgctcagcaaaatttaatactacttttggtgcctggtgctcttgagagaagaaaaggagaacctgctcttccctcagttctgtgctctgccagagcatcattgccagggatactggtacatgccaaaggcttaccagaagtcagtgtttcattcccttgccgactggcagctggggcatggtgtacggtgggcctcagtgtgatagaaacgaactgcagtgggtaccaatttcagtgaggtggaaagctttcctaagtgctcgtgttttttccagtcttctcactgcccctgccaacattgttccatccccactgtcagatttcccagtagtcagctctgccttcactcatttactcattcatcagtctactgtgctaaatgctggagaaacgatgaaggggacctcggcacaatycaacctgagtcaggcagacatgtaaataaatagtaaacaagaagtgttcaggggtggggcgctagcgtatcaaggaaagagtgagggtgaggatgggcagaaggcaaggagcatgtcccacagaagggatgtttgaataaggaagccaggagaacggggtggccaagagcatcgcaaaagcagaaagattcagttgcatatgggtgtttggagaacagtgaggagtctgtcatgacgggagaagtgtatctaggtctctcctgcaagaccaggaccaaaatccagaggatgagtggccaggaaatacaaggaccagtggtgaggtcagcagcagaggaggtggcaagaaaggaagagcctcaagcctggcgggggtgagagattgagaggccttgcactgaaacctggccatacaaggcctggcatctttgaggagca

SEQ ID NO: 695493 - DNA, 1879 bp, Homo sapiens
ctgtggtggattgggttgcagggtagattcctgggtggattcctggctgccagggcttggggcaagggctgcattgtaaaggaggtctgtctgaaggtcctggtggtagcagccttctaaaagggtatgttttcaaggtggtgttttgtctctaccagagctccttaccacatctgtctgtcagtatgtccagttcccagcctatggagttgaaggcgcagcagtgtctcagaggctggtctaaatgtcagaactgtttttgtcattagttttagcatggagcagcatcaaggggaaactgctgttcttagaatgtgctgaaaatgggcacagcctgtgctttattcagcccagggttctgtcagagctgagctgctgggtctgttaaagccacacagcttgaagagcatgaactttgatctgatgaagctgaggttgagtcacagcctcacccctctagcttggagacttaggacaagtcatgtattttctttatgccttgattttctcatgtgtaaagttggcggggggtggaagtcatagcttttaccttacagtgggcatgtaagaacttagcgcggtgcctgtacaaagcaagctcctagtcatgcgtggctatcatttcaccaatgtatagtttgaataggcactgtgggttatagatgggaggttgttgctcagaatattcagatgatgcctgtgccggagccagtgtcccagaggaggtgatacctgtgtagcagagtgtttaagagcatggtacctgggatccttcagagctcggttcacatcctggtgccctggatagctgggaggctgaggtctggaccaagacatacaccatggtgccctaggagccctgcaaacatcatatggggaactcactcaatcttggggttgtgacattatcactaggccttgaaggctgaaagagatcatctcttattggtgatttggggagttggggggcagttggaaagggaatttcaggcagaatgaataaccctttggaaagacaggtgatgtgctcagcaaaatttaatactacttttggtgcctggtgctcttgagagaagaaaaggagaacctgctcttccctcagttctgtgctctgccagagcatcattgccagggatactggtacatgccaaaggcttaccagaagtcagtgtttcattcccttgccgactggcagctggggcatggtgtacggtgggcctcagtgtgatagaaacgaactgcagtgggtaccaatttcagtgaggtggaaagctttcctaagtgctcgtgttttttccagtcttctcactgcccctgccaacattgttccatccccactgtcagatttcccagtagtcagctctgccttcactcatttactcattcatcagtctactgtgctaaatgctggagaaacgatgaaggggacctcggcacaattcaacctgagtcaggcagacatgtaaataaatagtaaacaagaagtgttcaggggtggggcgctagcgtatcaaggaaagagtgagggtgaggatgggcagaaggcaaggagcatgtcccacagaagggatgtttgaataaggaagccaggagaacggggtggccaagagcatcgcaaaagcagaaagattcagttgcatatgggtgtttggagaacagtgaggagtctgtcatgacgggagaagtgtatctaggtctctcctgcaagaccaggaccaaaatccagaggatgagtggccaggaaatacaaggaccagtggtgaggtcagcagcagaggaggtggcaagaaaggaagagcctcaagcctggcgggggtgagagattgagaggccttgcactgaaacctrgccatacaaggcctggcatctttgaggagca

SEQ ID NO: 695494 - DNA, 607 bp, Homo sapiens
tgcaaccatcacccccatccttctccagaagtcttttcatcttgcaaaactgagattctgtacccatttaacaataactccccattccctggaaaccactcttctaccttgcgtctctatgaatggaatcacacaatatttgtccttctgtaactggcttattcacttaaacatttaatcttttaagccactgaaatttgggatgtgtttgttataacagctagaattacatactgtrtgcctggaacagagcagatcctcaaataaatgtttgctgagtaagtgaacattcaaatattgttaatttgaaacatatgtttaggacattatgttgtatttaatttataaatttatattgttttataatgatataaaagttataagatatttaattttatgtgtaatatacacttaggtaacattataattatgataatttaaatcaacatcaggagtccatgactttttaccccatacatcatttatttttgggaaaaactgctatattgggttgtttgaaaaagcatatattctaagaaaactgaatcaagtacttgctttaattttccattgcctaaaaccaaacttgactagagttgttgaggat

SEQ ID NO: 695495 - DNA, 872 bp, Homo sapiens
tccctaaaatgtacaaaacgaagctgtgccccaaccaccttgggcacatgtcgtcaggacctcctgaggctgtgtcatgtcttaaatttgagtaatctttctcatatcttaaatttatgttaaagtttacattttctcttgtaggtattctcatgggagcagttataaaaattatagagtttaaaaaactggcgaattggaaggtaggtttgccctttggttgttcttaattttagtaacattgatcattatgctggcttttttgtaattacttggctatcagtggagttatttatattattatrttatatatcccattactttttaatttttttattagatacaggttgatgcctttacatctgagtttttgcaaaagcataagtctcatgctgtttcaagtgaacatgggcgccaatgtcatttttttttgttattatacttgcatttttgtaatcctagactaacctacttttttaggcaggaaaattctctaattagcattaaacattaaatactgtttattgctcccaattccattttgacaactgaggataataaaacatacttgtccagtactgtgagacacagtactttatatattgtagctcatgttattctcatgacagtcatgtgaggtggattgtctgggtattgtaatatcatcacctcgtttttacagatgaaaaaagtgacactcagggagattgggatgtattcagtgtcacagagctagaaagaaagtggccgagtggagtcttgtgtccaaaccctctggcctgaatatgcagtgttttctccaccataccaccccgtcctcagtttgctgatatatatacccttgtgttaaagaggttattagaatatgaaca

SEQ ID NO: 695496 - DNA, 603 bp, Homo sapiens
tttgaatatcttatatgaattaaaatgatatttagataatttgaaataattacaagctcacgtaactagtttgtggcaaaatagagactagaattcaggtctcctaacgtgtcaatgtgagactggggacagaggctgggaatgtggctctagtgtgtggctgtgttggtatgaagccttgttgaaggtctgaaagaccttagaaccattccctccctctgccactttctagcttggtgaaccaggatagcttaggctccctgggatttgatgaacttgtcctagaacaaaaaggtcaaacaaaatgatctctaaggctttttccttctaaaattcagtgatacaaatttagtccctgccctccccaccaacacacacacacaggtttagtatccctaatctgacgaactgaaatcctcccaaatccaaaacttttgragtactgacatgacgccacaagtagaaaatttcgcagctgacctcatgtgacgggttgcagtcaaaatgctgtaaaaactttgtttcatgcacaaaattataaatattctataaaatcaccttcaggccatgtgtatgaggtgtatatgagtcaaatgaactttg

SEQ ID NO: 695497 - DNA, 602 bp, Homo sapiens
  misc_feature 233, 234, 235, 236, 237, 238, 239, 240, 241, 242, 243, 244,245, 246, 247, 248, 249, 250, 251, 252, 253, 254, 255, 256,257, 258, 259, 260, 261, 262, 263, 264, 265, 266, 267, 268,269, 270, 271, 272, 273, 274, 275, 276, 277, 278, 279: n = A,T,C or G
  misc_feature 280, 281, 282, 283, 284, 285, 286, 287, 288, 289, 290, 291,292, 293, 294, 295, 296, 297, 298, 299, 300, 301, 302, 303,304, 305, 306, 307, 308, 309, 310, 311, 312, 313, 314, 315,316, 317, 318, 319, 320, 321, 322, 323, 324, 325, 326: n = A,T,C or G
  misc_feature 327, 328, 329, 330, 331, 332: n = A,T,C or G
gagtgactaagaagaaatatgggagcagaaagaggcagatgtttgtgttatgctgctcttttattttgttgagtgtgttctggttattcaggtgggtttggtttgggaaaatccattgagctctactcttatgatttgtgtaattttctgatgtatgttttactttaacaaaaagttattgtgtgattcccagcaacataaacataagaattaggaaacagcacgtagaaaannnnnnnnnnnnnnnnnnnnnnnnnnnnnnnnnnnnnnnnnnnnnnnnnnnnnnnnnnnnnnnnnnnnnnnnnnnnnnnnnnnnnnnnnnnnnnnnnnnnatatcattttcccctccaaactctgggaaagtttggtgccattatrtgaaaatagagtcagccttctctatgtgtgagttctgcgttcacagtttcacccaaaccacagattgaaaatatttgaaaaaatattgtgtatatactgaacatgtgcagacttttcttattattttctaaataatacagtataactatatagcatttacattgtattaggtattatacataataggcacatatttaaagaatatgagaggatatgcataggtt

SEQ ID NO: 695498 - DNA, 604 bp, Homo sapiens
tgagagagaccatatttataaaactggtttratagtatatggtcatgattgttctattttagttattaatctcttactgtgactaatttattaaacattataagtatgtatccattaaaaaacatggtgtatatcataaggtttgttactacccttggtttcagacatccattgggtgtctcggaatttattccccgtgaataaagggagaatactgtataaaagttgcccattttacccctcccaacagagctgcttgcagattgatgccaccccaattcaggagtcactgaatgctcaaataagtgcttcaaaattttaatgtgcttaagtttgtttttaatcaaccagaataacacagtttggattgcattataatgtgtggtattgtgaacaaaactgacatttctgagtaggaagtatgagacacagattcacaattactccatatataaacttttaaaaagttgaacatactagacatgttaactaaagtttcagattgaactgagacttgagatctagcatttaagatcattactatttcctatagagcatcaaataaaaactcagattacgagaatttctaccttaaatttttaaa

SEQ ID NO: 695499 - DNA, 1012 bp, Homo sapiens
ttggaaagattatacatgtatgtctggagttgaatgactgaacagagcaataataagagttaaagcaagaaagacaggcctacaggagatggcagagggtcttgcctgtcaggcattgattttgaacttcattgcataggcaatcaagaactattgaagtttttgcacaaaagactatagatgagattaacctggttaccgtaaaggacaaagtgattgcaggtagaatgaggccagcttcataaatgaatcatcaggatatgagaagcaagggcttgaacatgagaggccatagtgggaatggagggaaagggacaatgtgagaagcagtgaaggagaagggctgattgagtaaagcagtggagaagacagtgaaagatgtcagatgactaccatgtttggcgactgagtgagggaagaggtggtgatgatattactgaagagagaggcaaggggtggtcactggatttagagcagacattatcaacttgtggtgtccagacatttcaccctgggagaaacctgttctgaagtggcttcagcatctctgaggtcagattcctagttctactatttttctactgactgaaatggaaatcgagtaggcaaggcttttgatttgtctcagtggtctcttctgtaaaatgggggtgtttatatccatagtcttatcacagggctatttgggggattaagtaagacaagtgtggcagagctttgwaaactgtaatacactgtgtacaattggataattatggattcttctgactcatccacatggatgtctgctgaccctgggggaccggagcctgggagggaggccagacctggaaatggaaacttgaaaatgttctctgtagaaaagataattaacatttgaggatggttaagtcctcttaaatagatgtcagaaaaaatggaggtcatgtagacagaatgttggataacactactttgtaaaatattttatcttatttccattataaaagaaaaaaagctgggctgggcacgg

SEQ ID NO: 695500 - DNA, 2043 bp, Homo sapiens
ccatttaccagctgtgtgacattgggcaagttgccaacctatctatgtcatttcctcatgtaaagataatcccacttcaccaggccacttttgaggacccagtgaaatgatgtgtaaccattttaggaacactggatcattctacagtgcaattttttacatcagcttggagcctaccatgtaggcattcaaatccactgagtgtatggagctccgtgcacaaataaaaggacttctcttttctgcccgtgtacaactttggtttccttaatcaatagaatccatgacaatcctgggccatggtataaagatgggactttcttcctgtgaaggagtctggtctgaacatcttccaaactccaacataactgatgtcatttctccacccaaccccatttgctgtctcctgactcaattgctagagaagccacttaaggaaggttcctggagttaaggctgtgtctgggccagtgtagcgagcagttttcaacagtcagtcctctttatcttctcttttcctgcgagcctttactaagcactgcctcctcctgtctccttactgcatctcctgatggaatgcacaggtaaatctccttggagagtaccagccaggaacagtccacagccaaggccaccgatcctcaccgctgagctccatctttcctttcaagctgtccttcccctcccctccccaccatcaccatagcaacacagtggtataaaaaaatgaaagcgctaaggcatctaaatatagtctgagtatcaactcttccagcatggagccgaaaacctagggaatgacagctagaggcatccagacgataactggcagccaggagggtggataagtcaaaggaaggggtcaaggaaagaggggaaggaaagggaaccatcacttgctgagcctgctgcctgtgctttctcatgtcacccgcacgacaacccaatgtgaatgttatcatctccaggtaactgctgaagaaacggaagctcaaagaggtaagagatttggccaaggtcacacagctataagcagtagaactaagattttaactcaagtttctatggccccagagtttatgtgtttctctctccataccacagggacaggtgcaagtgagagattttgctggaagcactgggctttttgagcaggccatataaaaattctgagcccagagctcaactaaattattggaagagactgggccaaatataaggcttctatctaagcagcacctgtgtttctcaaggactgaggaaaatgaagggggagggttggcaaggctgcatttcccagggtgcgtgattatatggcatgggggtgggggccattatgatgcccggacatggaacttacaccagtgcagaaagggtgtgattagaagccctaagccagagaatgttcagtgtgataaatgccattattttttccctcattcattcaatagattttttttttagatggagtctcactctgtcgcccaggctggagtgcagtggcaccatctcagctcacggtaacctctgcctcctgggttcaagcaattcttgtggtccagcttcctgagtagctgggattacagatgtgcaccaccacgcctggctgatttttttttttttttttttttttgtattttttagtagagacagggtttcaccatgttggccaggctggtctcgaactcctgaccccaagtgatccacccacctccacatcccaaagtgctgkggttacaggtgtgagctaccgtgcctagcctcattcaacagatatttttattaagcatctgatgtgtgcttaactctggaaatataggggtgattagaacaaatgcagctcctgcccttgtagagcttattaggatagtggagaagacaaataaggaaacaattatacaattgattgattctttacaactgtaacatgtactataagtacataacagaagaatatcacttgcctgatgacttcagtgaaagggaaatacagaagttcttacaaatcaaagcaatcccctgggccaattgtaaaggtgatgc

SEQ ID NO: 695501 - DNA, 1640 bp, Homo sapiens
tgctttaaaggtgttattgtccaaatctggcagatgagaaaactgaaggttaaaagtttttccaattttcccaagattaaattatgtcaaagctagaacttcaaattagttttccaattataagtctggtgcctacttcattagactacagaaagacaaatgatatacagcattagtgaaatgactatagaacgaggtaagctactttaagtacagcaggggaggaaaaacgtgtactttaatatccttactttggagaggtgagtgtattagggttttccagaagaacagaaccaatagragatctatctgtctgtccgtctgtctgtctgtctgtctatctgtctgtctgtctatctatctatctatctatctatctatctatctatctatctatctatctatctatctatctatctggagggagaaagggggagatagagagaggcaagtatgtattataaggaattggctcatacagttatgaagactgagatatcccaagatctgctgctggtatgctggtgacccaggaaagttaatgatgtagttctactctgaatgctgtcaggcttgagacccagaaagagccagtgtttcagttcaaatccaaaggcagggaggaactgatgtcccagcccaagacagttgggcaggaggagttctgtctaacttatgggaaggccagcattttcttttttttttttcaggccctcagcgactaggggaggcccacccatgctggggagggtaatctactttactcagtctatggattcaaatgttaatctcatccagaaccaccctcacagacccaaccagaataattctccaccagtgtttcggtaccctacagtctagtcaagtggacacataaaatcacagtgggtttgccttactctctctttatatgtatctgtcacaatagctcataattggttttgcattaaaattcttacgtcaagattaaaaaaaaattgagtcaggtgtttgcttttgtttgtttcactcccaatatccatcacccttttataacaatttctgatatccttctataaaactctctctctttaatggactgttcttagaaggattgtaagccaagatggctccacttttctctatcagaagggcacacatgtgacccaagctaacctcaacagactctctctgggactgggaatattgagtaaagcaacacaaggtgggaaaaatgattgtatgcaactatttcagtggcagaggctctttgagaaatttctgctgcttagatacctggaactgccaaattttaagcctggtttctgccttctcatcaagatccttctgataaatttcctttttgcttaagctagccacatttgtttctgttgcttgcaatgaaagtatcctatcagatacaaaaacattatgtgattccccagccttttcttttctatctagtctcaatgggtatgaacatcaactgttttagatttaccactgggatgaatttcccaaaagattaagtatttatctgaagcctggactgccactgagaattttgtagcaaagctattttctgaagtgctttcatttttacattatcaaatttggcttcctttgacttgcatggtctctacatcctgagaccaggacta

SEQ ID NO: 695502 - DNA, 1640 bp, Homo sapiens
tgctttaaaggtgttattgtccaaatctggcagatgagaaaactgaaggttaaaagtttttccaattttcccaagattaaattatgtcaaagctagaacttcaaattagttttccaattataagtctggtgcctacttcattagactacagaaagacaaatgatatacagcattagtgaaatgactatagaacgaggtaagctactttaagtacagcaggggaggaaaaacgtgtactttaatatccttactttggagaggtgagtgtattagggttttccagaagaacagaaccaataggagatctatctgtctgtccgtctgtctgtctgtctgtctrtctgtctgtctgtctatctatctatctatctatctatctatctatctatctatctatctatctatctatctatctatctggagggagaaagggggagatagagagaggcaagtatgtattataaggaattggctcatacagttatgaagactgagatatcccaagatctgctgctggtatgctggtgacccaggaaagttaatgatgtagttctactctgaatgctgtcaggcttgagacccagaaagagccagtgtttcagttcaaatccaaaggcagggaggaactgatgtcccagcccaagacagttgggcaggaggagttctgtctaacttatgggaaggccagcattttcttttttttttttcaggccctcagcgactaggggaggcccacccatgctggggagggtaatctactttactcagtctatggattcaaatgttaatctcatccagaaccaccctcacagacccaaccagaataattctccaccagtgtttcggtaccctacagtctagtcaagtggacacataaaatcacagtgggtttgccttactctctctttatatgtatctgtcacaatagctcataattggttttgcattaaaattcttacgtcaagattaaaaaaaaattgagtcaggtgtttgcttttgtttgtttcactcccaatatccatcacccttttataacaatttctgatatccttctataaaactctctctctttaatggactgttcttagaaggattgtaagccaagatggctccacttttctctatcagaagggcacacatgtgacccaagctaacctcaacagactctctctgggactgggaatattgagtaaagcaacacaaggtgggaaaaatgattgtatgcaactatttcagtggcagaggctctttgagaaatttctgctgcttagatacctggaactgccaaattttaagcctggtttctgccttctcatcaagatccttctgataaatttcctttttgcttaagctagccacatttgtttctgttgcttgcaatgaaagtatcctatcagatacaaaaacattatgtgattccccagccttttcttttctatctagtctcaatgggtatgaacatcaactgttttagatttaccactgggatgaatttcccaaaagattaagtatttatctgaagcctggactgccactgagaattttgtagcaaagctattttctgaagtgctttcatttttacattatcaaatttggcttcctttgacttgcatggtctctacatcctgagaccaggacta

SEQ ID NO: 695503 - DNA, 1640 bp, Homo sapiens
tgctttaaaggtgttattgtccaaatctggcagatgagaaaactgaaggttaaaagtttttccaattttcccaagattaaattatgtcaaagctagaacttcaaattagttttccaattataagtctggtgcctacttcattagactacagaaagacaaatgatatacagcattagtgaaatgactatagaacgaggtaagctactttaagtacagcaggggaggaaaaacgtgtactttaatatccttactttggagaggtgagtgtattagggttttccagaagaacagaaccaataggagatctatctgtctgtccgtctgtctgtctgtctgtctatctgtctgtctgtctatctatctatctatctatctatctatctatctatctatctatctatctatctatctatctatctggagggagaaagggggagatagagagaggmaagtatgtattataaggaattggctcatacagttatgaagactgagatatcccaagatctgctgctggtatgctggtgacccaggaaagttaatgatgtagttctactctgaatgctgtcaggcttgagacccagaaagagccagtgtttcagttcaaatccaaaggcagggaggaactgatgtcccagcccaagacagttgggcaggaggagttctgtctaacttatgggaaggccagcattttcttttttttttttcaggccctcagcgactaggggaggcccacccatgctggggagggtaatctactttactcagtctatggattcaaatgttaatctcatccagaaccaccctcacagacccaaccagaataattctccaccagtgtttcggtaccctacagtctagtcaagtggacacataaaatcacagtgggtttgccttactctctctttatatgtatctgtcacaatagctcataattggttttgcattaaaattcttacgtcaagattaaaaaaaaattgagtcaggtgtttgcttttgtttgtttcactcccaatatccatcacccttttataacaatttctgatatccttctataaaactctctctctttaatggactgttcttagaaggattgtaagccaagatggctccacttttctctatcagaagggcacacatgtgacccaagctaacctcaacagactctctctgggactgggaatattgagtaaagcaacacaaggtgggaaaaatgattgtatgcaactatttcagtggcagaggctctttgagaaatttctgctgcttagatacctggaactgccaaattttaagcctggtttctgccttctcatcaagatccttctgataaatttcctttttgcttaagctagccacatttgtttctgttgcttgcaatgaaagtatcctatcagatacaaaaacattatgtgattccccagccttttcttttctatctagtctcaatgggtatgaacatcaactgttttagatttaccactgggatgaatttcccaaaagattaagtatttatctgaagcctggactgccactgagaattttgtagcaaagctattttctgaagtgctttcatttttacattatcaaatttggcttcctttgacttgcatggtctctacatcctgagaccaggacta

SEQ ID NO: 695504 - DNA, 1640 bp, Homo sapiens
tgctttaaaggtgttattgtccaaatctggcagatgagaaaactgaaggttaaaagtttttccaattttcccaagattaaattatgtcaaagctagaacttcaaattagttttccaattataagtctggtgcctacttcattagactacagaaagacaaatgatatacagcattagtgaaatgactatagaacgaggtaagctactttaagtacagcaggggaggaaaaacgtgtactttaatatccttactttggagaggtgagtgtattagggttttccagaagaacagaaccaataggagatctatctgtctgtccgtctgtctgtctgtctgtctatctgtctgtctgtctatctatctatctatctatctatctatctatctatctatctatctatctatctatctatctatctggagggagaaagggggagatagagagaggcaagtatgtattataaggaattggctcatacagttatgaagactgagatatcccaagatctgctgctggtatgctggtgacccaggaaagttaatgatgtagttctactctgaatgctgtcaggcttgagacccagaaagagccagtgtttcagttcaaatccaaaggcagggaggaactgatgtcccagcccaagacagttgggcaggaggagttctgtctaacttatgggaaggccagcattttcttttttttttttcaggccctcagcgactaggggaggcccacccatgctggggagggtaatctactttactcagtctatggattcaaatgttaatctcatccagaaccaccctcacagacccaaccagaataattctccaccagtgtttcggtaccctacagtctagtcaagtggacacataaaatcacagtgggtttgccttactctctctttatatgtatctgtcacaatagctcataattggttttgcattaaaattcttacgtcaagattaaaaaaaaattgagtcaggtgtttgcttttgtttgtttcactcccaatatccatcacccttttataacaatttctgatatccttctataaaactctctctctttaatggactgttcttagaaggattgtaagccaagatggctccacttttctctatcagaagggcacacatgtgacccaagctaacctcaacagactctctctgggactgggaatattgagtaaagcaacacaaggtgggaaaaatgattgtatgcaactatttcagtggcagaggctctttgagaaatttctgctgcttagatacctggaactgccaaattttaagcctggtttctgccttctcatcaagatccttctgataaatttcctttttgcttaagctagccacatttgtttctgttgcttgcaatgaaagtatcctatcagatacaaaaacattatgtgattccccagccttttcttttctatctagtctcaatgggtatgaacatcaactgttttagatttaccactgggatgaatttcccaaaagattaagtatttatctgaagcctggactgccactgagaattttgtagcaaagctattttctgaagtgctttcatttttacrttatcaaatttggcttcctttgacttgcatggtctctacatcctgagaccaggacta

SEQ ID NO: 695505 - DNA, 624 bp, Homo sapiens
gccctcactcacccattccctgccttgctttacccaacatccccaatgttggacacctttcagtgacctcatctgtggagctgtctttcagagtagttttctctgtatgggtttagtattttattttgagagtcagggagggtgatgttatttgtgtagctagttttacagtacagaagaaagatttcacatacatattattgtttctycattttaaaagtagatgaataaatatttcatttctctttttcaaattaaaaaccactgtctcaatttattttttcttattatagctctaaatagaaaaaaaaatgcttccccaccttaatctatatcacagttttgctattttcaaggcatggagtacagtttttttttttttttttttaaacaggcactgaatttgaaaagctctttaatactagcacaaacttagtaatataaattctggggtgaattataaactttacatgtatgtgacatatcaataaactgtattgcaaatatcccccaaagcaaacaaacaaacaaaaaacaggctattattactctctaccagtttcattacagttacaaagactgccataaatgttttttatttacaaacatctactggtctcagaa

SEQ ID NO: 695506 - DNA, 651 bp, Homo sapiens
aaatctgtttactacagtgaaattccttaaagatttgttagccaaattcatttgtaatctcctccttaaacacatactctaattagtgttccacacagaaaaatgtcctttaataatatttcaactctaattttagaattcttattatatcaatataaatttttccttaagaacttcaaaaatgaaaagtaaccaattttgaaaaggttggaaaaaaattaggaaatagtatcttccattaaaagatcactagtaaaaggttagtatcattaaagatcctcaaataatatataattacaactaaactctggatatttaataagcattcctataaattccttgtattggcttagaactaataaggctcatatagacactaactacagtgatatatttgtggtcacatrcaattacttttgagaaaggcatgagtctcaaaactacaggagaacacaaaacataaaaggaacagcattgtctccctctgctttaaactgttttgactataatttcattcgtacaaatttttccctccctgaaaaatgcaaaaataaaaataggaaaggaactaagctagtcattttccctcagttagttccacatgtgaaacatttgagaaagatcaaagtgttacctagaagggtcctaaat

SEQ ID NO: 695507 - DNA, 994 bp, Homo sapiens
taatgaaaacagactttaatttctcgtatttatttcccttgctctggtccctgtttgagatgtatgggaaagccaggagtcccgcgatgcttctgagtgaggcattctgggtagcgccaagaagggcagtacagggacattggtgcatgggccacgggcagatggcccttgctgggctcagctgttcactggaatgtgcactattcttggggtgacagtgaatgactaagccattttaccttcagggggtctgcagctctgaggccacccaaggacaccaaaaccaggccaggaagctctagtggggaaggtgatgagagggggggcgtcggtgcacagagcggcaccgtggctgcgtccaagtccagtcgggttttggaatcttgtcctgcgtgtctgtttgtgattctctcactctcctctggcttctggacctaccatgttctatggagcatccaaaactggggagctgacacctcagggccagccctgcactctcatttctggcgtataccacagtgggccttacttgggaggcattcggggcagggcccagcacagacgagattctcagaatgtgtggacgatggcactgtagttgaagaggggagtcctcgcttctagagctccacgcctgaatatttacaatgaaatgaygtgatagccgggatttacttcagagtaacctggagtgcagagacagaggctaggcgatgggaaacgagaatggccatgagccttggggatggcccatgggggtctgatctacatctgtctctgctttcgcatgcatttgaaattgttcataaaaatatctgttaaaccatacttgtccctccaaggccaaggcatggtataggggccaaggtgagtgaagaggccccggttctcttttggagagaattacttggtttggaatgagagtttttaatatctccctgttgatctggaagagtggggctcctgttacgggtgggtaggggacccagtgcca

SEQ ID NO: 695508 - DNA, 669 bp, Homo sapiens
ttattcatattcaccaaaagatccattggctgatgaatggataaacaaaacgtagagtatattgatgtaattgaatattatttggttgtaaaaaaaaatgaaatagtgattcatgatataacatggatgacccttgaaaacattatggtaagtgaaggaagcaaaaaaaagtcccacaatgtataaatccatttgtgtgaaatgttcagaacaggcaaatgcatagagacagaaagtaaactagtggtgccaggagacaggaggagtgatgcaaagtaactactagcaagtatggggtgtagaattagggactgctgatgtttgcacaacttcgtgaatctactccaaaacgctgaattgtacactttaaaagggtgarttttattatgtgtatttttcagtacaaaatataaaaaaatgttttattttttaggacagaaaactagttagtatggggtcatgatttgaatccaatgtccatgcacttaaggtcatctgcgccaatacctctggggcttgctaggcagcatgtggtcacttggaactgtctcaggtacccagagaaaaatggtttctgttgggtgtcactatgtgccactatctgggcacagcttcctgggtatctgcttgtcaccagggactgatctagacacaaattcatgttcaatg

SEQ ID NO: 695509 - DNA, 669 bp, Homo sapiens
ttattcatattcaccaaaagatccattggctgatgaatggataaacaaaacgtagagtatattgatgtaattgaatattatttggttgtaaaaaaaaatgaaatagtgattcatgatataacatggatgacccttgaaaacattatggtaagtgaaggaagcaaaaaaaagtcccacaatgtataaatccatttgtgtgaaatgttcagaacaggcaaatgcatagagacagaaagtaaactagtggtgccaggagacaggaggagtgatgcaaagtaactactagcaagtatggggtgtagaattagggactgctgatgtttgcacaacttcgtgaatctactccaaaacgctgaattgtacactttaaaagggtgagttttattatgtgtatttttcagtacaaaatatmaaaaaatgttttattttttaggacagaaaactagttagtatggggtcatgatttgaatccaatgtccatgcacttaaggtcatctgcgccaatacctctggggcttgctaggcagcatgtggtcacttggaactgtctcaggtacccagagaaaaatggtttctgttgggtgtcactatgtgccactatctgggcacagcttcctgggtatctgcttgtcaccagggactgatctagacacaaattcatgttcaatg

SEQ ID NO: 695510 - DNA, 1051 bp, Homo sapiens
ggaatgaggctatttgcctctcccatatgtaacataaattgttacacttttactttcttctattccttctctataccaatttaactaaccaaaaaccaacagaatcaaaaatcttgatttttgtttaattttaaaactaatatgagaatttaggccctgtttattaaattcataatttttaatattgtatacctttaaaaagaatgattcttgatatttgagtttttaaaaaatatatttaccacaattatttagacctgattttgtgttgaactgcttctaatgctcattgctggtccttttatatcacaaggttcccattcttaaggaattttgattcctctcttaattgactagagtatttatacaaatatatatatttatttcaaagttatcttttaaaagggtgcttaagagacattttaagcctctgaatatctgcaaatatctgtcacctttgtactttggctgtgcacagaattcttgggtcacaagaattgtctcttcaaaatcctgcagaccttgttccactatcctgtggcattcaaggtttcagggacaactaatgtaaaattaatttttctttctctgacaatagcttgtttttcaactgcttctctgcttttaggatttttttttttttaatttttgaaatgttaaaattccaygaagctgtgttgagtgcttctctctttgttaattttgcatggtacttagtaaagtccttttgatccatagacttaggcctttcttcagctgggtacggttttgttactactttggttattgtttatgaatatttttcagtggcctcctctacagggatatgatttgttcattcagcatatgtttactaagcacttaccatgtttcatgtactgttctatttgttgggacgactcagggctctgtatgtcagctctctactttgtttttactaattagctttcttatggtttttacccctttatttcctctggaataacttcaacttttttgttcacattactacttagacttaagactggatggagtctgttctttctacttt

SEQ ID NO: 695511 - DNA, 755 bp, Homo sapiens
aatcctgcttctcctcctcctttttttatattatttcttaaatcacagatacctgcttatttgcaggtggttctgtctcattctaagtgatccattctttgagaagaaaaacagctttatattattcacaggtatcagtgctatagcattatgaaaccatcagattacttttatttatggtctttagcaaagctctatttggtatttgtatttgaatgtaatgcttcattaagaaaatttaaaacttatatggtcatgtatgccaatgtccaaacttaaagaaatggcagctcatataacatagctgtagataacacctgtttgcttgtgaatggagataataattatttttctaacactgagaaatacatttcgcataragtttcaaaatgtgtttgttacaagttacttaaaaattgagtaaactctatggtaaaaggattatttctatatcagataaggagaatggctgcctcaaaaacatgaccagaagtataaagtaataccattcgatttgcaatagcaaaggagattctatgaaagaccatcctataagaattaaacttttgccatatatcattagaatgctataatataataacaatgggaattgcatattttactatatttatcaaaagtaagaagtgagaactggccaggcactatggctcaggcctgtaatcccagcactttgggaggtcgaggccggcggaatgcttgaagccaagacttcaagaccagcctaggcaacatgg

SEQ ID NO: 695512 - DNA, 1187 bp, Homo sapiens
cttttatttctaataaaatgaggtacttctactaaacgtctacctcttaaattgctttaagaggttttaatttctagtggtaacacttggggccttaacctggatttcactgcagttttgcactatagactttctgaaagaagactaggtccatatcctttttgaatctcattgagatgaaattctatctatctatctatctatctatctatctatctatctatctgtttattatctatctgtctgtctattatctatctatctatctatctatctgtctatctatctatcttactgctatagactgaatgtgttctctyaaaattcatatgttgaaattcttcctcaaggtaatggtattaggaggtgggggtttttgtaggtgattgggtcacaagctaccctcgtcaatggaattagtgcctttgtaaatgtaaagagggagcactccctcgccccttccccagatgaggacacaacagatatctatgacccagaaaacggagtcttcaccagacactgaatctgtcagcatgttgatcttggagttctcagcctcaagaactgtgataaataagtttttgttgttaagctacctgctctacggtatttttgttatagcatctgggatggactaagacactgtttatctacctatctacctccccataatagcaaaggctatggagtaaaattcaatacaaaatagttttgtcttgaaaccaatccaagaggatatttacttcctgaagtaccactcaagaagttgtttcatttataatgttatctacggaaagaaaactgagacaagaactggtttcacacaagtgtaaaaatataaaagtcaagtaaaaataagaaaaaactttggaggacatattgttgcctaatgtgttttaatgtatgatttataatctctaaccaaacaagaattatacaagcatgtagaattattagtattaataagcaaaaaagttataaactcacacaaaaaagaaattttttaatagatttattgtcctcaatatatattagtttattcttacacttgagaatataattgcctggtaccctatcaagcactctgtaaacctgatctgaaaataggatttgctcttcctaagtttagacatttttttttaggtgccatctgttgtcccaatggaatatggatcaattgtcatggg

SEQ ID NO: 695513 - DNA, 586 bp, Homo sapiens
caacagtatgaacttgtaaaataaacaagtggggataaagacagcatctatggtcttagaaaagcatccccagtcccaactcctatacaaagctttaaagtgaaaacgtgagatcttcattagctctatgtcaccaactgtttagtctgttctcatattgctataaagaagtacctgggactgggtaatttatttaaaaaaaaaaaggtttaatcagctcatgtttctgcaagctgtacaggaaggcatagtggcttctgcttctagggagggcctcaggaagcttccaatcatggcagaaggtgaagggggagcaggtatctcacacagtccgaacaagagcataagagagacagggggaggtgtcacacattttgaaatgaccagacctcgggggaactcacttgctatcacaaggacataccaaaggggatggtgcgaagccattyaagaaaaccgcccccattatctaatcacctcacaccaggccccacctccaacactggggattacatttcaatatgagatttaggtagggacacacatccaaaccgtatcaccaacccaggaccctaaagttccagtc

SEQ ID NO: 695514 - DNA, 628 bp, Homo sapiens
gtgcgggtagggatagaaggccgggggaggtgtattccagagatgaatggtttaaatcaaaaccaaaaggcaggaaagcacaaagccctcatagaaaaatgtgagcaacacatttttgttactcacatttggctagttgggagtatatgtcaggatggtatgcagggaaggtgggagggccaggtcatggaagacctgggaagtctgacaggtgaagcaggcataggggcaccatgcagcaattgaaacggggtcaaagggaaaattaccaaggaccatgtgcttgtggattagaaagcactgccacagttttaacagagatgaggagagagaagaatgaggatgtggtaagtgccagagagaaagaattcaccagaaatgatgagtgaacagaaaagaaggcaaaaagcagccatgacatggccaggcacggtggctcatgcctgtaatcccagcactttggaggccgaggcaggtggatcacaaggtcaggagttcaagaccagcctggccaagatggtgaaaccccatctactaaaaatacaaaaactagctaggtgtggtagcacatgcctgtatttccaactactcaggaggctgaggcasagaattgcttaagcccaagaga

SEQ ID NO: 695515 - DNA, 1088 bp, Homo sapiens
cagaagtacactttacagaaataatgaaatcccaggagtgatttggattactgtgggatggtgccagcactggctgtgggcagtacttagaactatgccctgttatgcatcttttaggagataggttctacagaactgtatgggtttttttcaaggttctaatgaaaggtgattcaattcaaagaaaatattagaagtcagtacagatgcatgggagaagaaatatagggcaataatattaatatcaatgtatcaaattatatctgtatttaaaagcatggattccrtaaattcaagtgaaatactttaatttcaaggctcatcattgtcataaatcataaagaatatcataaatacataactattaaaatgcaggcatttattgtgtaaatacaactacatatagacagtagtatctttgcatagttcattattaaaccaaaacacaagtttttatgtacaaaaacattccgtagagaagtgagaaaataaaaataaaaacccacatatgggtctctataaatgtcaacattacacctatgtgtaatgttacattatgttgtggtcaagtctaacaagaagtggattgctgaagatcgtgaatgcttcactggttaatcatgaatttatagacactgatctttctctggagagtatttggccagtatgaaagttaatttatccttgtagtattctatgaaaataaactttcaggaacttgggtgttttagaaaccactgcttgggcactaaggagggaatgagttctttcaaaaacatttttgtttttgtattcagttctttaatcagacaagaagttatttttcatgtggatgtgaagtaggcaaataattttcttttgctttctgagtgggaatacccagttgtctcaaaagtcagtccattccttctttatccgtaatgctatttttgtcatatataaagctatttttaatgggtgccctattctcgtctgttgttctggcttttttcttcttaaaccagtatctccctaatagctgtacaatgcatctggtacctgctagggcaagtgtccccaccatgtcttcttcagagttgtattggctg

SEQ ID NO: 695516 - DNA, 1088 bp, Homo sapiens
cagaagtacactttacagaaataatgaaatcccaggagtgatttggattactgtgggatggtgccagcactggctgtgggcagtacttagaactatgccctgttatgcatcttttaggagataggttctacagaactgtatgggtttttttcaaggttctaatgaaaggtgattcaattcaaagaaaatattagaagtcagtacagatgcatgggagaagaaatatagggcaataatattaatatcaatgtatcaaattatatctgtatttaaaagcatggattccataaattcaagtgaaatactttaatttcaaggctcatcattgtcataaatcataaagaatatcataaatacataactattaaaatgcaggcatttattgtgtaaatacaactacatatagacagtagtatctttgcatagttcattattaaaccaaaacacaagtttttatgtacaaaaacattccgtagagaagtgagaaaataaaaataaaaacccacataygggtctctataaatgtcaacattacacctatgtgtaatgttacattatgttgtggtcaagtctaacaagaagtggattgctgaagatcgtgaatgcttcactggttaatcatgaatttatagacactgatctttctctggagagtatttggccagtatgaaagttaatttatccttgtagtattctatgaaaataaactttcaggaacttgggtgttttagaaaccactgcttgggcactaaggagggaatgagttctttcaaaaacatttttgtttttgtattcagttctttaatcagacaagaagttatttttcatgtggatgtgaagtaggcaaataattttcttttgctttctgagtgggaatacccagttgtctcaaaagtcagtccattccttctttatccgtaatgctatttttgtcatatataaagctatttttaatgggtgccctattctcgtctgttgttctggcttttttcttcttaaaccagtatctccctaatagctgtacaatgcatctggtacctgctagggcaagtgtccccaccatgtcttcttcagagttgtattggctg

SEQ ID NO: 695517 - DNA, 654 bp, Homo sapiens
caagaggcataaaggcaggatggcttatgatggtaaaccatggagtaagaacaccttctaccaacatggtaaggaatgcttgcaactatttttgacctattttccttctgcaccaaacaggtccttctaaagaacaggcaaatctttagatagaaggatgtatttccagaagttattttgccatatttagctttggctaatatcaatcagagggatcacataacctccttgcttccaaatccaatattcaytttcctattttatttccctcactttttaaaatttatttcactcttcattttatttgaaatggttggctatttcctccttgaaaacacttttttcttgttttcttaaaatcagtattctcctaattttaccctctacctttctagactttaattctcaggccctttcataatcttctctttttctctggcctctaaatggtggattttgcctgaactgttctgggaccatctcttctcttccttcaatttttcaaggtgatcctattcattatcatgtctttaaatactatttacaggctgatggttcccaaatttatatttctacctaaaatatctctgaactctctactctaatctgataattgcctgtttgacatctccacttggtatttcgaaccgaact

SEQ ID NO: 695518 - DNA, 654 bp, Homo sapiens
caagaggcataaaggcaggatggcttatgatggtaaaccatggagtaagaacaccttctaccaacatggtaaggaatgcttgcaactatttttgacctattttccttctgcaccaaacaggtccttctaaagaacaggcaaatctttagatagaaggatgtatttccagaagttattttgccatatttagctttggctaatatcaatcagagggatcacataacctccttgcttccaaatccaatattcactttcctattttatttccctcactttttaaaatttatttcactcttcattttatttgaaatggttggctatttcctccttgaaaacacttttttcttgttttcttaaaatcagtattctcctaattttaccctctacctttctagactttaattctcaggccctttcataatcttctctttttctctggcctctaaatggtggattttgcctgaactgttctgggaccatctcttctcttccttcaatttttcaaggtgatcctattcattatcatgtctttaaatactatttacaggctgatggttcccaaatttatatttctacctaaaatatctctgaactctctactctaatctgataattgcctgtttgacatctccacttggtatttcgaacygaact

SEQ ID NO: 695519 - DNA, 602 bp, Homo sapiens
aaaaaaactaataaagctggtgtaacttgagtttagttcattgacggctcactayatgtagacattgaacaaagagtttatggtctggtagagaggacagcatagacaagtaatgacaacaaaaatacaagtaactacagttaagtttcaaagtacatatagatctaatatttgctttatatatttgggtgctttactgttgggtgcatatatatttataattgctatattttcttgctgaaaatgttcctttatcattatataatgaccattttaatcttttttttatagtttttgacttaatgtttattttttctgatacaactacccctgtttacttatggtttccatttgcagggcgtatctttttccatctctttgcttgtagtctatgtgtgtccttataggtgcaataagtctcttgtgggcagcatacggttgggtctttttatccattcagccacactataccttttagttggggaatttaacctatttacatggaaggttattgtcgataggtaaggacttattcctgctattttattaattgtttcctggctgttttgtagattctttgtttcttccttcctcccttgttg

SEQ ID NO: 695520 - DNA, 602 bp, Homo sapiens
aaaaaaactaataaagctggtgtaacttgagtttagttcattgacggctcactacatgtagacattgaacaaagagtttatggtctggtagagaggacagcatagacaagtaatgacaacaaaaatacaagtaactacagttaagtttcaaagtacatatagatctaatatttgctttatatatttgggtgctttactgttgggtgcatatatatttataattgctatattttcttgctgaaaatgttcctttatcattatataatgaccattttwatcttttttttatagtttttgacttaatgtttattttttctgatacaactacccctgtttacttatggtttccatttgcagggcgtatctttttccatctctttgcttgtagtctatgtgtgtccttataggtgcaataagtctcttgtgggcagcatacggttgggtctttttatccattcagccacactataccttttagttggggaatttaacctatttacatggaaggttattgtcgataggtaaggacttattcctgctattttattaattgtttcctggctgttttgtagattctttgtttcttccttcctcccttgttg

SEQ ID NO: 695521 - DNA, 602 bp, Homo sapiens
aaaaaaactaataaagctggtgtaacttgagtttagttcattgacggctcactacatgtagacattgaacaaagagtttatggtctggtagagaggacagcatagacaagtaatgacaacaaaaatacaagtaactacagttaagtttcaaagtacatatagatctaatatttgctttatatatttgggtgctttactgttgggtgcatatatatttataattgctatattttcttgctgaaaatgttcctttatcattatataatgaccattttaatcttttttttatagtttttgacttaatgtttattttttctgatacaactacccctgtttacttatggtttccatttgcagggcgtatctttttccatctctttgcttgtagtctatgtgtgtccttataggtgcaataagtctcttgtgggcagcatacggttgggtctttttatccattcagccacactataccttttagttggggaatttaacctatttacatggaaggttattgtcgataggtaaggacttaytcctgctattttattaattgtttcctggctgttttgtagattctttgtttcttccttcctcccttgttg

SEQ ID NO: 695522 - DNA, 641 bp, Homo sapiens
acagttttttataatttaattattgctatcatcagtttaaaagccccaggaaacagacattgggatcacagaaccactgaacccaaagtatatcttgatgtcaacttttgatgcaagattttaagacaggaaaagcactggaatagaattttcagaaaattaaggcaagcaattttaccatcccgggacctaggttccaaaaamacaaaattagaggattagactagatggtctttaagtaagtttccttcagattaaaattctttagtctatgcctttatgtctgcttcttgcctcattaatctctcctgcaaaagaaaccttatgtctgacaacatctgaggaaataaagatagcatgtttgtaagaattggaaagactgttgaaagaagtggttatttccttcttactgtgttaatgacagcagtgtcttgaatatcagggaatgaatgcatcaaaggctctcactagtcctgtggtaaagaagttaaaaaaaaccctgagtaataggattttatctgtccatctatgatcaagagtggttttaaaatggggtggtgtgggaggctgaggcaggagaatctcttgaacccaggagtcggaggttgcagtgagccgagatggtgccattgcactccagc

SEQ ID NO: 695523 - DNA, 603 bp, Homo sapiens
tgctaaattagccgggcgtggtggcacatgcctgtaatcccagctacttgggaggctgaggcaggagaattgcttgaactcaggaggcagaggttgcagtgagccaaggtcacgccattgcactccagcctgggcaacagagtgagatcccgtttwaaaaaaaaagaatctgggcgcctgtaatcccagcactttgggaggccaaggcgggtggatcacctgaggtcgggagttcgagaccagcctgaccaacatggagaaaccctgtctctactgaaaacacattagctgggcatggtggcggtcgcctgtaatcccagctacttgggaagctgaggcaggagaatcgcttgaacccaagaggcggaggttgcggtgagccaagattgtgccattgcactccagcctgggcaacaagagcgaaaactccatctttaaaaaaaaaaaaaaaaaaaagatgagggtctgaatggaggcaggtgtaggcactggggatagtcaggaggagacagatatgaggaatatttggagattaattcacaggacttcgtaacggttgtgatgtggtagttatggtgtgatgtgcgtagggggtggtagcag

SEQ ID NO: 695524 - DNA, 3204 bp, Homo sapiens
  misc_feature 821, 822, 823, 824, 825, 826, 827, 828, 829, 830, 831, 832,833, 834, 835, 836, 837, 838, 839, 840, 841, 842, 843, 844,845, 846, 847, 848, 849, 850, 851, 852, 853, 854, 855, 856,857, 858, 859, 860, 861, 862, 863, 864, 865, 866, 867: n = A,T,C or G
  misc_feature 868, 869, 870, 871, 872, 873, 874, 875, 876, 877, 878, 879,880, 881, 882, 883, 884, 885, 886, 887, 888, 889, 890, 891,892, 893, 894, 895, 896, 897, 898, 899, 900, 901, 902, 903,904, 905, 906, 907, 908, 909, 910, 911, 912, 913, 914: n = A,T,C or G
  misc_feature 915, 916, 917, 918, 919, 920: n = A,T,C or G
gtatattcttccagtttttactgcctaaagctcccaaatgattcaaatgtcaagttcacgccaaggccagttaagggtctaacatgggttctagataatagctaaaacagtagaaaaattgttccatttcacttattgtgtatttctcagatccctgccaggtctccctggcttggaacggccccctgaactgtcttataggaatggccacagcctcctgcccctccccagcagttgtgtcccaactggcctttctgccttcggagtgcctcgtctgtcccaatatgaagcattaaatgagattcaaacattccgacaatgttcctgcatcttctaattcaattagttgagctaaatatgtaaaaccctaataacagaaaatagaggaagctcaaaagtgtatgcatgttggagtcagctaaattttgatgaagagtaaattaagttagctatagattaaattcacagtatctcactcactaggaagtcacacaacaccattgtttcatcctttgttatcttcccttgaagactttgctttacccacagtcctctgtaaatgttctccattgcatccttttttgaatagtacattctgaagtctacttctgatctctgacctcacagatgttctcctattagttctatgctcagcataacggaatgttaataggctgttatgacttactctacaaaaatcagtggtctcaatcctgccgggtaaataagctactttggcgggcacggctatccacacagcattaggtaccatttgataagtcatagccttcaaagaacaaaaatttatcctaaggaattcnnnnnnnnnnnnnnnnnnnnnnnnnnnnnnnnnnnnnnnnnnnnnnnnnnnnnnnnnnnnnnnnnnnnnnnnnnnnnnnnnnnnnnnnnnnnnnnnnnnnaagggggcagatcctgtctagcctataatatggtcaacatccaaaatattgcccaacactgaaaagataaaatttcaacagagaatgatgagtactgagttatgaattttgggacacagttggctggtacaagaaaggtttttgttttgtttaagtctaggaataaaagtactatataacaataatcccctggtagatcaagctaggactttgaaaaggcacatggtggaattcaacatcaatttttcataaaaattatctttcaacaaatgaaaggtcattctttgataatagaagtgtgatagtacatgaggctgacccaagaaggtatcaattttaagatgcagcagatttttaaaaagatcatcttgctttgaaagaatgagaaaagaaaagcttttctaaacttctaagagttagagaaaacatattttcttttttcctggggttatcttggatcgtatgtgtattcacagttaaggtttttttcagtgttttgttttgtttaatacaacacatctgtaaaattattcccaagccagaaggctctactttcttttttttttttttttgagacggagttttgctcttgttgcccaggctagagtgcagtggcatgatctcagctcaccgcaacctccacctccggggttcaagcaattctcctgcctcagtctcccgagtacttaggattacaggcatgcgccaccacgcccggctaaattttgtattttttgtagagacagggtttctctatattgtgcaggctgatctctaactcctagactccagagatctgcccatctcagcctcccaaagtgctgggataacaggtgtgagccagcaagccccgcccccaaattacttttttttttttttttttttttttttttttagttttgctcttgttgcacaggctggagtgcaatggcacgatctgcaacctccgtctctacagttcaagcgattctcctgcctcagcctcccgagtaattgagattacaggcacctgccaccacgcccagctaatttttgtatttttagtagagacagggtttcaccatgttggccaggctggtctcgaactcctgacctcaggtgatctgcccgcctgggcctcccaaagtgctgggattacaggcgtgagccaccgcacccggccatttttctctgtttctattagtatttcataattttttcaacatcaagaaaccaggattctatttgatatgttctagttaagacatgttaatgatctttattttctatgcttcagtaatgagcaattcacacttaaatgaataaaattagcttttaccttcagctggtaaagttgaccctcaagtctgagctgaagattttctcagaaactttcaaatcaagatctagatctccacagataagaataatggagtgactccaccagtagattttacctacagaaaaagcaataatttattagaactttgtatgaaggaaaggtgctgtgtagttattactgaatcatgtaaacataccaagtctccaaatagtactgaagttttttatttctactcattaggcaaatacatactagttaacattttttgaaagcttcctatgttgctgtatgtaactacatttgtctcttttttttkttttgtttttgagatgaagtctcgctctgtggcccaggctggagtacagtggtgtgatctcagctcactgcaacctccttctcccaggttcaagcgattctcctgtctcagcctcctgagtagctgggactacaggtgcgcaccaccatgcctaattaatttttatatttttagtagagatagggttttgtcatgttggtcaggctggtcttgaactcctgacctcaagtgatctgcccgccttagcctgccaaagttctgggattacaaaaatgagacaccgtgcctggcccatatttgtttcttatcattgatgtcattttgcggatgaagaaaatggaacacagctagtaaatgacagtcacaatttatacccaaggattctggctctaggttctgagttcttaatcacagaacaaccttaacacactgtcttgacataggtccatatactctaggaaaaagttttaaaacttagatggtatgaggaatcctatatggtttattcccatttgattgctagtgcttctcaaaaatatgtaaatgtcatctaaaattcaaaatactatagtcagggtgagatagtgacaagagactgaatcaagggtagacaacctgggtatttgagacagaggaccaagcaatgg

SEQ ID NO: 695525 - DNA, 3204 bp, Homo sapiens
  misc_feature 821, 822, 823, 824, 825, 826, 827, 828, 829, 830, 831, 832,833, 834, 835, 836, 837, 838, 839, 840, 841, 842, 843, 844,845, 846, 847, 848, 849, 850, 851, 852, 853, 854, 855, 856,857, 858, 859, 860, 861, 862, 863, 864, 865, 866, 867: n = A,T,C or G
  misc_feature 868, 869, 870, 871, 872, 873, 874, 875, 876, 877, 878, 879,880, 881, 882, 883, 884, 885, 886, 887, 888, 889, 890, 891,892, 893, 894, 895, 896, 897, 898, 899, 900, 901, 902, 903,904, 905, 906, 907, 908, 909, 910, 911, 912, 913, 914: n = A,T,C or G
  misc_feature 915, 916, 917, 918, 919, 920: n = A,T,C or G
gtatattcttccagtttttactgcctaaagctcccaaatgattcaaatgtcaagttcacgccaaggccagttaagggtctaacatgggttctagataatagctaaaacagtagaaaaattgttccatttcacttattgtgtatttctcagatccctgccaggtctccctggcttggaacggccccctgaactgtcttataggaatggccacagcctcctgcccctccccagcagttgtgtcccaactggcctttctgccttcggagtgcctcgtctgtcccaatatgaagcattaaatgagattcaaacattccgacaatgttcctgcatcttctaattcaattagttgagctaaatatgtaaaaccctaataacagaaaatagaggaagctcaaaagtgtatgcatgttggagtcagctaaattttgatgaagagtaaattaagttagctatagattaaattcacagtatctcactcactaggaagtcacacaacaccattgtttcatcctttgttatcttcccttgaagactttgctttacccacagtcctctgtaaatgttctccattgcatccttttttgaatagtacattctgaagtctacttctgatctctgacctcacagatgttctcctattagttctatgctcagcataacggaatgttaataggctgttatgacttactctacaaaaatcagtggtctcaatcctgccgggtaaataagctactttggcgggcacggctatccacacagcattaggtaccatttgataagtcatagccttcaaagaacaaaaatttatcctaaggaattcnnnnnnnnnnnnnnnnnnnnnnnnnnnnnnnnnnnnnnnnnnnnnnnnnnnnnnnnnnnnnnnnnnnnnnnnnnnnnnnnnnnnnnnnnnnnnnnnnnnnaagggggcagatcctgtctagcctataatatggtcaacatccaaaatattgcccaacactgaaaagataaaatttcaacagagaatgatgagtactgagttatgaattttgggacacagttggctggtacaagaaaggtttttgttttgtttaagtctaggaataaaagtactatataacaataatcccctggtagatcaagctaggactttgaaaaggcacatggtggaattcaacatcaatttttcataaaaattatctttcaacaaatgaaaggtcattctttgataatagaagtgtgatagtacatgaggctgacccaagaaggtatcaattttaagatgcagcagatttttaaaaagatcatcttgctttgaaagaatgagaaaagaaaagcttttctaaacttctaagagttagagaaaacatattttcttttttcctggggttatcttggatcgtatgtgtattcacagttaaggtttttttcagtgttttgttttgtttaatacaacacatctgtaaaattattcccaagccagaaggctctactttcttttttttttttttttgagacggagttttgctcttgttgcccaggctagagtgcagtggcatgatctcagctcaccgcaacctccacctccggggttcaagcaattctcctgcctcagtctcccgagtacttaggattacaggcatgcgccaccacgcccggctaaattttgtattttttgtagagacagggtttctctatattgtgcaggctgatctctaactcctagactccagagatctgcccatctcagcctcccaaagtgctgggataacaggtgtgagccagcaagccccgcccccaaattacttttttttttttttttttttttttttttttagttttgctcttgttgcacaggctggagtgcaatggcacgatctgcaacctccgtctctacagttcaagcgattctcctgcctcagcctcccgagtaattgagattacaggcacctgccaccacgcccagctaatttttgtatttttagtagagacagggtttcaccatgttggccaggctggtctcgaactcctgacctcaggtgatctgcccgcctgggcctcccaaagtgctgggattacaggcgtgagccaccgcacccggccatttttctctgtttctattagtatttcataattttttcaacatcaagaaaccaggattctatttgatatgttctagttaagacatgttaatgatctttattttctatgcttcagtaatgagcaattcacacttaaatgaataaaattagcttttaccttcagctggtaaagttgaccctcaagtctgagctgaagattttctcagaaactttcaaatcaagatctagatctccacagataagaataatggagtgactccaccagtagattttacctacagaaaaagcaataatttattagaactttgtatgaaggaaaggtgctgtgtagttattactgaatcatgtaaacataccaagtctccaaatagtactgaagttttttatttctactcattaggcaaatacatactagttaacattttttgaaagcttcctatgttgctgtatgtaactacatttgtctcttttttttgktttgtttttgagatgaagtctcgctctgtggcccaggctggagtacagtggtgtgatctcagctcactgcaacctccttctcccaggttcaagcgattctcctgtctcagcctcctgagtagctgggactacaggtgcgcaccaccatgcctaattaatttttatatttttagtagagatagggttttgtcatgttggtcaggctggtcttgaactcctgacctcaagtgatctgcccgccttagcctgccaaagttctgggattacaaaaatgagacaccgtgcctggcccatatttgtttcttatcattgatgtcattttgcggatgaagaaaatggaacacagctagtaaatgacagtcacaatttatacccaaggattctggctctaggttctgagttcttaatcacagaacaaccttaacacactgtcttgacataggtccatatactctaggaaaaagttttaaaacttagatggtatgaggaatcctatatggtttattcccatttgattgctagtgcttctcaaaaatatgtaaatgtcatctaaaattcaaaatactatagtcagggtgagatagtgacaagagactgaatcaagggtagacaacctgggtatttgagacagaggaccaagcaatgg

SEQ ID NO: 695526 - DNA, 3204 bp, Homo sapiens
  misc_feature 821, 822, 823, 824, 825, 826, 827, 828, 829, 830, 831, 832,833, 834, 835, 836, 837, 838, 839, 840, 841, 842, 843, 844,845, 846, 847, 848, 849, 850, 851, 852, 853, 854, 855, 856,857, 858, 859, 860, 861, 862, 863, 864, 865, 866, 867: n = A,T,C or G
  misc_feature 868, 869, 870, 871, 872, 873, 874, 875, 876, 877, 878, 879,880, 881, 882, 883, 884, 885, 886, 887, 888, 889, 890, 891,892, 893, 894, 895, 896, 897, 898, 899, 900, 901, 902, 903,904, 905, 906, 907, 908, 909, 910, 911, 912, 913, 914: n = A,T,C or G
  misc_feature 915, 916, 917, 918, 919, 920: n = A,T,C or G
gtatattcttccagtttttactgcctaaagctcccaaatgattcaaatgtcaagttcacgccaaggccagttaagggtctaacatgggttctagataatagctaaaacagtagaaaaattgttccatttcacttattgtgtatttctcagatccctgccaggtctccctggcttggaacggccccctgaactgtcttataggaatggccacagcctcctgcccctccccagcagttgtgtcccaactggcctttctgccttcggagtgcctcgtctgtcccaatatgaagcattaaatgagattcaaacattccgacaatgttcctgcatcttctaattcaattagttgagctaaatatgtaaaaccctaataacagaaaatagaggaagctcaaaagtgtatgcatgttggagtcagctaaattttgatgaagagtaaattaagttagctatagattaaattcacagtatctcactcactaggaagtcacacaacaccattgtttcatcctttgttatcttcccttgaagactttgctttacccacagtcctctgtaaatgttctccattgcatccttttttgaatagtacattctgaagtctacttctgatctctgacctcacagatgttctcctattagttctatgctcagcataacggaatgttaataggctgttatgacttactctacaaaaatcagtggtctcaatcctgccgggtaaataagctactttggcgggcacggctatccacacagcattaggtaccatttgataagtcatagccttcaaagaacaaaaatttatcctaaggaattcnnnnnnnnnnnnnnnnnnnnnnnnnnnnnnnnnnnnnnnnnnnnnnnnnnnnnnnnnnnnnnnnnnnnnnnnnnnnnnnnnnnnnnnnnnnnnnnnnnnnaagggggcagatcctgtctagcctataatatggtcaacatccaaaatattgcccaacactgaaaagataaaatttcaacagagaatgatgagtactgagttatgaattttgggacacagttggctggtacaagaaaggtttttgttttgtttaagtctaggaataaaagtactatataacaataatcccctggtagatcaagctaggactttgaaaaggcacatggtggaattcaacatcaatttttcataaaaattatctttcaacaaatgaaaggtcattctttgataatagaagtgtgatagtacatgaggctgacccaagaaggtatcaattttaagatgcagcagatttttaaaaagatcatcttgctttgaaagaatgagaaaagaaaagcttttctaaacttctaagagttagagaaaacatattttcttttttcctggggttatcttggatcgtatgtgtattcacagttaaggtttttttcagtgttttgttttgtttaatacaacacatctgtaaaattattcccaagccagaaggctctactttcttttttttttttttttgagacggagttttgctcttgttgcccaggctagagtgcagtggcatgatctcagctcaccgcaacctccacctccggggttcaagcaattctcctgcctcagtctcccgagtacttaggattacaggcatgcgccaccacgcccggctaaattttgtattttttgtagagacagggtttctctatattgtgcaggctgatctctaactcctagactccagagatctgcccatctcagcctcccaaagtgctgggataacaggtgtgagccagcaagccccgcccccaaattacttttttttttttttttttttttttttttttagttttgctcttgttgcacaggctggagtgcaatggcacgatctgcaacctccgtctctacagttcaagcgattctcctgcctcagcctcccgagtaattgagattacaggcacctgccaccacgcccagctaatttttgtatttttagtagagacagggtttcaccatgttggccaggctggtctcgaactcctgacctcaggtgatctgcccgcctgggcctcccaaagtgctgggattacaggcgtgagccaccgcacccggccatttttctctgtttctattagtatttcataattttttcaacatcaagaaaccaggattctatttgatatgttctagttaagacatgttaatgatctttattttctatgcttcagtaatgagcaattcacacttaaatgaataaaattagcttttaccttcagctggtaaagttgaccctcaagtctgagctgaagattttctcagaaactttcaaatcaagatctagatctccacagataagaataatggagtgactccaccagtagattttacctacagaaaaagcaataatttattagaactttgtatgaaggaaaggtgctgtgtagttattactgaatcatgtaaacataccaagtctccaaatagtactgaagttttttatttctactcattaggcaaatacatactagttaacattttttgaaagcttcctatgttgctgtatgtaactacatttgtctcttttttttgttttgtttttgagatgaagtctcgctctgtggcccaggctggagtacagtggtgtgatctcagctcactgcaacctccttctcccaggttcaagcgattctcctgtctcagcctcctgagtagctgggactacaggtgcgcaccaccrtgcctaattaatttttatatttttagtagagatagggttttgtcatgttggtcaggctggtcttgaactcctgacctcaagtgatctgcccgccttagcctgccaaagttctgggattacaaaaatgagacaccgtgcctggcccatatttgtttcttatcattgatgtcattttgcggatgaagaaaatggaacacagctagtaaatgacagtcacaatttatacccaaggattctggctctaggttctgagttcttaatcacagaacaaccttaacacactgtcttgacataggtccatatactctaggaaaaagttttaaaacttagatggtatgaggaatcctatatggtttattcccatttgattgctagtgcttctcaaaaatatgtaaatgtcatctaaaattcaaaatactatagtcagggtgagatagtgacaagagactgaatcaagggtagacaacctgggtatttgagacagaggaccaagcaatgg

SEQ ID NO: 695527 - DNA, 3204 bp, Homo sapiens
  misc_feature 821, 822, 823, 824, 825, 826, 827, 828, 829, 830, 831, 832,833, 834, 835, 836, 837, 838, 839, 840, 841, 842, 843, 844,845, 846, 847, 848, 849, 850, 851, 852, 853, 854, 855, 856,857, 858, 859, 860, 861, 862, 863, 864, 865, 866, 867: n = A,T,C or G
  misc_feature 868, 869, 870, 871, 872, 873, 874, 875, 876, 877, 878, 879,880, 881, 882, 883, 884, 885, 886, 887, 888, 889, 890, 891,892, 893, 894, 895, 896, 897, 898, 899, 900, 901, 902, 903,904, 905, 906, 907, 908, 909, 910, 911, 912, 913, 914: n = A,T,C or G
  misc_feature 915, 916, 917, 918, 919, 920: n = A,T,C or G
gtatattcttccagtttttactgcctaaagctcccaaatgattcaaatgtcaagttcacgccaaggccagttaagggtctaacatgggttctagataatagctaaaacagtagaaaaattgttccatttcacttattgtgtatttctcagatccctgccaggtctccctggcttggaacggccccctgaactgtcttataggaatggccacagcctcctgcccctccccagcagttgtgtcccaactggcctttctgccttcggagtgcctcgtctgtcccaatatgaagcattaaatgagattcaaacattccgacaatgttcctgcatcttctaattcaattagttgagctaaatatgtaaaaccctaataacagaaaatagaggaagctcaaaagtgtatgcatgttggagtcagctaaattttgatgaagagtaaattaagttagctatagattaaattcacagtatctcactcactaggaagtcacacaacaccattgtttcatcctttgttatcttcccttgaagactttgctttacccacagtcctctgtaaatgttctccattgcatccttttttgaatagtacattctgaagtctacttctgatctctgacctcacagatgttctcctattagttctatgctcagcataacggaatgttaataggctgttatgacttactctacaaaaatcagtggtctcaatcctgccgggtaaataagctactttggcgggcacggctatccacacagcattaggtaccatttgataagtcatagccttcaaagaacaaaaatttatcctaaggaattcnnnnnnnnnnnnnnnnnnnnnnnnnnnnnnnnnnnnnnnnnnnnnnnnnnnnnnnnnnnnnnnnnnnnnnnnnnnnnnnnnnnnnnnnnnnnnnnnnnnnaagggggcagatcctgtctagcctataatatggtcaacatccaaaatattgcccaacactgaaaagataaaatttcaacagagaatgatgagtactgagttatgaattttgggacacagttggctggtacaagaaaggtttttgttttgtttaagtctaggaataaaagtactatataacaataatcccctggtagatcaagctaggactttgaaaaggcacatggtggaattcaacatcaatttttcataaaaattatctttcaacaaatgaaaggtcattctttgataatagaagtgtgatagtacatgaggctgacccaagaaggtatcaattttaagatgcagcagatttttaaaaagatcatcttgctttgaaagaatgagaaaagaaaagcttttctaaacttctaagagttagagaaaacatattttcttttttcctggggttatcttggatcgtatgtgtattcacagttaaggtttttttcagtgttttgttttgtttaatacaacacatctgtaaaattattcccaagccagaaggctctactttcttttttttttttttttgagacggagttttgctcttgttgcccaggctagagtgcagtggcatgatctcagctcaccgcaacctccacctccggggttcaagcaattctcctgcctcagtctcccgagtacttaggattacaggcatgcgccaccacgcccggctaaattttgtattttttgtagagacagggtttctctatattgtgcaggctgatctctaactcctagactccagagatctgcccatctcagcctcccaaagtgctgggataacaggtgtgagccagcaagccccgcccccaaattacttttttttttttttttttttttttttttttagttttgctcttgttgcacaggctggagtgcaatggcacgatctgcaacctccgtctctacagttcaagcgattctcctgcctcagcctcccgagtaattgagattacaggcacctgccaccacgcccagctaatttttgtatttttagtagagacagggtttcaccatgttggccaggctggtctcgaactcctgacctcaggtgatctgcccgcctgggcctcccaaagtgctgggattacaggcgtgagccaccgcacccggccatttttctctgtttctattagtatttcataattttttcaacatcaagaaaccaggattctatttgatatgttctagttaagacatgttaatgatctttattttctatgcttcagtaatgagcaattcacacttaaatgaataaaattagcttttaccttcagctggtaaagttgaccctcaagtctgagctgaagattttctcagaaactttcaaatcaagatctagatctccacagataagaataatggagtgactccaccagtagattttacctacagaaaaagcaataatttattagaactttgtatgaaggaaaggtgctgtgtagttattactgaatcatgtaaacataccaagtctccaaatagtactgaagttttttatttctactcattaggcaaatacatactagttaacattttttgaaagcttcctatgttgctgtatgtaactacatttgtctcttttttttgttttgtttttgagatgaagtctcgctctgtggcccaggctggagtacagtggtgtgatctcagctcactgcaacctccttctcccaggttcaagcgattctcctgtctcagcctcctgagtagctgggactacaggtgcgcaccaccatgcctaattaatttttatatttttagtagagatagggttttgtcatgttggtcaggctggtcttgaactcctgacctcaagtgatctgcccgccttagcctgccaaagttctgggattamaaaaatgagacaccgtgcctggcccatatttgtttcttatcattgatgtcattttgcggatgaagaaaatggaacacagctagtaaatgacagtcacaatttatacccaaggattctggctctaggttctgagttcttaatcacagaacaaccttaacacactgtcttgacataggtccatatactctaggaaaaagttttaaaacttagatggtatgaggaatcctatatggtttattcccatttgattgctagtgcttctcaaaaatatgtaaatgtcatctaaaattcaaaatactatagtcagggtgagatagtgacaagagactgaatcaagggtagacaacctgggtatttgagacagaggaccaagcaatgg

SEQ ID NO: 695528 - DNA, 912 bp, Homo sapiens
ctccctcctcagcctcccaagtagctgggaccacaggcacatgccaccatgcccagctaatttaaaaagaaaaaaaaaaagaawtttttttctggagagatagggggtctcactatgttgcccgcgctggtctcaaactcctggcctcagacaatcttcccacctcagccacccaaagtgctgggatgataaacatgagccaccgtgcctgattataacatacaattttaaaatatgaccactgagaagtacgtaatgtcacaagcacccataagaaaaatgtctaaacatgaatgtagcaagcttacttcaaatcactagaagaaacagtatcttccatgagaacattaataaaaacactcaaatgcttaactataaaaatagttcatataaccagaaactgttccttactttagtattctgtaatttctccaagtcatcataattagcatccagcaacagagtataggtaagaagaaatgcaaaatggacacaataagacctacctacctcataagcactgggaagatcaagacagtacttgtgaaaacactactcctgaggtgtgctatacaattacaagtggctcctttccctttgacgtacatagacagcttctgttcagaagctggttgaaccagcatggtaagatgctttccactctggctccaagttcattcacattaagcgtatcactaagcatcattcaagcttttggggtcttagttttccctgaaagaggaattaaatccctaccctgcctatacctgaggaagacaagcacctctggagtgggggttatgaggctgggctttgtcatcagtataaattctaatcctgctccaccattactgggctggatggctttgggagggagtaggtcactgaacttctctaagcctctatctctca

SEQ ID NO: 695529 - DNA, 655 bp, Homo sapiens
tcatgctgacatgagctggatcagcttacagaaggggccagagataaggcatccaaaggaggttacaagtaagcaggccccagaaaaatttctgatttctttactcatctatcctcctcacccctccctctccccgctttataaaaattggttcaatgtgcaatacagaagaaagagctatttctttccctttattaacaacagcactagattctgaaattaacaaatatctacctccttccaatttctaaggatctcttaatttttcttcgaaaatcataaaaagcatatcagtttaccccactatcaggcctttgattttattaagtccaaagctacaaggcctgtagagcagaggactgwttggcttattttaaaagaatgaatcaaatattagctgtaaattggtcataaatggggccacttaagcctctacagaaaggaattgcaaggacttgggattaaaattgcaggaagccaaaaagaaaattgaggacaaggaaatgactgatgggtttggtgctattatctctgagaatactaaggacactgaagctttgaaaaaaaattacataggtgaccttgagaacaagtccagactgagaagtcagcttggtgtagcttcctacaggggtggaagcagagcaggctgaat

SEQ ID NO: 695530 - DNA, 1805 bp, Homo sapiens
gcacttggcctcatctaagttttaagcaaggctggaagtgcagtctagttgtatgcccagaggaagaaggaaatgggtttggtaaatacactgtctgccataatctcacacaaggacaaaaaattaaacatgtaactaaattgatctyacaaaattttctcccaatcttactattgtttctctatttcctagctctttgattaattggacatgtatttgtggagagcccactagacttttgtggtaggcagcccctaagatagcccccaatgatacccttttcccccattcattccctgtaaaatcccttcccctggaatgtgagctgaacttattgaaatgtttttaatgaatggaatcgggttgaagggatgggtgtcacttccaagattaggttataaaaagactgtagtttccatcttggttgctctatgattccctgtctttctctttctgattactagctaccatgtcatgaggatatccgggcagccattggaggaggtccatggccaaggaactgaggtcagcctgcaaaaacatgactaagtttggatcctactgagatttctgaggcctgccaacagtcacatgactgagcttgcatataaattctcaagccctagttgagccttgacataagtgcagccttgggtgacacctaactgcaatctcaagagagaccttcagtcagaggcacccagctaagtcatgtcccagataaatgtgcattgttttaagctgctgaatagtggagtaatttgtttggtggcactagatcatcaatatacctttgtgttaaatactggggacaaaagagttaacaaggcgcattttgcttaaggaatcaccatgttctacccccaagcatgaaatcttaggatcacctttgactccgactttttaaaacatgagttccctgtggagtcacaaagtttgtagtctagtgacctccattatctctaacttccacatttgaaggtagcccacactgactccctatcttatctttgtacattttcttttaccttcctaatcatcttacactgcatttgtagcaattagcctctactccaataatgcttttttattttttaagcaactataatatattgaataatttgtacagcaatacactatcatatcttctggatggcagagtggggtgatccctaattgtggctctagcatagactgcactaatgactcttaagtctgaaaacctcttaaggagcccaggagagccatctctggaggtgacacaaatgcaaactgattttcatcaagccactctttaggctcaagcattttgactcctcatgactccaagaaaactgtacttttctttttttgtgagttggtgttagttgcatctttactcacttcaaggaaggtgagttgtttgttccataaataaggagtgaggaaacacaggcatcaataaaaggtgattcaaggaaaaaaaatggtatcaaactatagtttttgttttttgttttttgttttggtgacagggtctcgctgaagtgcagtgatgctatcgtagttaactgtagcctcgaattcctgggctcgagtgattctcccaccttagcctcctgagtagctgggactacaggtgcataccaccacacctggataatttttttattttttatttagaaatggaagctcactatgttgcctaggctggtctttaactcctgggctcaagtgatcctccagtcttggcctcccaaagtcctgggactccaggcatgagccactacacccagccaaactacagttttaaatgagctttgcca

SEQ ID NO: 695531 - DNA, 1805 bp, Homo sapiens
gcacttggcctcatctaagttttaagcaaggctggaagtgcagtctagttgtatgcccagaggaagaaggaaatgggtttggtaaatacactgtctgccataatctcacacaaggacaaaaaattaaacatgtaactaaattgatcttacaaaattttctcccaatcttactattgtttctctatttcctagctctttgattaattggacatrtatttgtggagagcccactagacttttgtggtaggcagcccctaagatagcccccaatgatacccttttcccccattcattccctgtaaaatcccttcccctggaatgtgagctgaacttattgaaatgtttttaatgaatggaatcgggttgaagggatgggtgtcacttccaagattaggttataaaaagactgtagtttccatcttggttgctctatgattccctgtctttctctttctgattactagctaccatgtcatgaggatatccgggcagccattggaggaggtccatggccaaggaactgaggtcagcctgcaaaaacatgactaagtttggatcctactgagatttctgaggcctgccaacagtcacatgactgagcttgcatataaattctcaagccctagttgagccttgacataagtgcagccttgggtgacacctaactgcaatctcaagagagaccttcagtcagaggcacccagctaagtcatgtcccagataaatgtgcattgttttaagctgctgaatagtggagtaatttgtttggtggcactagatcatcaatatacctttgtgttaaatactggggacaaaagagttaacaaggcgcattttgcttaaggaatcaccatgttctacccccaagcatgaaatcttaggatcacctttgactccgactttttaaaacatgagttccctgtggagtcacaaagtttgtagtctagtgacctccattatctctaacttccacatttgaaggtagcccacactgactccctatcttatctttgtacattttcttttaccttcctaatcatcttacactgcatttgtagcaattagcctctactccaataatgcttttttattttttaagcaactataatatattgaataatttgtacagcaatacactatcatatcttctggatggcagagtggggtgatccctaattgtggctctagcatagactgcactaatgactcttaagtctgaaaacctcttaaggagcccaggagagccatctctggaggtgacacaaatgcaaactgattttcatcaagccactctttaggctcaagcattttgactcctcatgactccaagaaaactgtacttttctttttttgtgagttggtgttagttgcatctttactcacttcaaggaaggtgagttgtttgttccataaataaggagtgaggaaacacaggcatcaataaaaggtgattcaaggaaaaaaaatggtatcaaactatagtttttgttttttgttttttgttttggtgacagggtctcgctgaagtgcagtgatgctatcgtagttaactgtagcctcgaattcctgggctcgagtgattctcccaccttagcctcctgagtagctgggactacaggtgcataccaccacacctggataatttttttattttttatttagaaatggaagctcactatgttgcctaggctggtctttaactcctgggctcaagtgatcctccagtcttggcctcccaaagtcctgggactccaggcatgagccactacacccagccaaactacagttttaaatgagctttgcca

SEQ ID NO: 695532 - DNA, 1805 bp, Homo sapiens
gcacttggcctcatctaagttttaagcaaggctggaagtgcagtctagttgtatgcccagaggaagaaggaaatgggtttggtaaatacactgtctgccataatctcacacaaggacaaaaaattaaacatgtaactaaattgatcttacaaaattttctcccaatcttactattgtttctctatttcctagctctttgattaattggacatgtatttgtggagagcccactagacttttgtggtaggcagcccctaagatagcccccaatgatacccttttcccccattcattccctgtaaaatcccttcccctggaatgtgagctgaacttattgaaatgtttttaatgaatggaatmgggttgaagggatgggtgtcacttccaagattaggttataaaaagactgtagtttccatcttggttgctctatgattccctgtctttctctttctgattactagctaccatgtcatgaggatatccgggcagccattggaggaggtccatggccaaggaactgaggtcagcctgcaaaaacatgactaagtttggatcctactgagatttctgaggcctgccaacagtcacatgactgagcttgcatataaattctcaagccctagttgagccttgacataagtgcagccttgggtgacacctaactgcaatctcaagagagaccttcagtcagaggcacccagctaagtcatgtcccagataaatgtgcattgttttaagctgctgaatagtggagtaatttgtttggtggcactagatcatcaatatacctttgtgttaaatactggggacaaaagagttaacaaggcgcattttgcttaaggaatcaccatgttctacccccaagcatgaaatcttaggatcacctttgactccgactttttaaaacatgagttccctgtggagtcacaaagtttgtagtctagtgacctccattatctctaacttccacatttgaaggtagcccacactgactccctatcttatctttgtacattttcttttaccttcctaatcatcttacactgcatttgtagcaattagcctctactccaataatgcttttttattttttaagcaactataatatattgaataatttgtacagcaatacactatcatatcttctggatggcagagtggggtgatccctaattgtggctctagcatagactgcactaatgactcttaagtctgaaaacctcttaaggagcccaggagagccatctctggaggtgacacaaatgcaaactgattttcatcaagccactctttaggctcaagcattttgactcctcatgactccaagaaaactgtacttttctttttttgtgagttggtgttagttgcatctttactcacttcaaggaaggtgagttgtttgttccataaataaggagtgaggaaacacaggcatcaataaaaggtgattcaaggaaaaaaaatggtatcaaactatagtttttgttttttgttttttgttttggtgacagggtctcgctgaagtgcagtgatgctatcgtagttaactgtagcctcgaattcctgggctcgagtgattctcccaccttagcctcctgagtagctgggactacaggtgcataccaccacacctggataatttttttattttttatttagaaatggaagctcactatgttgcctaggctggtctttaactcctgggctcaagtgatcctccagtcttggcctcccaaagtcctgggactccaggcatgagccactacacccagccaaactacagttttaaatgagctttgcca

SEQ ID NO: 695533 - DNA, 1805 bp, Homo sapiens
gcacttggcctcatctaagttttaagcaaggctggaagtgcagtctagttgtatgcccagaggaagaaggaaatgggtttggtaaatacactgtctgccataatctcacacaaggacaaaaaattaaacatgtaactaaattgatcttacaaaattttctcccaatcttactattgtttctctatttcctagctctttgattaattggacatgtatttgtggagagcccactagacttttgtggtaggcagcccctaagatagcccccaatgatacccttttcccccattcattccctgtaaaatcccttcccctggaatgtgagctgaacttattgaaatgtttttaatgaatggaatcgggttgaagggatgggtgtcacttccaagattaggttataaaaagactgtrgtttccatcttggttgctctatgattccctgtctttctctttctgattactagctaccatgtcatgaggatatccgggcagccattggaggaggtccatggccaaggaactgaggtcagcctgcaaaaacatgactaagtttggatcctactgagatttctgaggcctgccaacagtcacatgactgagcttgcatataaattctcaagccctagttgagccttgacataagtgcagccttgggtgacacctaactgcaatctcaagagagaccttcagtcagaggcacccagctaagtcatgtcccagataaatgtgcattgttttaagctgctgaatagtggagtaatttgtttggtggcactagatcatcaatatacctttgtgttaaatactggggacaaaagagttaacaaggcgcattttgcttaaggaatcaccatgttctacccccaagcatgaaatcttaggatcacctttgactccgactttttaaaacatgagttccctgtggagtcacaaagtttgtagtctagtgacctccattatctctaacttccacatttgaaggtagcccacactgactccctatcttatctttgtacattttcttttaccttcctaatcatcttacactgcatttgtagcaattagcctctactccaataatgcttttttattttttaagcaactataatatattgaataatttgtacagcaatacactatcatatcttctggatggcagagtggggtgatccctaattgtggctctagcatagactgcactaatgactcttaagtctgaaaacctcttaaggagcccaggagagccatctctggaggtgacacaaatgcaaactgattttcatcaagccactctttaggctcaagcattttgactcctcatgactccaagaaaactgtacttttctttttttgtgagttggtgttagttgcatctttactcacttcaaggaaggtgagttgtttgttccataaataaggagtgaggaaacacaggcatcaataaaaggtgattcaaggaaaaaaaatggtatcaaactatagtttttgttttttgttttttgttttggtgacagggtctcgctgaagtgcagtgatgctatcgtagttaactgtagcctcgaattcctgggctcgagtgattctcccaccttagcctcctgagtagctgggactacaggtgcataccaccacacctggataatttttttattttttatttagaaatggaagctcactatgttgcctaggctggtctttaactcctgggctcaagtgatcctccagtcttggcctcccaaagtcctgggactccaggcatgagccactacacccagccaaactacagttttaaatgagctttgcca

SEQ ID NO: 695534 - DNA, 1805 bp, Homo sapiens
gcacttggcctcatctaagttttaagcaaggctggaagtgcagtctagttgtatgcccagaggaagaaggaaatgggtttggtaaatacactgtctgccataatctcacacaaggacaaaaaattaaacatgtaactaaattgatcttacaaaattttctcccaatcttactattgtttctctatttcctagctctttgattaattggacatgtatttgtggagagcccactagacttttgtggtaggcagcccctaagatagcccccaatgatacccttttcccccattcattccctgtaaaatcccttcccctggaatgtgagctgaacttattgaaatgtttttaatgaatggaatcgggttgaagggatgggtgtcacttccaagattaggttataaaaagactgtagtttccatcttggttgctctatgattccctgtctttctctttctgattactagctaccatgtcatgaggatatccgggcagccattggaggaggtccatggccaaggaactgaggtcagcctgcaaaaacatgactaagtttggatcctactgagatttctgaggcctgccaacagtcacatgactgagcttgcatataaattctcaagccctagttgagccttgacataagtgcagccttgggtgacacctaactgcaatctcaagagagaccttcagtcagaggcacccagctaagtcatgtcccagataaatgtgcattgttttaagctgctgaatagtggagtaatttgtttggtggcactagatcatcaatatacctttgtgttaaatactggggacaaaagagttaacaaggcgcattttgcttaaggaatcaccatgttctacccccaagcatgaaatcttaggatcacctttgactccgactttttaaaacatgagttccctgtggagtcacaaagtttgtagtctagtgacctccattatctctaacttccacatttgaaggtagcccacactgactccctatcttatctttgtacattttcttttaccttcctaatcatcttacactgcatttgtagcaattagcctctactccaataatgcttttttattttttaagcaactataatatattgaataatttgtacagcaatacactatcatatcttctggatggcagagtggggtgatccctaattgtggctctagcatagactgcactaatgactcttaagtctgaaaacctcttaaggagcccaggagagccatctctggaggtgacacaaatgcaaactgattttcatcaagccactctttaggctcaagcattttgactcctcatgactccaagaaaactgtacttttctttttttgtgagttggtgttagttgcatctttactcacttcaaggaaggtgagtygtttgttccataaataaggagtgaggaaacacaggcatcaataaaaggtgattcaaggaaaaaaaatggtatcaaactatagtttttgttttttgttttttgttttggtgacagggtctcgctgaagtgcagtgatgctatcgtagttaactgtagcctcgaattcctgggctcgagtgattctcccaccttagcctcctgagtagctgggactacaggtgcataccaccacacctggataatttttttattttttatttagaaatggaagctcactatgttgcctaggctggtctttaactcctgggctcaagtgatcctccagtcttggcctcccaaagtcctgggactccaggcatgagccactacacccagccaaactacagttttaaatgagctttgcca

SEQ ID NO: 695535 - DNA, 1805 bp, Homo sapiens
gcacttggcctcatctaagttttaagcaaggctggaagtgcagtctagttgtatgcccagaggaagaaggaaatgggtttggtaaatacactgtctgccataatctcacacaaggacaaaaaattaaacatgtaactaaattgatcttacaaaattttctcccaatcttactattgtttctctatttcctagctctttgattaattggacatgtatttgtggagagcccactagacttttgtggtaggcagcccctaagatagcccccaatgatacccttttcccccattcattccctgtaaaatcccttcccctggaatgtgagctgaacttattgaaatgtttttaatgaatggaatcgggttgaagggatgggtgtcacttccaagattaggttataaaaagactgtagtttccatcttggttgctctatgattccctgtctttctctttctgattactagctaccatgtcatgaggatatccgggcagccattggaggaggtccatggccaaggaactgaggtcagcctgcaaaaacatgactaagtttggatcctactgagatttctgaggcctgccaacagtcacatgactgagcttgcatataaattctcaagccctagttgagccttgacataagtgcagccttgggtgacacctaactgcaatctcaagagagaccttcagtcagaggcacccagctaagtcatgtcccagataaatgtgcattgttttaagctgctgaatagtggagtaatttgtttggtggcactagatcatcaatatacctttgtgttaaatactggggacaaaagagttaacaaggcgcattttgcttaaggaatcaccatgttctacccccaagcatgaaatcttaggatcacctttgactccgactttttaaaacatgagttccctgtggagtcacaaagtttgtagtctagtgacctccattatctctaacttccacatttgaaggtagcccacactgactccctatcttatctttgtacattttcttttaccttcctaatcatcttacactgcatttgtagcaattagcctctactccaataatgcttttttattttttaagcaactataatatattgaataatttgtacagcaatacactatcatatcttctggatggcagagtggggtgatccctaattgtggctctagcatagactgcactaatgactcttaagtctgaaaacctcttaaggagcccaggagagccatctctggaggtgacacaaatgcaaactgattttcatcaagccactctttaggctcaagcattttgactcctcatgactccaagaaaactgtacttttctttttttgtgagttggtgttagttgcatctttactcacttcaaggaaggtgagttgtttgttccataaataaggagtgaggaaacacaggcatcaataaaaggtgattcaaggaaaaaaaatggtatcaaactatagtttttgttttttgttttttgttttggtgacagggtctcgctgaagtgcagtgatgctrtcgtagttaactgtagcctcgaattcctgggctcgagtgattctcccaccttagcctcctgagtagctgggactacaggtgcataccaccacacctggataatttttttattttttatttagaaatggaagctcactatgttgcctaggctggtctttaactcctgggctcaagtgatcctccagtcttggcctcccaaagtcctgggactccaggcatgagccactacacccagccaaactacagttttaaatgagctttgcca

SEQ ID NO: 695536 - DNA, 1805 bp, Homo sapiens
gcacttggcctcatctaagttttaagcaaggctggaagtgcagtctagttgtatgcccagaggaagaaggaaatgggtttggtaaatacactgtctgccataatctcacacaaggacaaaaaattaaacatgtaactaaattgatcttacaaaattttctcccaatcttactattgtttctctatttcctagctctttgattaattggacatgtatttgtggagagcccactagacttttgtggtaggcagcccctaagatagcccccaatgatacccttttcccccattcattccctgtaaaatcccttcccctggaatgtgagctgaacttattgaaatgtttttaatgaatggaatcgggttgaagggatgggtgtcacttccaagattaggttataaaaagactgtagtttccatcttggttgctctatgattccctgtctttctctttctgattactagctaccatgtcatgaggatatccgggcagccattggaggaggtccatggccaaggaactgaggtcagcctgcaaaaacatgactaagtttggatcctactgagatttctgaggcctgccaacagtcacatgactgagcttgcatataaattctcaagccctagttgagccttgacataagtgcagccttgggtgacacctaactgcaatctcaagagagaccttcagtcagaggcacccagctaagtcatgtcccagataaatgtgcattgttttaagctgctgaatagtggagtaatttgtttggtggcactagatcatcaatatacctttgtgttaaatactggggacaaaagagttaacaaggcgcattttgcttaaggaatcaccatgttctacccccaagcatgaaatcttaggatcacctttgactccgactttttaaaacatgagttccctgtggagtcacaaagtttgtagtctagtgacctccattatctctaacttccacatttgaaggtagcccacactgactccctatcttatctttgtacattttcttttaccttcctaatcatcttacactgcatttgtagcaattagcctctactccaataatgcttttttattttttaagcaactataatatattgaataatttgtacagcaatacactatcatatcttctggatggcagagtggggtgatccctaattgtggctctagcatagactgcactaatgactcttaagtctgaaaacctcttaaggagcccaggagagccatctctggaggtgacacaaatgcaaactgattttcatcaagccactctttaggctcaagcattttgactcctcatgactccaagaaaactgtacttttctttttttgtgagttggtgttagttgcatctttactcacttcaaggaaggtgagttgtttgttccataaataaggagtgaggaaacacaggcatcaataaaaggtgattcaaggaaaaaaaatggtatcaaactatagtttttgttttttgttttttgttttggtgacagggtctcgctgaagtgcagtgatgctatcgtagttaactgtagcctcgaattyctgggctcgagtgattctcccaccttagcctcctgagtagctgggactacaggtgcataccaccacacctggataatttttttattttttatttagaaatggaagctcactatgttgcctaggctggtctttaactcctgggctcaagtgatcctccagtcttggcctcccaaagtcctgggactccaggcatgagccactacacccagccaaactacagttttaaatgagctttgcca

SEQ ID NO: 695537 - DNA, 1805 bp, Homo sapiens
gcacttggcctcatctaagttttaagcaaggctggaagtgcagtctagttgtatgcccagaggaagaaggaaatgggtttggtaaatacactgtctgccataatctcacacaaggacaaaaaattaaacatgtaactaaattgatcttacaaaattttctcccaatcttactattgtttctctatttcctagctctttgattaattggacatgtatttgtggagagcccactagacttttgtggtaggcagcccctaagatagcccccaatgatacccttttcccccattcattccctgtaaaatcccttcccctggaatgtgagctgaacttattgaaatgtttttaatgaatggaatcgggttgaagggatgggtgtcacttccaagattaggttataaaaagactgtagtttccatcttggttgctctatgattccctgtctttctctttctgattactagctaccatgtcatgaggatatccgggcagccattggaggaggtccatggccaaggaactgaggtcagcctgcaaaaacatgactaagtttggatcctactgagatttctgaggcctgccaacagtcacatgactgagcttgcatataaattctcaagccctagttgagccttgacataagtgcagccttgggtgacacctaactgcaatctcaagagagaccttcagtcagaggcacccagctaagtcatgtcccagataaatgtgcattgttttaagctgctgaatagtggagtaatttgtttggtggcactagatcatcaatatacctttgtgttaaatactggggacaaaagagttaacaaggcgcattttgcttaaggaatcaccatgttctacccccaagcatgaaatcttaggatcacctttgactccgactttttaaaacatgagttccctgtggagtcacaaagtttgtagtctagtgacctccattatctctaacttccacatttgaaggtagcccacactgactccctatcttatctttgtacattttcttttaccttcctaatcatcttacactgcatttgtagcaattagcctctactccaataatgcttttttattttttaagcaactataatatattgaataatttgtacagcaatacactatcatatcttctggatggcagagtggggtgatccctaattgtggctctagcatagactgcactaatgactcttaagtctgaaaacctcttaaggagcccaggagagccatctctggaggtgacacaaatgcaaactgattttcatcaagccactctttaggctcaagcattttgactcctcatgactccaagaaaactgtacttttctttttttgtgagttggtgttagttgcatctttactcacttcaaggaaggtgagttgtttgttccataaataaggagtgaggaaacacaggcatcaataaaaggtgattcaaggaaaaaaaatggtatcaaactatagtttttgttttttgttttttgttttggtgacagggtctcgctgaagtgcagtgatgctatcgtagttaactgtagcctcgaattcctgggctcgagtgattctcccaccttagcctcctgagtagytgggactacaggtgcataccaccacacctggataatttttttattttttatttagaaatggaagctcactatgttgcctaggctggtctttaactcctgggctcaagtgatcctccagtcttggcctcccaaagtcctgggactccaggcatgagccactacacccagccaaactacagttttaaatgagctttgcca

SEQ ID NO: 695538 - DNA, 1852 bp, Homo sapiens
tgcatatacacacaaatacacacacacacacacatatacacagagagaggggtgggggggagagagagagagagagaaagagagattgagttattataaggaattggcttgtgtgattacagaggctaaatctcaagatcctcagggtgagttggcaagctggagacccaggagagctgatggcgtaactccagtttgagtccaaaggccagagaaccaggagccaatggtgtagttgcagttcaaagactggtagacttgagacccaggaagagcctatggtttcagtttgaatctgaaggcaggaaaaaaattgttgttccatttccaaggcagtcaggcagaaggaattctcttactcaggggagggtcagccttttttttctagtaagaccttcaactgaatgaggctcaatcgcatcagggtgggcaatctgctttcctcagtgtactgattcagatgttattatcacccagaaacaccatcacagacacacccagaataatacttgaccaaatatctgggcaccctgtagcccaaattgatacacgggttggggataggtcatgatgtttcatgggaagcatcagaatgtccatggttttatggaatggggatcatttattagactaaagcaagtggagatagttctagcacctctctgttatagcgtgcagagctcaggttagagacacagagagctgtaaactcagtaggcacagtcttatatcaatgttttgtagttttcagggtcaaagtctttgcacatcttttgttaaatttatcccaaagtatttcatgttttttattgtgattttaaatgaaatttaaaaatttattgtcttatagtttgctgctagtatataaaaatgcaattgattgttacatattgaccttgtatcctgagaccttgctaaaatctttaatgagttctaataatttttgttgtgttgattgtttaggattttctatatatacgatctgttatctacaaataggaaccattccactttccttttcccaatctgtttgtcttttatttccttttcttgccttattacacttgccttatcattttactgcaccttgggttagtcagatgctccaagaagtagatgcaaagatagaattaaacatgcaaggatcggccaggcatggtggctcatgcctataatcctagcactttgagaagctgaggtgggaggatcatttgatcccaggagttcaagactagtctgggcaacatagcaaaacccggtctctatcaaacaattttwaaaaaaatttagccagatgtagtggcaagtgcctgtaatcccagctactcgggaggctgaggcaggaggatcacctgagcccaggagatcaaggctacagtgagctatgattgtgccaccgcactccagcctggctgacagactgagaccctgtctgtctcttaaaaaaacaaggattttattgtggaaaatgcctgtaggatacaaaatgcagagggattcccacaagctggaggagccatcagatactgatgtgagaaagtaaaggagaaagggaaggacgagtaggtggaagcattctagactgctatgctgcatgaggaatatttgcaaggaatatcactaagctagagtcctgtgactccagtcaatttcagagttcaatggctggggcccttggtcaattacattctctttagtagcaggtgtacaaagtgtattctcatgaccaccacagatctccagtacaatgtttaacagaaatggtgagaatggccatctctacatttttcctgatcttatggggcaagtgttcagtaaatcaccattaagtatgatgtaggctgtaggtttt

SEQ ID NO: 695539 - DNA, 1852 bp, Homo sapiens
tgcatatacacacaaatacacacacacacacacatatacacagagagaggggtgggggggagagagagagagagagaaagagagattgagttattataaggaattggcttgtgtgattacagaggctaaatctcaagatcctcagggtgagttggcaagctggagacccaggagagctgatggcgtaactccagtttgagtccaaaggccagagaaccaggagccaatggtgtagttgcagttcaaagactggtagacttgagacccaggaagagcctatggtttcagtttgaatctgaaggcaggaaaaaaattgttgttccatttccaaggcagtcaggcagaaggaattctcttactcaggggagggtcagccttttttttctagtaagaccttcaactgaatgaggctcaatcgcatcagggtgggcaatctgctttcctcagtgtactgattcagatgttattatcacccagaaacaccatcacagacacacccagaataatacttgaccaaatatctgggcaccctgtagcccaaattgatacacgggttggggataggtcatgatgtttcatgggaagcatcagaatgtccatggttttatggaatggggatcatttattagactaaagcaagtggagatagttctagcacctctctgttatagcgtgcagagctcaggttagagacacagagagctgtaaactcagtaggcacagtcttatatcaatgttttgtagttttcagggtcaaagtctttgcacatcttttgttaaatttatcccaaagtatttcatgttttttattgtgattttaaatgaaatttaaaaatttattgtcttatagtttgctgctagtatataaaaatgcaattgattgttacatattgaccttgtatcctgagaccttgctaaaatctttaatgagttctaataatttttgttgtgttgattgtttaggattttctatatatacgatctgttatctacaaataggaaccattccactttccttttcccaatctgtttgtcttttatttccttttcttgccttattacacttgccttatcattttactgcaccttgggttagtcagatgctccaagaagtagatgcaaagatagaattaaacatgcaaggatcggccaggcatggtggctcatgcctataatcctagcactttgagaagctgaggtgggaggatcatttgatcccaggagttcaagactagtctgggcaacatagcaaaacccggtctctatcaaacaatttttaaaaaaatttagccagatgtagtggcaagtgcctgtaatcccagctactcgggaggctgaggcaggaggatcacctgagcccaggagatcaaggctacagtgagctatgattgtgccaccgcactccagcctggctgacagactgagaccctgtctgtctcttaaaaaaacaaggattttattgtggaaaatgcctgtaggatacaaaatgcagagggattcccacaagctggaggagccatcagatactgatgtgagaaagtaaaggagaaagggaaggacgagtaggtggaagcattctagactgctatgctgcatgaggaatatttgcaaggaatatcactaagcyagagtcctgtgactccagtcaatttcagagttcaatggctggggcccttggtcaattacattctctttagtagcaggtgtacaaagtgtattctcatgaccaccacagatctccagtacaatgtttaacagaaatggtgagaatggccatctctacatttttcctgatcttatggggcaagtgttcagtaaatcaccattaagtatgatgtaggctgtaggtttt

SEQ ID NO: 695540 - DNA, 533 bp, Homo sapiens
tctaagtgagaagaagagggaaatgctggcctagagctcctttatcttaagccaatggggacagttagcaggttgtccagaagtagctacccccactttcctaatggagcatccaccctcctctgcttccaagggtattcccaagctcactccttccaggatccatttctggatccctcctwgtatgggggccagagagtccagaatggtaacatttcagtattgaaagagatcctagaaatcacaccccgcccctcatttttaggattatccactcttatgactaagatgggttcctattgccccgagttggaattcagaatgcctttcatcataagaatggtataatgaatagtgactacaagggattgatggaggctccagctcctttctaggttataggctttcgtgggctagcctgggaacctactgcttttgatggtgtccattggtgagaaaaaaattatttcaaggtttaaaatcatgttacatgtaaccaggttacatgccatgaaggaagtgggaatgatagt

SEQ ID NO: 695541 - DNA, 544 bp, Homo sapiens
attaagaggaaatacctcacatgatcaagctatacttgacaaacgaacttagtgctagagccatttcccaggttccaaatatagaaatttacttttgtttctttcaaactgaggttcatctgctagagccaacccaacccagcctagccacaattcactgttgctaaagcttccccaaactattcaccattgtttccagtggttctcaaccctggctgcacattaaaatcacctggagaatattttaaaatcccaatgcccaagccaataaaatcagaatctctgagaatsggatccagatatcagtggttttaagctcctcaggcaattccagtgtgcaggcaaggctgacaaaggcagctttagactgtcctagcttagctttcattttttaaagaagagttctgttactagctcaaacaaagttaagctctgccccaaggagacttcctgttaaccaaagaaaatagggctgtgatgtctataggccctataagtcattccctttcagtaggaaaatgggcgattgctccacaccaggtgc

SEQ ID NO: 695542 - DNA, 610 bp, Homo sapiens
ccatctcacccaacatcatcacaatttctaagtttctaaaaaaaaaaaaatgcttgtaaagtttctaaaaaatgaaaatagtaaaaaccaacttctccactcagcaactagctggagagttatttgttttgttcactttcaagttcctgtgtaacaatgtgaccttttaaaaaacacacaaattagcagttttaatttgcaatttcattcatactacagaaatatgggaattctaatagcatgggcaattatcttgcccatctttgccccatcttatcttgctagtgtataatgattgatgtagaaaagagcataggtaaataggaaacatgacctataacttgtaattacacttgtgttggtttgcactgaatttgtatttagaattaatgcctagcttttaacagtttgaattgagtttttgtgcaaaagaattattttatttcagagagtcttttatgtttatatggcttaatttgtatcactattcagaaggtttgtgtgtttttcataagttcccagaataaagtgaaacttgcatrttatttttttaagttgaggatgaagcaaaatatagccaaggaaggaatacatctgcatatttaatggc

SEQ ID NO: 695543 - DNA, 657 bp, Homo sapiens
tgaagggagcaaatagagcccttcttcatactttaatatccatatgaatctcacctgaagattttgttaaactgcagatcccacatcagcaggtctgtgtaggacccaacattctacctttctaacaagttcctgggtgatgctcgtgctctgacagatggcccacactttgtgtagcagggcctgggacatcctcatagagtccctagggatacccaaagaattattcttcatgtagctctagcatttccgcctttttttatgtaactccgtattattatcttcttctcctgtaggcataaatatgctctgccccaaagatgtctacgtcctaacccctggaacttatgaatatgttagagtacatggcaaaaggaaattaagtttcagatggaatttaggttgctaactagctgatcatgaaatagctaaattatgcggaattatctgggtgggtctaatgtaatcacaagaatacttaaaaatggaagagggaatcagtcacagaggggtgtgactcttgaggaatggtcacagagagacagtgctgctggcttcacagatggagaatgggggtgaggagcttctcaaagctggagaaagaaaggataaatacatcttctcctaggctctccaaaaaataaaaataamaaataa

SEQ ID NO: 695544 - DNA, 1575 bp, Homo sapiens
cctgtaaaaaatgaattaatttaaaaaactccacatcctgaatgtgaccacagctcctctctccaccactaccctggcccacctctcacctggttatctcagtagccccctctttgactctctgcctccccgggcgtgagccaccgcgcccggccgtttctgagagttttaacatcaaaggacaacgcttatgctacgatgtcaagtggataccacggtatgcacgaagcagacacatagacaagaaaaagacccccttagagtctgttctccatagcagccagagagatcctttcaaaacctaggttacatcagctcagccctgagctcacaaccctccagtggctcgttcacgtggggtaaaagcaaagccctcactatgacccgcaaagcctttaggacctgtgcctcccgcactcccatcacctccctcacctaacatcctgccactcccctgcacccwctcagctccctgatgctcctcagaacacctccaagtgcattcctgcctcagggcctttgcacttgccgttactcctgcctggcatatttcctcaggtacccacagggctcctctcctcaactgtcatctcaaaacaatcataagcaaacaggatctgctttgggaaggccctccctgatcagcccatctgaagaagcgccctggcccctctctcttccctcaccctgcgtcgtgctcccttactctgtgattattctctgccctctctagtagtagaaagcctccacaggactgcactctgtctgtctcgttcactgctgcaaccctggcacctgtgtgccgcctggctcccagttggtgttccactgtacatctgctgaatgttgacttgaatgggagattgcactgtctgggtatgtgcgtgtggcttcccctgcctgggtgataccttactgtctctaaggtccccagctcgcagatactgcctggcatttagtaagtagccaggttggattcgctgtacaaatggacacatgaagacaggaaggaactcacagcagggcaggagagaccactgcatgggggtcaggaaactggaattccagataaacccctgccactcaccatcattaggccttgggcaagtcacttcacctctttgaaccttagtttttcacccataacatgggcatggtgacccctgtgctgttggcctcacagggctgttgtgaggattacatgacaaagacaaagcaaggcacagggacagccctgctcaagctgcagctctcccatgaggctccacctgacacctcaccttgccaggccaaccaatcctttctctgagcccccgaggagcccctccagcgcctcatagattgtgtgtgtgtgtgtgtgtgtgtgtgtgtgtgtgtgtgtgtgtgtgtgtgtgtcagggccctgctggtgcttttatggaagctatatttttatgactaccctccccaaactgtgcaccccttgagatggggccctgccccaccatctttgcgtccgttggtcttaccctgtgcctggcagctaggagtgctcctgggacatctgatgactggccaagtacatttgttgaaagc

SEQ ID NO: 695545 - DNA, 634 bp, Homo sapiens
aaattgatcacaagagtggagttctgatgctatagattagtatctttataaaaaaaaaaaacaacaaaaacgaccagatatctttctctgtgtgtttctctgtctgtttccctttccttctcccrcttcctttatcatatgagaatgcagaaagaaggtggctatctactcgccagtaaaagagcgctcaccagaaaccaaattggcaagcaccttgatcttggactgcacagcctctagaactatgagaaataaatttctgtcgcttaggccattcagtttatggtattttgttatggcggcttgagcaaactaagatagattttgctaccaagaagttgcatgttgctttaataaaacctaaacatgtgaaagtggttttggaactaggtaatgggtagaggctgaaagaattctgaggtgcatgctagaaaaagcctagatttccatgctagaaatatggatgttaaaggcaattctggtaagaactcagaaatacagttgaagagaaagcctccatcttcttagagaaaacataatcatgaacacaattttggtaaatatatgtttgttaaaggccattcttgtgaggtctcagatggaaatgaagaatgggtcactggaagacagaaga

SEQ ID NO: 695546 - DNA, 634 bp, Homo sapiens
aaattgatcacaagagtggagttctgatgctatagattagtatctttataaaaaaaaaaaacaacaaaaacgaccagatatctttctctgtgtgtttctctgtctgtttccctttccttctcccacttcctttatcatatgagaatgcagaaagaaggtggctatctactcgccagtaaaagagcsctcaccagaaaccaaattggcaagcaccttgatcttggactgcacagcctctagaactatgagaaataaatttctgtcgcttaggccattcagtttatggtattttgttatggcggcttgagcaaactaagatagattttgctaccaagaagttgcatgttgctttaataaaacctaaacatgtgaaagtggttttggaactaggtaatgggtagaggctgaaagaattctgaggtgcatgctagaaaaagcctagatttccatgctagaaatatggatgttaaaggcaattctggtaagaactcagaaatacagttgaagagaaagcctccatcttcttagagaaaacataatcatgaacacaattttggtaaatatatgtttgttaaaggccattcttgtgaggtctcagatggaaatgaagaatgggtcactggaagacagaaga

SEQ ID NO: 695547 - DNA, 616 bp, Homo sapiens
caggatcaaagacacacaggagtcctttcttttgaaatgccacgtgccattgtctttcctcccttctttgcttctttttcttaccctctctttcaattgcagatgccaaaaaagatgccaacagacactacattaccctaatggctgctacccagaacctttttataggttgttcttaatttttttgttgttgttgttcaagcttttcctttcttttttttcttrgtgtttgggccacgattttaaaatgacttttattatgggtatgtgttgccaaagctggctttttgtcaaataaaatgaatacgaacttaaaaaataaaagctggtatcttaaaatgtaagagagtaagactgtgaagcctaaaatgactggctgagaatgaaccagaaatgccatttgccaaacagttgtaactagaaatttgattctcacggtccattcttttctttgtccttaagatgacattgttagtgttcacgtcccatgttcagtgtccaaaccggcaatgtaaaaagtatcctgtgtggtttaacaggaaatctgtttatgtctctttatttgaaaccagttttactctcagtggttctttaagttcaatgaagtctgccagga

SEQ ID NO: 695548 - DNA, 616 bp, Homo sapiens
caggatcaaagacacacaggagtcctttcttttgaaatgccacgtgccattgtctttcctcccttctttgcttctttttcttaccctctctttcaattgcagatgccaaaaaagatgccaacagacactacattaccctaatggctgctacccagaacctttttataggttgttcttaatttttttgttgttgttgttcaagcttttcctttcttttttttcttggtgtttgggccacgattttaaaatgacttttattatgggtatgtgttgccaaagctggctttttgtcaaataaaatgaatacgaacttaaaaaataaaagctggtatcttaaaatgtaagagagtaagactgtgaagcctaaaatgactggctgagaatgaaccagaaatgccatttgccaaacagttgtaactagaaatttgattctcacrgtccattcttttctttgtccttaagatgacattgttagtgttcacgtcccatgttcagtgtccaaaccggcaatgtaaaaagtatcctgtgtggtttaacaggaaatctgtttatgtctctttatttgaaaccagttttactctcagtggttctttaagttcaatgaagtctgccagga

SEQ ID NO: 695549 - DNA, 616 bp, Homo sapiens
caggatcaaagacacacaggagtcctttcttttgaaatgccacgtgccattgtctttcctcccttctttgcttctttttcttaccctctctttcaattgcagatgccaaaaaagatgccaacagacactacattaccctaatggctgctacccagaacctttttataggttgttcttaatttttttgttgttgttgttcaagcttttcctttcttttttttcttggtgtttgggccacgattttaaaatgacttttattatgggtatgtgttgccaaagctggctttttgtcaaataaaatgaatacgaacttaaaaaataaaagctggtatcttaaaatgtaagagagtaagactgtgaagcctaaaatgactggctgagaatgaaccagaaatgccatttgccaaacagttgtaactagaaatttgattctcacggtccattcttttctttgtccttaagatgacattgttagtgttcacgtcccatgttcagtgtccaaaccggcaatgtaaaaagtatcctgtgtggyttaacaggaaatctgtttatgtctctttatttgaaaccagttttactctcagtggttctttaagttcaatgaagtctgccagga

SEQ ID NO: 695550 - DNA, 1162 bp, Homo sapiens
tttgctctgaagtgttcttttgttaatagtgataatcatatttcttttgggacctttgaattttaataattatcaatttaataattaacaaactctttaactcaaagggatgagactttagttatggagacttgtgaagactatggtgggctgtcaggggtgagccttgtttccctgggggagatttgggacaggagatgggtgtgggaggtgtgggctgtgcagtcacactgtgaagcacagtgcccttgaacccatgaattctgcttttgttctgtgtctggatatcagaagtaactttgactaggaccgagacattcttcagtgtttgcctcacmatgctgaaatgtgctttttatcatccttttgaaaagcaagtagtgtctttggactgaaagcattgtccacccccaaactatgcctcaagattgcttggcccactccaaagcaaagcagctcaccaagccactggtaaactctgtagctttcacatctgacggaaaactcccgcagaaggcaagttaacacagagtagtggggagcgcattgaacgtggagtgaccagagagtggatggtcttggctacgtcagttagcttctctgagccttcattttctcctctggaaaatgaaagtcataatgcctactttagaaggttgtagggacaatgaccataagacattgtgtatgtaaatgctctgtgaatgctaaagcattggacaaatacaaagagttgttgggtctgtgtggaggagacttgacacttgtgagcagaggcagtgtcagaccttgcttttacagctgtcagtctggggtctcgaacttgagcaagcagcagagtccctcggaggtgtgttaagcaggtggctggctgggctccacccacagagtttctgatgcaataggtctggggtagagcccgagaatttgcatttctggcaagtttccctgtaaccctgatgctgtggtttgtggactccactttgagaaccgctgcagtaaatctatcttaatgcatatacgtgtccctgcagtaactcttagagacacgtaggaaccaccattcaccaatcttagcacctcccaacatttacccagaaccatgtcccatttttatttggggcaatgggctgtcctcttcaatgtctgctcaggtaataca

SEQ ID NO: 695551 - DNA, 644 bp, Homo sapiens
tatttatattttcccctaaacagtttacttttaaaatgacgaatcctctctctttttctgcagaatgtatccgttgcctacattgggatattaatcggtggagactacattttctctttgttaaactttgtagggttaaatatttggtgagtgggaatttttaatggactcgctttgggaagacaagaaccttaaacactctgattaatatgtaataagcaaaagagcctggagaagtctttcaygttaagccaggaggcgttttgacattctaatttctaagataattttacttcatcactgggttcatcctcatgcagatccatggggacacgtgtgatggcagtttgcggggctgggatcggaatttaactcacctgtcttcctcacagcaggcccctgcgttctctgccctcctcctataaagtggagggtgttaacctttgtgcccactaggctcggcatgcagggggtgtggactaagccagctttgaaaggcatttggggtctcagcagtgggatactatttaaggctaagggtatgtagtttattcagtagaaaccaagtgcttattttctctctgaggttctgcattagatttgatgactctttttctgcctccaaaggcttgtaaataagggga

SEQ ID NO: 695552 - DNA, 597 bp, Homo sapiens
tggaaggctgcaaggacgcagagggaacacgtctatcaaaacggccggcttctgatgctgggccctggggtcccaagccctccaaagataagagaatcaggcgagaaacaagagcccagcacttttccgcagaaacaaaaggtcagtgaaacttggcaggcctccctgttcctgaatgattcccagaggatagtaaatttggaaagtggtcagtgttgaaatccagacatatgggcctggctgctgaagcctggctccctcctgttgcctccacaacatgtgagagtgaaatatacagakttgagggcacggcattcaccccttgccattaatttcgattaaataaacttagcccagacgtagggctctactgttctgctatagccaaggtgtgcgggaaacgccagctctgccactcactggtcaagtgaacccacacacatgagttaagttttctctgcctcagtttcctcatctgtaaaatgaaggcaatactaatagtacctacttcttcagttgttatgaggctttacatagtccctgactacaattagtgttcaatgaatgatagctattatctactactaatgatgatga

SEQ ID NO: 695553 - DNA, 597 bp, Homo sapiens
tggaaggctgcaaggacgcagagggaacacgtctatcaaaacggccggcttctgatgctgggccctggggtcccaagccctccaaagataagagaatcaggcgagaaacaagagcccagcacttttccgcagaaacaaaaggtcagtgaaacttggcaggcctccctgttcctgaatgattcccagaggatagtaaatttggaaagtggtcagtgttgaaatccagacatatgggcctggctgctgaagcctggctccctcctgttgcctccacaacatgtgagagtgaaatatacagatttgagggcacggcattcaccccttgccattaatttcgattaaataaacttagcccagacgtagggctctactgttctgctatagccaaggtgtgcgggaaacgccagctctgccactcactggtcaagtgaacccacacacatgagttaagttttctstgcctcagtttcctcatctgtaaaatgaaggcaatactaatagtacctacttcttcagttgttatgaggctttacatagtccctgactacaattagtgttcaatgaatgatagctattatctactactaatgatgatga

SEQ ID NO: 695554 - DNA, 643 bp, Homo sapiens
ttttaaacattttgagtatcctatcctgtttttgtttttaccaacaatcttayatagaacctcaaatataaataaaatagataaagctggtgttgcattcattgatgtgggtcgggaggagaccagaaactggcctgatgtaactgttgcctgacgtcttcctctgttcaatgtgaaagataaataaatcttgggaccccaaaatccctaagccaatgggacaagtcaagctgggagctgcatcaggtaaacctgcctcccattttattcctaaataagatgactacaaagaaaaaaagctacagacctcctttgcaatttgcccactaagaaattccttgtgtgtcccaagatctttaccctaaaatggttctgtggaattttatcctgacaatgtaaattgatcacttgtcttcacaggacggagagaaaggacaaaactcaaagtcatctctctgctcacctgagacaagtacacatctgattgcttcctctgatgtaaaaaagcagagtcactgagctagacaaggcataagtgactattcctctaccccctcccacatgtgaattgtgtatttggtgaaaggctgatcaaagactcaaaagaatgcaaccgcttgtctcttatctgcccatacctttg

SEQ ID NO: 695555 - DNA, 643 bp, Homo sapiens
ttttaaacattttgagtatcctatcctgtttttgtttttaccaacaatcttatatagaacctcaaatataaataaaatagataaagctggtgttgcattcattgatgtgggtcgggaggagaccagaaactggcctgatgtaactgttgcctgacgtcttcctctgttcaatgtgaaagataaataaatcttgggaccccaaaatccctaagccaatgggacaagtcaagctgggagctgcatcaggtaaacctgcctcccattttattcctaaataagatgactacaaagaaaaaaagctacagacctcctttgcaatttgcccactaagaaattccttgtgtgtcccaagatctttaccctaaaatggttctgtggaattttatcctgacaatgtaaattgatcacttgtcttcacaggacggagagaaaggacaaaactcaaagtcatctctctgctcacctgagacaagtacacatctgattgcttcctctgatgtaaaaaagcagagtcactgagctagacaaggcataagtgactattcctctaccccctcccacatgtgaattgtgtatttsgtgaaaggctgatcaaagactcaaaagaatgcaaccgcttgtctcttatctgcccatacctttg

SEQ ID NO: 695556 - DNA, 537 bp, Homo sapiens
ttgccccagccccaygcaacccacactgcacactgtgattgctctctgcctcttttcagctcatctctggctggcgtagactctggttggaccagtctccccaggcaaagcttctcatgccaggtacctttgtgggccagtgaccagcctctttttgttccctcagctgtggacaacaggggagccatgggatgcatggcatgggcacctggggctacccatacgtgggggatgtttccttttgcaggtgctacgggactggcaggtaccagtagcaaaccacacagtgatgcagaccagccatgcccgctgcccacatgctcagaggtacttagaggaggggaggatggccattcagggctgccagtgatgtgtcaagcatccttttcacgtactcctcgcctcaaccttgggagggagacccatggactgtccaagcctatctcccttccctccaggcacacagctggatggcatttcctagcatcctttgcagttcggtggagccatgtgctgaattctggccatgaagtgtgc

SEQ ID NO: 695557 - DNA, 537 bp, Homo sapiens
ttgccccagccccacgcaacccacactgcacactgtgattgctctctgcctcttttcagctcatctctggctggcgtagactctggttggaccagtctccccaggcaaagcttctcatgccaggtacctttgtgggccagtgaccagcctctttttgttccctcagctgtggacaacaggggagccatgggatgcatggcatgggcacctggggctacccatacgtgggggatgtttccttttgcaggtgctacgggactggcaggtaccagtagcaaaccacacagtgatgcagaccagccatgcccgctgcccacatgytcagaggtacttagaggaggggaggatggccattcagggctgccagtgatgtgtcaagcatccttttcacgtactcctcgcctcaaccttgggagggagacccatggactgtccaagcctatctcccttccctccaggcacacagctggatggcatttcctagcatcctttgcagttcggtggagccatgtgctgaattctggccatgaagtgtgc

SEQ ID NO: 695558 - DNA, 537 bp, Homo sapiens
ttgccccagccccacgcaacccacactgcacactgtgattgctctctgcctcttttcagctcatctctggctggcgtagactctggttggaccagtctccccaggcaaagcttctcatgccaggtacctttgtgggccagtgaccagcctctttttgttccctcagctgtggacaacaggggagccatgggatgcatggcatgggcacctggggctacccatacgtgggggatgtttccttttgcaggtgctacgggactggcaggtaccagtagcaaaccacacagtgatgcagaccagccatgcccgctgcccacatgctcagaggtacttagaggaggggaggatggccattcagggctgccagtgrtgtgtcaagcatccttttcacgtactcctcgcctcaaccttgggagggagacccatggactgtccaagcctatctcccttccctccaggcacacagctggatggcatttcctagcatcctttgcagttcggtggagccatgtgctgaattctggccatgaagtgtgc

SEQ ID NO: 695559 - DNA, 3282 bp, Homo sapiens
cttgaacccaggagttcaaggttgcagtgagctatggaaaaaagaaaaagattaaacacaaccatctctgcctgacttttctgtaaaactgtgatctcttcaggaggtctttctgaactcttgatgttgaagtccttgtagacacctgctagccaagcacagaacagcagtgatgctcccagccttctagaaatgaggaggacccagtccatttcaaaagcagcccagaggctgattttagaggccttgctcctaacacagccagcattgctgggaaggttcagccgccagtgctcagggcctgggactgtggggatttcaggtgccggacagtgatcacaaggctcgtctggcacaagggactcatggggctgctccgggcaagaggggctggggaccctcacgatgtcagtgcatcccaaatgatgaggacacgtcgtgacattgggactgagcgtgcatgaactcaggccagcgttagccacgcggccagggtgatgattctttccttctttccctcaaagcaattttgaggcattttccacaaggtcacctgagggtcccctcggggagtgaacagcagactggggacaaggatgaggctcagggtgcctaagtttggggctctttcacagggtacggagaagaccaacccctgcacaggggtcaatactgtaaactggatgggatctcaaggaaggagggctgaatctcttcctcctcggcttgggaggaagtgtaacaggcttgtacaactcaggccaggctctcagtcccagatctgtgccccacttgcttgttgatcttgggcaatactcagttcttctgagctccagtttctctacctatgaaattggaggtaatagagcctgccttgcaggtggctgtcaggactaccttccatagggcatgtgaagctttagctcagggcacaccatggctgtagctcaggagttttttagaggtttgcaggctccagtgctggagacagtgatgaattggttaaagcctcaaaatggtggcctaaattaatagggattttcagccacttgagactgtttgaaaggaaacaatggctacccctccctttccttctccccctctatagaccctgcatgaggaccgccacccacacttgttctaggagctggaagggtaaggctctctggcatctgctgcagcttgcaaggatgccatcctgcccagtgtctgagctcagaggacccctcccctagggaaggaaagggggtgaacctgaatggcacgcagcccaagataacaggggtggagggggaggccaacagctctttaaacacttgtccatgcagagggaggggaagagaaggaaatgcttctggcagtgccattgcacacccctctgcgggagccctggtttctgatgagcaaatatacacgacagatggggatgacatcattagtcccacagagccagctctccctctagctgggggaccacactgctgaggccatcacacaagctgggcaacacccactgaggagctggggatacatgacatcatcgcagccgccgccttctgtggaccacgcagccagccctcagggcgacccttgctggactgaaccaagccaggtcttcccttctttgagaatggggcccagctctaagctgggctcagaagctctcatttgggaatttggagtagagattccatttctaggtcatagaagttctctgctggatgtgtcaactgaggccagggaagcctggggctgtgtggctaatgtgaccacacacattgaaacggtgacagctgtgctgccaagaaaatcgaagcagaactatgctagtgaagcagggagagggcggggacagagggggccaggcaagtcccagaagtgtggagcagttaggggagctaggagaaaaccgaatttccaggagaactctccttattacttttatgacagatttaccgttggaaaatattcaaaacttcagctccaaccctgggctccaataacatcatatattaaaatgtctggtccaagaagtgtgctgaattactcctgctgggcaaccccagcttccaagtcattctgggagcatgaacagagacagtgtgctctagacagggatccttagacaatcactctgtggaaactaggcaagttctgctgaaattcacgtatccacctcgctctacacagatgttgctgcaatgctgtcctgcgtgccaggacactcgttcccctctgtcactgtgatcaggccagaaggtcaactgctgccatctaaagaggagaatccctcaggctacatggagaccggacctgagattgtatagaaactgtaaaggagaggtcagctgatgargctttaaaaatgatcacgtgtaatgacaaaacctggctcccagaagtgtccacatacctggctggcctatcttttatgaaataatgaggccactgatttgattctggtctaatgctgaaataaaacatactgccatttcaggttataaaatgcacttcctgacaacagtgcaacaaaggcttactgtgtttgtttttcttctctggtagaggaggtggtttttctgggtcaccggttgactcaggagcagtaaaatcacccacaaattcgacaggggctgaggaacctccatgctgaaagggcagaatagcagcaaagggcgcgtaggggacggatgggatcggggctgtgctctgcaggtcctccccagagatgttgtcatactgcgagggatgccgctcgtaggacaccctgcagccagagccgtccgccgtctgggaggctgcgctcctgcgcttcttctcggggagagcaggtggcgtatctgtctgctgccctggggccagaggtccgtctggctggggatggccgccaagaggcagctggaaaggagggccaagaaatggagacccagactcccccaaagactctggcaacgggctaaggttccaggccgtctgctgaggtatctggtctgcgttagagaggtcttgctggaggaattcatagtcgggatcatagtggtctgcagttacaacaggggaaaaagagacccgttagccacaggccctgcaggagcagccagctccccccgcccgcctctcgccggctcgctcatgggtgtgtgacaaagacctgtctccagggcttattttatattcacatgttatattcttcattcttctccctgattataaaagcaaaccagatgggaatatggctgtttgctatacttttattttttacatttcttatttaaaaaaaaa

SEQ ID NO: 695560 - DNA, 588 bp, Homo sapiens
tctttacctcactgggccgttgggaggatgtcatacagtactgcacatacagtgagtcactaagcccagtcctggcacttagttaacattcataaatgtcatctgtggccaccagaccgttcaaaaatatactcctttttgggataaatgccaccatcttcagtggacagctgytatttcttaacacaactggctttaaaaatagagaaaaattctaataacttaagcatctcctaggatttaaacagaacccacagccctcgtcaggtaaacttttccgcgtgaacaaagcatggagatgatgtccagggagcccctcccttacctgccagagacgtgaagagaattcccagactcgctcctcttataaaccacagatgctgcttgaggggatggaagggacgcctctgagactcagagcggcttccctcccggagcccaatcaagtggttaaatcagcagcggctgtttttaaacttcctctcagaaatttttaaattagatattaaaatttagatttttaaaaaacttacaatttaagaaatccccttagaagccaggagtggggcttctaatatgtggggagct

SEQ ID NO: 695561 - DNA, 625 bp, Homo sapiens
tcaaattaaagaatcaagtcacaaatattttgtatcccactttaccaagtggcataaaaacatattttcttccagagaaaggtttaagatgtctttgaaactcyaacatgaaaactgtttcatttccttatcatctgtttatcatgtgatcctgaaaagtccaatttcaccctttgcacacatttgatactgggaagtaagtaatgccatcacgtacacagcattcagctgagtttcactgcaagaggcactgtaactagatgactatgcggtctggaatattttggactatttttccttcctaatttgttcagctcaaccatgtgccaaatggtgttagagaattcctgttaaggagaagtcatcttcctttcacatagtaagtgtcaaagcaaaagaaggtgtgctaatacgatgtcaacctaggcacagcaccaccatagtacggcttaaggaagagaagaactgagagcactacaatttttagatttgtgtttcagaagcatcttgatgcttgataaaacaggagaacgatacaaagagtcacgctgttgggcacacccactgtgtcacctcctccatgcctcataatttcctggccagtttaacatcaaatcctaattaa

SEQ ID NO: 695562 - DNA, 625 bp, Homo sapiens
tcaaattaaagaatcaagtcacaaatattttgtatcccactttaccaagtggcataaaaacatattttcttccagagaaaggtttaagatgtctttgaaactctamcatgaaaactgtttcatttccttatcatctgtttatcatgtgatcctgaaaagtccaatttcaccctttgcacacatttgatactgggaagtaagtaatgccatcacgtacacagcattcagctgagtttcactgcaagaggcactgtaactagatgactatgcggtctggaatattttggactatttttccttcctaatttgttcagctcaaccatgtgccaaatggtgttagagaattcctgttaaggagaagtcatcttcctttcacatagtaagtgtcaaagcaaaagaaggtgtgctaatacgatgtcaacctaggcacagcaccaccatagtacggcttaaggaagagaagaactgagagcactacaatttttagatttgtgtttcagaagcatcttgatgcttgataaaacaggagaacgatacaaagagtcacgctgttgggcacacccactgtgtcacctcctccatgcctcataatttcctggccagtttaacatcaaatcctaattaa

SEQ ID NO: 695563 - DNA, 565 bp, Homo sapiens
tcactggaatagattcttgaatttattgtatctgagtaaagtcctgggaagctgacagagttacctccagcaactcagaagagcaccaaaaataccaatgtgaagagatcagggacctcaagctaaagatctcaaaagataagcattaataattaaccttccatggatagtctttttatggtcttgcctatgattgctgttcttaccttcattctgttctataccatggggtacagtaatgttttcagaatgattagtgtatttcacttcttatttctgttgtccttggcactagattctttccttttaaccccttgttgyataatacacatatttgatccatgcatacttaaccttgtaaaacttgtgtcttcttgcctagatgccatcgaactccaaacagtcaggaaaccagcgccttggatgatggttcccttttgctagggacccttaggtagacttctgggaggaatctgacagctcgttctccccaaaaccacaccccctgttagcaagaagtagctaaaatcaggcatcgtccgtattctagtggcaattagatgtg

SEQ ID NO: 695564 - DNA, 285 bp, Homo sapiens
cttatgtaaatcyggtaaaagaggaagtagccacactttctcagattccctctactagggggatggaatggctacagagaaacctcactactcagggacccataaatgaaaaaactgcccagaacattagttcaatgaggaggaaaggaggtgcaaagtttatacgtcattcaaaggggaaattgattcccatctaccgcccaatttgagaaatgcatcattaggccatctcattgttgtgtgactatcatagagtgaacttacacaaatctagatggtagagcc

SEQ ID NO: 695565 - DNA, 736 bp, Homo sapiens
gcagccactaactgagccctagttcctgttctaaacmctctctcccatcagaggtttgcctaaaattatacggtctcaattttcttactgaaaattcactgggatcccaaaattaaaaatcaaacctacaccaaaacaaaaccttaaacacaattagcacaagatgacactgactatccctctatctatcccagggtttctcaacctcagccctcttacctttttgggcccaatataattctttgttttgaggggtctatcctgtgcactgcagcatgttcagcagcatctctggcctccacccactgcatgacagtagcaaccctcctccagcccctagttacaaaaatcaaaaatgtctacaggctgggtgtggtggctcacacctaccatcccaatactttgggaggccgaagcaggactgcttgaggccaggagtttgacaccagcctaggcaacacagtgagactctgtctctacaaaaaattaaaaaattagccgggtgtggtggtacagctagttgggaggctgaggtgggaggattgcttgagcccaggaggtggaagccgcagtgagccgtgatcatgccactgcactccaacctgggcaacaaagtcagactctgtctccaaaaaaaagataaaaaattgtctacagactttgccaaatgttccccgggaaacaaaactacctgaaattgaaaaccactgctctaggctatctcatttattgctca

SEQ ID NO: 695566 - DNA, 736 bp, Homo sapiens
gcagccactaactgagccctagttcctgttctaaacactctctcccatcagaggtttgcctaaaattatacggtctcaattttcttactgaaaattcactgggatcccaaaattaaaaatcaaacctacaccaaaacaaaaccttaaacacaattagcacaagatgacactgactatccctctatctatcccagggtttctcaacctcagccctcttacctttttgggcccaatataattctttgttttgaggggtctatcctgtgcactgcagcatgttcagcagcatctctggcctccacccactgcatgacagtagcaaccctcctcyagcccctagttacaaaaatcaaaaatgtctacaggctgggtgtggtggctcacacctaccatcccaatactttgggaggccgaagcaggactgcttgaggccaggagtttgacaccagcctaggcaacacagtgagactctgtctctacaaaaaattaaaaaattagccgggtgtggtggtacagctagttgggaggctgaggtgggaggattgcttgagcccaggaggtggaagccgcagtgagccgtgatcatgccactgcactccaacctgggcaacaaagtcagactctgtctccaaaaaaaagataaaaaattgtctacagactttgccaaatgttccccgggaaacaaaactacctgaaattgaaaaccactgctctaggctatctcatttattgctca

SEQ ID NO: 695567 - DNA, 598 bp, Homo sapiens
ttatttactagctaaataaatttgagcaggttgactaatctctttgtgccttgattttccaacatattttacataggaaatagtggtaaatctgcctcatagtgttgttaagattaatggattaataatatatgtaaagcacttacaaaagtacctggagtatgacacayactaaatgaatattattgttttatgtaaatccagttttgacagaccttaaaaatatttaattgctctaacattaacagtaatacatacaaaaattcaaacaacacataaattaataaagaccccccctataatcttctgttgaagatatatgtgaattttaaagtgattttacagttttagtgggccattttggcatagctgcataaaaatattctacattgatccaatgtaaggttatatggcatgatttgtaaataaggtctgagatatgcagttctttccattgcatctccctatcaatatacacaagcacttttgatgtaatggtaaattggaggtgggtggggactacattctatagtcctatatttagatctcagtcttttagtgagcctgtatccctagtttgtgaccctgacatgtactt

SEQ ID NO: 695568 - DNA, 598 bp, Homo sapiens
ttatttactagctaaataaatttgagcaggttgactaatctctttgtgccttgattttccaacatattttacataggaaatagtggtaaatctgcctcatagtgttgttaagattaatggattaataatatatgtaaagcacttacaaaagtacctggagtatgacacatwctaaatgaatattattgttttatgtaaatccagttttgacagaccttaaaaatatttaattgctctaacattaacagtaatacatacaaaaattcaaacaacacataaattaataaagaccccccctataatcttctgttgaagatatatgtgaattttaaagtgattttacagttttagtgggccattttggcatagctgcataaaaatattctacattgatccaatgtaaggttatatggcatgatttgtaaataaggtctgagatatgcagttctttccattgcatctccctatcaatatacacaagcacttttgatgtaatggtaaattggaggtgggtggggactacattctatagtcctatatttagatctcagtcttttagtgagcctgtatccctagtttgtgaccctgacatgtactt

SEQ ID NO: 695569 - DNA, 704 bp, Homo sapiens
agagaaaaaaagctattgctgtgtgaattcaataaatatttaaaaaatttaaaaaatcagtgagcattatttctgccatcatgtgatctgaactatctgagtagtatcataaatcttgggtgatgggttaccttgaccaacctccctttcagtaagaaacaaattattaacagaaagtgaaagagaaataaacctattcaatgtttcaagtccctcagaagagggtgaggcagctccccagwtcgttgctagatccagcctggccaatgaaccctgaaaaagcccaactcctgctttcatcatggaagcacgggacaaagtgtctcttcctaaaaacagaagttagaccagaccccttcctgcctatgattcttcaagaagcattgcatcatcaacatcaggcataagcattaataaagaccctaaataataacagagacgaaacacatcgcaaagagagttttcttttatcccctttaaaatgtaaatactcccaggaggaatcagccaacatcattaggggttaatgcatatgtagaataactagggccaggatataaaataagaaatacgtagggaggagagaaaggcatccttgagacgactccaagaaggaaagttggggatgaggcgaaatttctgattttaccttaaagtgaccctaattcgatgaccttttgtggtttttttcttttttctttttt

SEQ ID NO: 695570 - DNA, 640 bp, Homo sapiens
ctttaaaatgtggctataccattaattaacacaattgaataggacaaatgagtaaattttacttaatgtgtcaattcaacattatgttatagaagtatgtcctaaaaattataaagaaatttaaggtaaaaaaaaaaaaaagagaaatagttatgaaaccaaaaggctttagattacctttcgttctctgcttttgaaaggcctatttgttattgtgttattgacayagttaatagccaaaagaacgaaactctgcccttggttacaaagtctaccaaataaaaactgcaagaatgtaataaagggcatgactatgagcaatgtagaagaaatttaaaaagaaaaaaaaaacaagtctaaatctagtaataacaaataaaaattactacagagattaataccatcaaatcatgtggcaaaaaactattcctttttacagattttctttatgttcaaagataatttatttaaaattatcaaacttagatttcacaacctctgatccatgtctaacataaaaatggttctttataaaaaagtctctgccgggcatggtggctaacgcccgtaatcccagaactttgggaggccaaggcaggtggatcacctgaggtccggaatttgagaccagcctggccaa

SEQ ID NO: 695571 - DNA, 1701 bp, Homo sapiens
  misc_feature 365, 580: n = A,T,C or G
atgtaatccacagaaattaatatgatttaaaccagttaagtataactaaaacatgacaatactaggatagtcttaaagctatttttgagcttgagctttctttaaaatttttttatgttaaaatgcagcaaacatgtatgtaaagaagttttgttgctttttaaatgtaatatgtatatttataaaaacatataaatcaggtaattctgtttttctaacgtgaaaatctttggtgttatgaaaatttgcaaacatggaaaaccttgaaaaaacagtacaattaacatccatatcctatccacttagactcaacaattgttaacattctgtcatatttgctttgtgtgttatgtgtgtatttttcncccctgaacatttgaaagaaaactataaacrtcaactacttgacatctaaagactttcttgtacatcacctaagaataaggacagtgtcctaaataaacataataaccttatcccaccaaaggaaattatgcctatttccttaatatcatgtactctcagtcttgtttaaatgttttcaccacatgtctatagaattttttgttctttaataaangcatcaaatcaggattcactaattacatttggttgtttagtctttaaatatattttacatgaatttatcttatttagtgataaatgggtttatatttttttgcctcaagattctccctgtcatgtctcttgttgatatggaaacaatatttatataatacaggaacatgaattttggacaagattctgaagtgaaccattagcagagacaagtacggtttgctgtgtttcaaaatattggttattggtgtgacctcagcctgaaaattatataaatgaataattatttattttataggttcatatcgagggattttttaaaaatactttgaatcattctcgttttcattttcttttaggaattcttttagttggacccccagggactggaaagacacttcttgcccgagctgtggcgggagaagctgatgttcctttttattatgcttctggatccgaatttgatgagatgtttgtgggtgtgggagccacccgtatcagaaatctttttagtacgttttggtgtatctttgatgcagtgctaaattttgttaagggaagtgtgtatcttaccctttctttgctaattactttttttcttcctttttttaatttctattttttggggcctccagctttgcatgctaattagttttgattgatagttaaaatagccattgtgggaccttggtttgggtaacttactatatgaattatcggaagagctagtggaagtgcaagatgaagttggaggctaccaaaaatctcttagtgttttttcattttattcatcaattttgtagtatggaattaaggagtaattagcttcaaacctgattgtatatatttgtatagctggaaagaatgaatgaatgcccaactgttttgttttatatcatttctttggtatagttttttcccccctgaagatactatttttaagtcagtaaaaaatgacgtccttttctttcagtgaatattttttgttggcttttgacagttgtataggattttaatatttatctcgttttgttcaaaagtgttgactttctttcagcttatttgaatgttttttgttttcttaggggaagcaaaggcgaatgctccttgtgttatatttat

SEQ ID NO: 695572 - DNA, 1701 bp, Homo sapiens
  misc_feature 365, 580: n = A,T,C or G
atgtaatccacagaaattaatatgatttaaaccagttaagtataactaaaacatgacaatactaggatagtcttaaagctatttttgagcttgagctttctttaaaatttttttatgttaaaatgcagcaaacatgtatgtaaagaagttttgttgctttttaaatgtaatatgtatatttataaaaacatataaatcaggtaattctgtttttctaacgtgaaaatctttggtgttatgaaaatttgcaaacatggaaaaccttgaaaaaacagtacaattaacatccatatcctatccacttagactcaacaattgttaacattctgtcatatttgctttgtgtgttatgtgtgtatttttcncccctgaacatttgaaagaaaactataaacgtcaactacttgacatctaaagactttcttgtacatcacctaagaataaggacagtgtcctaaataaacataataaccttatcccaccaaaggaaattatgcctatttccttaatatcatgtactctcagtcttgtttaaatgttttyaccacatgtctatagaattttttgttctttaataaangcatcaaatcaggattcactaattacatttggttgtttagtctttaaatatattttacatgaatttatcttatttagtgataaatgggtttatatttttttgcctcaagattctccctgtcatgtctcttgttgatatggaaacaatatttatataatacaggaacatgaattttggacaagattctgaagtgaaccattagcagagacaagtacggtttgctgtgtttcaaaatattggttattggtgtgacctcagcctgaaaattatataaatgaataattatttattttataggttcatatcgagggattttttaaaaatactttgaatcattctcgttttcattttcttttaggaattcttttagttggacccccagggactggaaagacacttcttgcccgagctgtggcgggagaagctgatgttcctttttattatgcttctggatccgaatttgatgagatgtttgtgggtgtgggagccacccgtatcagaaatctttttagtacgttttggtgtatctttgatgcagtgctaaattttgttaagggaagtgtgtatcttaccctttctttgctaattactttttttcttcctttttttaatttctattttttggggcctccagctttgcatgctaattagttttgattgatagttaaaatagccattgtgggaccttggtttgggtaacttactatatgaattatcggaagagctagtggaagtgcaagatgaagttggaggctaccaaaaatctcttagtgttttttcattttattcatcaattttgtagtatggaattaaggagtaattagcttcaaacctgattgtatatatttgtatagctggaaagaatgaatgaatgcccaactgttttgttttatatcatttctttggtatagttttttcccccctgaagatactatttttaagtcagtaaaaaatgacgtccttttctttcagtgaatattttttgttggcttttgacagttgtataggattttaatatttatctcgttttgttcaaaagtgttgactttctttcagcttatttgaatgttttttgttttcttaggggaagcaaaggcgaatgctccttgtgttatatttat

SEQ ID NO: 695573 - DNA, 1701 bp, Homo sapiens
  misc_feature 365, 580: n = A,T,C or G
atgtaatccacagaaattaatatgatttaaaccagttaagtataactaaaacatgacaatactaggatagtcttaaagctatttttgagcttgagctttctttaaaatttttttatgttaaaatgcagcaaacatgtatgtaaagaagttttgttgctttttaaatgtaatatgtatatttataaaaacatataaatcaggtaattctgtttttctaacgtgaaaatctttggtgttatgaaaatttgcaaacatggaaaaccttgaaaaaacagtacaattaacatccatatcctatccacttagactcaacaattgttaacattctgtcatatttgctttgtgtgttatgtgtgtatttttcncccctgaacatttgaaagaaaactataaacgtcaactacttgacatctaaagactttcttgtacatcacctaagaataaggacagtgtcctaaataaacataataaccttatcccaccaaaggaaattatgcctatttccttaatatcatgtactctcagtcttgtttaaatgttttcaccacatgtctatagaattttttgttctttaataaangcatcaaatcaggattcactaattacatttggttgtttagtctttaaatatattttacatgaatttatcttatttagtgataaatgggtttatatttttttgcctcaagattctccctgtcatgtctcttgttgatatggaaacaatatttatataatacaggaacatgaattttggacaagattctgaagtgaaccattagcagagacaagtacggtttgctgtgtttcaaaatattggttattggtgtgacctcagcctgaaaattatataaatgaataattatttattttataggttcatatcgagggattttttaaaaatactttgaatcattctcgttttcattttcttttaggaattcttttagttggacccccagggactggaaagacacttcttgcccgagctgtggcgggagaagctgatgttcctttttattatgcttctggatccgaatttgatgagatgtttgtgggtgtgggagccacccgtatcagaaatctttttagtacgttttggtgtatctttgatgcagtgctaaattttgttaagggaagtgtgtatcttaccctttctttgctaattactttttttcttcctttttttaatttctattttttggggcctccagctttgcatgctaattagttttgattgatagttaaaatagccattgtgggaccttggtttgggtaacttactatatgaattatcggaagagctagtggaagtgcaagatgaagttggaggctaccaaaaatctcttagtgttttttcattttattcatcaattttgtagtatggaattaaggagtaattagcttcaaacctgattgtatatatttgtatagctggaaagaatgaatgaatgcccaactgttttgttttatatcatttctttggtatagtttttycccccctgaagatactatttttaagtcagtaaaaaatgacgtccttttctttcagtgaatattttttgttggcttttgacagttgtataggattttaatatttatctcgttttgttcaaaagtgttgactttctttcagcttatttgaatgttttttgttttcttaggggaagcaaaggcgaatgctccttgtgttatatttat

SEQ ID NO: 695574 - DNA, 642 bp, Homo sapiens
tacagatgattttcagtacaagatttcaaaagatgatctttattaaccaagaatgttcacttcaatatataatttccaaataacattttttaaaattattatttgggttctgaattatatcaaatgctttcacgtttattaatgtgaycatatgatttctcttctttaatctgttgatgtaataaattatggggaggtcatttttgatgttgagtcaccctgcattactggacccactctgatttgatactgatttattatccttttactgtatttctagacataatcttttattttgtaatttcacatttatgtttgtaagtggaagtggcttacagctttcttgctcatttcgatatcaatgtcatgctagcctctttaaaaaatgagttggatacttctaatctttctctttgacccggaaatggtaatgtgaatttggatgttgcttacatttgttagaatttgcctgttggtgtatggaaaatgatactgaaatgatactgaaaatgatactgaatttctactttttttgaaggactacttcttccattatgactccattttatctgttattagttttatctctcataatttatgttttactagaaaaacgtccattttatgtagcttgtcaagggt

SEQ ID NO: 695575 - DNA, 3778 bp, Homo sapiens
gtatatatgtaagctctgtttccatggtggtgggtgggttatatggaaaacatcatccaaagcagacatacaatttcccccaaagtagaatatttattctacaaatcttgcaatctgttttcataagagatgatacaaggactaaagtgccacttcattgatacttacttcattattttaccagaggatgagatcaacttaatagaagataattacattattggctttggggcttcaaagaaagaaagaaatcagttttacatttgctccttcttaattccctaactcttcttgggacttttgaaaagataattgcctgtaattcagaaaagttcatgaactaatttacttaagaccctagaaacacacataagatccaaggaagaactaagaacaccatttttcatcttttccctaacaagattatggaagacaggatgattctaaagatgctgtgctaaaataatatgacaaatttttttcagtttgtggatgtctgtacaaagcataaataaagtaatatatttcatagtattattactaggcaacatgtgttttagcatttttattgtaaaagtaatatatgttcgtgattttttaaaaggcaaaagtgtttacggtaaacagcaaaatccccttccctgacccacctctgaatgtatactaaagtttttctctaaaacgaactactataaaagcatgtatccacatataaacacatatatatcctggattttggtacacaaatagggttttatttacattctcttgtttaaatgttgtctacttcacatatctcttggatatatttcttgctaaaatatacatccataacattattcataatggatataggtatcatggatataaagcatatggcccagctaataaatcttaaacatacatattatacctgactcagcaattctgctagtagggttgctatgctcttttatggctatataataatttatgtcactagtatcctattaatggatatttaggttaaaatgttttgctcttatgatcaatattgcacttagtgttgttgaacctgtatgtttccatatatcaggagcctactataaaataaattcctactagtaaaactgctgaaccagaggatatatgtattttttaaatatgctagttagaccgtgtgcattatgtccatgaatatgaatgattaatttctagatgaaattcatagcaaaacataaattcaattctatttgaaatgggacagatgttataattaatgattggcttctaaaatctgagggatctcaaaataaattctttattttactctaaaacaaaagagtttacagttccttgtttgaacattgcacagaaagattgccatgcactgaatttatttaagagacatattttgaatggtgctccatgtttacatatttcaaaaactccagaaactaaatcctgtctgtgaaacagtgtagaaaagaaatacttcacaagagttaattatttgggccacaaaatataaaataaaatctctcatttccagtggatgaaaattggcgcttctaaatcagagtgctagtaatgttcaacaatttgagcacaacacatgattggctgtgaaacagtgtacagaaacatgtagctccacctgttcagatattcaaaagtcatttcatggttattataagataaatttatttggacatgcctagtcatgcatgcattagacatgtgtctcagccaaaataaattgcatttcattataaaatggaaaaccaaagctcacaataggtccatttttcttattttgttctttttcaaatcaattattttacttcctccattctctgttttatttatttgtctttgtctttctctatctctgtctcttttaatgtaagaatatctttaagaaaagtttctaactatacgtttctaattatacatttaaaracagcatgtatgtgcatacattcgcacacacattttatatatatacacacacacacacacacatgctctttaaatgttaataattaatcacataaccctccttttggtggctttggtctcactgtcagaattgctaagtaggaaggtacaggcagccagtgatggctcccttgtcaatctcagtgagcctgagcagtcgctggagcttgcagtatcagttgctaggcaacctgttcatctgctgtgcctgatatttcaattcggcagcagtaaaggtctgttatgttatggcctttcagaactaccttcattacataatatctaccattataataaaggagctttaaatgtttaggggtgtgagagtagcaaggaaaatcagtgcagctgtgccactcagataatgtcaaggtagactttctgcatataaaaaagtataaaattatgacatatttaacactcagtccttcctggcagagaactaaaaaagcatcctaccagactatttacttgatgatatcaaatcaggtcttgttaccattctagaaaagtttctaactgctgctataatgaaggtaaaacagcaatggcctacagaaataagaagaatattaatgttctggatataataaatgaggctagcgtgtctagccaagtatttgtttaaagggcacttcttgagaacaaacttttttaagtctgaaaagcagcagctatgtaagtattccaggttgccaatcttgctaaatcattttcctaaataaaatgtctgggattctatgacattcattggaaatgatttcaaatagtctactctttaccctgagtttatttagaagaagcaaataatcgttgtaacaagatggcttgaatcacaggtttgctaatttatccactcttgtccaagttttctgtatttataaaaatagaacttgtctttgtattcgggctacaataacaaaaatattatgaactgagtggcttataaagaacagaaatttattcattacagttctagaatctggaaagtccaagatcaagataccagcagatttgatgtctggggagggccaatctgtttcatacatggtgccttctatgcatcgtcatttggtggaaggggtgaaccaacgacctcaggtctcttttacaagaacacttatccaattcatgagggctctgctctcatgacttaatcaactcccaaagcctccaccttcaaataccaccacctttgagattaggcttcaacatatgcatgtagggtagggggaacacaaacattcagaccatagcgcaagtgtaccaattagaatatagttttagatcagtaaccaaaataatcctaaagatacagtgtcttaaacaatatagaatcttatttttctcccacataatagtttcaaaagttcaggcttaatatagtcccttctgtttttcacattgccatcttcaacttgcagtttctatcttgtggtctaagatgaccattgaacctggattcttgcctaagcaaagtgcatctacactccaaacctttgagagaacggctagtagttgtacttattacttctactcacattccattgaacagaacttggtcacgcttaactgcaaggagactggggaatgacattgtctattgggggggcattttctgtctggctaaaactctgggtagctattacaaaaggaaaagtagaaaagtagattggaggacaaccagctgtctgcaatgagaggaagcaagagcaatgctactacataatacttagtagtgttgtgtagaagaagtaatacaattgtcttaaactgtacaaataaaattcctttgaga

SEQ ID NO: 695576 - DNA, 1072 bp, Homo sapiens
agagtgagcaaacagacatacaggatctagagacagggctgcctttatggttgttgtcctaacataattactgctagtgacttctttgaatttctaaggttttctagtttggaaaataagtcatacagtatccctataactagaaggaagaaggctattggcctcaccccattcaaggccattggcctcgaaacatctgcaaaacaggtatttaggagcaagagcatactcaacggatctttcttccactgcaaaaggttgctgagtgaaacttgctattgcatgcccattgtgggcagtggaactttttcatgcatataaggagttggtagtcattttcataagtatcatttgcgagcatgaggacaagccatatcttcaatccccatatattgctgttccctagagaaggaaagctccttgaggacagggaattttggtgtttatcactgtgtctctactgcctaaaatggcatttggcacaggacaaatgtttaataaatattttttgaatgaataattccagaagtcaatgctgtccttcatgactctttagagaacatgttatatatgaatgcattattaagggaaactatatttcatttacgtggttgttgctcccattgtaacacccaattgaccctgttgccattcttaacttcaggaaatcaagaatcctttcctctgatcctcttctctttctcactggtaggtctttgtctagaaaccatgaaacttccaaatagctaatttactgcaagaataacatcatttttcatcagaaaaataaattacatataattaaatgtgaagaccatgacgtgtccctttcctttcgtttaatcrtttgtttgaactgacactacgtctcttttcccagatgggagagaaatctggtaacaaaataaaatgtgttagtgatgctcattcatttttatttactaagactcgggcttattatctctgcaaattgcaaagctgtgaccttaaatactcgatgtaaatgtggttctttagaaaaaagggaaattaaaatatgaacataatttatttagctagattttcctttttc

SEQ ID NO: 695577 - DNA, 1527 bp, Homo sapiens
ttcacccatgagtttcaggcagggaaacaggcactgacattaaggatcccagacagtttgctactttgaagcattaaatgggtagttacctgttcaattttttctgcctttttacttaggagacttttcatatgttgaaagcacaaagaaccaagtgtaatagtgttcacatcttttctagatagcatgttcctttcaggtgaaggctcaagacctgtatactccctcccccgccccacccctccacccccaaaagaataaaaacatactccaaattgcatgtgattttaggtggtttgaagatcctttaaagcttctccatgggccctgagttaatagctcccattttaaagagtatactttttttttcttcacacagtggaatcttttggacttcttgtttctagagggtcagaaaggcaggctctggatttctgatgtcatcttttcagttagttgttatatttaaaattggatttacaatttactcatcttattgactgatacaataaaatgtaaatgattattagtgttttgcttataaattgcttgactaatttttgcctactatctaaaacatttgccaaaatttctcaaataatcaatgctaagcttaattcatcactgttaagtttaattcatcaccttcttcctctttaaaggaattgacttctctttgtgtagtcatattaacaacaggtattttaatgtcttcgtcgtttgatgaaggattggcagacctaaatatataccagtttggtattatttagttttaaagtaatgattcgtgtgataggttcttgctggtttttaaagtgtgtatctaaaaccatttatgagtaaatttttatataggtaatttaattccaaaaactatgtcaagctaagttaaagaagttataaaacatttatttgtgtcttttagacatagaaagttgtttcactttattttaagcttccttgatatttgcttaagttacatttttaccttgtgaaatagttggaaacaagcatgccattttcaggtattayagtagaattctatttgaaaaagtgctagtcgaaagagttttttttctaactttcagattgctgcttggaaccctttaaattacagaatcatattaatgtgcctatgttacctgatatctgacaaggaatctattagtgctcttccttatagtgccagttctttgtatccctaagttatttatataaaatagataaatttacagtgtctttttttcttcccactagtcatgtgttttatctaatagtaaagattataccttgaaaaataaaatacagagggacctctattttcttgtaaaatttatctgatctcagagacaacaccttgctttacctcattttaccaccaaatacagagttatttcttttctaccaaaaaaaagcacttcaatgcattgatgacatacttatctcattgatgcatattcattctaagacttgtctcatgatgcttgcttgctgctgctgatttgcttatcttaattttttcttaaa

SEQ ID NO: 695578 - DNA, 1527 bp, Homo sapiens
ttcacccatgagtttcaggcagggaaacaggcactgacattaaggatcccagacagtttgctactttgaagcattaaatgggtagttacctgttcaattttttctgcctttttacttaggagacttttcatatgttgaaagcacaaagaaccaagtgtaatagtgttcacatcttttctagatagcatgttcctttcaggtgaaggctcaagacctgtatactccctcccccgccccacccctccacccccaaaagaataaaaacatactccaaattgcatgtgattttaggtggtttgaagatcctttaaagcttctccatgggccctgagttaatagctcccattttaaagagtatactttttttttcttcacacagtggaatcttttggacttcttgtttctagagggtcagaaaggcaggctctggatttctgatgtcatcttttcagttagttgttatatttaaaattggatttacaatttactcatcttattgactgatacaataaaatgtaaatgattattagtgttttgcttataaattgcttgactaatttttgcctactatctaaaacatttgccaaaatttctcaaataatcaatgctaagcttaattcatcactgttaagtttaattcatcaccttcttcctctttaaaggaattgacttctctttgtgtagtcatattaacaacaggtattttaatgtcttcgtcgtttgatgaaggattggcagacctaaatatataccagtttggtattatttagttttaaagtaatgattcgtgtgataggttcttgctggtttttaaagtgtgtatctaaaaccatttatgagtaaatttttatataggtaatttaattccaaaaactatgtcaagctaagttaaagaagttataaaacatttatttgtgtcttttagacatagaaagttgtttcactttattttaagcttccttgatatttgcttaagttacatttttaccttgtgaaatagttggaaacaagcatgccattttcaggtattacagtagaattctatttgaaaaagtgctagtcgaaagagttttttttctaactttcagattgctgcttggaaccctttaaattacagaatcatattaatgtgcctatgttacctgatatctgacaaggaatctattagtgctsttccttatagtgccagttctttgtatccctaagttatttatataaaatagataaatttacagtgtctttttttcttcccactagtcatgtgttttatctaatagtaaagattataccttgaaaaataaaatacagagggacctctattttcttgtaaaatttatctgatctcagagacaacaccttgctttacctcattttaccaccaaatacagagttatttcttttctaccaaaaaaaagcacttcaatgcattgatgacatacttatctcattgatgcatattcattctaagacttgtctcatgatgcttgcttgctgctgctgatttgcttatcttaattttttcttaaa

SEQ ID NO: 695579 - DNA, 1527 bp, Homo sapiens
ttcacccatgagtttcaggcagggaaacaggcactgacattaaggatcccagacagtttgctactttgaagcattaaatgggtagttacctgttcaattttttctgcctttttacttaggagacttttcatatgttgaaagcacaaagaaccaagtgtaatagtgttcacatcttttctagatagcatgttcctttcaggtgaaggctcaagacctgtatactccctcccccgccccacccctccacccccaaaagaataaaaacatactccaaattgcatgtgattttaggtggtttgaagatcctttaaagcttctccatgggccctgagttaatagctcccattttaaagagtatactttttttttcttcacacagtggaatcttttggacttcttgtttctagagggtcagaaaggcaggctctggatttctgatgtcatcttttcagttagttgttatatttaaaattggatttacaatttactcatcttattgactgatacaataaaatgtaaatgattattagtgttttgcttataaattgcttgactaatttttgcctactatctaaaacatttgccaaaatttctcaaataatcaatgctaagcttaattcatcactgttaagtttaattcatcaccttcttcctctttaaaggaattgacttctctttgtgtagtcatattaacaacaggtattttaatgtcttcgtcgtttgatgaaggattggcagacctaaatatataccagtttggtattatttagttttaaagtaatgattcgtgtgataggttcttgctggtttttaaagtgtgtatctaaaaccatttatgagtaaatttttatataggtaatttaattccaaaaactatgtcaagctaagttaaagaagttataaaacatttatttgtgtcttttagacatagaaagttgtttcactttattttaagcttccttgatatttgcttaagttacatttttaccttgtgaaatagttggaaacaagcatgccattttcaggtattacagtagaattctatttgaaaaagtgctagtcgaaagagttttttttctaactttcagattgctgcttggaaccctttaaattacagaatcatattaatgtgcctatgttacctgatatctgacaaggaatctattagtgctcttccttatagtgccagttctttgtatccctaagttatttatataaaatagataaatttacagtgtctttttttcttcccactagtcatgtgttttatctaatagtaaagattataccttgaaaaataaaatacagagggacctctattttcttgtaaaatttatctgatctcagagacaacaccttgctttacctcattttaccaccaaatacagagttatttcttttctaccaaaaaaaagcacttcaatgcattgatgacatacttrtctcattgatgcatattcattctaagacttgtctcatgatgcttgcttgctgctgctgatttgcttatcttaattttttcttaaa

SEQ ID NO: 695580 - DNA, 857 bp, Homo sapiens
ttgtttttgccatctaagagcttagagaaatatatacaagggtaattttcaagatatttgataaagggtagtgccgttggtcagaaaatgctggctggagtaggcacctggaggcctcctgctggccagaaggtaccccttgatttaggactacactgtgtagggtgcgggatccttgggacaatgcctgtttatcagctgattcaggggcatctctgttgtagccatcagttcagccacacattagccctgcatgtgtggcacctaaggattagatgcttagttctgcacataattaagtggattagtgataatctaacgaaagtaaaaaaggaagtaaattctaccctgggaatattccaagataccgtccgtcctttgttcgctctgttccccaccattcctactcagaatataaaacagaagaagcttttcccccctcaagattaacatccctaaccgtgctgttctcccacctcttgtttcaattgtgtttcaggtcgtcatgttggcaatgtacaacttgtctctggaaggaagtggacgtcaaggttatttcaggtggaaagaagatatctgtgcttttattgagaaacaytggacttttttactagggaataggtaatgtgtttttaaaaaatcttatacttcaaggaatatgtaaagaatgaagtatacaggatttgagacagcctaatgtagacttgttagagatttattttaatttttttgagatagagtctcccaggctggagtgcagtggcatgaccatagctcactgcatcctcaacctcctgggcgcaagtagtcctcctgcatcagcctcctgagtagctgggattacaggtgtgcaccaa

SEQ ID NO: 695581 - DNA, 1704 bp, Homo sapiens
ttttgaaacagttggtcaggtgtggtagctcacacctgtaatcccagaactttgggaggccgaggtgggcagcacttgagctcaggagttcgagaccagcctgggcaacgtgggaaaaccccatctgtacaaaaaatacagaaattagctgggcttggtggcatgtgcctgcagtcccagttaatcagggaactgaggtaggaggatcacctgagaccaggaggttgaggctgcagtgagctgagattgcagcactgcactccagcctgggagacagagtgagactctgtcttaaaaaaaaaaaaaagtgtaatattcayagaagttgcaaaattagtgcagagagtcccgagtactcctcacccagcttcctctgctgacgacatgcatcatgacccaagcccacggttgaatgcgggaataggatgccgacacaatcgcacgaatgcaggtgtccaggctttctgcaggtccaggtcttctccagctttccccgggttttcacgtgccctcctttgggtatttttaaatgactcgagagtgactgtgtctccagtagggaagcattccaggtagaaacaggacctttccatagcaatgttcctctaaccccagcagcataaaccaaagcagcccaatggaccacagcaagctcgggattttagtttagttgtgtgggttttctcccatagctttaataaacagcattccccaggtaaatgtttagagacagatggagtcacggctgccatgcttttgggaagccctacagttcacaagtggcttctgggtcttttaatgggtagatataggtgaattcgtcagatatcttgcttctttatataacaccatccaagcaaagtggcgggtgttgtccatcaaatagctcttagctacagtcattagaaactgtttagccatttttaatttgacttttttggtaaagaaaaacttggcattacaactccacctggagagggtaggggtctccccggcagtgaaaggagctcactatttactgaataacgaatgcaaaggtatccacactgatggtcggggacgcagacgggtggtgtctcttccctaaatgggcggcggaagcgtgtggtgccctcctggccccactgtggccatccgtcccccaggaaagtagctgggagaaagccccgggcctgttttctgttgcatgccctgcacgacagctgcaatctgccctggtgtttatagaatgaaccttagtaaaaagttgggctgctgagaggaggctgccagagggaggaagatttacaagaggcctccatggaaggttttggaagagcacgtggcggggaatgacggaggcaaatgccttctctgtgttgtgctggaatgctggaagggtgtgtctgtgcgtgcgaggagcacgccatgccacgcaatcatcacacgtggcaaacgcatggtcacctgacaagagagcagagaccggcgagcagagaccagcgtgggcccgctggcagtgccgcagctccacccaaagacggagtcgcctggatcagtaggccgtggcctgagatgaggcctcctgatggtgagaaagctccagcagcaatgaggaaactgaggcaccgttctggcatggagccgccttcccacctctgtggctagggagagggatggaggatgggcagtgaatggacagtgctggccagctctggacagcag

SEQ ID NO: 695582 - DNA, 602 bp, Homo sapiens
tgtgctgctcgcttgtcaccacccttccgtctttcaggaggggaagccaggagtagccaactgttgaaaacaaagaacaacaacaacaacagaacactgtgagtgtatgaaaacttatgaaagcaagccaatgtaaaaccgtctratttttaagaacttttcctatcaattagagtaagaaatttaaaatgccctaaatgtaatctctgcagaacattgtctacaatgtacttaggccttttcggggttagaattctacaatcttcttttataaaaatgtacatatgcaggctgggcatggtggctcacacctgtaatcccagcattttgggaggcagaggtgggcagactgcttgagctcacgagttcgagaccagcctgggcaacatggcgaaatcccgtctctacaaaaaaatacaaaaattagccagtgggtgtggtgcgtgcctgtagtcccagctattcaggaggctgaggtggaaggacagcttgagctcaaaaattaaaaaaaaaaaaaaaaattacatatgcaacccagacatgctacatatccgttacctataaaattcatttaaagatccctttgcaaaaagatggaaatt

SEQ ID NO: 695583 - DNA, 636 bp, Homo sapiens
tggacctcagaagagaatttaatttttgtcttgctgaaatttcatcgtattgtgtttgagctatttctagtttatcaaagtcctcctagatccagattttaccacctactgcattagatattcctaatagctttatgtcataaaaaatttaatcagcatgttatagtctcataaaagtcattgataaagatactgcacagtatattgccaagaacaggctccttcccaagtctctggaggcccatttccagactgacactagctyattcatcaccctccctagcatctggtttttccagcagttgaacaactgcccactcacgtgtgcagcgcttctttgactcattcacaggctaccacagcacccacacgtggtaaatacattctgctgaagcctttgcactcctctactacacaagcttagcggcgcagttacaaagagagaagaaatgcagttaggatgactagttcaacacgatatgacttagtcttaggaaacacaatgccgcctcacagtccttcctacgccacctgtttcagatctcctttagaacattgccaaagatcaccaaagcacagggactggcagattcagcattggttttgttcccatttttgaaaagttcctacctacaa

SEQ ID NO: 695584 - DNA, 891 bp, Homo sapiens
tgaacaatatagcttggatctatctcaagttttcccaagttgcataatattcctctatgtggatagaccataattgagttaactagtctcctactgataggcagttactgtttctctcccctaactttttgctattataattatgtttcaatgaacatccttttatgtgggtctttgcatgcatgtctaactatacctacaggataagttctctgaagcgaaacagctgtacccaatggtatgtgcatttaaacctctgtgtgaacccttaacagtttagtattaccatcgtttgagttctatcatctaatagctaaccttttttgcattcttatattttacactgaggttgagaaataggtaaagaggtttctcttagggaaaaagccagagtctttggggcctgagataagcagagacggtggctatggggatgctgatggctcatgaagatgtatggccacaggctttcactctacacttgccaagaacaatgataggcaggaatgacatggcatatagactgagaatctgttgtgtgccaggcactgtactacgtgctctcacaatttcacatagattgtgccatctaatcctcaccataatctggggcagaagaaagtccccatttacagatgagctaacagaggctcagagaagtaaagtaattctcccatttaccagtctgaagaatcatggctgagtggggatttaaatcgcgtgcatcygattctaaaggccgcttggcctattagaccagtaataagggtaggtcatgggcttccatctttaggggtttcaagtttagattccagaggaacagactctggctacttgaggctggccatcagggtatggtgagcccccggggagctcagtgcatgctggaga

SEQ ID NO: 695585 - DNA, 1061 bp, Homo sapiens
tttaatactaccagtcaaattccaagtccccttacagtttagacaaaagtatccaatttctatttcaattatttggatgtatggcatctactttctatctcccatgttttaagacaaaattattctccaatactaatgatatttttgttttgtttcattttattcttgtttacttattttacttatatgttatagtatctaattatcttcagagaaaaaaagtcttcagataatctttgaaactaaaattatctttaaagcgtcctccaaaagacaattggctatattttctaattccaaacaaaacattaatccatttagtaacttgaattatattgtgagttcatcagaaagccattttgtcttaaaaaatatatatttcatggaagcatcgtcaaggtttttcttggccaaattatttcagtaacgtttgatgggggaaaacttaggaaattcaataattcagccatatttgttcatgggttagagaggactcaccctttctttcttttttttttttttttcagacggagtcttgctctgtagcccaggctggagtgcagtggcacgatctcagctcactgcaacctccacctcccaggtcccggttcaagcagttctcctgcctcaacctcctgagtagctgggattacaggaacrcaccaccatgcccagctaatttttgtatttttagtagagacagggtttcaccatcttggccaggctggtcttgaacccctaacctcttgatctgccctcctctgcctcccaaagtgctgggattacaggcatgagccactgtgcccggccaggactcactctttcttgaggaaaaacctttttctctagaagctgcttttgctagtaagtcattgtcatcaccagctgtttctgtttttcctaactacagactgcaacaaatgcatttcaggttaactactatttctaagtaattaagttctttctattgtaaattattaataactttcagcatagattccatttattgaatgtggttttaaatgtgtcactttaagaatagcttgtcacatttcaaacga

SEQ ID NO: 695586 - DNA, 632 bp, Homo sapiens
gagcaagtgtgcaccctggccaagttcctttccaagaatccttggaaatgtggaggaaggttctggattttcccaacctcaccaaatcacaattagccaggacatcctaatcatgtagctcacatttatttattgagcatcaagcatataccaggcatcttcatacattatgaaatttaatcctgcaaagtaggtattttatccttagtttatagttgaggaactgaagccagaaaggttggataacaagcctaagatcgatcaatcaatcagttagtaatagagctgcgactgaagcccagatctacctgactccaaagcctgtctttcctgctccacattatactacaccccttctcagagattaaaaaaaaaaaagctctggctgctttaactggtgtacctccaggtcaaccacttccatctccttctcctctttcagatttgcacctgttccctaaccaaagagaggaacaacagcaatagtgttctgtcgggatctgttcagagttaaggccaccaatattgttcaragaattcagtcagcacacccctcccacctcaatctgctgtcccatctctcctcttcatcaccaaacttttttttccaaactttctaaatagtctccact

SEQ ID NO: 695587 - DNA, 2001 bp, Homo sapiens
  misc_feature 719, 720, 721, 722, 723, 724, 725, 726, 727, 728, 729, 730,731, 732, 733, 734, 735, 736, 737, 738, 739, 740, 741, 742,743, 744, 745, 746, 747, 748, 749, 750, 751, 752, 753, 754,755, 756, 757, 758, 759, 760, 761, 762, 763, 764, 765: n = A,T,C or G
  misc_feature 766, 767, 768, 769, 770, 771, 772, 773, 774, 775, 776, 777,778, 779, 780, 781, 782, 783, 784, 785, 786, 787, 788, 789,790, 791, 792, 793, 794, 795, 796, 797, 798, 799, 800, 801,802, 803, 804, 805, 806, 807, 808, 809, 810, 811, 812: n = A,T,C or G
  misc_feature 813, 814, 815, 816, 817, 818: n = A,T,C or G
atttctgatataacaccctagtgagtaggcctatgtaactggtattaaaatgattaatatatactgccaaaatgaaagtaggtttatataatactacaccttaacttgaacacrctagagcttttcaaagcccctatatgaacatcttattctgcagcttttcctgtccaagtttttggttagcttcttgttttccctattgttatcctcaccacaagccaactgtgatgttaaaccaacctgccactgattgttttacacatgctccccagggggaaagctatttgcaataagggagctctgagttaggacaaatcaagacaagccctgggactgggtgtttccagggaactgccagacaggtcaaatatgacagttcttttggagatgagacttttacggtattccaaaccattctttcccttccagtggctgctagtctgctggtttttactgctgctgtgattctgagacttttccaaggcttttgtgaagctggggagacagagtagggaatagagcaaattaaaatgacacaaagctcactgtccatatcaggatctagctgttttccctgaacatactgttgcaagcctttggttaatttctagagttccaaaaaaaattagttttgacgatttacgcctgtgttctcactgctgttatggagcaatgaatttttggaggttaacactgtgtcattcctaatgatatcttcnnnnnnnnnnnnnnnnnnnnnnnnnnnnnnnnnnnnnnnnnnnnnnnnnnnnnnnnnnnnnnnnnnnnnnnnnnnnnnnnnnnnnnnnnnnnnnnnnnnnaacttgggaacacagtgttttttatttaccaacatgtcaaatgaataattttcttcatcatatgactgtatatatagaataaagctatgttcaaagcctgtgggtgaccaattgtaaaaaggtatttttttcatctgactcagacccttacttcagaaatttacaatgaataaaccatttcacaggtcagtaagtttccttacttgagggccctcatcatttttgttgatacatgttaagctttcatgcatagcaggcctttggttagacccttcatcgagaattgtctcaaaaacattcagagcattttgtccagaggaaactaaagacaaaccagaaaaagcagagctaggtagtagagtaaaggtgcttccccctttttacattacctaaaacaaacctaaaaacaaagctctacatgtttgtttctgagattagcttttacataatgttactttgggttaaacttttatctccatggaagttgtgtttggtttaaatggaaataagaaggaaaactttcaccaatagccaaaaatctaatgtaaaaactttaaaaagtgctcacataattaagttcaaaaagttacaaatttgtaaatatatgcatttaaaattctgatagcttgcatgctaagctataaacataaaccttaggaatgaggctactgagactgaaataaagcttatacttttgtgccaataattttgtgcctcagaattctaatacaaaccattaatcatagatttcatggcccaaattagtcatcttctaactgctatgcagctttgcctggcaaataaatagtggtttgctaaatttctcattcttagaagctttggaaaggctagaatttaaacattactctcctttttcaattagtttttttctcccacacgtctgcaccatgccactttctgtgacatttccttagaaaatcaaatatttttgaaaaattctagtgctattaccgttaacttttctttagacataaaaagccttatgctcaaggttcagatctgaaaatttgcttagttatcacatttttgtaagcacacattttaaaaaatttatgataaatattaagctaggttgtcctggaaaaacattaacttcacacatattcaggttctgaaatgtataaaatattgcacggttcttgttttaagagatataaaatca

SEQ ID NO: 695588 - DNA, 629 bp, Homo sapiens
cagtggtcccatagcttataacagagctgaaaaattcctattgcctactgatgtcacagctgtcgcaatgttgtggcataatacattatttgtgtgtatgtggtgatactggtgtaaacaaatcttctgtgcagccaggcatataaaagtatagcactcacaatttgtacagtacataatactttgataatgatacacaactatgtactggtttatgtgtttataatactattcatcattgctttagagtatactccttttacttattttttaaaaaaaaagatgttaatgctgggtgcggcggctcaagcctgtaatcccagcactttgggaggccaaggtgggtgaatcacctgaggtcaggagtttgagaccagcctggccaacatggggaaaccccatctctactaaaaatacaaaaattagctggaagtggtggcacgtgcctgtaatcccagctactcgggaggctgaggcaggagaatcacttgaacccaggtggcagaggttgcagtgagccaagatcgcaccactgcactctagcctgggcgatagagcragactctgtctcaaacaaacaaaaaaaagagctgttaaaataaatgaaaacaatctcgataatcaacagc

SEQ ID NO: 695589 - DNA, 572 bp, Homo sapiens
ggccctgccttcattcctgactgttccagtctccacacagtagccaagcaagtgttttaaaaacacacacactttatcgcatctcactcattgttagaacccctcacagttcctgtttcattgaggataaaatccaaaatagtgatgygattacccaaggcctgtggaatctggtccacgcctgcttctccggccttgttttggctcctatgctctcagtcaccttttcctgaaatagtccacattccctcagtctcagggtttcgtcacgggatgtttccttcatgggtgaattctgcttttttgacatgcccagcttaaaatcttgtccttagaagactgacgcagagcagctgtccttccaccccaggcaggcctcacctccgccgtggctcacgctgcctctgcttgtccgagtgacgagcacgtgtgtaaggcggcgttcttatttgtgttgctcattgtcacagccttgaaccgtctgagagccataaagatctcatttcttgaggtctctccttgggttggttcttctaccttgagctaattcagagcaaaggtaccgtagggca

SEQ ID NO: 695590 - DNA, 670 bp, Homo sapiens
aatcttggtgttcattcctggaggaaggggtgagtaaaatgtgcagactgcataatattgagtattgtatggcagcttgaagtaacaaaccaagtgtcaacagagcaatatgaatagatcttaaaaacacagtgctttgggaggctgaggtgggtggatcacctgaggtcaggagtttgagaccagcctggccaacgtggtgaaaccccatctctactaaaaatacgaaaattagccaggcgtggtggcgggtgcctataatcccagctactaggaggcttaggcaggagaattgcttgaacccgggaggctgaggttgcagtgagccaagatcgcgccattgcactccagcctgggcaacgagcaaaaccctgtctcaacaaaacraaacaaaaccacagcgctgagtaaaaaaataagaagtagaacaaagtctaataagatacagtagactatattattatattttgcaagagtatgtatacacgtgttagacttcaaactcagagcagttgtctatggaaaggggaatgggagagggaacggtaacagaatgaggtgaaaaaggaataaatatctaaattaagtgttttgcttcaactctaatgatcaggtgatatgaactgaggaatatgattagttcaactctggcactgaggtcatttgaaaa

SEQ ID NO: 695591 - DNA, 602 bp, Homo sapiens
atctttgtacttctgcattagatccattgaattttctcttagatctttttcctggatcccgtgtcttcttctttcttggtttgccrccatgttttactggaaaatgattcaagttttgatgtttggtccattaactttccacatgccttctaagtctttgtaatgtgtggtattagcattagcacacacccacccacccttctacttttgtcacctatacatattatgttaactattttaacttttactttgtcaagggtattaatgttttcaataagccctgtaccagtaaccggttattgtccataggttggcattaaaatttgaaggcaaaaaagcgtttacattactatgtttttataaactaaacatctttaatgcaggggcaagtagtgctaagataatttttcttaatgttcacgaccttttggtcaatgcaagatcagtcttaacatcaacctcatatgacttctctttcctaagacttcatccatgttttatgtttgcactgttcagttcacttcaaatttcaatcatgactttttcggtcttttccccctctcagtctgtttctgccctttgtaataatcctcaatgttact

SEQ ID NO: 695592 - DNA, 727 bp, Homo sapiens
cttcatatcatttttaaaacaagatggtacaatccttataacctggtactgtaactggagcagaccctaaaagtgttgcatccatatactgtagaccactagaagactccaaaccaagatcatttgcatcttcattttgcagatcaagaaagcgaaggacataaaagttaagagatttttccargctcacccaactagtaagtaacagagttgatgtttgaatccagtactgcataattgatatcacctccccatttatgtggcagtaactttttgcatgaaatcagagttataaggagcattctccgaaacacaaatatcatagaaatttcatgaagtttcatagaatgtatgtgcatataaaattgcagaatgtgaaagacagagatagcaacttctaggaacaactgggtctgccacagctggtttgaattaacattaagaaccaacattaagacatgagaagcacagagcagagtgttctccaacaggcactcctggaaatcctgatcccatgcagaatcacaaacctcagatatatatttccatactcctgacaggctattagcttgcagctgaaacacaagatgtgatcttggctcaggggaaacaggcattaggatgcctacctcagagccagttaacagaggcaaagaaaaaacagacacaggcgcttttgaaataggaactgaaatgaaaaagtttgaatttgctcatcaatacaaat

SEQ ID NO: 695593 - DNA, 727 bp, Homo sapiens
cttcatatcatttttaaaacaagatggtacaatccttataacctggtactgtaactggagcagaccctaaaagtgttgcatccatatactgtagaccactagaagactccaaaccaagatcatttgcatcttcattttgcagatcaagaaagcgaaggacataaaagttaagagatttttccaggctcacccaactagtaagtaacagagttgatgtttgaatccagtactgcataattgatatcacctccccatttatgtggcagtaactttttgcatgaaatcagagttataaggagcattctccraaacacaaatatcatagaaatttcatgaagtttcatagaatgtatgtgcatataaaattgcagaatgtgaaagacagagatagcaacttctaggaacaactgggtctgccacagctggtttgaattaacattaagaaccaacattaagacatgagaagcacagagcagagtgttctccaacaggcactcctggaaatcctgatcccatgcagaatcacaaacctcagatatatatttccatactcctgacaggctattagcttgcagctgaaacacaagatgtgatcttggctcaggggaaacaggcattaggatgcctacctcagagccagttaacagaggcaaagaaaaaacagacacaggcgcttttgaaataggaactgaaatgaaaaagtttgaatttgctcatcaatacaaat

SEQ ID NO: 695594 - DNA, 641 bp, Homo sapiens
acgttggacctgtaaccacccctgcctatccctgctgcacatctggcctgctgctcaccacctctgtggtcaaggcttccttctgccctttacaagcttttacctctccagaaaattctaccgtcactctatcttgcttaacagtgtctttttatattttcctgtgttatttattttgcttagtttccatagaaacataggactggaggatactgtggggattatctacacctacatcttacggatgagaaaactgaggcccagggagatggagttagattttgttttgagtgagccatgggggaaaagaaggatctgtataaaaggacctggctcctctcagagagctggctgtgtttctagaactttgcgtcaatgagtttctcagggtagcaggttattcctgcatccccagagckccccagaagcccagcaccagagctcattctgagagtatctgcactccctctgggatcggctgaccctgcttctgacccttttagactcttggcgtggtctggacaagcaggcttctttccccagcttcctggcaaccatgatgtcatccagaatgttctctctccagcctgacctcatttccatcttgctgcctctctctaatgctgccactctccttgcca

SEQ ID NO: 695595 - DNA, 641 bp, Homo sapiens
acgttggacctgtaaccacccctgcctatccctgctgcacatctggcctgctgctcaccacctctgtggtcaaggcttccttctgccctttacaagcttttacctctccagaaaattctaccgtcactctatcttgcttaacagtgtctttttatattttcctgtgttatttattttgcttagtttccatagaaacataggactggaggatactgtggggattatctacacctacatcttacggatgagaaaactgaggcccagggagatggagttagattttgttttgagtgagccatgggggaaaagaaggatctgtataaaaggacctggctcctctcagagagctggctgtgtttctagaactttgcgtcaatgagtttctcagggtagcaggttattcctgcatccccagagctccccagaagcccagcaccagagctcattctgagagtatctgcactccctctgggatcggctgaccctgcytctgacccttttagactcttggcgtggtctggacaagcaggcttctttccccagcttcctggcaaccatgatgtcatccagaatgttctctctccagcctgacctcatttccatcttgctgcctctctctaatgctgccactctccttgcca

SEQ ID NO: 695596 - DNA, 589 bp, Homo sapiens
caaacatttgaaccaaaacagtgttgtagccaggcgcggtggctcacacctgtaatctcagcattttgggaggctgaggtgggcagatcacttgaagtcaggagttcaagaccatcccggccaatatggtgaaaccctgtctctactaaaaatacaaaaattagctgggtatggtggtgggtgcctgtattcctagctactcaggaggatgaggcaggagaatcacttgaacctgggagccagaggttgcagtgagccaagatcgcaccattgcaccccaacccygagcgacagagaaagactccatctcaaaagaaaaacaaaaacaacacaaaaaaaaaacagtttgtatttgatcacaggaagccaggctgagctttcatatatgatgtcacttcacctgagctaaaaggtataaacaaaataaaaacttataaatgcactggttacttttctatagtaggcattatccaattgtatttagaaaaattattccagctattttttggccgggtgcggtggctcacacctgtaatcccagcactttgggaggccgagttgggcaaatcatgaggtcggcagttcaaga

SEQ ID NO: 695597 - DNA, 589 bp, Homo sapiens
caaacatttgaaccaaaacagtgttgtagccaggcgcggtggctcacacctgtaatctcagcattttgggaggctgaggtgggcagatcacttgaagtcaggagttcaagaccatcccggccaatatggtgaaaccctgtctctactaaaaatacaaaaattagctgggtatggtggtgggtgcctgtattcctagctactcaggaggatgaggcaggagaatcacttgaacctgggagccagaggttgcagtgagccaagatcgcaccattgcaccccaaccctgagcgacagagaaagactccatctcaaaagaaaaacaaaaacaacacaaaaaaaaamcagtttgtatttgatcacaggaagccaggctgagctttcatatatgatgtcacttcacctgagctaaaaggtataaacaaaataaaaacttataaatgcactggttacttttctatagtaggcattatccaattgtatttagaaaaattattccagctattttttggccgggtgcggtggctcacacctgtaatcccagcactttgggaggccgagttgggcaaatcatgaggtcggcagttcaaga

SEQ ID NO: 695598 - DNA, 1190 bp, Homo sapiens
ttcaccaatgctcccaaagagactctttagttcctcctgtgtcatgttctgaggaaggtagttgactattaagttggtcttgctgtcttctgtgttcccagagtcaactggtgacgaacagttgttgtttatggtggttggaccattggctgtgttattgcaagttggcccattagacagttgtgtttccatggcagcaattacctgctaaaaacagagaaaacaagaaatgtcagaattcatatttcacaacctattagagactccatccaagaatttaaacacttgtcactaaacacaagtcgttctaatgaaattacaacaatgcttcaacaaaaagtgtaatacctacactaattttcacttcatattaacctattcatcttaaggttacaactatattttcacatacatattccatacatgcatataagcacaatttaaatcttaaacattttctagaatcacattctgggtctattcacatayccttactcacctgcagtgtccacagatgagaaaatcaagtaccaaagggcacagaattgaaccctaactaaaaatcatactagaaaataaaagtgcttaacatgctacaaaaatgaacaaaaaaatgacctacctaactctgaagagattttcagttatcctaagaggttcaatattctaaaactgacagatagccattaacttaaaaatcaaagagcaagagtacttttaaaaatataaatttgtcaacatgtactgttttggttacatattgaaaacgtttttgatggacaatatcttatctctaccattggtaagaaaaaaacagatgctatattttagggagtggaaaggaactaactgtaaggtaacttgggaatgagctatgaatactttgtctaactggtagaatctaataggacactcctgtcaaccttggcagctaaaaattaccaacaaggtgactgatctacaacatcaaaataaaatccccaaacacttcgatatggtgtttctccttgactctgctttttaatgagaaaaaagaaaacctatccagtcaatgaaaacaacaatgtaaatatatcaacttttgcaaacagaccagcccaaggaattctcgtctgagcacataagcctgttgaaaatgcaagtaatagggtatctataaactccaaacaccagataaagaacagaattgg

SEQ ID NO: 695599 - DNA, 639 bp, Homo sapiens
ataaaccagttcttgtaataaactgtatgtcctggccaattgaccctgcaacaaattaccattaatataacgaatggataaggcactgtgaatctaattttcagctaaagctgttttgtgagttcttaaargccttcataggcaagatcagcttgtacaatgatgtctttaaacaaattatccttatataaagagatgcttataaaagttgtagactaaaactacctcacttttgtgctacacatttttgttaaattagcagcttagtttaatatactccaagaggcatgaaatgaaggtataatgtgatctttctgtatgttttaataccctgagtaataataaataatgacaatcgagaatagtgactgctactttatttcttggaaaagcattaaaattaacatgaaattttatttattaaaagcaaagctttttattaaaacttcaatgcttaaaaacatgaaacatcaaacagtatttattaaacattagtatttattaaacattaaaatacaattgtatttactgaacattcttactctttaaagtgaatgtgtaaaaaccacttttaaaagagatctacagataatgagtaactccagaaacaaaggaagatgaggaatgtgaactaaccag

SEQ ID NO: 695600 - DNA, 1316 bp, Homo sapiens
tgccaatcagaacagactgcaattcagaagaattgcaagaaatgtcaagttcacacagcaagttggtacgctgtacagcaaatagaggtcaaaatgttctatccagatctttacactattttccaaattcagactcttcttatcttattctctgccccaggaggctaggccaatgtctgtgggattcccataaatttcccagtggggacctctggcaagagattgtagggagagcagagagaggtcaggtgcttctctggtgttcacaaagtgaggtaacctttggaggatggattcctctgctgaacaccactgttcctcaaactctcatttcagtttctgaaccagctcttccttgagtcctgctagatctaagggtggtcatagctctcacgctgctgtgatggttgcctttacgagacaacttgattgggccacaggatgcccagatagctgcttaaacatgatttctggctgtgtctgtgagggtgttcctggaagagactggtgttttaactggtggatggagtaaagcagacggccctccccaatttgcataggtatcaccaatcggttgagggtgggaatagaacaaaaaggcagaggatggttgcattaactctctgcctgattgcttgagctggaatattgatcttgtcctgcactcagctggttctcaggccttcagacctggactgggatccataccatctgctctgaggctctcaggccttcaaactacaccatcagctttcctgggtctccagcttgcagatggtagatcatggaacttctcagccattgtagtcaagtaagccaatatattaaaataaacttatatagataaatgtacatattgatataaaatacagctgcactatctctgaggcaaccctgcaatcttcttgcatacgtcaaaggctctctttaggaataaatcctccttaactaattctaatttggcacctgactaatagaccttggtatgttctcytttatcaacaggtataaacgattaaaaacagaaacagagctgggcatggtggctcatgcctgtaatcccagcaccttgggaggctgaggcggatggatcatgaggtcaggggtttgagatcagcctgaccaacatggtgaaaccccaaccctactaaaaatataaaaattagccaggcgtagtggcgtatgcctgtaatcccagctacttgggaggctgagggaggagaaacacttgaacccaggaggcggaggttgcagtgagccgagattgctccactgcactccagcctgggcaacagagcgagactccgtcttaaaat

SEQ ID NO: 695601 - DNA, 604 bp, Homo sapiens
ggccacactaatcttctctgtatcattccaattttaatgtatgtcctaccaaagtgagaacaactcaaagttcttaatcagtttgtttagactcaagggcctttcaccaaacctctgaaaagatgaggtcatgtcactggggctgattcagtgacatggcccatactaaaatgggcattgggtcgggggatggggtgaaccaggactgtgacttgatactgggctgagcattgagctagacatgaaagggtacaggcagtacattgtgattaaatcaagtttctcaacctcagtacaattratattttggctcagataattcattgttgtcagaggctgtcccgtcctaggatgtttagcagtatccttggcttctaccgactagtattcccctgcatcccagttttcacaaccaaaaatatctcatgacactgccaaatgtcctttggggggctaaattgcacccttataaagaactaccaggctaaacttttgcagtggataaaagctttgtatatcctcagaagaatttattatcccaggcttggctcttttgattcaggaaaactttggcactaagaaatctgaagtcttgaccttgttt

SEQ ID NO: 695602 - DNA, 604 bp, Homo sapiens
ggccacactaatcttctctgtatcattccaattttaatgtatgtcctaccaaagtgagaacaactcaaagttcttaatcagtttgtttagactcaagggcctttcaccaaacctctgaaaagatgaggtcatgtcactggggctgattcagtgacatggcccatactaaaatgggcattgggtcgggggatggggtgaaccaggactgtgacttgatactgggctgagcattgagctagacatgaaagggtacaggcagtacattgtgattaaatcaagtttctcaacctcagtacaattgatattttggctcagataattcattgttgtcagaggctgtcccgtcctaggatgtttagcagtatccttggcttctaccgactagtattcccctgcatcccagttttcacaaccaaaaatatctcatgacactgccaaatgtcctttggggggctaaattgcacccttataaagaactaccaggctaaacttttgcagtggataaaagctttgtatatccycagaagaatttattatcccaggcttggctcttttgattcaggaaaactttggcactaagaaatctgaagtcttgaccttgttt

SEQ ID NO: 695603 - DNA, 661 bp, Homo sapiens
ccacaggcagaaacagctaagtccaggctcctgaccatcctccagcttccacgtggacctgccctccccagtcatgggcctcccagaggcctgaggaaacctgtaaacaggtaaagcacatcccattcctctcagctcccagccctccccagcttccggtcttactcaaaggaaaatccaaatctgctggcatggcccacaagcccctcccatgtctgtcccctctgaccttgtcccccttcctcttcgctactcaccaacctacagccatactgacttcctgctgttcctcaagcaagtgaagcccgctatagcctcagggcctttgcacatgctcttccctctggtggctggtttgcacctggctgatgtctgtgcctctgcacgggctgtgagctgagggcactgggagcctgggaagggtttccagctgggagggaaccagccagctttgtgctgctgaggggcattctggggtggaccggagggtgggctggaggggatgagcttgagggcagagagagtgctcagtgtgcagagctggggcatgargtgggctcagctgaagggccagggaggtcacaaatggtcaggatgggccccaggtcaggtggggagaagcagccaggccagtggttttgatgtggaaatgtctgaactg

SEQ ID NO: 695604 - DNA, 1095 bp, Homo sapiens
acttcccgggtccaagcgatactcctgcctcagcctcctgaatagctgggattacaggtgcccgcctctgcgctgggctaatttttgcattttcagtagagatggggtttcaccatgttggctaggctggtctcggacttctgacctcagatggtccacccgcctcggccttgcaaagtgttgggattacaggtgtgagccaccgtgcccggctagctagtgcttttctagacatttaaaaacaggttatttcagtgaaactctattttcctgattctaccttcaagcctacaaaccccacacaccttaactagtagcacccattaatcccacaggttacagcttcttccaggaagctttctcctaaattgtatcattaggttaggccctcactttcagcatctgagcactctaaatggtcacaatgttgtcttcgccactaggctctgagcatttacctggttcattgattagcgtagagctttgaaattcaggattctttattaatatagcacacagccctagacttctgccatgcagtatttattaaattttataattcatccaactgttaaaaataagaagatgtatcaccaatagtccaaaatatttgtgcttaccaagaaagtaagttccagaaaatgaaatttagctttgtttcccataatcagatttgtgattcaggaataggccagagaagttggattgatactatgcataaaaacataaatagagaatcaaaggtaaagaagatttctctatgtctctttcttaccttttccatatcacccaggccctccgtgtccagaaggatcagggtgtggtttggcttggaggggtggggcacacaccacatccagatgcctttggtttcagacttcactgtgcagcccagagggaagccttcaagggaagaggagaaacaacatatagtgacagcagaatccaggcagacaaggcctataccagttaaatgtataggaacgttaagttcctggcaggggaaacgggttgcttccatttcagcaaagacaatcaatcaaatctttatttgtataaatgactttctcaggaggtacttgkgtcccttattca

SEQ ID NO: 695605 - DNA, 1425 bp, Homo sapiens
  misc_feature 490, 491, 492, 493, 494, 495, 496, 497, 498, 499, 500, 501,502, 503, 504, 505, 506, 507, 508, 509, 510, 511, 512, 513,514, 515, 516, 517, 518, 519, 520, 521, 522, 523, 524, 525,526, 527, 528, 529, 530, 531, 532, 533, 534, 535, 536: n = A,T,C or G
  misc_feature 537, 538, 539, 540, 541, 542, 543, 544, 545, 546, 547, 548,549, 550, 551, 552, 553, 554, 555, 556, 557, 558, 559, 560,561, 562, 563, 564, 565, 566, 567, 568, 569, 570, 571, 572,573, 574, 575, 576, 577, 578, 579, 580, 581, 582, 583: n = A,T,C or G
  misc_feature 584, 585, 586, 587, 588, 589: n = A,T,C or G
ggagttcatgaaggaagggctttcatgtatactttcttgtagtggaaactgccattaagacattgccaaactacaaccttgcgacaaaggctacttctgtacttccagtaatagccagtcctaaccacaatcttgcaagtggccttacttgctgccatcagggtccctgcagtcagggttctatgcataaaactctctcaagcaacagctaatgcacatgtccccacctgcaatatgatcctgtaaaccaatgaactttcattttacatcaactggcgtatatgtctccttttggcctttaaaagtttctcactgccttaacatttccagatgagttattattgttatagcatgcatttccagaatttataaatcccctgcttattcctgaatatatcattccttggagagtgactatctgtcgtcattgtgagtcaacagaggaactcacgatatggtagtcaaatcactcatttcctgaatgatgaannnnnnnnnnnnnnnnnnnnnnnnnnnnnnnnnnnnnnnnnnnnnnnnnnnnnnnnnnnnnnnnnnnnnnnnnnnnnnnnnnnnnnnnnnnnnnnnnnnnactgactgtgtaactggacagatgggtctcatccatgctttgctggtgccactcacctttgttcttcccagccagcttgttcattaggtaggatttgcctgtgcggtagaggcccacaattgccaccactactacaggctgtgtaatggcagacaggatttccagagcttctgaattcaccaccagatgccctttagtgttctcagtgaggcacactgggcctggcatgtggatctctgatgccatgttcagggcgttcctctgtctgcaaggaaaaaatgaaatggaaagtaatgtctggtaagtcagttgagctgaaatctataatagggcataaatctttgttttctattcttgaacattgtttcttgtgcatttctaaggagacctgtggccctttaaggctgtcctatagactgggccactgtctgccctttaaaataatttcattttgaaatagacttacagaagcatgataggtatgaagagtgcccatacaccacttccctggcttcccctaatgtcgatattttacttaaccatagaacaattactgaaaccagggttttagcatcaatacaatgataactaatctacactccttattcacatttcaccaktttcccactaatgtccttctgcttcatgatccaatccaggatccctcattgcatttagtcattatgtttctgtagttttcttgcatctttgatagttcgttattcgttctttgtctttcatgtctttgacattttagaatagcactggcctgtgattttgaggaatatccttcaatttggagttttctgatgtttcctcattgattgaagttatgc

SEQ ID NO: 695606 - DNA, 3748 bp, Homo sapiens
tgggtaggcatatgatttagattcttccctgcagattgacttttgtgaggcttagctggagatgtgagcagctcaaagatgcaacttttcatggggtaggggagtatttgtttactgaaaatgtgaaggtggtggcatccatttactcatagctgacactgcagaagcttccagcatttcatccagagatcatggtgctggttcatggtagctgtgttgttttcccgtgagatgcctttacaatggtagtattatcctcggtggaatagctgtagagtatggctccctcacaattctggagcatcggtgtgcaacctaatggtattaaaaagtaaattactttttacttaaattgctgagcagattgttatttgccatgaagaactctgaataatacacatcctgaaacaattgtagtaggataatgttttgtattaatgaattattcttgatttttcaatctgtcatttttttttttttagtaagtcatttaccctgagtagctttgaggatataatgtcatagcagaggagcagagagaaaaatgcagtcaagttttaggctttataggattatagtcctggtcctcagaagaatggaaagtaatttgagtttgagttaaagctttcctttctgtgattgtagaagttattttctaaacttcaggaaagagaaaagactaagggagactagagaagagagatctaggtggcctgggaatggggcagtaattacctagagggtttacatggacagagaaggtggagcctctactcataaatgcattctgcacagaggcaaccactttctctgctagtgcccacagatcatgcagcctccacccaaatgagaactgtgcactgtctgtactttaaaagcctagttaagtgtcccagatctcctttatttgcagccagcatgccatacaaagaccacttggcaggagtgatgctctactgtgccccatggtttgtttggtctcatcacattttcatcatattcacaacacttcagccctatgctacgaccatagttaaatccctgaataagagtataggactgaatatacagtaagggtggtgcatatgagagaaaaaaatctacccagaacagaaactgcaagatatctcattggaaaatgcatcctagttacacaatatctctcttgagtccttgtgtatgatttcaaatataggatttagttaaagatcatattaaaagttagtactataaataagcatgagttgaattgctctgtaggtaaaacattgacctcatacttaacctttactttgcaaactttatggttcaacaaaaatgcatgcatcatgattttgagttaagtttaatggcagttgtttgacactctgaagttgctcattcatgttgtttcttggggagagggagctggacaggcaaattttgctccttggacttttagagtatgttacatattggctccaatgatttgcttctcatctggatatcccatatgtctttttgaagtctcttgctctcattctcgaatccctccttgagaaggcgttcctgttcctaaaagggaaagtggagactaagcctatccagcttaacacatttccaccagattagttccccttttggtacttatattgatccttcaagaatttttgactatcactctcttctgagtctcctatacctgccaataatttttctatgatttttttagcttcaaaaatgttgttgttctacagtttctaaaatattagtgacccagcgttttattccttggtcccttcaccatttgcactcatgcaacacagtctttctggaaaaaccataactttctcttgttctttttgttgttgttgttcatttctgatctatatagaatggactcttaaatatatatctaggaaggtatgaaagatagatgatttccaattggtaggttactatataactcaagactagggcaagtgtttgatcagggaatttagtacaggtctccaaaattcggaggtaacagaaataaattgaggagatcagggcttacagtggcccataggctatttctgggcaaacgtaaatgtggaaaagagcccagagaacaagaaagtattggcaccatgggcacttaaccagtgtgcttaagtgggtagatggttagggaatctttctttttttttttttgagatggaatttgrctcttgttgcccaggctggagtgcaatggcgccatcttggctcactgcaacccccgcctcccaggttcaagcgattctcctgcctcagcctcctgcatagctgggattacaggcatgcgtcactatgcccagctaattttgtatttttgatagagacggggtttctccatgttggtcaggctggtcttgaactcccgacctgaggtgatccgcccccgtcggcctcccaaagtgctaggattacaggtgtgagccactgcacctggcctggttagggaatctttctactcataacagtgcttccagacataaagtcttagcaggcataacagaaacaaaatccccatggatccctctcagtaggaaagactggctagatatttctctaggtagtctgatgcagaaaagttacttactgctcatgagattataattacttcatttagcaaatgagaaactaatagttcctctaccattaaaggaaaatttgatcacataatgtaaaatacttgtgcagtgcctagcaatgtttattagtgatagcataataaagaattccatgtgattgtatcctgcaagtaaacagtctttactaaccagagatgactggcataaaaatagttagggaaggaaaaatgtagtagtgtctgggctagaaagtttttttgggaggcattaggttctcaaccttatacttcattttcgatatggggcactggaagagaaaattgagatgatgcaattgaatacctgaagtttaagagcgagggtcttctcttgctctgccattaactgggccctgtccctctccatcttctcagtcaattgtttcacatgttcctgataactcttctctttctgttccatcatctcctcattcttcttttgtatttcctccaacattttctttgcagcttctgcagattcagcctttatacgttccactgtggaagaaaaataagcagaaaaagatatgaatattcaattgtaggtgttcccttttcctttccctcgtttttgtttgtcttatccttacatcattgagaaaacttcttgtaattttgccttgggtaaccagaaaaccaatgatcatacagattagttaagaaaactctcatagaactatgaatgatacttgccattctttctctacaataataattccaggtggaccaatattgctaactaacattttgagagctttccgaccatgtagagtgttttcagctgttctcaccttcaatcgctttttccttttctgagagtgactgatcagtctgtagaagtgcatcagccacatcctccttggactccaaatattttttcagcacctctttggcctggttatacagagaaaggtagaatgaagaaagagtgattgtgggttagatccagcaatcccaccactgggtatctacccagaggaaaataagtcattacacaaaaaagatacttgcatacgcatgtttatagcagcacaattcgcaattgtaaaaatatggaatgagcccaaatgcccatcaattaatgagtggataaaaaattgtttcatatatatg

SEQ ID NO: 695607 - DNA, 3748 bp, Homo sapiens
tgggtaggcatatgatttagattcttccctgcagattgacttttgtgaggcttagctggagatgtgagcagctcaaagatgcaacttttcatggggtaggggagtatttgtttactgaaaatgtgaaggtggtggcatccatttactcatagctgacactgcagaagcttccagcatttcatccagagatcatggtgctggttcatggtagctgtgttgttttcccgtgagatgcctttacaatggtagtattatcctcggtggaatagctgtagagtatggctccctcacaattctggagcatcggtgtgcaacctaatggtattaaaaagtaaattactttttacttaaattgctgagcagattgttatttgccatgaagaactctgaataatacacatcctgaaacaattgtagtaggataatgttttgtattaatgaattattcttgatttttcaatctgtcatttttttttttttagtaagtcatttaccctgagtagctttgaggatataatgtcatagcagaggagcagagagaaaaatgcagtcaagttttaggctttataggattatagtcctggtcctcagaagaatggaaagtaatttgagtttgagttaaagctttcctttctgtgattgtagaagttattttctaaacttcaggaaagagaaaagactaagggagactagagaagagagatctaggtggcctgggaatggggcagtaattacctagagggtttacatggacagagaaggtggagcctctactcataaatgcattctgcacagaggcaaccactttctctgctagtgcccacagatcatgcagcctccacccaaatgagaactgtgcactgtctgtactttaaaagcctagttaagtgtcccagatctcctttatttgcagccagcatgccatacaaagaccacttggcaggagtgatgctctactgtgccccatggtttgtttggtctcatcacattttcatcatattcacaacacttcagccctatgctacgaccatagttaaatccctgaataagagtataggactgaatatacagtaagggtggtgcatatgagagaaaaaaatctacccagaacagaaactgcaagatatctcattggaaaatgcatcctagttacacaatatctctcttgagtccttgtgtatgatttcaaatataggatttagttaaagatcatattaaaagttagtactataaataagcatgagttgaattgctctgtaggtaaaacattgacctcatacttaacctttactttgcaaactttatggttcaacaaaaatgcatgcatcatgattttgagttaagtttaatggcagttgtttgacactctgaagttgctcattcatgttgtttcttggggagagggagctggacaggcaaattttgctccttggacttttagagtatgttacatattggctccaatgatttgcttctcatctggatatcccatatgtctttttgaagtctcttgctctcattctcgaatccctccttgagaaggcgttcctgttcctaaaagggaaagtggagactaagcctatccagcttaacacatttccaccagattagttccccttttggtacttatattgatccttcaagaatttttgactatcactctcttctgagtctcctatacctgccaataatttttctatgatttttttagcttcaaaaatgttgttgttctacagtttctaaaatattagtgacccagcgttttattccttggtcccttcaccatttgcactcatgcaacacagtctttctggaaaaaccataactttctcttgttctttttgttgttgttgttcatttctgatctatatagaatggactcttaaatatatatctaggaaggtatgaaagatagatgatttccaattggtaggttactatataactcaagactagggcaagtgtttgatcagggaatttagtacaggtctccaaaattcggaggtaacagaaataaattgaggagatcagggcttacagtggcccataggctatttctgggcaaacgtaaatgtggaaaagagcccagagaacaagaaagtattggcaccatgggcacttaaccagtgtgcttaagtgggtagatggttagggaatctttctttttttttttttgagatggaatttgactcttgttgcccaggctggagtgcaatggcgccatcttggctcactgcaacccccgcctcccaggttcaagcgattctcctgcctcagcctcctgcatagctgggattacaggcatgcgtcactatgcccagctaattttgtatttttgatagagacggggtttctccatgttggtcaggctggtcttgaactcccgacctgaggtgatccgcccccgtcggcctcccaaagtgctaggattacaggtgtgagccactgcacctggcctggttagggaatctttctactcataacagtgcttccagacataaagtcttagcaggcataacagaaacaaaatccccatggatccctctcagtaggaaagactggctagatatttctctaggtagtctgatgcagaaaagttacttactgctcatgagattataattacttcatttagcaaatgagaaactaatagttcctctaccattaaaggaaaatttgatcacataatgtaaaatacttgtgcagtgcctagcaatgtttattagtgatagcataataaagaattccatgtgattgtatcctgcaagtaaacagtctttactaaccagagatgactggcataaaaatagttagggaaggaaaaatgtagtagtgtctgggctagaaagtttttttgggaggcattaggttctcaaccttatacttcattttcgatatggggcactggaagagaaaattgagatgatgcaattgaatacctgaagtttaagagcgagggtcttctcttgctctgccattaactgggccctgtccctctccatcttctcagtcaattgtttcacatgttcctgataactcttctctttctgttccatcatctcctcattcttcttttgtatttcctccaacattttctttgcagcttctgcagattcagcctttatacgttccactgtggaagaaaaataagcagaaaaagatatgaatattcaattgtaggtgttcccttttcctttccctcgtttttgtttgtcttatccttacatcattgagaaaacttcttgtaattttgcctygggtaaccagaaaaccaatgatcatacagattagttaagaaaactctcatagaactatgaatgatacttgccattctttctctacaataataattccaggtggaccaatattgctaactaacattttgagagctttccgaccatgtagagtgttttcagctgttctcaccttcaatcgctttttccttttctgagagtgactgatcagtctgtagaagtgcatcagccacatcctccttggactccaaatattttttcagcacctctttggcctggttatacagagaaaggtagaatgaagaaagagtgattgtgggttagatccagcaatcccaccactgggtatctacccagaggaaaataagtcattacacaaaaaagatacttgcatacgcatgtttatagcagcacaattcgcaattgtaaaaatatggaatgagcccaaatgcccatcaattaatgagtggataaaaaattgtttcatatatatg

SEQ ID NO: 695608 - DNA, 1662 bp, Homo sapiens
agcacttggttctatttctagctctgccacctccttgctatgtggcccgaggctggtcacctgctctcacttagttacctttccctagtattgggggagagcagagctttttgccttatcattccaggacctgaggatgtgtatgctgaaacagtggcatttctctgaatctctttgaattacagtgcacatatcttcaggatatcagagacatcccatccataccagcacgtgccttcttttcctagtcatttttcttcaactattcccgtttgagctgggctaagagaacaacagtctggactcattccttaggtgcrttgttggccttctcacagacttaaatatatacatctgtcccacttttagagaaaataggaacaaaatctattacatgtattttaggccctctatctgaattctgaagtctttctctgacttctttttcagcttcagcttttgatttcaggcacattcacacttgtttagctttcaacttacagagaatgctggaaaagagattcatgcattatttagagcattcgtctaaatgccctcccagatcccttctaactccatgaggtcccatgagtctgtgaaatgcatgggcaaaggaagaggaactgaggctttgaaatcagatatacctagttccaattcctagttctcaagtttactagttgtgtgactttgggtgagctgcttaacctcataggagcctagagtcctcatctaaaaacctgggccagtgccaactaccaagccatgactgtgaggattaaatgagacatcacttccataaaaacacggaacagagtgtgaggcatacagcaggtgccaaggtagatattagatcctgcttttcattattggtgcaagtttctgatgggtcaaacatgcaggctgttgtatatttgaatattgcttcagtcttcacttccacggttttatttcaaaaagagaaagaaggaaggaaataaacagaaactgtcagaggcccttcggaaatcatcactcatccattgaaatgtgctttccattcaaaaactaccttattaattattcattgcttttggaactgaaaatgagaacagagcttaagacccagagttggacaagaacagtgttccaactgcttgatttctgtcatttcctggtttctacgcagtacctcccaaaatctgagatttgcagttttgggagtcgagagaactttaggcttgatgatcagtcaggtttagtcaggtttagccaatgccctggaatgactgttctctttactttcatttccactcccggcaccgcatttctgggggattatttcactgcatgggtggcccgagtcccttggccttcagccttatggctcattccaccgctctgggcaagccataaccacccgaacatgcaagtctttcttttgtgccccagtggcatgagtaacatcattaactcttcagggccgaggtttgggattaggtaaaaatcttacatccccccgtgtttgcagtcagaacaccagagtaacaacagggtgtttgcggggcttgttttcacgccagaaatgaggttgccctaacacacaatccttaagatgttttttccctaacgattgtcttcaccaggatcgtgggttacaaaatggaagctcagtgcttcctg

SEQ ID NO: 695609 - DNA, 3499 bp, Homo sapiens
tgtctgtttccagcacaggatataggcgcagcagaaagcaagcaggtgcccaataaatgtgtgtggaatgggtgagggatgattgtccctgggattagagagggcagcagcccatttcaaccatcattcctggtggtggaagtgagagggcctcgggagcagagcagcgtcaacagttgttttggctgaagggggctgggaatgcttcctgtcctcccaggctacagcccctcaatgccccttcttagtccgagagagagacgatgtcagaaaaagaaagttactgtccaggcactgaagatttacttcaatccaatctttgttttaattgctgccgttaaacctagtagcaggatcctaatgaaccgtgttctttccaggaacctgttggcccagttggtttcaagccagagacattcagaaagtttttagctctatatttgcatggtgctgcgtgagcggaggacccctctgaatcctgaaacccctcttgcctctcttccacggaagagggcctgggccccgtggagcctcagtgcccgtttggcctgctgctctcgctgacaataaagagcccttgcgttgcactgaagcctgtgtttggtatgagggtgccatcgggaagggcgcccacacaagtccaagccctggagcctgacctgccccagctgaagcccagctctgcccttgacccatgttgtgatcttagataaggatcttcatctgtctctttccatttcttcatctgaaacctggggctaatgtgacttacctggcgttgaagactctgggttatgtgtgtgtagtgtctgccacatggcagatacgctgatggtcactaggttcttatggcattatttaaattgtggacacattccacaatgactgcagaaaatctcgctagcatatttattgtagatttctccctcgtatcctggttaatggggcaagtacacccctggttcagctggtctctgtccaaataatgtcaagtcctgatctgtgccagacactgctgccatgccaagcacctgatacatagcatatttaatctgcacacaccccttacaaggtaaatgtcatttccatattcaagaaaaatattgcatgcctagcatgtgccatgcactgttctgggccctaagaagaaaacacggataatttaaggaatttgcccacggtcacccacctggtgctataggtcagcttcccgaggaaacacttagagacttttatttggggagaacctttaggacaggaacctgtggagagcgaaggcagcagcaggtgggggtggcgggcccaagctcagtgtggctgcctctgaggcctcacccagttcatgggcactctggagccagaggcaagggagttgagccttctacaaacacccctggcctggcaccagccattggatatgtgctgcttcctgacagcgggtgggaccttgggcgaggtggctttgttggtctgtaattcctgctgagggactgctgagagcagttagtgtgggaacttccagcagctggaggagctctcagctaggcagtggcaaagtggcgtccagcctgtgtctctgcctcccaggcttgggctctttccacttgaaagcttactttttaggcttgagggattagcaggaaaagcagcaaggcacagaggaccatggggacaggaagtgactggaagtggggaggccggaggcttggctggggctggagtggccagctwgggaggggcctgaacaccaagcacctcacctcctagggcagctgacctggggctccgggtactctgagccctgctgcccattttactttttattttacagacaggaaacaattatacataaatgataaaagttcagagttcagggaaagataagtcgacccacccaaggtgatccctagctagtccttttctctaaggttaacagagcttcaagtttcttccatgctgttggtgaaaatgtgtatgtatcataacaacacacatatatacatgactgaagagtcatcctatttacagcctgttctgcacttcctttttcacctgatgtctctggattgtaggctcttgccacatcaccacataggatctcttcgttcttttgagcagccacattagtatctgttgatggcagtccgggttgtttccagttgttattagaaataatgctgcagtgagcaccctcgttcatgtatcttagagtagttttgccagcagagccattgggtaagttcctagcagtggaattgctgagtcaaacgtttttttttttaaacaacactctgttgggagtacagaggaggagctggtgggatggcggtagggagtccagctggaggccactgcggggatcctggggcaagtggtggtgatggcttggcgtgatcctgagcaggctgaagcccctggagactgcttggagaggagggagggtgaggtgaacttgagccctgagcgagtgggacggaggctctgagtaagcggaccatcagcagatgaccttgtagcttgaggactgcctggaagggggccagggttgccgggcaggcctgggcagcctgtcctcccaacccaccctgaatgagggcagctcggatgctggccttagtgctaagttgtggagcctggaacccaactacacttttgtgtcaagggagctgcaaagtacagctgatctgcaaagtggggcaggcaggactggcggttttttttattgtccccatggagatgaggaaacaggcttagagaccacatgatgcagtgtgaagagctgggaagctcgtgtgtcatgacagctgccccctccacagacaggtccttgcttctccaaatcccaaatgtctaccagcttcgtcctcactccctcattcaacgcaggagaggaagtgatgcagcggaacttgagggcctcagccagcctcccgcccagtacaggctccccagccagtgagctggtgaaggagcaggagcacgctgcagggagagtgctgcgccgggtcatgctggatagcgaaaccccacgagaggaacttccagcagcagacttttggaaatgaaatggtgacattcccattgtgaacgtatttctcactgtctcatatatttaaattcctggttgttccattcaaaagttcttcagttcatttccagcaagcttcagtggcaagggaattctaatttggcctgggggaaagccacttttcccctcctgtattccagctgccctgtcagatcctccacttcctcgctggcaaaatggggatacagcacctcccttccaagtttccccacctttggatcaaataggctccattcgccaaggtttcaagtcgatgggtttggagttcttcttagaagccaggtggaaaggtggacttgctggaggggacctcactttaggctgctctctgttctctcccaaagctggctcaggctggacctggggcaagtgtttggcagaggctctgtgacaacccacaggagcaggaca

SEQ ID NO: 695610 - DNA, 619 bp, Homo sapiens
attgagaacttgacctggccaggcacggtggctcacgcctataatcccagcactttgggaggctgaggtcgggggatcacttgagcccaggagttcaagaccagtctgggcaacatggcaagaccctgtctctactaaaaatacaaaaattagccaggcgtggtggtgggagcctgtagtcccagctacttgggagactgaggatgtggtgagcagagatgatgccactgcactccagcctgggtgacagagtaaaccctcaaaaaaataaaataaagaataaaaaacaataaaactttttttattttttaaaaaatttaaaaaaacttttaataaaaaatattttaayttttaaaaaataaaaataaaatttgattcctgttaaaagaaaaaaaaaaagggaactggacactggaccctgccccttccaacagccctccaggtcaggcacagttcttattcccattttacagatgcagccgctgagcctctgaggatccatgggctgggcggtggcattcgattttccctcctcagattccatcctcctgagtcacacagatcccatgacatctgacaatccaaggccactgctgatttctacaccaataaaatgtga

SEQ ID NO: 695611 - DNA, 1633 bp, Homo sapiens
atgtcatgttcatgggttggaaaagattcttgttagtgcatcaattgtccccagttttatctataaattcaatgctattctaatcaatatcttagcaatcagatattgatcaaataattctaaaatctatgcagaaaggcaaaggaactagaatggtcaaaacaactatgaaaaagaacaaagttgtaggactctcgttacctaatttattcccgctgcccaatttaaagatgtaaactgggtagcaagagtccttcagcttgaggtacagtaaaaaagagtatgattttggtgaaagacaaagacaagttaatgggtcaggatagacagcccagaaatagacccagacaaatatacctgtttttacataggtgcagtagcaacttgatggacaaagggtagtcttttcaacaaacagtgctgggaaaatcgagtgtccacatgcaaaacaaataaaccttgacatatacgtcatacttcattaaaaattaaactttcccagtgctttgggagaccaaggtgggaatatcgcttgaggccaggagttccagaccagcctgggctacatagtgagaccctgtctctaaaaaaaaaaaaaattaaccaggcttggtggcacgcacctgtagtcccagctacttgggaggctgaggtgggaggattgcttgagcctaggagattgaggctgcagtgagccaagatctcacctctgcactccagcctgggcaatagagggagactgtgtctcaaacacacacacacacaacacctggtttttctttttttaaaaaaaaattaacaagataaaagtagggaaggcaggagacctttgagcccgagagtttctatcctgaactttgattgtaaggatgttttaattcaggtgacatttggacatacgtatgcaactttaacactgaattatgccaacattcatgacttttctttaaattctcttaagttatttaatatcgtatcacgtttttacacagagtagttgaactgtctgacttttttgcactttaattttacattaatggttttattctagattagtttctccatttaaattatccaatgaagatttggttccttagtttttttgtggggggttcatatccattatttttaactcattatgacttctgccaatgtgaattttcctttgtggccaatatttcttccaatcctatatttaaaggaaaagctttattagacaaattaaatttaacagagtttaattaggccagaataggctcagagagactgcagtggagccaygtggtggaagatttatgaacagaaaagaaatgtagagaaaatgaaaatgaggtctagaaacagctggattgtttacagctctgtgtttgccgtatttgaacacagtttgaacagttgcctgctctcaatttctgtacagcctcgtcaccgatggtctgcataccacactctagggagcactgtgctaggccatacagtaagttcagtaaactgtacaaaacttatatacacaccacattctctgacaacaatggaattaaattagacatcagtaaaagtataaactaacaatcttcataaaattattttatttttagctgtggtattggcattgtaagtagtttgagagaga

SEQ ID NO: 695612 - DNA, 1633 bp, Homo sapiens
atgtcatgttcatgggttggaaaagattcttgttagtgcatcaattgtccccagttttatctataaattcaatgctattctaatcaatatcttagcaatcagatattgatcaaataattctaaaatctatgcagaaaggcaaaggaactagaatggtcaaaacaactatgaaaaagaacaaagttgtaggactctcgttacctaatttattcccgctgcccaatttaaagatgtaaactgggtagcaagagtccttcagcttgaggtacagtaaaaaagagtatgattttggtgaaagacaaagacaagttaatgggtcaggatagacagcccagaaatagacccagacaaatatacctgtttttacataggtgcagtagcaacttgatggacaaagggtagtcttttcaacaaacagtgctgggaaaatcgagtgtccacatgcaaaacaaataaaccttgacatatacgtcatacttcattaaaaattaaactttcccagtgctttgggagaccaaggtgggaatatcgcttgaggccaggagttccagaccagcctgggctacatagtgagaccctgtctctaaaaaaaaaaaaaattaaccaggcttggtggcacgcacctgtagtcccagctacttgggaggctgaggtgggaggattgcttgagcctaggagattgaggctgcagtgagccaagatctcacctctgcactccagcctgggcaatagagggagactgtgtctcaaacacacacacacacaacacctggtttttctttttttaaaaaaaaattaacaagataaaagtagggaaggcaggagacctttgagcccgagagtttctatcctgaactttgattgtaaggatgttttaattcaggtgacatttggacatacgtatgcaactttaacactgaattatgccaacattcatgacttttctttaaattctcttaagttatttaatatcgtatcacgtttttacacagagtagttgaactgtctgacttttttgcactttaattttacattaatggttttattctagattagtttctccatttaaattatccaatgaagatttggttccttagtttttttgtggggggttcatatccattatttttaactcattatgacttctgccaatgtgaattttcctttgtggccaatatttcttccaatcctatatttaaaggaaaagctttattagacaaattaaatttaacagagtttaattaggccagaataggctcagagagactgcagtggagccacgtggtggaagatttatgaacagaaaagaaatgtagagaaaatgaaaatgaggtctagaaacagctggattgtttacagctctgtgtttgccgtatttgaacacagtttgaacagttgcctgctctcaatttctgtacagcctcgtcaccgatggtctgcataccacactctagggagcactgtgctaggccatacagtaagttcagtaaactgtacaaaayttatatacacaccacattctctgacaacaatggaattaaattagacatcagtaaaagtataaactaacaatcttcataaaattattttatttttagctgtggtattggcattgtaagtagtttgagagaga

SEQ ID NO: 695613 - DNA, 1633 bp, Homo sapiens
atgtcatgttcatgggttggaaaagattcttgttagtgcatcaattgtccccagttttatctataaattcaatgctattctaatcaatatcttagcaatcagatattgatcaaataattctaaaatctatgcagaaaggcaaaggaactagaatggtcaaaacaactatgaaaaagaacaaagttgtaggactctcgttacctaatttattcccgctgcccaatttaaagatgtaaactgggtagcaagagtccttcagcttgaggtacagtaaaaaagagtatgattttggtgaaagacaaagacaagttaatgggtcaggatagacagcccagaaatagacccagacaaatatacctgtttttacataggtgcagtagcaacttgatggacaaagggtagtcttttcaacaaacagtgctgggaaaatcgagtgtccacatgcaaaacaaataaaccttgacatatacgtcatacttcattaaaaattaaactttcccagtgctttgggagaccaaggtgggaatatcgcttgaggccaggagttccagaccagcctgggctacatagtgagaccctgtctctaaaaaaaaaaaaaattaaccaggcttggtggcacgcacctgtagtcccagctacttgggaggctgaggtgggaggattgcttgagcctaggagattgaggctgcagtgagccaagatctcacctctgcactccagcctgggcaatagagggagactgtgtctcaaacacacacacacacaacacctggtttttctttttttaaaaaaaaattaacaagataaaagtagggaaggcaggagacctttgagcccgagagtttctatcctgaactttgattgtaaggatgttttaattcaggtgacatttggacatacgtatgcaactttaacactgaattatgccaacattcatgacttttctttaaattctcttaagttatttaatatcgtatcacgtttttacacagagtagttgaactgtctgacttttttgcactttaattttacattaatggttttattctagattagtttctccatttaaattatccaatgaagatttggttccttagtttttttgtggggggttcatatccattatttttaactcattatgacttctgccaatgtgaattttcctttgtggccaatatttcttccaatcctatatttaaaggaaaagctttattagacaaattaaatttaacagagtttaattaggccagaataggctcagagagactgcagtggagccacgtggtggaagatttatgaacagaaaagaaatgtagagaaaatgaaaatgaggtctagaaacagctggattgtttacagctctgtgtttgccgtatttgaacacagtttgaacagttgcctgctctcaatttctgtacagcctcgtcaccgatggtctgcataccacactctagggagcactgtgctaggccatacagtaagttcagtaaactgtacaaaacttatatacacaccacattctctgacaacaatggaattaaattagacatcagtaaaagtataaactaacaatcttcataaaattattttatttttagctgtgrtattggcattgtaagtagtttgagagaga

SEQ ID NO: 695614 - DNA, 727 bp, Homo sapiens
aagatagaagtcagagctgaatcatgagcagcagatgatcacacttcactcaagtatgctccatccactccacccagccaggggcatgatgctaattatccttcccgtaggcctcctcatcctcatgccaacacctgagcatgcatcttcccagtagagatgacaacagtctccaccaaggcttttagcactccccatgagagtttgtgcgaaacaattgtattagttttctgtggcttctgtaacagattaccacaaactcagtggcttaaaactgcacaaatgtatcttgcagccctggaggtcagaagtcctaaaatcaaggtagggctggattctctctggaagcactagagaactatctgtttccttgccttttccagcttccagaggccgcccacccacccactttccttggcttatggccccacatcactttgacctctgcttctgtcatcacctgactttgaccctctgccctccctcttataaggacccatgtgataacactaagcccatgtggatagtccaggaaaatcttcccatcccaagatccttaatcatctcagccaggtttcttttaccatttaagrtaacaaattcacagatactggtgtggatatctttgtggggtgggcatcatttagcctactgcatcaatatcccaagattatgtgaaactagatctttgtttctctcatctactgctttgctagttacctccttg

SEQ ID NO: 695615 - DNA, 608 bp, Homo sapiens
taagaggacacaattcaacccataatacatgtcaatactaaagatgttgggtcactagcaattatctgttcctcttcccttccttttttcctaggaaaccccaaatactagaacacaagatagctgctctgatttgctctcccccaaaataaactatttttaaattaaatggtctgttactcttagatataaatggttgttgctgatattgactatcaggttaccattcatccagatgatcattctaaccacacttcatctgcttacaaatgttaacctgggaagagaagctgggacttactctgtggcagtattcctcaagtatggtctgtgkgccagtggtgggactggttcccctggccgcaaattctactgatagaaaattaattcccctggtagaatgttagatgatttgtttcttcacaagctccatgttctctctccactaggtaataggaatgcgtggagacgttattccacaggagctcttcttttacctaaatgtgttgcggtgttgtcggttcgatgtaagaggtaaaagtttcttggttaggcttgagtctaagccatgttttctaatccagtttaaccagatatttacattggga

SEQ ID NO: 695616 - DNA, 667 bp, Homo sapiens
ttttgggggggcctgttcccaacatgtctactatttgttttcaagagcaacaaaaaattaaatgttcagtgagtcaaggtttatttttaatttattcctcactttcttttacattgtatatgaattaaagtggaaaagtagaaaaaagtagagcaaaacttaagggaaattgacataataaataagataaaaataacctgtaaatatggacagattataagaccttagagtttttgtctaaattgagtacaaatacgtctctgatctttatgatgccatggtaaaagggcagtcacgtttgttgcatgattggaatgggacctaagaagagaccatgctacattctcgtgagtcargaagacttgctggcaccagagtctgaaacactgacttcattagtgacatagatgatgtggtggaaactttttcactaccaacctggaaggtaaatgcttttcacattctgcagttgaaatggatccctggcactaaaacacaacttccagaataaggtatttctggagttactaaaatatgttgtcctagacaggttttggaaggtcaaacttcattcataagtaaaacctggaacatctaggggactgagtcaaccacagacccttaaataattatctatacctttctctcagttcttctgtatatacaa

SEQ ID NO: 695617 - DNA, 921 bp, Homo sapiens
tggctcatacctgtaatcccagcactttgggaggctaaggcgggtggatcacctgaggtcaggagttctagaccagcctggccaacatggtgaaaccctgtctctactaaaaatacaaaaattagccgggtgcggtggcaggcgcctgtaatcccagctactcaagaggctgaggcaggagaatcacttgaactcgggaggcggaggttgcagtgaaacgagatcacaccactgcactctagcctgggcaacagagctagagtgcacaagcactcctgtggccgccaccactaggactgtgttgggttggatctgaagccagcacagcactgagtcttgcccaagacctgctgtaaccactccttggctacagctcaaaaaaaaaaaaagttgatgtagcatattgaatcaaacagtaaaataaataatattaatacaataagagacataatctggtaggaacataaagtatagtggctttggaaaacactattctaaattctcaaaaagtcaaacctagagttattcattatttccacttayaggtaattgcccttgctggcttcagataagactcagcacattcccagctgtgatggctatggggtgagactccttctgcttgagaaaagcagagggaaaagtaaaggggcctttgtcttgtaccttaggtaccagctcagccacaggcgggtagagcaccaagcaggctcttggggtccccagttccatgacttggctcctggatggcatttctggaccttctctgggccagaggggaacccgctgccctgaaaactgagtcccaggtcaggcagcattcaccacaagctgactgaacagcccttggaccttaagggaatattagtcatagtctggcagtataccctattgacctgtggtgtcagtggccatggggtg

SEQ ID NO: 695618 - DNA, 647 bp, Homo sapiens
cagaaataaagccacatactttcaacgaactgattttttaacaagttaacaaaaataaacagtggaaaaacgacactctattcaataattggtgctggaaaaactagctagccatatgcagaagaatgaaactggacttctgtctctcaccatataaaaattaactcaagatggattacacacctaaatgtaagacctagaactacaaaaatcctcaaagaaaacctgggataaactctggacattagcctatataaaaaacatatgacaaagaccccaaaagcagttgcaacgaaaacaaaaatagacaaataggacttaaactaaaaagcttctacacatgacaggaaataaccaacagaataaacagataacctacagaatggtggaatatatttacaaatatgtctccaacaaaacattaatatccagaatctacaagatgctcaaacaagtcaacaagaraaaaaaactccattataaattggcagattagaaaaacattgcagtggccagattttaaacacacacacacacacacacacacacacacacacacacacaccacacaccatacatatttggcgatttgtttaattattggttgggaaaaatttccagcagaaataaagggcgatatcattttt

SEQ ID NO: 695619 - DNA, 655 bp, Homo sapiens
aaatgtgcatctacaccgaccacgctgtctctccctgccagttgcgggactgggaggtgatggtcctggggaagctcaaatgggacctggccgctgtgattgctcatgacttcttggccctcattctgcaccgaccgacaggccttggtcaaaaagcatgcccagatctttttggctgtctgtgctacagattacacctttgccatgtacccaccatccagttgtgaaaacaacccaaatgcctgttaactgatgaacagataaccatatgtgakatatatcaatacaatggaatatggcctggcatgctggctcacgcctgtaatcctgcactttgggaggccaaagtgggaggatcacttgagccgaggagttcaaggccagcctgggccacaaagtgagactccttctaaaaaaataaaataaaataaaaaataaaaacaatgtaatattattcagccatagaaaggaataaagtactaaacacactataacatggatgaactttgaaactattatgctaaatgaaagatgctaatcatgaaagaccacatatggtatgatttcaattatatgagatgtccaaaataggcaattccatagagacagagagtagataagcagttgctcagggctggagggaatggggtcattg

SEQ ID NO: 695620 - DNA, 875 bp, Homo sapiens
tttatttttgagacagggtctggctctgtcacctaggttggagtgcagtggcacaatcaccgctcactgcagccttgacctctgtggtcaagcaatcctcctgcctcagcctcccaaggagctgggattacaggtatgagccaccacgcctggctaaattgttttatattttgtagagatggagtcttgttatgttgcccaggctggtgtygaactcctgggctgaagcaatccccttgcctcagcctcccaacatgttgggattatagacatgagccactgtgccggcctaattatgactttttaaagaactcacttaggttaaatctacaatataggatatcattcactagactatcctaaatcgtaaattactttaaaatgtgtttgcaatagatatttaattgtttagaaatatatttgaagaacatgcaaaagaatgccgggcgtggtggtgggtgcctataatcccaggggctactctggaggctgaggaaggagaatcgcttgaatccaggaggtggaggttgtagtgagctgagatcgtgccactgtactccagcctgagtgacagagtgagtgagactccatctcaaaaaacaaacaaacaaaaaaacatgcaaaaggaattcaaggaagcaccttttcattggcataaataaacactttttttccatcgattaaaaaaaattaacacagacattgtttttcagcatgcagaaagaatgcttaatttatagagtgacttcaatattttgatcaagaggcctcaaaatataagattcaagtaatatgatgggtgatttttcagagtttacaggagtgaagatgccaggaacggacagcccattccactctcattttcctggcaccag

SEQ ID NO: 695621 - DNA, 1339 bp, Homo sapiens
acaaagattattcaaagactaaatcactatggaataggacttaggtttttaaatttttctttattttgatcatacataggaacttctatatagcaaagtaaaaagaaaacatttctctgaaggctaagtgtaaatattactagaaacttttattaatatgaagagagtacttgagttcttaagtccatatttgttttttaggtagtgaaataarccaatgatatattttatgagcaggcagaaaagaaataggttgagttcatgtgagtgacagaaggccatgtggctagaggaaaaacaatggggagtatttttatggagtaactgataccttgggatttatcagtcaaaaatataaaacccccataaaattgaagccatgaagttttaagtttggggaaaatatatttcttactctatagtacccttttacaatctaagtattcttactttaaaatggtttagcctcctcactgataaagaaatgtgtattaaaactacaataagttatcttttcttaacagactggctaaaatctcagtttgctaacacatcctactggcaaagcatgaggaaataggcacactcacatattgcaggtgaatacacaaaatgattcagcacctgtggcaggaaatttggcaatacccagcaaaattctatgttcaatttaccctctgactcagcaatctcttcttgattgataacataaattttctaagccaataaatgaagaaagaatgaaaacattagagtgacaatgttttgtattacttaatgaaacaatggacctagaggcaatgaaaaataaattatcaatctctgctaaaactaggtggaaatgaataggcaactttactgaatggatcaggctgataacacctatacacactgatcggtcttatcataaaaagaacaactacacattatgtgccttgtgatgtgatgcaataagaagcacacaaactatctatcagatattcctgtaaaaaaaaaaaaaatatatatatatatatatataataacctcactgacaagatctaaacaccagtttacacaaaatgcagaggatagggcaacatattaaacagccaagtgttcgtagtgtatcagcataacaaagcccaggaaatgaaaaattctatcataacaaaaaaaggaaaaatgtctaatataactctactcagagttctacaaaatgagaatggaaagaatgggggaaaagcaatatctgaagtgataaaagccaagacttttcaagaataaccacttaggtagagaaataaagcataaaacttaaaggaaaaagtaggacaaatagaatgcacaaaatctgatg

SEQ ID NO: 695622 - DNA, 634 bp, Homo sapiens
tttctatagattaaaaactattaatagtagtaattgctaaattaaacattatctagttttaagatggtcacctttcgaagaatcagtttttacagaatgtgacataatataagggggatataagctaataaagtgaatgaacatagaccttgtatgctaatgaaaagaaatgttcagtgcaattttctgctgtgatttcaattgctaaaagcaactgtaaaaatgatagaacattmcagtgtagagattagagatttatagaatgtagaatttagatttgctttttaaagatttcctgtgtctttgcaacatttctttggataaagaagaaacttgatgatctcttttgtagcaatattgacatttctttcggagtttcctattacattctctacttattgataattaagagaacaaagctcacataatttatcaatttacatgtattttgaccaaaaaatccaattgtaatacagaggtagcattacagttgtgggtaagtgtgcagactcatgagccagattgtttagatttgaatactgtctcagctccttgcatactgtgagactttgtgagaattgcttagccttttattgtctagctttctcctctgtaaaatggcattcacacacca

SEQ ID NO: 695623 - DNA, 605 bp, Homo sapiens
cttgctgtatcatagcagggcagaggcatggtagaagggcaaaggaacagatgacggaaagacaaagggcaagagagaaacagcaggggatcaaacttgtccttttataaggaacccacccttgtgataacaaatgcacccatgtaattgtagcataaatcattcatgcatataatcacctcttaaatgccccaccttttaatactgctacaatggctattaaatttcaatagaatgcaggaagggacaagtattcaaaccatagaattatattaataaatcttgtctagcttcctattctcaacaatttttattaaggtataatttacatacagtaaatcttactcttattaatgtatagttctttggattttggcaaatatacatagccatgtaaccaactgcacaatcaagacttattactgctcaatcatgctaaaaattattcataccttttgtggtcycatcccttccctctacccccaaactctgtcaaccagtaatctttatttcatccttacagttttctgcttttcagagtgtgcaatcaatagatttccagtcttttgagcctgacttcttttccttagcataatgcatctgca

SEQ ID NO: 695624 - DNA, 605 bp, Homo sapiens
tagttcagccacttattaactctgtgaccttgggcaactcatttaagctctctgaatctatgtcttcatctgtaaaatgggccagcatgtcccactttctaggattagaattaggatgaaatgagataatgcacagaaatggtgtgcaacagagtctgtgggtttgtgtccccagatgaatctaagtgtgcctccagcatgaagctataatagaacaggatgcctcccagagtgtagcaagcacccaccaggtggtatgcaggatagctcaggcagcacagccacatcttactaatgatggatttgttccarcaggaattagaataaaacataacgagcacatcaaacctgtgatttcataggtatcattacttaggacaagacaaaagtaattatttcagtttttttaaagacaaatcaatgtaaagaaaattttgggccaggcctggtgcctgtaattctagctacttgggaggattacttgaggctaggagtttgagaccaacctgggcaacatggcaagaccccgtttctgaaagattccaaatagaaaattaggcaggtgtgatggtgtgcacctatagtcccagctatttgagaggctg

SEQ ID NO: 695625 - DNA, 590 bp, Homo sapiens
tataaagctaaatataaacttagcaaatgacctaggcagaaaacctatgtttcacacaacaacctatacattaattacagctttgtaattgccaaaaactgcaaacaactttgtgttatttaggccaatagatggtaaatcatttttctacagaagaggaaacctaagtaaagtgttgatggttttaataataacaaacaatttgttcatgcctcctkgtatgtatacccctctgcattgtgactttgccacttgttggtttagggtttggccatgtgattttctttgccaatgggacaatagcaaatgtgacactgttggaggcttgaaaatgtttgtacattgggacttactctctcttgcaactgggaaccctccgtcacatgtgaggcctggactagcctactagatgagagatcctctagccaccctagaaccatctgagtcctcagacatgcagagtctcatcaatccccagctgagctggatcttaactgcccagccaaactatagattcataagaaggaataaatgccattttaagccactagattttgggtggtttgttaagcagtaagagctaacagata

SEQ ID NO: 695626 - DNA, 602 bp, Homo sapiens
tgctcaaacaatcagggagtaaatatcactgttaagaaggagaaaagggaggactcaaaaatgttgcctgttataaggtcaattttagccctgaatctggatgtttacatgtatgtgagtgtgtatagagatccattttygcagaaggccaataaactttaaagactgataagataacaaaaaaatcctgtgttgattttggggattgaatatgagccagaaggaaatatctggtgaagaggagaggtcagcactcatggagctagatgttcgctggggctaggattagtgaataagttacttcggaaattacatacacagatgtttcctgcctaaatggtgacctaatatgtgatgctggctccttcctctgaaccaaccccaaagttgtcatataaacaagttggatgcatctaataacacagcataaaacccccacaaaaggtaaaaagatactggtgaggcagacggtgattgggtctcagggtatgtaatgatggggcaggggtgggggcagtgagtgtgaagaggggtagaggatctggtgccaagattgggaacagactacagaaaagagttttctggttatatcttgatcattc

SEQ ID NO: 695627 - DNA, 2270 bp, Homo sapiens
gtatgtaaagaaaaaagggggagggaggaacttcttccttctcctgatttggtgtcatatgaggtataagcagctcagtgagggtttggggcacaggtgaaaaatctaccaaataaaatctttagatacaaccattaagatgtgaccaatttggttgaggtattttgatgcaggccatttaaaacacagtatcactgttgtattgccaacttatattagtaacgaatatccctgtgtcatttctaacccccattcaaatcatggaggattttcatattcagttgtgtttatttttgtattggcccacatttttgtcctatgtataaagtttaaaattaatttttaaaaaatttgaataggcaatggatatattcaaaatttaaaaaatgtaatacatcatataatacaatcacaaaaacatcaaaacaatatatgaagaagcaaaccttatattcttatagccacactatccatatccatttaattctaccccgcccccaacaggtaaccactttttaatttgtttatcattccagggaataacccgcatatatgtttacatatacacttagagtatttacttcaaaacactatcattaaaaatgtaaataaattttgactttttattactttgtctgacagtaaatatggtctatgatctcagtttgttccatttttaaaaaacacaatttgtaataatgtatcttgagagtgaataccctcatttgtaaaatttttgttaaaacttaaatcttggcaagttttcccctcactttcttaccttttatgtaacaatattgttagataaatctgtttaattttaaggcctgaagattctttataaatcatgtaatcttactcaagacattttgagatcaggagaagagaaggagtgtgttcaggaccacagggtcaatttgtggcagagctgggagtggaacagaggcccagtccagagctgccctctgcccacactcctgaatacacccattgctgtgagatgactcagatttattgttaccatggctgaaatccaytggaaaaatgtttctgccattcatctcaatcctctgctagtcatgtggtttatcctttataaatgaggatttcttcttttttgttgacagtttcatgattttagttgtttctgctctcttaacatttgcccagttcaatgattaatcctctgatctgagcccacttagactggagtaatatcttgccaatgagaatgagcaagtgaataattgaaatttttattaaggatgaaatttctttactatgttatatttattatatatatgatagtttcaactttctgagtctctcttgtcaaatgcattctttctcattatctcctttataaaatgtttaatttaaatggtcagtcttctgttcttatgcaggagaatgtcagcctgatcctcaaccaattaataccacgtttcaagttgggtttgacttctactaacgtagtagtctgacccctagtggttataagaaacatctgcacggcttgtaagcaaattttgactgaattttctgaaaagtgaatatcggacaatgaatttctccttgaaaataaataaaataaaaataagagaagaattttgagtccatagaaaaaataatagggaagttcaggtaaaatcatgtttctataaaaataatttcaaatcggtatttttactgattttttagtattatgtgatcaggctgcacttatgtaacacatttatggtgaacataacacacttatgttccaggaattcattctatgttatttattggaaacaaagcttgtttgcccccaaaattaatgttttgtcattgtcccagcatgccctttctagtctgcgtagaattgggatcaaacttagagctggatgacatttttgtggtctgaagatcagagagccagaaaggactggccacaaagtgaagtcacaaagtgaaattatcagtaaatctaagcaaactctgtctttcatgaggccctgaggtctaggagggcctgagtcacatcaggagagtacagcctgcccttgattcttgggagctgggaggcaaagtcgtgctgcaggggagaaggaggagggtctcaagagtgcagatccagaaaggaacaaactgtaacaactataaatgcagtatgtgcttactgtaaaaatgtccaaacagaaggatatgaagtaaaaggtaaaaattcctcctttttttccagcctgagttccgccaaaaccatagcctagaactatgtacttagacat

SEQ ID NO: 695628 - DNA, 847 bp, Homo sapiens
tgaacatttatgattctctttcccctatttttcataaatataagattaattaattatcaagccacatgtagacagggatgaaatgaacttttacagttaatcatttcagcyagtttatctttttttaacaaagttcctcttggtaaacagtttatttcctggatatgatttgtcccattttaaagcatattaaacattgaaaattattataagaggactagataaagaggagagtgatagaactcactgggctgaagatcacattttaaaaataataatataggtaaattagataaaaaacaaatactgacagggaaaaagcacatggtactgatttgcactaacacatgtattttgataaccattcaaagtataatgaatatgtcttgatattgaccttcctgttaaggatttggttatgtggtttttaccccaacttccagtccactaattatgctatcaggttttagttgtatatatattttcctccatctgttatggtgagttaaaaaacaaaaagaccttggagagaccaatcagtaattggcatggaaatactttgttcaaattatgaataaacaaattgatttcttggatggaataacattttctgttggctgtctcttcctctgggagggctcattgttctgctcattcttattttgatgatctggacctggtcactgaaaaaagaagaattgatggggctttagctataagaattgccatgataaactaactccgaaaataataatggcatgcccttaaattttgtggtagcttttaattcacaaagcattttcacatgtgtgaacatttaaacttatttagaatataattcagtaaa

SEQ ID NO: 695629 - DNA, 847 bp, Homo sapiens
tgaacatttatgattctctttcccctatttttcataaatataagattaattaattatcaagccacatgtagacagggatgaaatgaacttttacagttaatcatttcagccagtttatctttttttaacaaagtkcctcttggtaaacagtttatttcctggatatgatttgtcccattttaaagcatattaaacattgaaaattattataagaggactagataaagaggagagtgatagaactcactgggctgaagatcacattttaaaaataataatataggtaaattagataaaaaacaaatactgacagggaaaaagcacatggtactgatttgcactaacacatgtattttgataaccattcaaagtataatgaatatgtcttgatattgaccttcctgttaaggatttggttatgtggtttttaccccaacttccagtccactaattatgctatcaggttttagttgtatatatattttcctccatctgttatggtgagttaaaaaacaaaaagaccttggagagaccaatcagtaattggcatggaaatactttgttcaaattatgaataaacaaattgatttcttggatggaataacattttctgttggctgtctcttcctctgggagggctcattgttctgctcattcttattttgatgatctggacctggtcactgaaaaaagaagaattgatggggctttagctataagaattgccatgataaactaactccgaaaataataatggcatgcccttaaattttgtggtagcttttaattcacaaagcattttcacatgtgtgaacatttaaacttatttagaatataattcagtaaa

SEQ ID NO: 695630 - DNA, 614 bp, Homo sapiens
tatgtatacacacacacgtgcgcgcacacacacacacacacacacacgcagagggaagggggaggtctagaaagtcttggacatggacttaaagaatgcaaccagaatgataagggtacacaaacataaagttatttgtatacatcaggatgaaggaacccctggaggagtaagtcttcttcatcataactgaagtcctaaggccatcagcttactttcacctgagtcttacatattctggcttccactttgttttcattcgccatcctttacctaagcatctcagtcatcgctatagttycttctgtatattcataatattctaatctctgaggtctagacccataattctaactgcctattactattagatattgacgtcatctggatatcataaattcaatacatccaaaagcagatgaccacaatgggtcaaaaattaagtagttttgattcttagcaggtaaattgtgtgattatgtccaatgacaaaaaatttagagcagtatttttcaaactttcagtaagctgtggactacctgcttcatgggtaaacatggaccaacaatttttctaatttttatggattgattgcaattttaaacaattaaaaa

SEQ ID NO: 695631 - DNA, 3235 bp, Homo sapiens
  misc_feature 1927, 1928, 1929, 1930, 1931, 1932, 1933, 1934, 1935, 1936,1937, 1938, 1939, 1940, 1941, 1942, 1943, 1944, 1945, 1946,1947, 1948, 1949, 1950, 1951, 1952, 1953, 1954, 1955, 1956,1957, 1958, 1959, 1960, 1961, 1962, 1963, 1964, 1965: n = A,T,C or G
  misc_feature 1966, 1967, 1968, 1969, 1970, 1971, 1972, 1973, 1974, 1975,1976, 1977, 1978, 1979, 1980, 1981, 1982, 1983, 1984, 1985,1986, 1987, 1988, 1989, 1990, 1991, 1992, 1993, 1994, 1995,1996, 1997, 1998, 1999, 2000, 2001, 2002, 2003, 2004: n = A,T,C or G
  misc_feature 2005, 2006, 2007, 2008, 2009, 2010, 2011, 2012, 2013, 2014,2015, 2016, 2017, 2018, 2019, 2020, 2021, 2022, 2023, 2024,2025, 2026, 3134, 3135, 3136, 3137, 3138, 3139, 3140, 3141,3142, 3143, 3144, 3145, 3146, 3147, 3148, 3149, 3150: n = A,T,C or G
  misc_feature 3151, 3152, 3153, 3154, 3155, 3156, 3157, 3158, 3159, 3160,3161, 3162, 3163, 3164, 3165, 3166, 3167, 3168, 3169, 3170,3171, 3172, 3173, 3174, 3175, 3176, 3177, 3178, 3179, 3180,3181, 3182, 3183, 3184, 3185, 3186, 3187, 3188, 3189: n = A,T,C or G
  misc_feature 3190, 3191, 3192, 3193, 3194, 3195, 3196, 3197, 3198, 3199,3200, 3201, 3202, 3203, 3204, 3205, 3206, 3207, 3208, 3209,3210, 3211, 3212, 3213, 3214, 3215, 3216, 3217, 3218, 3219,3220, 3221, 3222, 3223, 3224, 3225, 3226, 3227, 3228: n = A,T,C or G
  misc_feature 3229, 3230, 3231, 3232, 3233: n = A,T,C or G
tcttggcatccaacaatgtccattaacctcagcagtttttgaagctgatgatacatcctgtacctcatatcatatcatattttaaatctctttccctgcataactttgtacagtttcatagttctactttgcccgaataagcacgttacctttctgggggcatctttgtgagtcgatgactcatagggttcaggtctgctttcaaggttagttgagcgaggacatgaccgcataacaacagtaaaatggaaatgattttttcaaggagcctctctcaccatctgatgtgtggaattttttccagctttcacagctgaggcattgctaattgttgaatttacattaagattgtaagctctggcaagcctgaaattcattttggctcatttcctcagcctcattccacaaatagtatctccagccccaaatgctaaggccaaaggagaaagatcccgagctgtgtaaggcagatctttggcctttttcttactatagcaagatgctttctatagcagtgaaaagaattctaaacattggaaaatgtctccttatgtgtgccttctctgtgtcactgtagaccaaattagttcacattagggtaggcgggactgagatttttcctaccagggcaatttgtgcraagggatggttagtgcttttagggaaattttgatcatttccttccagtttctttcagttctagcaacaactcagatatggtggctatgtgggaggtcgatccatgtttaaatcaacactgatttaacaatataatcaaacctttcttcagaattcatgtggtgatagcaaaaacaatttcaagggtaaacaaatattttttgagggtggggattttttttttgaagctgaaaatactttgaatagtggtgcttctctgagttataaagaactaactagacaagtttaaaaggcatgatttcttttcgtatgattttagttgattccgctaaaagtggggtaagaaatgtcataggaaagagtcacactgaaaagccactctacttttttccttcttattaaacatgtgctgtcatttcctaagggcaattaggataaccaagtttattcatgttaaagttagcttccaaaagcattggtctgcattagttgtttggtaaacatattcaagttcaactacctacatcgaccacgatgttaaaaattgatcatttttcctctgcatctttccctagatgatgagctgttattattttacttttttaatgaatgaagtgcctttggatgtcagttatctaattaacaaatcatccaatagttaattgccaagataagaacaaaggaaaatgtaaaaacaagacaaatcatctccttctccaaatgagaaactcaataaaaaatggttggtttaatggattccagcaggagaaaaatataaaaccaataaataattaattttattctctttttaaaattgttttgggattatggtatggatgcaattataaacaactgggagagttcagttcttaagtatatttgcatctaaacaagaggaaaaaattataccagggttatttatatcttaatgaagagagcagagaatgacattaaaacctcatgacagcctttttctggatgcctcagtttataataagtttcctttgaagggaaaggactggatttgtaggcctaactttaagtactcatactggaggcaaaactgggaagtggaggtgaggaaaaaaggatgatgatatgggttattggttgctgaataataattcacttcaaaacatataacttaaagaacagtcattttattggcttttataacttgtgtgagttgcgaattcaggaagggtttagctgcgtgctactgtctagaatctctactctgattgtaaccagacagtggttggagcaacactagtacatggatgacggnnnnnnnnnnnnnnnnnnnnnnnnnnnnnnnnnnnnnnnnnnnnnnnnnnnnnnnnnnnnnnnnnnnnnnnnnnnnnnnnnnnnnnnnnnnnnnnnnnnncaccaaagtacaggttgaggttgagaaagtagcttaggtttagtgggtgtagcagctgcatggtgctgggcatctctcgctcacgatgcagcttcagtgctccccttgctatcttttcactactagaaaaataaaagcgagtcaatcaagtggggcacaaaagaaataggggcagaagaggtgaaatcacatcaagtttgggcttcctcaccacatggcagtttcagagtagttggacacttgcttggtggctcaggactcaatgcctatgttcctgtgaggtagatgagcttcatcatttataacctcagaaatcactccgtgtaatttctaccatgctctgtggttaccagtcacaaatctgcctagacttaagggaagaggaagtagaatccatgtcttgatggagaagtgccaaatttctggaaaatcttaggacgcaattcttatgcaactgcaatatgcaagaatagtaggaaatatcttatggccagttttggaaactacagtattccataggtggccaggtaaatcttggaaacaaccaggtattccttcagtaggtaagggataaattgtggtacatcaaacaatggaatatcatttaatactgaaaagaaatgaactatcaagccatgaaaagacatggaggaatcttaaatatatattactaagtgacagaagctaatctgaaaaggtaacggactgtaatatttcaactatatgaccttctggaaaaggtaaaactgtggaggcagtaagaagatcagtggttgttaggggctgaagggagggggagggataaatagtgtaggagtcaaagagccctctgaagtttcgctaaaaaatcaactcacagaaggtagattaattgggaaaagggcacgccaatgtgtttactttcacacagtagacgcagtgattactccaaccaccgattagggggcagaagcttatacaccatgttgaggttacagaaaaacagaatgagtccacaagaatacctgttggtcctcacgttttcctagaaattttcccattccggcaaagcacactatgtgagaaggaacaagagtaattctgttgaggggcaatgcatgattcctannnnnnnnnnnnnnnnnnnnnnnnnnnnnnnnnnnnnnnnnnnnnnnnnnnnnnnnnnnnnnnnnnnnnnnnnnnnnnnnnnnnnnnnnnnnnnnnnnnntg

SEQ ID NO: 695632 - DNA, 3235 bp, Homo sapiens
  misc_feature 1927, 1928, 1929, 1930, 1931, 1932, 1933, 1934, 1935, 1936,1937, 1938, 1939, 1940, 1941, 1942, 1943, 1944, 1945, 1946,1947, 1948, 1949, 1950, 1951, 1952, 1953, 1954, 1955, 1956,1957, 1958, 1959, 1960, 1961, 1962, 1963, 1964, 1965: n = A,T,C or G
  misc_feature 1966, 1967, 1968, 1969, 1970, 1971, 1972, 1973, 1974, 1975,1976, 1977, 1978, 1979, 1980, 1981, 1982, 1983, 1984, 1985,1986, 1987, 1988, 1989, 1990, 1991, 1992, 1993, 1994, 1995,1996, 1997, 1998, 1999, 2000, 2001, 2002, 2003, 2004: n = A,T,C or G
  misc_feature 2005, 2006, 2007, 2008, 2009, 2010, 2011, 2012, 2013, 2014,2015, 2016, 2017, 2018, 2019, 2020, 2021, 2022, 2023, 2024,2025, 2026, 3134, 3135, 3136, 3137, 3138, 3139, 3140, 3141,3142, 3143, 3144, 3145, 3146, 3147, 3148, 3149, 3150: n = A,T,C or G
  misc_feature 3151, 3152, 3153, 3154, 3155, 3156, 3157, 3158, 3159, 3160,3161, 3162, 3163, 3164, 3165, 3166, 3167, 3168, 3169, 3170,3171, 3172, 3173, 3174, 3175, 3176, 3177, 3178, 3179, 3180,3181, 3182, 3183, 3184, 3185, 3186, 3187, 3188, 3189: n = A,T,C or G
  misc_feature 3190, 3191, 3192, 3193, 3194, 3195, 3196, 3197, 3198, 3199,3200, 3201, 3202, 3203, 3204, 3205, 3206, 3207, 3208, 3209,3210, 3211, 3212, 3213, 3214, 3215, 3216, 3217, 3218, 3219,3220, 3221, 3222, 3223, 3224, 3225, 3226, 3227, 3228: n = A,T,C or G
  misc_feature 3229, 3230, 3231, 3232, 3233: n = A,T,C or G
tcttggcatccaacaatgtccattaacctcagcagtttttgaagctgatgatacatcctgtacctcatatcatatcatattttaaatctctttccctgcataactttgtacagtttcatagttctactttgcccgaataagcacgttacctttctgggggcatctttgtgagtcgatgactcatagggttcaggtctgctttcaaggttagttgagcgaggacatgaccgcataacaacagtaaaatggaaatgattttttcaaggagcctctctcaccatctgatgtgtggaattttttccagctttcacagctgaggcattgctaattgttgaatttacattaagattgtaagctctggcaagcctgaaattcattttggctcatttcctcagcctcattccacaaatagtatctccagccccaaatgctaaggccaaaggagaaagatcccgagctgtgtaaggcagatctttggcctttttcttactatagcaagatgctttctatagcagtgaaaagaattctaaacattggaaaatgtctccttatgtgtgccttctctgtgtcactgtagaccaaattagttcacattagggtaggcgggactgagatttttcctaccagggcaatttgtgcaaagggatggttagtgcttttagggaaattttgatcatttccttccagttyctttcagttctagcaacaactcagatatggtggctatgtgggaggtcgatccatgtttaaatcaacactgatttaacaatataatcaaacctttcttcagaattcatgtggtgatagcaaaaacaatttcaagggtaaacaaatattttttgagggtggggattttttttttgaagctgaaaatactttgaatagtggtgcttctctgagttataaagaactaactagacaagtttaaaaggcatgatttcttttcgtatgattttagttgattccgctaaaagtggggtaagaaatgtcataggaaagagtcacactgaaaagccactctacttttttccttcttattaaacatgtgctgtcatttcctaagggcaattaggataaccaagtttattcatgttaaagttagcttccaaaagcattggtctgcattagttgtttggtaaacatattcaagttcaactacctacatcgaccacgatgttaaaaattgatcatttttcctctgcatctttccctagatgatgagctgttattattttacttttttaatgaatgaagtgcctttggatgtcagttatctaattaacaaatcatccaatagttaattgccaagataagaacaaaggaaaatgtaaaaacaagacaaatcatctccttctccaaatgagaaactcaataaaaaatggttggtttaatggattccagcaggagaaaaatataaaaccaataaataattaattttattctctttttaaaattgttttgggattatggtatggatgcaattataaacaactgggagagttcagttcttaagtatatttgcatctaaacaagaggaaaaaattataccagggttatttatatcttaatgaagagagcagagaatgacattaaaacctcatgacagcctttttctggatgcctcagtttataataagtttcctttgaagggaaaggactggatttgtaggcctaactttaagtactcatactggaggcaaaactgggaagtggaggtgaggaaaaaaggatgatgatatgggttattggttgctgaataataattcacttcaaaacatataacttaaagaacagtcattttattggcttttataacttgtgtgagttgcgaattcaggaagggtttagctgcgtgctactgtctagaatctctactctgattgtaaccagacagtggttggagcaacactagtacatggatgacggnnnnnnnnnnnnnnnnnnnnnnnnnnnnnnnnnnnnnnnnnnnnnnnnnnnnnnnnnnnnnnnnnnnnnnnnnnnnnnnnnnnnnnnnnnnnnnnnnnnncaccaaagtacaggttgaggttgagaaagtagcttaggtttagtgggtgtagcagctgcatggtgctgggcatctctcgctcacgatgcagcttcagtgctccccttgctatcttttcactactagaaaaataaaagcgagtcaatcaagtggggcacaaaagaaataggggcagaagaggtgaaatcacatcaagtttgggcttcctcaccacatggcagtttcagagtagttggacacttgcttggtggctcaggactcaatgcctatgttcctgtgaggtagatgagcttcatcatttataacctcagaaatcactccgtgtaatttctaccatgctctgtggttaccagtcacaaatctgcctagacttaagggaagaggaagtagaatccatgtcttgatggagaagtgccaaatttctggaaaatcttaggacgcaattcttatgcaactgcaatatgcaagaatagtaggaaatatcttatggccagttttggaaactacagtattccataggtggccaggtaaatcttggaaacaaccaggtattccttcagtaggtaagggataaattgtggtacatcaaacaatggaatatcatttaatactgaaaagaaatgaactatcaagccatgaaaagacatggaggaatcttaaatatatattactaagtgacagaagctaatctgaaaaggtaacggactgtaatatttcaactatatgaccttctggaaaaggtaaaactgtggaggcagtaagaagatcagtggttgttaggggctgaagggagggggagggataaatagtgtaggagtcaaagagccctctgaagtttcgctaaaaaatcaactcacagaaggtagattaattgggaaaagggcacgccaatgtgtttactttcacacagtagacgcagtgattactccaaccaccgattagggggcagaagcttatacaccatgttgaggttacagaaaaacagaatgagtccacaagaatacctgttggtcctcacgttttcctagaaattttcccattccggcaaagcacactatgtgagaaggaacaagagtaattctgttgaggggcaatgcatgattcctannnnnnnnnnnnnnnnnnnnnnnnnnnnnnnnnnnnnnnnnnnnnnnnnnnnnnnnnnnnnnnnnnnnnnnnnnnnnnnnnnnnnnnnnnnnnnnnnnnntg

SEQ ID NO: 695633 - DNA, 617 bp, Homo sapiens
gattacaagacagagcaggtgataatttaagtgatggttttgccctcygtgccatgaactgccagtgaaccccttaccaatgtaaacaaggtcattattgcctttagatttcatcagatcaggaactcaatttagataacccagaggcctctctttcaaagttctgttcctctgaaaccatttctagtactaattactgaatcagttcagctttgaccacagacacagaaccactctggactatacaaactaagaaagtgattatagggttagacctcactcagttgtgggacttgatggagcagtctatgaaggctgatgcctctgcatctagtgttgagcctaaagccatgctaggagagccagtctaccagtcaggaaagaaagctggatatggatgaacacactgcaacctacaggaatgtactgaaattcacaggaaaactagaacttgtctctaaccaactccaaccttgatgctgtaagtgacctgaggggaagttggcaccttttcccgtggaattgcacatgcacttggcccggaactctgagatgctgaaggagtgtctccagatatgaaagaaccacagatccagatgcttccccattcccacaag

SEQ ID NO: 695634 - DNA, 617 bp, Homo sapiens
gattacaagacagagcaggtgataatttaagtgatggttttgccctctgtgccatgaactgccagtgamccccttaccaatgtaaacaaggtcattattgcctttagatttcatcagatcaggaactcaatttagataacccagaggcctctctttcaaagttctgttcctctgaaaccatttctagtactaattactgaatcagttcagctttgaccacagacacagaaccactctggactatacaaactaagaaagtgattatagggttagacctcactcagttgtgggacttgatggagcagtctatgaaggctgatgcctctgcatctagtgttgagcctaaagccatgctaggagagccagtctaccagtcaggaaagaaagctggatatggatgaacacactgcaacctacaggaatgtactgaaattcacaggaaaactagaacttgtctctaaccaactccaaccttgatgctgtaagtgacctgaggggaagttggcaccttttcccgtggaattgcacatgcacttggcccggaactctgagatgctgaaggagtgtctccagatatgaaagaaccacagatccagatgcttccccattcccacaag

SEQ ID NO: 695635 - DNA, 607 bp, Homo sapiens
aagcaaccacagtgcctgattcatgatgggtgtttttaaaaaaattacagaatgaattattcggcttgttgatttctgaggctcaatagttgggctagaagtaaatgcactagccattctgttgaaagataatatgagaatttattttccaactcatatgccttctttttcagattagaggaaggctggaggaagagatacagatgtaacttgaaaagctatggccagaatcctcttgagaagacaaatgatagaattatagcatctyagtgctgagagaacctcagagcccacttattccctttcttttattttgtggatgaagatatcaagattcaaatagtttccacatggcttttaaaacgcgaaaatattcttttagagtcttgccaactgctaggttaatttaaaggtttaggcttcctagttcatgttcccatttcatcttagagttcatgaaccctttccactcagatataggtctgggtgtggtgctcattgttttccctccttttatcctgctctttcagcctacttaccaggaactcagctcactcccaccctctgcctcctcctcttctgctgacactgaaagaaacatacattc

SEQ ID NO: 695636 - DNA, 618 bp, Homo sapiens
tgatggyggaggagggcatggattcaggaaaatgaatgaggaaactagcacttccaaaatgacttccaggcctattaaaacatcaaagccaaaatactgtttcagaaataaactccagatgacagtttaaaagaagacataccaaaaaatgtttttcttcatattcacaaaacctaagctcccatcttcatagtgttctatgtttgtacgtattgaatagcttgtaatcatgtcaaatacaagcatgtgacattcatatagagacagacaatctaaaacacaattcttaatcattcggtatcactctagtctttcccaatatggacagggtaaaagttgaacttttgtcatgcaaattaaaatagaggaagaacacttctacaagacaattcttttcggaagtttttattgtgacaaaaatgttcccaaccactggaatataaaaggcacacaaacacatacaagcatgaaatgagctaagaacatatagtagtgaagaaatctgcttgcagaaaaacacatacttttgtttataatgaagactttcattttttagagcagttttaggctcatagccaaattgaaagtacagagatttcccatatctcagctgttccc

SEQ ID NO: 695637 - DNA, 830 bp, Homo sapiens
atgtgtgcaaggcagcttgcaataaggttgtctgtcattgttgagaacacttaaatttatataaggcttgtaggcaaaatgttgcctggtatcacyatctttctggatggtgttgaagaatatagctacaaagtcaatgcatttgccgcagtagaaatcctatctaatccctttagatactgagaaacaacatttttaaatatgaattttagttcccaaattcaaaaatccagtgggataacggctgcaataaaagaaattgaatgtatgaccatctgtatccaggcacgaaatgccaccagcagaactagcccacccacacgtcagtctcttagtggccagtaacaatgtccacgactgaactgaccatgaggtgaaccacatatatgcctgagggggccaacaaaatgattccaacattaccatgatctatctgtatgtactttaatctcatagtaacaacctacaaaacctaatttcaagacttactatgtaaagctacagttgtcaagacagtgtggaagttgtatatagacatataaataaatggaacacaatggagaatcccacatatatgtgctcagtttgggtttgtttcattggttgtttttttgtttgtttgttcacaaaggaccaaggtaatgtaatcggggaaaaaattattttttcaacaaatagtactcgtatcagtgtgggataaaaatgaattttgacctctacttcacgttgtatacaaaaatcaactccaaatggaacatccactgatatggcttggatttgtgttcctgtccaaatctcaggttggaggcggggcctggtgggaggtgatg

SEQ ID NO: 695638 - DNA, 1375 bp, Homo sapiens
tgaggaacagatctaggacatggaagttgattcatcttaggttccatccaagatgaccattgtcaggaaaaggagatgtcagctgaaagatgcttgtgtcgccagtgacccgggatggagggacaagccatcagtggcaggccagagtactctccctgtcaaagaattgaaggtgaggtccccagtgatgggggaggccacgtgcatgtgtgttggaggtagatcagtcagggccgaactacgaaaacagagacaacttcaagtgtctacagtaccggaagtttactgtagagagttgtttatactggtgacataggagctgagaaccaaacaaaggatggagaggtaatccagagattggcaagagcaggaagccactgcatccttatgttggagggagaaagcaagggatggtgttacgggagcctgtgggctggggccactggaaaaaaatctggaatcagagtgggacttttcagtaggaggtcatctgaagtagtggggacatttaagttttatctccccattttgaagagttttgcaaataaatttttgaaagaagaacacaattagttgaatccttttaatcctgtrggtacatagaaactttgtgactggtcccattggagtgcccttcaattgactagaggtaatgagaaagaacccaccctcctttctttatatctgctagtgggttggggccaatggtcacatgattttttaattaattccactgtagggacagaaatatgggaattcttggcatttggcatttatcattttggggtttcagcaccaattaagactgaaatgttcactctgttttaacattctttgatacttatacttgggatgattacacgaatagaaaaaaaggggtgtaagagtattaggttatgaagatataaggaaagttctacctaggcatgtttaccttttgtgattgttgaaattcatatttcttacacatgcacacatgtctggaattctgaagaatccttgtgtaaggcacatctactctacaaactaacataatcctagataagaattggagcaagtgagtctgaaaccagagttttgaccctttgtgaaaaccggtgtgcagcaaagaagtagattttcaaaaatccctgttagttttcgaagcgagactgtcataagagcatggttgaaagtgtcatggtcagacagagacccattacagaaagagatggacatggaaagactgcgacttcaaaatatcaaggcgctgaaagcattgaatctcttcttaaagatggaatgccatatcatctgggatgagaagaatggagatctgggacatgatgggagtgcttttgctttgaaggggtggattggaccccataattaggca

SEQ ID NO: 695639 - DNA, 3795 bp, Homo sapiens
  misc_feature 1961, 1962, 1963, 1964, 1965, 1966, 1967, 1968, 1969, 1970,1971, 1972, 1973, 1974, 1975, 1976, 1977, 1978, 1979, 1980,1981, 1982, 1983, 1984, 1985, 1986, 1987, 1988, 1989, 1990,1991, 1992, 1993, 1994, 1995, 1996, 1997, 1998, 1999: n = A,T,C or G
  misc_feature 2000, 2001, 2002, 2003, 2004, 2005, 2006, 2007, 2008, 2009,2010, 2011, 2012, 2013, 2014, 2015, 2016, 2017, 2018, 2019,2020, 2021, 2022, 2023, 2024, 2025, 2026, 2027, 2028, 2029,2030, 2031, 2032, 2033, 2034, 2035, 2036, 2037, 2038: n = A,T,C or G
  misc_feature 2039, 2040, 2041, 2042, 2043, 2044, 2045, 2046, 2047, 2048,2049, 2050, 2051, 2052, 2053, 2054, 2055, 2056, 2057, 2058,2059, 2060: n = A,T,C or G
ccgattaagggatacctagttagctggtaaagcattgcttctgagggtgtctgtgagggtgtttctgaaggagattggcatgtgagtctgtgaaccgagtgggtaagatcccccctcaatgtaggcgggcaccatctgattagttaggggtccaagtggaacaaaaaaatggaggaggggcaaatattttctttctcctgcagatccaggatgtccctctcctgcccttgggcatcagaactccacattctctggcttttcgactccaggattcacacaggtgaccctgggtactcaagccttcagcctcaaactgagaattataccatcagcatccctggttatgaggttttaggctgagccacactatctacctccctggttctccagcttgcagagggcctgtgttggtacttctcagccttcataatgatgtgaaccaattcccccagtaaatcccttctcacatgtatatatgtataggttctatctctctggaaaacyctgactattacagcactttgaatgccaagcacagaggttagactttaattcagtgagcaatggagaggcttttaagccatagaacaatgtgattgaagctgttcttttggaaaattaatctgatcaatgaagaggcctagattccaaaaggttaattgctaagacacctagttagtgcagagatgggactaaaatggaagtcttcagactcctggcctattttgtgcaatgaggaagaacattgcctacttcatagaattctaaatatgtattcctctctccaataagtcttcctcccttactgaattccacagccttcatgcttatattgggccagacatttagcacacaaagagaatggatggatgcttccagtatttttttattaatgcccaaagagcccaattctatgttgttccaatcataatgttcaaaaaatacctgctaaatgtagataaaggcaatggttttgtaagactccttcaaaggtggaatctactaggagtaaaataaaaataaaatttaaaattacttaaaaataataaattggcttacaaatacaaattagcattattaagacaacaatattaagaattatattttactgaagtttttttctgtgataagagttatttcatacatgagtttattttgtcttcataaatacctatttgatatatgagaaaactgagtcttagaaaggttaagtaacttactcaataccacacagtaaatggtagagttaggatttaaccccaaatccaactccagaatcccagcccttaagaagtctgctattctgcccttcagaatgattttcttgagaaggttcaaaagaagctcaggcgaaagcagcaaatgttattttttatcaaggcaataaacagtgattttcttgcagctgtggtagccattatagcaaacaggtgtcttttactcagcgccccagagagaacctaccaactcaaattgcaactcccaattgcaactgaactatctgggaagaacaacaagttcctaacacaccggaaataaagactggggaagagtacagaatgagaggagagggaactgccattaacctcacttattttaaatagcacttagatgaacaaaaacaatcaggaaattaaaataaacccaattctaatctgtatgtgtgctttgtgcatttgcatgcttatgtgtatgtatgtactcacaaagaatgcgagggaaatactggaaaaccaaacaactaaattcaacaaaaagcagtggccttacctgttaacttctgagctatttttgtgacatgaaatgctgcattttggcactttttgtttcgtgaaggcccttgggtagattttttatgaatgtcattattcgccaaagtgaatttagtagagaaaaccccaagggagcaagatgatgagttttttaaacaaacattttgtaatataattttacattagcannnnnnnnnnnnnnnnnnnnnnnnnnnnnnnnnnnnnnnnnnnnnnnnnnnnnnnnnnnnnnnnnnnnnnnnnnnnnnnnnnnnnnnnnnnnnnnnnnnnccaggggaggaattccaatgctgggctaagcatttatgtgagtgcagaaacaactatgtgaaagaagacccgttaaaaaaaaaaaaaaaacatgattgaagcaatatgtggagaagggaatgagaaagaggcaatttgacaaaagaaaataaaaatgacgtgattagagcatgtgaaaattaatttttttctagtactgattcttcaattttttccaacatattgacctatattctcaatttcacagtattatctagattatatcacagtgttggactattgtgatatcaaatgcggtagctattcagtgatgcaattggttgcaaagcaattaattacatatgacaactccaaaataaattagtgttcattcagagtaagagtggaggctgaagtaaaggataagaatgaaagaaaaaggataaggaacaggggaaaggaaccactcataaacacaagaaatggtttcttattcaacaaggtgtctgtttaaattttatgtctaagttgctaaaagcagaaaaaaaactgaaatagtttaagaaggaagaagtagtgaatctcaaagatgttgttgctgtaggtatttagaactaagaagttacacagtataatataccatgaaagtaaatgtatttaataagagaagaaatggaaaataccaaataaagcaacgtaataatttcaataatgcactgactcttaaaatgttgtaagtctacatgaagacttgagggcagctggttccagaatatccaaacctgaaacaaaattatttattgacatgacagaattatctgagatcatatgaacattgtttatcatatattttataagtgagacaaaggtctttaacagaaaaatgaatttttagactcagtaagtcaaacaagttgttgaagaaaataaaaaaggcataggtctaggataaccaacaatattaccagaaatcatttataataactctcatttcctgatttttctagaaatagtagttttacactagaaaacttgtaaggatttacctcaaacaattgtgtaaaaatccgcatttctccagatagtagtgatttcaaaccaagcaaaacttattcccgtttaactttttttttaccaggctcagaaaaggagatgctatgatccatcttgaaaacgcccatgagtcaattctaaacaaccttgaaagattatctttcagactctaacaggagaccaacataaataaaattatccacttttagaaaaagacatttttttctaaatattattgtcttttgaaattatattaacatgctgcattcttcttctgattaaaaaatacatattaaattacaatgtagcctattttgctgaaaccagaaattgtttagatcaagtaaagagaccagctggtccaaagaggagcctgtgagagacccagacaagcatcaccctggctccaaggagacatcaaatcagatagcagcaacgaagtgactgtcctgcctggtgaatcaccatagctcatctgtgtctggaaatggcaatgcaagagtaacttacactcacttgcattattgatagctggatcttcagacctagacttggaaaaggctttccactactgtattaatggattcttgcactgctataaagaagtacctgagattaggtaatttatatataatatatatatatatatttttaacttgtggtaagagccatctactcaaatctaagagttagtgagttttaa

SEQ ID NO: 695640 - DNA, 648 bp, Homo sapiens
agattattatttcatcattaagtaccctgttttgaaagacaataatagggaaatattcttctaatgtaaggttaagttacaaacaattactcatttaaaataacatgctgattttgaaagtatgcatactcatacacacatatatatatatgcatttctatttggtaaataagtatatgtaaatattatttatttatgtatacaggtgttaaaggatttatgcaccaaaatattcaaaatattatgtttggtttttctttccttggtaaattaaccagggkttgattcttaatttcttcttaataatctcctacattttaaaatttcatgtaatgagcaagtgttagtctataatcacaaaaatgctatcttctcttgttatcccttggctttagcttgacaagcagtctgaattcataattaattggaggaaggaaagatgacttctggttcatgaaactttcaatatgaatcaaaagtgaatactttttataacatttctgaaatgctgatctctctactccagactcttaatttattaagttataaggctatgaaaatattcattgcctatttcaaactcctctgcccaatgccaatttaacctagcaatatgaaattccaaggtagggcacacatgtgagggga

SEQ ID NO: 695641 - DNA, 650 bp, Homo sapiens
taatttcataattaaaaacttagtgattatcagaaatttagtttttgctttcttttttgtttgttttggtttttgagacagggtctcactctgttgcccaggctggagtgcagtgacacaatcatagctcactgtagccttgaactcctggattcatgcctcagccccccaagtagctgagactacaggcaggcaccaccatacctaggtaatttttgtattttttgtagaaacggggttttgacatgtttgtcagactagtctcgacctcctgggctcaagcgaactgccagccttggcctcccaaagggttgggattacaggcacgagccactgtgcctggccagaaatttagtttttyatttatttatttatttatttatttatttttttgagacggagtcttgctctttgcccaggctggagtgtagtggcgccatctgcgttcactgcaacctccgtctcccgggttcgcgccattctcctgcctcagcctcccgagtagctgggactacaggcgcccgccaccacgcccggctaatttttttatttttgtatttttagtagagacggggtttcaccgtgttagccaggatggtcttgatctcctgagctcgtgatccgcccgccttcgcctcccaaagtgctgg

SEQ ID NO: 695642 - DNA, 650 bp, Homo sapiens
taatttcataattaaaaacttagtgattatcagaaatttagtttttgctttcttttttgtttgttttggtttttgagacagggtctcactctgttgcccaggctggagtgcagtgacacaatcatagctcactgtagccttgaactcctggattcatgcctcagccccccaagtagctgagactacaggcaggcaccaccatacctaggtaatttttgtattttttgtagaaacggggttttgacatgtttgtcagactagtctcgacctcctgggctcaagcgaactgccagccttggcctcccaaagggttgggattacaggcacgagccactgtgcctggccagaaatttagttttttatttatttatttatttatttatttatttwtttgagacggagtcttgctctttgcccaggctggagtgtagtggcgccatctgcgttcactgcaacctccgtctcccgggttcgcgccattctcctgcctcagcctcccgagtagctgggactacaggcgcccgccaccacgcccggctaatttttttatttttgtatttttagtagagacggggtttcaccgtgttagccaggatggtcttgatctcctgagctcgtgatccgcccgccttcgcctcccaaagtgctgg

SEQ ID NO: 695643 - DNA, 640 bp, Homo sapiens
ttgatcagtggcaatctggctacagaagcacatttaatcatcctggatatgcaggaaaacattatccaggtgaggaaaacaaacacccaatctgatttgttggccatgaatatgtttactagaataaggacttctttatgcaaaattgtgaaagacataaatgtgatcccatagtaccttttttaaaaaaatgaagttgagaagtttactatttacaacagtgtctaccttataaattccagagataccaaacattcttctggcttctttgacttagggcttacttggagagggttaggtgtttggccagctgaccctcttggttaaatctgtgtgagtatgtaccaagtttataatatggatgttgggtttatcgtttagtatctagaacagtagtggtaagtagaattttttytgatgggtcaactccagttgaatgatggtcactgtctgatatgggagctatgattatgactaggctaggtaaaaagagtgctaaatttgacaaatgatgtcttctttggacttaaatttgttaaggaaagtcatttgtaccatgaatttgccatccctgctgtagaaaaatatagctttgtgaactttgtaccatactaattttatcttctatgtgattatttcc

SEQ ID NO: 695644 - DNA, 640 bp, Homo sapiens
tagggtgaagaggcactcaccctcagggtcgagcgggtacaagatcagtacttccatggccctaaaagcgagtacctctctaaattttgtcttgggtttctcatttggttcaccccaaccatggtctctgcatgctctgctagaggctctaaacgcaatagtttatgtaaaggaaacaaatgcatggaaacaaaatgttcaggaagaacaaaaacacacacacagtaactgctgcaatgccatgaaaacttccttaatgaagacagcctcgcttgctgttgtcrtatgtcatggctgtttatctgagtcaactccagagtagcaacatacttcagaaaaacaccactgtaagtcagaggtccactcggtgaaacagggagcctagttaatgttaattgggtctttgccttttgaaaaccaggacaccagccctatgtcccttagggttgtttcactaaagtaactcagctgttgtgacattgaggtaagtgtcctttatacaaaatctcctaatggttaaaaagaaaaacgtgaggtttgaagaccagttgctcagtgcgcctcttctaaatgaatggcagacagatactctcggggtagaattacagacctagtttagtcacggtcttggtaaggatct

SEQ ID NO: 695645 - DNA, 1352 bp, Homo sapiens
caaaaacaagttttcactaagagctggaagcaggttaagagctcaggaagaaccccaagtgcagcagtctgacaccagctgaggcttggtgcacctactttttaaaagtcaaccaagcagaagagacttcagctttctcataaaaattacagaagctacctaagactcttgcctaagtagatggcccccacacctcataaaaaggagtgtgagggtgaacatgcagaaatggccaagatcccccacaaaaagaatctcaacatgtagatggtgaataaccaattgaggcacaaacgttctgttcctcacagcaatgtatgactttattttgtcatcttgcttcaaagaattccgatttcatatcttttatataagacagaaatttcctagtaagaacatcagcaacagttcatcagtttcatttttgaaagaaaaataccaagacagactgatgaggccttaataaattttatttctgtcaaaaggccccatctctacccttctcttgacagtagcatccactgttaattggctgccaaaaccatattaaatcaggcaattaaacaaaaatcatctgaccaataggatactaacaatgcatgyaaaatcaagatataaaagtcaagagaggaagaagtgtaacttcttgattaaaatacagatctggagccatgggaaacaactaatggaaagttaccaagttgttggtacagctctccaattcataaaagattaatcagtcctgtccaaaaactagaccctgttttccatatctaggcagatttctgaggcataatcttttcaaaataaaacccaaagtgcagatttaaccaattctaaaaactatttctgaatcagaacacaggccattaaattttttgagttaaatatagtcttccattatgttagattatattgttttcaattattcgctaacctccctgaaagaggattatatcccccattgtcacgtgacttatagcatctccagatggaagaattaaccacacttctctaccacattgctggcaggcctggccatatgactttcttcagccaagtgaaggcgagtagaagtgacacacaagcagaagtgttaataactatgaatgaactggtcacttcctttttaatttttatttatttttttgagacagggtctcactctaccaagcaggctggagtgcagtggtatgatcacagctcactacagccttaacctccccaggctgaggtgatcctcccacctccacctcccaggtagccgggactacaggggcgtgctaccacacacggctaatttttgtattttttgtagagatggggttttgccatgttgcccagactagtct

SEQ ID NO: 695646 - DNA, 541 bp, Homo sapiens
ttatttttagtagagacggggtttcgccatgttggccagctagtctcctggtctcctgaccttrtgttctgccctcctcggcctcccaaagtactaggattacaggcgtgagccaccacgcccagccccaaaagttaacttttaaagaagtaaagtcagttacatgaacagtgcatcttaatactcttaagaccattgcaaacattctatgagcaataatttcaaaggcgaacgtgtgtacgcaaacatacacattctttccaacaagaaagtgcaacaagtgattgtgaatggcttaacattaagaacaaggatactgccttcaattaatattttaaataagactttagtcagtaagtatcagtctttgaagtaaaaaggagtacagatatttgtggttttgaatatttcagaacacagtatatttcttggaacacaagttcttcaggattttaacaactgttagctgcaagaaagattctctgatcaagaagtctgagtaataccgagctacacaaaggtatcagtttcttttctgtag

SEQ ID NO: 695647 - DNA, 541 bp, Homo sapiens
ttatttttagtagagacggggtttcgccatgttggccagctagtctcctggtctcctgaccttgtgttctgccctcctcggcctcccaaagtactaggattacaggcgtgagccaccacgcccagccccaaaagttaacttttaaagaagtaaagtcagttacatgaacagtgcatcttaatactcttaagaccattgcaaacattctatgagcaataatttcaaaggcgaacgtgtgtacrcaaacatacacattctttccaacaagaaagtgcaacaagtgattgtgaatggcttaacattaagaacaaggatactgccttcaattaatattttaaataagactttagtcagtaagtatcagtctttgaagtaaaaaggagtacagatatttgtggttttgaatatttcagaacacagtatatttcttggaacacaagttcttcaggattttaacaactgttagctgcaagaaagattctctgatcaagaagtctgagtaataccgagctacacaaaggtatcagtttcttttctgtag

SEQ ID NO: 695648 - DNA, 644 bp, Homo sapiens
tgggattacaggcatgagccaccgcacccggccacttttcctttagatattcagaacactcatggtcttttctatgaaattttgaggtgggttctcattgcggtttaccttttggtttgtttttattttcttagccaaaaaaaaaaaaaaaaaagctgaaagtgagttatagggagtagttgttattgaagttttgcagagaaagcagacatggtgaaacaggcctcctggagagtggaagagcaaattatgtcagaaaatgttgactagggcttgtctggcagtgccgatgccccrtccgaaattagcacaaacatttaatgagtgagccatcagtgtggttgtgaggatttctcctttcgtgttcagctgcttaaatgcagacacatagttgtactgggatcttgctgggtttggaggacaaaagaagaaaagaacaaaaacaccgaaggtatatgaaagggaaacattacagtaggggattgtggagtctaaccagggtgaggaggcagtggtagaagtatgacagacagtgaaaagtggaagaggcagtcaatgggagattccactgtggttgaagcatattggctcagaattgttggaggaatgcccaagaaaaacagaagatgatgagctcagtgaga

SEQ ID NO: 695649 - DNA, 580 bp, Homo sapiens
aaaaaaaaaawaaagataataatagctattttattgaatcgtaaggcatgcgataatatataacaaatgcctggtacatggcagttgctcaacaagtgacagtattagtactgagtaaataacatttggcccaagaccagtgagtcatgctgaaactgccaaaagtaagcaaagtgagtgtgcccctcagaagtgtcctcatccagtccattgaaaaagaaaaactttactccctctcactacacaactggcagctcccataaaactgctaggaagcacactgcatctccttccaggacttgaaatgggtcgtgttatgcagaaagcaagttatttccagaaatatgcaatgttaagaaaataaatcacattctatctccttcaacatgtcaaaggtccactgaaaactcttgctaagaacaccacaaaatcacgttttgtcatcctcatccgatggcaacaaatacaggttggatcaagtggtggatgagccggccctccctgtgctcatgccctattctgtccaagaatctacggcagcggccctccctgtcctcatgccctattctgtcctagaatc

SEQ ID NO: 695650 - DNA, 581 bp, Homo sapiens
ctaaggaaaaagaaagaaaagcaatcattaacatgaggaggcagggggcagtaaggacaggggcatggtcacagtaccctacagtgctcggctgggagtaatatgtacataggataatgtaaacactatgtgttatttaatcctacaatttgcaatataattatattgaaggactgctgagggagggctgaaggatggctccttgaccatcatgtgaagttagtagttaaaacggatgaatcagaagaggtcagggtgcacacattacttagaatcaagaacatgtgaatgccaggaaaaaaaattgcttaaaaattatgtggactttaaattctatctaccaggccacattagtcttttccagtaacaaagttgaaccctctaaggagatttctagggcagtttgaaaaagacccaaagctgtttactaatgtagtttattaattaaagtggccctggagtcacacamcacaggtactacaatttgtcatgacatttggccctccatgtccaagggttccacatacacggattcaacaaacctcagatcaaaattattcaaaaaatgaaaataaaaaata

SEQ ID NO: 695651 - DNA, 645 bp, Homo sapiens
acagaaaaccaaatactacacgttctcacttataagttaaagctaaactatgagaatgtatggacacaaagaagaaaacaacagacaccagggcctacttgagggttgagggtgagaggagggtgagaatcaggaaaaaatctgtcaggtattatggttattacctgggttatgaaataatctgtataccaaacccctctgatatccagtttacctaaatccctgcacatgtacttctgaaactaaaatataataataaacatgcacatgtaaccctgaaactaaaataaataaacctgcacatgtacccctgaaactaaaagaaaagttaaaaaaactttaaaaagagaaagaaatccatgcaaaaatagagaaatttgtcaataccagagaatgaagatgaagaaaggaaaaaaaaaaaaamaacaaacttctgctttcatccatgagcctgtgtgtaaatgaagaattcccttttagagacaaaacaatttactgtaataaatcagggactattgcataggtgcagtcaggattacacaatgaagagagctttgtaggtactgaaccatgacaaagtcttcatactaatgaattacattcctcaaaaacctttgtcaaatcagtcaaagaactctctccgaa

SEQ ID NO: 695652 - DNA, 656 bp, Homo sapiens
atccttgcttctgaatcaatctcatcagcattcagttatatcccagtacctcycttcttcaacaagaagcaaggaggcaaagctttggagagaatttccttaatttgaattctctcaattctcttcctcacagcagcttcttgaaagagtgtattctctacacaaatactgtttacttttcatcttttattcactatttctttactttgttgattttataaaagtggcacatgctccttttttaaaaatttaagcaataaaatattttttaattatgaaaacagccccagaactcccacaacccagagataatcatcccttgtctctttgtaatctctcttttatattaatatatgtcaacatgaagggggatagatagagtaaaaaatataaaatgggatatattctatatgctgtgttttaaaatgtaagatttaattgtattttttcaaatgcatttttccccaaaccttatttattttttattgtacttgaatttaacaacagaacaagtttagaaagcaaaattaaaagacattcctggccatttgcagtggtggtttatgcctgtaatcctagcgttttgggaggccgagtcaagcagatggtttgagcacaggagtttgagaccagcatgggcaacatgttgaaaccct

SEQ ID NO: 695653 - DNA, 732 bp, Homo sapiens
tcctcagacatgatctcctcaaatgttttctcttttcttttatatattctttttctgggactcagaggtatacgataccctcgcttatagcctctgtttctctttcatgtgattttgtctgttttatatttggggctatgtcttcagatttatatatttcttttatattctgtgcctgataattttactatctaatgtgtgtgtcattgtaaatttttaggtctcattttttctgactcccactcttgaagacaaggttctctgtgtgttcagtgatctgtgtttgtcaattcacattttcttcctatgtgggaacatatgaacatatgagggcctattatttttcataagaaagaggaaattttcatttggttctgccaggttccagaagtcagcagtgagccatgcaacattttagatagctccaagcatcccactaactaaagtggaagtaataaaaacactcagaatctcagtggcttaaaatgagtttttatttgtttttatatgtaaaaacacaaatgcataaaatataataatatacaaaatattgcattttgtgtgtataatatacaacatattgtgtttgtatgtacaatatacaaaaatacaaataattttaaacagattttggtttagacatatttttatagaacactctttaatatttgtttattctatttctcactcatgctgcttgtttttaagggccmcccatggactgacagtaca

SEQ ID NO: 695654 - DNA, 630 bp, Homo sapiens
tcagctcctccagtgtttttcttagttttattgttctagattgttttcttagaatacaatatgctgtcttaacctataaataaaggattctcttctyttcagaaaaaaacagtaaatttttgaatttttaaaatatattttctattatcatatattgattacataattgttttttcctcatactcagtaacagcaattatgcgtatattgtatttgtcttttatatctataattagatctctaatctgctttatttatcatttttaagaattccatgttgattctctcaagtttttctttcatgtcctaaaatatagaacagggataaatgtgtgtgtgtgtgtgagtgtgtccatggtgggggtttatgtatgtgtatatgcacacaatgctgctaatgttgcttttatttctgtatttgttttgtttctctcttttatctttttctgagctctgtgaacttacttttcatttctggtcttataattggtttatgttttctttaagtcttttgaactcaagaagatttgattagaaactatattttgggttttggtaattgttctagtggtatttttaaccctcttttatttcttatattgcttttttcttacttatttaatttttaat

SEQ ID NO: 695655 - DNA, 491 bp, Homo sapiens
tttttttgggatggagtcttactctgtcgctcaggctggagtgcagtggctcgatcttggctcactgcaacctctgcctcccgggtttacgcgattctcctgcctcagcctcccaagtagctgggactacagacgtgtgccaccacgcccagctaattttttgtattattaatagacggggtttcaccatgttagccaggatggtcttgatctcctgacctcgtgatctgcctgcctcggcctcccaaagtgctgggattacaggcgtgagccacgcgcccgaccgcatcccctgctttctacagtaacttctttggtgtttccaaagatcttcatgccttgacgtctatcatcaaacttgccatactrtatttttaagcattatttcttttctaattatataataattccagtaattgtagaaaatgtatcatacattttttagaatacatacatgtattctaaatattttatgttatccattcccccta

SEQ ID NO: 695656 - DNA, 620 bp, Homo sapiens
aacattccggaacaagtgccttaatcaaagtccaaaagcttacctttattttatctttccatccagaaaataattcctatcctgtttcatctaacttctagtggtagtcacacctctacctccctgaatatttttctattaaaattcattatcacagtaggtcatcatacatttttataatgtagccttctgttttgtttaaattgaccttctgtggtacttacttacgtattttaaggtcatattttcagtttattttctgaggacatatttgctttttcttaaacaattttgttggatagaagacaatttcaatgtatttattctttatttctatggcttcagtttattttattaggttgggcaaaagtaatagtgatttttgccgttactttcaatggcaaaaaacccaattacatttccaccaatttaaatagatttaggaaatcagaaaaaaaatttaagrttatgtttcttactgaacatataattatattctacaaaaaatgaagagtgtaattattaggggcaaaaagggtgggtgaaagcagacattctgtttcaaggattttaactcactcagattactttaaaacgctatcttgacttattaattggtc

SEQ ID NO: 695657 - DNA, 620 bp, Homo sapiens
aacattccggaacaagtgccttaatcaaagtccaaaagcttacctttattttatctttccatccagaaaataattcctatcctgtttcatctaacttctagtggtagtcacacctctacctccctgaatatttttctattaaaattcattatcacagtaggtcatcatacatttttataatgtagccttctgttttgtttaaattgaccttctgtggtacttacttacgtattttaaggtcatattttcagtttattttctgaggacatatttgctttttcttaaacaattttgttggatagaagacaatttcaatgtatttattctttatttctatggcttcagtttattttattaggttgggcaaaagtaatagtgatttttgccgttactttcaatggcaaaaaacccaattacatttccaccaatttaaatagatttaggaaatcagaaaaaaaatttaagattatgtttcttactgaacatataattatattctacaaaaaatgaagagtgtaattattaggggcaaaaagggtgggtgaaagcagacattctgtttcaaggattttaactcactcakattactttaaaacgctatcttgacttattaattggtc

SEQ ID NO: 695658 - DNA, 1955 bp, Homo sapiens
aggcatggatggcagggacccaacagacttcaggcaatactctgtcctttgccccatgaggatagcctgtctccacaggaggaaggctgcgattcttcacccacccactcttccttgcaatggagacacctagagagtttggggtagtaagaaagggtaaggttgagaacccagccatgtgtattggcccagacagagccttggaagggagaaaaggagagggtcacagaaactcgtttcataaccaaatttccagccacttctcctctactgggcctctgcttctgcatatggaggtgggattggtggtcactgctgcttcttagagagggtcacaagggagtgtaaggagtgccagcagccaggtgggtgggcatgagagcagatctccctgtgctcctcaccagcgctggacctcaggcattttattgatatttaacaagcacaaatttagaatttaccatgtgctaggcactttataattgctagcccatttatgcctaattacagtgctaacctcatctcaattttacagatgaggctacggcagctctgagaagttaactcacccaatgtctcagagctactaagtgatagaactggaatccctgtactttcctgtaggaatattgtaccctaaaatttcatgtacacacatgttgatctatgttgatctatgtgtgcatgaaagatgatctttcaaatcaatggttcagtgaaagaaaacaagtgtatgcattgcatactattatttatattttttaaaaagcaaacacctataaaacaaaaactatgtatgtctgtagtaaacttttgtgaatgtaaatacctaggagaatctggaagggcacactgaatggataattgtttgtctctgggaaagaaactaggataaaatggcatggtcaacaattggttttctctgtaatattgttatattaagaatgtgtttatggtcatggtgtaattaaaaatacattttttaaaactaatggaaaaatagggttggcacagtaaggttagaagcatagaagcagacatgaaagttttatatctatgaattttatatwttctttttctttctttctttctttggtttttttttttttttttttagatggagtttcgctctttttgcccacgctggagtgcagtggcatgatctcggctcactgaaacctccacatcccaggttcaagtgattctcctgcctcagcctcccgagtagctggggctataggtgcatgccaccacgcctggctaatttttgtatttttagtagagatggggtttcaccatgttcgccaggctggtcacaaactcctgacttcaagccttccaaagtgctgggtttacaggcatgagccaccacaccaggcctatattttatattgtctaaactttttaatttttatgtttactaaaataaagggtgtatactaaataaacatgctgttgttcctttgcaagttgtaaattataaacaataggctttgtagattgacaaagatatgcttcctttgatcacagcatggctttcatgggtgaggtgaggttggcaatgatggtgctataattttgagaagaaaggcagattgtgagtgattgggagtagaaatctctgggccttcttcctcctccaactcactgatggccatgatctctaaaatgcctctgtttttcagagctgagttttgtgtgtctcctgagttagtaaagtcattggctgtgtaaggtacgcaagggtctggtcttgcccaacccgttttcacatctcttttgaagaatgcataaagtgcagggtgcttggtttttttctgatggtctctttgtgcctgtttaaggatgagagtgtgtcattcaaaccttgtccaaagatcaaactctctttgaggaggggattgatggaattccactgactgctttatcagtgtagtttgaagcttagagagaga

SEQ ID NO: 695659 - DNA, 1290 bp, Homo sapiens
  misc_feature 1123, 1124, 1125, 1126, 1127, 1128, 1129, 1130, 1131, 1132,1133, 1134, 1135, 1136, 1137, 1138, 1139, 1140, 1141, 1142,1143, 1144, 1145, 1146, 1147, 1148, 1149, 1150, 1151, 1152,1153, 1154, 1155, 1156, 1157, 1158, 1159, 1160, 1161: n = A,T,C or G
  misc_feature 1162, 1163, 1164, 1165, 1166, 1167, 1168, 1169, 1170, 1171,1172, 1173, 1174, 1175, 1176, 1177, 1178, 1179, 1180, 1181,1182, 1183, 1184, 1185, 1186, 1187, 1188, 1189, 1190, 1191,1192, 1193, 1194, 1195, 1196, 1197, 1198, 1199, 1200: n = A,T,C or G
  misc_feature 1201, 1202, 1203, 1204, 1205, 1206, 1207, 1208, 1209, 1210,1211, 1212, 1213, 1214, 1215, 1216, 1217, 1218, 1219, 1220,1221, 1222: n = A,T,C or G
ttgttattaacagttccaagatgaatactttgtacatatatctgtactgtattctgtgactatcttcactaatatgataatgaagattgtatttttatttccagtatttttttatctttggtcaggttttaacattttggaggtcatgtttattctttgataaattgctgagttcatttttatattagaatacttttctcttattgttaagagctcttaatatatccaggatgccaacctttcccatctttcttatcattcatatctcacaagtgttttttacagtttgtcccttactttttaaacttaattttatgatgttttgaagaagcaaaacctttactgtttacatagtcaaatttatcaataattcttttttggtttatttagctctactgatttaatctccaaacattcctactatcaccaacctagatcagatcctctatcgtcttttatccagatacctataacagtctggattggtctccctgctcccagtctctgtcttttggaatctgcactccatgcagctgtcagaatgtcctatttaaaatgaaaatctggccaggtcattcttctacctgactgtttgttcagtgctgtgtgttccaagttggatattcatacagccaatgctatatgaggtggctcttcataaaaatgaaataaaactaaaataaaaactaacttcactaataaaactaataaaaaccgttcttaaattccaaaatgatgtggaaaaatgcagagaaaaaggaaacgtcatctccaattctaccatcagaaataaacatgttttaatattttattgaaagtctgctggatatctctatatatgcagatacataatttgcacatacctgcaaagaatttctcccacaaagaatggaacatattcctggagcattacttatttgtatagatttttgaagaaataaagtacattattttattttaagaaaaacacacgtatatggagcaggatgcatgatccctatgaatttgcaaaatatactggaagacttcaaagaaatattcgtatttaggtgagcatgttcaaaagtcaatggatayggagaataaagttttaaacctcttgacatgtgcaacagaaactgcnnnnnnnnnnnnnnnnnnnnnnnnnnnnnnnnnnnnnnnnnnnnnnnnnnnnnnnnnnnnnnnnnnnnnnnnnnnnnnnnnnnnnnnnnnnnnnnnnnnnatatccattgccttgtcctcttgatcacataggatttccagcatcccttgaagttaggtgtgaccatg

SEQ ID NO: 695660 - DNA, 1899 bp, Homo sapiens
ctgagcctcatttgcatcaaaaattaaagaattacttaaaatattgaggtatttttaataataataaattatattgctgaattttccttttttcaagcatcttaaaatatttcacagaatgcttttcagcaaatgcgcatcttctcccaggaaagagaccatgccttaggacttattcaaaaatggaaaaaagtaactgtaacagaactaatatttaaattttgaaaattataccaggattaagttaatacttgcactagaatactgctgtgaaaatcagaatatcaacagttagattaatgtcattttacaactgactcttaggatgcatttggcatgttttgactttaaaagtatcaatctaaatctttaattttgcaatattcatcatagcagtgacaaatgatgattaaaacaaactctatcttgaatgttgccatttgccctattttctactgaagataaacttcattttatgtagtttttaygtggcagatactatgccaaatgtgttacatatctcaataactacaagagctctttgaagtaaatataagctctatgagggtaaatacgtaaatgtaagttctatgagtctgtctgttttgttcacagatacacatctagtacttaatactgtgtctgccacatgggggggttcaatatatatttattaaattgaataaatgttaccgatggggtaagtgaaagtgctatgtacataaacacaaagccatatttttgtttggctagattcttaccttgcatctttgtggtactatagagaagactttctgagaaaaactttctttttcttccaaatgtagaaagagcaatccataattcggcataattttttagctttcttctgtgggtttacaacagcaaggcttccaagctgcagatcagatattaggactgattactacaagataaatggcactcatgggtaggggttgtatcgatattaaaatatagttttagaagacttctaaaactgatgttctcttgaggccttacatttgcaggacacctgagctgaactttagcctactgaggttagcccaaaaggatcaggaaagataattgagaggcattcttcagtagaccataagtaactaagttcactcacagatcatcaatccacttttataactttcactggaatcaagttttgctctattcccaatctaggatgagagactatgaaggtccatggaacccaagtttggaactagtgtggtcaaagatgagggaagtccatgcatagggctaacttgggatttcgaggtcattggacaaggtcatttaagagatctctttttcaaatgcaggtggatactggattagggaagccaaaaataggcaacattggtgaatccagaaagcgaaaacccaaagatcatgccgaaagtctctctttatggccattttccctgtctgcacccaaggtgtccactgctatttctttagcacaggttccacatattttggaaacatattctcaaaactaggtagctgatttctgatagaatgactactagcaaacttaaggaagacaactaagttagtaaaatgctttaatatcaaaaacagcttcactgaaagtacaagttcacacgctagtgttagttttggggttatagtttctgttgataatccacagctctaagaatgctccttaccatattcagaacaattactttatctcattttattttattgtagtaggaacacttaacatgaaatagatcctctttactcattttttattctcctagtttttttagtcttgtgggactcagcacttcatctgtaggatctggtgtatctccaggcctctttacaaatgtttatgtgtctaatacagcactgttgactataggcacagttgtaagc

SEQ ID NO: 695661 - DNA, 555 bp, Homo sapiens
tgtgcttttttgtatgtcagcaggagttggtgggtatttatccttaaggtcgtatcaatgtttcctgctagggtctgaaaaggcaccttaattattcctaattcctacccatgtgcaatgcgttttgtgctctttcacagtcaccagccttaggtgtaacrgggtattctggcagctcccaaatcttgtaaactgaaaagactaatttcagtgttcctaagtcatactgataatgttagcatgtggaatttgcactgggtaagcagggctgccaatggttatttctagcttctcaatggcaaaagccacaaaagccacagaagccacagtttcatattcatttttttcttacctatgtctagtacagtgcctaaaattgaaatgtttagcaaatggcttcataattgtgtcaaataaatgaattccaaaaagattcatagtgcaaaataaataagatctaggtacaagaaagatcacttaagagcaaacacaaatgtaattttctgttatttttaaggaagctagttttttgacctggggtgtttaacaaagatt

SEQ ID NO: 695662 - DNA, 658 bp, Homo sapiens
tggccaacacggccaaaccccgactctactaaaaatacaaaaattagctgggcgtggtggtgggtgcctgaatcccagctatytgggaggctgaggcaggagtatcacttgaacccggggggcagaggttgcagtgagtcgagatcgtgccactgcgctctaacctaggcaacagaggaaggttctgtctcaaaaaaaaaaaaattaccttttcattgtttgctaatgtgtagaattctgcatgtaacatgtccagtttaaagaatgattatagagcaaatccctgtgtaaccagcgctcaaacaatgaaatagaatataatggcagcccagaatccctttgggtggtccctcctgccacacctacttccctccctgcagaggtgggacagtcctcctttctgccttccttgctgtgtatggttttaccacctacacgtgcatccctaaacgatgcaggttgattttctctgtttttgaactttatgtgttcatgtcttctacatatattttgtgacttttttcttttatgacttgctcatttcatttatcattgagattcatttattctccgcactgaaattctggttcattataggcttaatgtaagatgttgaggccatattgtttattagaaaggcactaaaatgccctattca

SEQ ID NO: 695663 - DNA, 589 bp, Homo sapiens
tgtggtagtgcacacctgtggtcccagctactcaggaggccaagttgggaggattgcttgagcccaggaggtggaggctacagtgagcaatgatggcaccacactccaacctgggcgacacagtgagactctgtctcaaaacaaaacaaaacaaaacaaaacaaaacaaagaagatttggtagaattctcctgtgggagtttggagaaagaagtagaacattattattgtttttttcctgtcatatttctaatggaaacaggatgattacaagagtgcaggggaaaggttggggaaaagaaatgtgacttctttcacttttacattattgaaattgttatttaaattgtattctataaccataattaaatcttcataaacttttcacttaatgatcttagcattcattgatggtctttgcctgaatcttatttcaaaaggcaaggcatttcaaaaatgctgatttttaaaatttctatcatttcttatacacttattagctcacatttttctgtaatgagtttacccttatcaagtgggactctttktttagctgctcctctaagctgaattttcttgtattctcaaag

SEQ ID NO: 695664 - DNA, 589 bp, Homo sapiens
tgtggtagtgcacacctgtggtcccagctactcaggaggccaagttgggaggattgcttgagcccaggaggtggaggctacagtgagcaatgatggcaccacactccaacctgggcgacacagtgagactctgtctcaaaacaaaacaaaacaaaacaaaacaaaacaaagaagatttggtagaattctcctgtgggagtttggagaaagaagtagaacattattattgtttttttcctgtcatatttctaatggaaacaggatgattacaagagtgcaggggaaaggttggggaaaagaaatgtgacttctttcacttttacattattgaaattgttatttaaattgtattctataaccataattaaatcttcataaacttttcacttaatgatcttagcattcattgatggtctttgcctgaatcttatttcaaaaggcaaggcatttcaaaaatgctgatttttaaaatttctatcatttcttatacacttattagctcacatttttctgtaatgagtttacccttatcaagtgggactcttttkttagctgctcctctaagctgaattttcttgtattctcaaag

SEQ ID NO: 695665 - DNA, 673 bp, Homo sapiens
tgtgcatgtatatctccacatacacaccagttcccaaatagaacatgttcttttcattctacctgtaatatggctgggagatcaaagactaactcctgttgcttttttatttctcaatatctgttgagaaagtgcctctgttatgtttccagtttgtagaatagatcttgtagaattttaaaagtaagccaaaatgttagtggaaaagatgggtgtgtgtgtctgtgtgtgcattctattttccacagctgtcacctgctttgcaaagatgttcttaaaaggtacagagaaatccaaggcattgcccatgatgcacttaggcacttagccttgaaccatactcagaatgaccttctcaaatccagtaaacagragctctgtgactattttattacatgctgcgatgctcacagtcataagtagttaccctgaactttcacccctttttggtttttgaagttatgaaacagtgaacttgaagtgacatgtatagaggaaacctgccttaacctgctcctaaatggcttccctttgcacggtgtcctgaacaaaactgaaaacatattctacaaagtagttatatttttgatctaactagtggagaagaaaagaggctaaaaaaataaaattcagaggaatcatatttttatagatataaacctttttctttcca

SEQ ID NO: 695666 - DNA, 588 bp, Homo sapiens
ttttcttttttttttctttgattcagatcttgctgtgttgcccagcctggaatccagtggcacagtctcagctcattgtaacctctgcctcctggattcaagcgattctcctgcctctgcctcctgagtacctgggattacaggtgcctgccaccacacctggctgatttttcggttttcagtagagatggggttctaccatgttggccaggctggtctcaaactcctgacttcaggtgatccacctgcctcggcctcccaaaatgctgggattacaggtgtgagccaccgtgcccggcctattatttatttttaatcatctcaactaccctaatggggcaggaactatcattctccccactttatagataaagacaactgaccccagtgtttccaatgtcacacaactgtgatagaaatggaactcaaattcaggcagtgtgaaatctccagatggccctactcatacttccctaatgaackcatacatgacctcattaattctaataaaggccccatgagataggtatcattatcccctcttactcatttgtaaggtgacagcactgggatttgaacctggcttat

SEQ ID NO: 695667 - DNA, 1296 bp, Homo sapiens
  misc_feature 594, 595, 596, 597, 598, 599, 600, 601, 602, 603, 604, 605,606, 607, 608, 609, 610, 611, 612, 613, 614, 615, 616, 617,618, 619, 620, 621, 622, 623, 624, 625, 626, 627, 628, 629,630, 631, 632, 633, 634, 635, 636, 637, 638, 639, 640: n = A,T,C or G
  misc_feature 641, 642, 643, 644, 645, 646, 647, 648, 649, 650, 651, 652,653, 654, 655, 656, 657, 658, 659, 660, 661, 662, 663, 664,665, 666, 667, 668, 669, 670, 671, 672, 673, 674, 675, 676,677, 678, 679, 680, 681, 682, 683, 684, 685, 686, 687: n = A,T,C or G
  misc_feature 688, 689, 690, 691, 692, 693: n = A,T,C or G
agtgcagtggcacaatcttggctcactgcaagctctgcctcccgggttcacgccattctcctgcctcagcctcctgagtagctgggactacaggtgcccgctgccacgcctggctaattttttgtattttttttagtggagacggggtttcatcatgttagccaagatggtctcgatctcctgaactcgtgatcctcccgcctcggcctcccaaagtgctgggattacaggcgtgagccaccgtgcctagccgaaacttgagactctttattaaaacattaagcaggcacaatttcaggcctgtgtgcatgtattatgggcaatctaaagacaagtgccagccacattcctgggtgggtttgcatcataatggagaaaccagaagaaagaaaattgcctaccatcttagcctaggagtaactaccaggagataaagggtccaacagtgatggaccctcctggttggacaattcttaatcaaggaacactgggctcatggctgggagcctgtccccacatctgaaaggggcctctagggtcatcaaagaggagcggacaaggggttttactgaccatctatgagagtgcatacannnnnnnnnnnnnnnnnnnnnnnnnnnnnnnnnnnnnnnnnnnnnnnnnnnnnnnnnnnnnnnnnnnnnnnnnnnnnnnnnnnnnnnnnnnnnnnnnnnnttaattattaggtgatggaattactgggcttgtttaaaaagaactataggccaggcgaggtggctcatgcctgtaatcctagcactttgggatgctgaggcgggtggattgcctgagctcaggagttcaagaccagcctgggcaacacagtgaaattctgtctctactaaaatacaaaaaaattcgctgggtgtggcgaagtgcacctgtagtcccaggtacttgggaggctgagacaggagaatcacttgaacctgggaagcagaggttgcagtgagccgagatccagccactgcactccaacctgggtgacagagcgagactccacaccaccctccaccaagaaaaggaactatagttagctgttcctggctatgtccctgtagggaagagaagacttttcctctacccactgaggttcatgtcagtttatccatgaaatcaactgacaacaggcagattaacaggagaaaaggcatataaatttagtatatgcasagaggcatcacaggaaaaacaaaaaagtagctatctgaaaagccagtgagatttaggagcttgtataccctcttcatatgggagaggggaggggggatattggca

SEQ ID NO: 695668 - DNA, 651 bp, Homo sapiens
aatgattagaaatgggtaaattttattgctatgtaatactttaccacaataaaaagtttgcttatattcaaagtaaggacaatttggtaaataaatcaaatgttraataacatctaaaataatctgataatatccacttctacaataagaacaatcttgccaacaaaaacagagttcttaaatacatttcaacatgcactaacatttacctttgtagttcttttctctgtttctacatgtacaagagtgggcttattatatgggaaaattactactcctactaacttaccaatatagttgtaagtattaaatgaggggggaaaagtccccattttctgactcccacaggtctgttatagattccagtgctttcagaaagtattatgaagaatcccccaaacctatgtttatattcaaaagggcggaaactcctgccttgataggggaagagttacaggcaccagaaatttgtatgagggccctatgaatgtcctcaaagtgcaatcactgaccactaccttcaaaatcatgtgagatatttgttaaaaatatatcacctccaggataggcgtggtggctcatgcctgtaattctagcactttgggaagctgaggtgggaggactgcttgtgtccaggagttcaagactagc

SEQ ID NO: 695669 - DNA, 682 bp, Homo sapiens
ctaggctggtctctaacacctgcgtagaagcaattctgccttggcctcccaaagtgctgggattacaggcgttagccaccacccaggctgattaaaggatgtttctgcaaaaattgaaaatttggtatatattttaaaaggaaccagagcatatatttaaaatcaattaaagctgtgcctatcaggattaaattcagtcactaagagttcaaattgtgaattattatttttgtagaatgccttctaatatttgttatgcctgttaatgttagttaatgttgattagtaaaaggaaagcatgctgctgttctataagttcacttttggcaacaaacgtgtgggttattttctacrccaattaatcacccaattctctgtggacaccaagtgggtatcctacaattcagttctgatattacccagagttagtgcagatcccatagatactgggtcccacgagactgcccccacttcagaggccagttgcaagtcccagattgtcacctgtacttttcaccaactggttataaattgggggttccacacaaccttctccttagattaggtaatttgctagaatagctcacagaactccagaacactattttttattacttatgtattgtgaaggatacagctcaggaacagctggatggaagagacacataggacaagttatggg

SEQ ID NO: 695670 - DNA, 652 bp, Homo sapiens
atctgtatacctaaattctttgggttaatattaaaaaagtattcttccaagttagcatgaatttgacctatcttttagagtgttcagattggttcactcatgttgacattagtcagttttgaaattcagacataaaggtatacacatatagatttgacatttgagattaacttacttttttccagttagattatggaagagataaacaatgactcagaggaaaatggagaggctatagaggtgaaatactgtaataatgtggctaaacttgcttgagagaagatgagacataagcctgctttgttagtcctttcatagagaaatgactcagcactgttagagaatatgatgaggttacattgttctttcatcacaaactgttgagttaatggtggcatatatagagtatagctctgattcataagacaattggtcattgtgcttctctctttttattttttaaagcaaattagtgctttaaaagagcatagtaatctggttcttttcatgaaaactgatgattaaaaacaaactrcgaaaataattttaaatacacctgggtttccaaatggacagaggttgttgaaagtcatttttaagttccttcaaagctacaaagtctatgtgtttctcaaattatcttttgcaaatc

SEQ ID NO: 695671 - DNA, 770 bp, Homo sapiens
caggaccagccagaagaacatgatgaccttcgagtttgaatatttagaataaggcttaaacctatatcagggaaggtcaatttctccagtctgccatcggagagagttaaggattggacacatcagtttctaagaaacttggatgttcttactccaactacatcatccatgaagactgaaggcagaacacagactaatgaaaagttcctatcagcctggactgatggataaaaatgtaggttgacattctggtatcagactctttattttcctgtagactccatgcatagcctctctagataacagagtgatcttcccacagatatcttattgtgaagtctctcttctatgaaaactctttagcaaaggtgttgatgggatagttttccgtcataagatgtgatttctccttaatttaccttgcccgtaggcgctttctcctggggcsggggggctctactgtttgcagtggtggaggctcaggtggaaggctgaatcccagctgcttttacaagagctgacttttatctagaacaagagaatcactgtttttgagccccacaagactctaacttagagaaggaaaagagaagatgtgaaaaaaatgcagctaactagaagttaaaaggaaggggaaatgtgttttgagatctttgttgttgtttgtttgttttttgagatagagtgtcactctgtcacccagactggagtacagtggcatgatctcggctcactgcaacctccacctcctgggttcaaatgattctcat

SEQ ID NO: 695672 - DNA, 824 bp, Homo sapiens
ttgttgtgtgagacagaatctcgctttgttgcccaggctgaaatgcagtagcatgatcttggctcacttcagcctcgacttcycgggctccagcaatcctcctacctcagtctcctgagtagctgggatcatatcagctactttttgtatttttgtagagacaagattttgccctgttgccaggctggtgtagatctcgtgagctcaagcaacctgcccacatcagcctcccaaactgctgggattatgagggcattcttaaatactgctaatcaaaagattgattattgcaaacatgttagaaaccaacataggaatatgttgtgaggtaccttacaatgttaatattttagtgcattacagttctacattttggaccctctcataagataaataaaggaaaatattgacaaacaaaaaaatcttttacatatttatttataattgctgaatattagagataatataatcacctactttacgtaagtaacaaactaaactataatatattcatataaaaagttattatgtaggcactaaggtaagatatccaaagattgttatgaatattatgggaaaaatattaaagaatacaaaatttgagacatgatattataacatttaaaatttatatagaataatttcaacaatagtttcatgtcttgatcagattttaggtgatgtttatttacttttggtatattttctttgattcttacccatgggatacataccagaaaagaaagtgatgattgcactgatgcaaactttctgacctcagatacaaatatatttttcattgaaaaaataatatagtggaactc

SEQ ID NO: 695673 - DNA, 824 bp, Homo sapiens
ttgttgtgtgagacagaatctcgctttgttgcccaggctgaaatgcagtagcatgatcttggctcacttcagcctcgacttcccgggctccagcaatcctcctacctcagtctcctgagtagctgggatcatatcagctactttttgtatttttgtakagacaagattttgccctgttgccaggctggtgtagatctcgtgagctcaagcaacctgcccacatcagcctcccaaactgctgggattatgagggcattcttaaatactgctaatcaaaagattgattattgcaaacatgttagaaaccaacataggaatatgttgtgaggtaccttacaatgttaatattttagtgcattacagttctacattttggaccctctcataagataaataaaggaaaatattgacaaacaaaaaaatcttttacatatttatttataattgctgaatattagagataatataatcacctactttacgtaagtaacaaactaaactataatatattcatataaaaagttattatgtaggcactaaggtaagatatccaaagattgttatgaatattatgggaaaaatattaaagaatacaaaatttgagacatgatattataacatttaaaatttatatagaataatttcaacaatagtttcatgtcttgatcagattttaggtgatgtttatttacttttggtatattttctttgattcttacccatgggatacataccagaaaagaaagtgatgattgcactgatgcaaactttctgacctcagatacaaatatatttttcattgaaaaaataatatagtggaactc

SEQ ID NO: 695674 - DNA, 824 bp, Homo sapiens
ttgttgtgtgagacagaatctcgctttgttgcccaggctgaaatgcagtagcatgatcttggctcacttcagcctcgacttcccgggctccagcaatcctcctacctcagtctcctgagtagctgggatcatatcagctactttttgtatttttgtagwgacaagattttgccctgttgccaggctggtgtagatctcgtgagctcaagcaacctgcccacatcagcctcccaaactgctgggattatgagggcattcttaaatactgctaatcaaaagattgattattgcaaacatgttagaaaccaacataggaatatgttgtgaggtaccttacaatgttaatattttagtgcattacagttctacattttggaccctctcataagataaataaaggaaaatattgacaaacaaaaaaatcttttacatatttatttataattgctgaatattagagataatataatcacctactttacgtaagtaacaaactaaactataatatattcatataaaaagttattatgtaggcactaaggtaagatatccaaagattgttatgaatattatgggaaaaatattaaagaatacaaaatttgagacatgatattataacatttaaaatttatatagaataatttcaacaatagtttcatgtcttgatcagattttaggtgatgtttatttacttttggtatattttctttgattcttacccatgggatacataccagaaaagaaagtgatgattgcactgatgcaaactttctgacctcagatacaaatatatttttcattgaaaaaataatatagtggaactc

SEQ ID NO: 695675 - DNA, 651 bp, Homo sapiens
atggggtctctatgatccacaaatgaggaaacgactaagaaacaaaaaatgatatgggttcactacggatggcagtctcttcccactgaaagcttgctagagtaggacaaaatacgaacacatagattctcgatttaggaaaaagaaacttacaaataagcatataacaaaagtatayataaagcatatccaacaatgctgacagtctagaaggactaaaagattatgaattactaagcacattttttaaaaatatgagtatcagacaaccagtttccttaggtgttaataaaccacagttctgggaaataagatgcttctgctttgtttacaacacagattctgtaagctccgtcaaatgcaatagaaagggatgctgatcgatggccaggatttaattaaagaactaattccaactgatgatagcagtgattccaagggcactctggaaatgaggcttgcctgaaaacttctaagcactcatgtcctctggccccaaacctagagagcctcacatgcctaaatgttcctgcaatgactctactgcacatacacactcatacatctgtggacactcatgacactcaggaactgggataccacgcagcttaatgacattctttaccttctgtgagtaccttaatttttttt

SEQ ID NO: 695676 - DNA, 836 bp, Homo sapiens
tataaaacctgtcatccaagaatactgtagccagcaaagttatcttttgaatgtgaaggagagataaaattctttcctagagaggattcacaaacaccagatccatcttattagaaatgctaaatatcttcaacctgaaagaaaaaaacactaayatgcaataaataagtaaataaataaataaataaataaataaataaaggtataaaattcggtggcaaagttaagtttatggacaaacccagaaaactaagaagactttaatactgtatttgtggtatgcaattgacataattaccggacgctgggaagtgtagtgggggcgggggagatgatggctaatggttacaaaaatttgaaagaatgaatatgatattgtattcgatagtatgacagggtgactatactcactaataatttaattgtacatttaaaaatagcttaaaaagtataattggattgcttgtaacacaaagggtgaatgcttgagatgatggaaaaaataaatatttgggctgtttgtatatttgttgatactaattactagtttagtaatctcttgctctgttgtagtcccaattctaaaagcttgatatgtataaactcatttaaccataatcaattcctattattttgtttcattttttattgtttttatgataaaaactctatccccatattatagatgagaaatgttgaagccaagagagatattaagcaacacgccaaaattaggcagcccaggaaatggcagatccgggatgtgacccaagacaatactgccttgtgttcatgttcttcttttgtaggccctccacaagcatccagtaattcta

SEQ ID NO: 695677 - DNA, 836 bp, Homo sapiens
tataaaacctgtcatccaagaatactgtagccagcaaagttatcttttgaatgtgaaggagagataaaattctttcctagagaggattcacaaacaccagatccatcttattagaaatgctaaatatcttcaacctgaaagaaaaaaacactaatatgcaataaataartaaataaataaataaataaataaataaataaaggtataaaattcggtggcaaagttaagtttatggacaaacccagaaaactaagaagactttaatactgtatttgtggtatgcaattgacataattaccggacgctgggaagtgtagtgggggcgggggagatgatggctaatggttacaaaaatttgaaagaatgaatatgatattgtattcgatagtatgacagggtgactatactcactaataatttaattgtacatttaaaaatagcttaaaaagtataattggattgcttgtaacacaaagggtgaatgcttgagatgatggaaaaaataaatatttgggctgtttgtatatttgttgatactaattactagtttagtaatctcttgctctgttgtagtcccaattctaaaagcttgatatgtataaactcatttaaccataatcaattcctattattttgtttcattttttattgtttttatgataaaaactctatccccatattatagatgagaaatgttgaagccaagagagatattaagcaacacgccaaaattaggcagcccaggaaatggcagatccgggatgtgacccaagacaatactgccttgtgttcatgttcttcttttgtaggccctccacaagcatccagtaattcta

SEQ ID NO: 695678 - DNA, 836 bp, Homo sapiens
tataaaacctgtcatccaagaatactgtagccagcaaagttatcttttgaatgtgaaggagagataaaattctttcctagagaggattcacaaacaccagatccatcttattagaaatgctaaatatcttcaacctgaaagaaaaaaacactaatatgcaataaataagtaaataaataaataaataaataaataaataaaggtataaaattyggtggcaaagttaagtttatggacaaacccagaaaactaagaagactttaatactgtatttgtggtatgcaattgacataattaccggacgctgggaagtgtagtgggggcgggggagatgatggctaatggttacaaaaatttgaaagaatgaatatgatattgtattcgatagtatgacagggtgactatactcactaataatttaattgtacatttaaaaatagcttaaaaagtataattggattgcttgtaacacaaagggtgaatgcttgagatgatggaaaaaataaatatttgggctgtttgtatatttgttgatactaattactagtttagtaatctcttgctctgttgtagtcccaattctaaaagcttgatatgtataaactcatttaaccataatcaattcctattattttgtttcattttttattgtttttatgataaaaactctatccccatattatagatgagaaatgttgaagccaagagagatattaagcaacacgccaaaattaggcagcccaggaaatggcagatccgggatgtgacccaagacaatactgccttgtgttcatgttcttcttttgtaggccctccacaagcatccagtaattcta

SEQ ID NO: 695679 - DNA, 836 bp, Homo sapiens
tataaaacctgtcatccaagaatactgtagccagcaaagttatcttttgaatgtgaaggagagataaaattctttcctagagaggattcacaaacaccagatccatcttattagaaatgctaaatatcttcaacctgaaagaaaaaaacactaatatgcaataaataagtaaataaataaataaataaataaataaataaaggtataaaattcggtggcaaagttaagtttatggacaaacccagaaaactaagaagactttaatactgtatttgtggtatgcaattgacataattaccggacgctgggaagtgtagtgggggcgggggagatgatggctaatggttacaaaaatttgaaagaatgaatatgatattgtattcgatagtatgacagggtgactatactcactaataatttaattgtacatttaaaaatagcttaaaaagtataattggattgcttgtaacacaaagggtgaatgcttgagatgatggaaaaaataaatatttgggctgtttgtatatttgttgatactaattactagtttagtaatctcttgctctgttgtagtcccaattctaaaagcttgatatgtataaactcatttaaccataatcaattcctattattttgtttcattttttattgtttttatgataaaaactctatccccatattatagatgagaaatgttgaagccaagagagatattaagcaacacgccaaaattaggcagcccaggaaatggcagatcygggatgtgacccaagacaatactgccttgtgttcatgttcttcttttgtaggccctccacaagcatccagtaattcta

SEQ ID NO: 695680 - DNA, 836 bp, Homo sapiens
tataaaacctgtcatccaagaatactgtagccagcaaagttatcttttgaatgtgaaggagagataaaattctttcctagagaggattcacaaacaccagatccatcttattagaaatgctaaatatcttcaacctgaaagaaaaaaacactaatatgcaataaataagtaaataaataaataaataaataaataaataaaggtataaaattcggtggcaaagttaagtttatggacaaacccagaaaactaagaagactttaatactgtatttgtggtatgcaattgacataattaccggacgctgggaagtgtagtgggggcgggggagatgatggctaatggttacaaaaatttgaaagaatgaatatgatattgtattcgatagtatgacagggtgactatactcactaataatttaattgtacatttaaaaatagcttaaaaagtataattggattgcttgtaacacaaagggtgaatgcttgagatgatggaaaaaataaatatttgggctgtttgtatatttgttgatactaattactagtttagtaatctcttgctctgttgtagtcccaattctaaaagcttgatatgtataaactcatttaaccataatcaattcctattattttgtttcattttttattgtttttatgataaaaactctatccccatattatagatgagaaatgttgaagccaagagagatattaagcaacacgccaaaattaggcagcccaggaaatggcagatccgggatgtgayccaagacaatactgccttgtgttcatgttcttcttttgtaggccctccacaagcatccagtaattcta

SEQ ID NO: 695681 - DNA, 836 bp, Homo sapiens
tataaaacctgtcatccaagaatactgtagccagcaaagttatcttttgaatgtgaaggagagataaaattctttcctagagaggattcacaaacaccagatccatcttattagaaatgctaaatatcttcaacctgaaagaaaaaaacactaatatgcaataaataagtaaataaataaataaataaataaataaataaaggtataaaattcggtggcaaagttaagtttatggacaaacccagaaaactaagaagactttaatactgtatttgtggtatgcaattgacataattaccggacgctgggaagtgtagtgggggcgggggagatgatggctaatggttacaaaaatttgaaagaatgaatatgatattgtattcgatagtatgacagggtgactatactcactaataatttaattgtacatttaaaaatagcttaaaaagtataattggattgcttgtaacacaaagggtgaatgcttgagatgatggaaaaaataaatatttgggctgtttgtatatttgttgatactaattactagtttagtaatctcttgctctgttgtagtcccaattctaaaagcttgatatgtataaactcatttaaccataatcaattcctattattttgtttcattttttattgtttttatgataaaaactctatccccatattatagatgagaaatgttgaagccaagagagatattaagcaacacgccaaaattaggcagcccaggaaatggcagatccgggatgtgacccaagacaatactgcctkgtgttcatgttcttcttttgtaggccctccacaagcatccagtaattcta

SEQ ID NO: 695682 - DNA, 1478 bp, Homo sapiens
tgaagttgcctaaatgctcttataaaaccttattgtgagtatatgaatttgatgccaacttgtttgaattacaatgtcaattttcttttcttttttttttttttttgagatggagtttcactcttgttgccgaggctggagtgcaatggtgtggtctcagctcactgcaacctccacctcccaggttcaagcatttctcctgcctcagcctcctgggtagctggtattacaagcatgcgccaccacctccggctaatttttgtattttattggagacggggtttcaccatgttggccaggctgatctcgaactcctgacctcaggtgatccacccacctcagcctcccaaagtgctgggattacaggcatgagccaccgcgcccacctaatgtcaaattattaacactgatatcatgggcccagagctgtttgagttacttaatatctgactatttgggaatatcaatataatgctgtctttctggaaatgcaaatactttgctacaatttgagaagatttttaccccagatagatttcccgccagcttgcaacagtgcctgaaattccacaagaaatattcatatctttttgtcttgaaaggaactcaagctagctattaaaatgtattcgtgtgtgtgtgtgtgtgtgtgtgtgtgtgtgtgtgtgtgtgtgtgtgttttaaaaggttaacaataattttctggagagaatggatataatggttatttttatattcttcatactttaacctattttaaaatttttctacaggaaagatatacacttctattatcagaaaaaaaatgctatagcaatttttatgaggccaggtgtggtggctcacacctgtaatcccaacactttaggaggctgattgcttaaggccaggagtttgatacaagcctgggcaacatagcacgactctgcctctacaaaataaaactaaaaaaaaattatacactcaaagatgagaaaaatctaaagccattatcagatagcagcttattgaatgtatatttctcaaaccttttatgttaatgctaggcagctagaacccagaccttttcagaaattcgcataagatcccaaaaggaagtaaatcctcatattgataatgttcttgttcttaagcagagtgtttattctattatatttaacaacacattcttttgtatgtatcaaatattacactmaaatttttcttttttttaatcctgaaagggccaaagataaacttcctgtttccccagtatttgcccaagcctcccatggcaggactcacatacagggccttttttacagctaatgctgctataagtagcatttctaaaagcatttcagaaactatgccgggcacagtggctcacacttgtaatcccagctctttgcaggctgaggcaagagtgtggcttgagctcaggagtttgaggccacagtgagctatgatcatgccactgcactccagcttaggtgaca

SEQ ID NO: 695683 - DNA, 1478 bp, Homo sapiens
tgaagttgcctaaatgctcttataaaaccttattgtgagtatatgaatttgatgccaacttgtttgaattacaatgtcaattttcttttcttttttttttttttttgagatggagtttcactcttgttgccgaggctggagtgcaatggtgtggtctcagctcactgcaacctccacctcccaggttcaagcatttctcctgcctcagcctcctgggtagctggtattacaagcatgcgccaccacctccggctaatttttgtattttattggagacggggtttcaccatgttggccaggctgatctcgaactcctgacctcaggtgatccacccacctcagcctcccaaagtgctgggattacaggcatgagccaccgcgcccacctaatgtcaaattattaacactgatatcatgggcccagagctgtttgagttacttaatatctgactatttgggaatatcaatataatgctgtctttctggaaatgcaaatactttgctacaatttgagaagatttttaccccagatagatttcccgccagcttgcaacagtgcctgaaattccacaagaaatattcatatctttttgtcttgaaaggaactcaagctagctattaaaatgtattcgtgtgtgtgtgtgtgtgtgtgtgtgtgtgtgtgtgtgtgtgtgtgtgttttaaaaggttaacaataattttctggagagaatggatataatggttatttttatattcttcatactttaacctattttaaaatttttctacaggaaagatatacacttctattatcagaaaaaaaatgctatagcaatttttatgaggccaggtgtggtggctcacacctgtaatcccaacactttaggaggctgattgcttaaggccaggagtttgatacaagcctgggcaacatagcacgactctgcctctacaaaataaaactaaaaaaaaattatacactcaaagatgagaaaaatctaaagccattatcagatagcagcttattgaatgtatatttctcaaaccttttatgttaatgctaggcagctagaacccagaccttttcagaaattcgcataagatcccaaaaggaagtaaatcctcatattgataatgttcttgttcttaagcagagtgtttattctattatatttaacaacacattcttttgtatgtatcaaatattacactcaaatttttcttttttttaatcctgaaagggccaaagataaacttcctgtttccccagtatttgcccaagcctcccatggcaggactcacatacagggccttttttacagctaatgctgctataagtagcatttctaaaagcatttcagaaactatgccgggcacagtggctcacacttgtaatcccagctctttgcaggctgaggcaagagtgtggcttgagcycaggagtttgaggccacagtgagctatgatcatgccactgcactccagcttaggtgaca

SEQ ID NO: 695684 - DNA, 551 bp, Homo sapiens
ttattwttattattattattattattattattattagagacggagtctcgctctgtcatccaggctggagtgcaatggcatgatctcggctcactgcaacctccgcctcctgggttcaaatgattcttctgcctcagcctcctgagtagctgggattacaggcacctgccatcatgcctggctaatttttgtagagatggggtttcaccatgttggccaggctggtcttgaactcctgacctcagatgatccgcccgcctcagtattgtcattatttaaaatcttgccatggccattgataagaagctggcagcagggtgccatttctgtgattctaggagggaaattcctggagagggagcctggggacataaagagagccttgaaccagagtcagaaggtgggaaggtccatcggtgtccagccagtagcctctaggcctctcactggcccttagctgcctcctttgtactgactgatttgggtctgatggtggcctgggagtcagagggtttgaatatgaccctggctcttgacagtgtgggatctta

SEQ ID NO: 695685 - DNA, 551 bp, Homo sapiens
ttattattattattattattattattattattattagagacggagtctcgctctgtcatccaggctggagtgcaatggcatgatctcggctcactgcaacctccgcctcctgggttcaaatgattcttctgcctcagcctcctgagtagctgggattacaggcacctgccatcatgcctggctaatttttgtagagayggggtttcaccatgttggccaggctggtcttgaactcctgacctcagatgatccgcccgcctcagtattgtcattatttaaaatcttgccatggccattgataagaagctggcagcagggtgccatttctgtgattctaggagggaaattcctggagagggagcctggggacataaagagagccttgaaccagagtcagaaggtgggaaggtccatcggtgtccagccagtagcctctaggcctctcactggcccttagctgcctcctttgtactgactgatttgggtctgatggtggcctgggagtcagagggtttgaatatgaccctggctcttgacagtgtgggatctta

SEQ ID NO: 695686 - DNA, 582 bp, Homo sapiens
aaagaagccagtagtgctcagtcccaggccaaaagcctcaaaagcagggaagctgacagtgcagccttcagtctgtggttgaaggcccaagagcccctagcaaaatactggygtaagtccaagagtccaaacaccaaagaacctgaagtctgagggcagaaagaacagatggaagcatccagcacgagagaaaaatgaaagccagaagactcagcaagccagcttagcccaccttcttccacttgctttgttctagccctgctggcagcccattgaatggtgcccacccacattgagggtaggtcttcctctcccagtccactgactcaaatgtcagtctcttctggcaacaccctcacagacacacacagaaacagtacttcaccagctatctaggcatccttcaatccaatcaagttgacacctcatattaaccaaaacatcagggagcagtaaaactagagagaaaactcatacgaccaaaaccagaaaagataaggatgccactctactgaatcaaattgttagtcttagaaaccagaacggaaaaggaaaggacagggagaatttgtgcaactgtgc

SEQ ID NO: 695687 - DNA, 647 bp, Homo sapiens
taagaaaattaaaactctaataaaagaagaagcagccrggcgcagtggctcatgcctgtaatcccagcactttgggaggccgaggcaggcgtatcacctaagttgggagttctagaccagcctgaccaacatggagaaatgccatctctactaaaaatacaaaattagctgggtgtggtggcacatgcctgtaattccagctactcgggaggggaggctgaggtaggagaattgattgaatctgggaggcagaggttgcggtgagcagagatggtgccactgcactccagcctgggcaacaagagcaaaactctgtctcaaaaaaaaaaaaaaaaaaagcaatttgctagaagaattacaaatggccacaggaaaaatggagctttataagttaccagataaatgtataacacatttctttttctgtgattatcttggccaaaaattaatttaaattaatgatatgcccagttttgtcaatgattcactaataaggacgttcttatacttttctgaggggcacgtaaaatggttcaacactactggatagcaatttggaaataactatcaagagcctgaaaatatattcatgatttatgaactaatcatccttcatcctaaattgtatcttaaggaaataatcagag

SEQ ID NO: 695688 - DNA, 647 bp, Homo sapiens
taagaaaattaaaactctaataaaagaagaagcagccgggcgcagtggctcatgcctgtaatcccagcactttgggargccgaggcaggcgtatcacctaagttgggagttctagaccagcctgaccaacatggagaaatgccatctctactaaaaatacaaaattagctgggtgtggtggcacatgcctgtaattccagctactcgggaggggaggctgaggtaggagaattgattgaatctgggaggcagaggttgcggtgagcagagatggtgccactgcactccagcctgggcaacaagagcaaaactctgtctcaaaaaaaaaaaaaaaaaaagcaatttgctagaagaattacaaatggccacaggaaaaatggagctttataagttaccagataaatgtataacacatttctttttctgtgattatcttggccaaaaattaatttaaattaatgatatgcccagttttgtcaatgattcactaataaggacgttcttatacttttctgaggggcacgtaaaatggttcaacactactggatagcaatttggaaataactatcaagagcctgaaaatatattcatgatttatgaactaatcatccttcatcctaaattgtatcttaaggaaataatcagag

SEQ ID NO: 695689 - DNA, 647 bp, Homo sapiens
taagaaaattaaaactctaataaaagaagaagcagccgggcgcagtggctcatgcctgtaatcccagcactttgggaggccraggcaggcgtatcacctaagttgggagttctagaccagcctgaccaacatggagaaatgccatctctactaaaaatacaaaattagctgggtgtggtggcacatgcctgtaattccagctactcgggaggggaggctgaggtaggagaattgattgaatctgggaggcagaggttgcggtgagcagagatggtgccactgcactccagcctgggcaacaagagcaaaactctgtctcaaaaaaaaaaaaaaaaaaagcaatttgctagaagaattacaaatggccacaggaaaaatggagctttataagttaccagataaatgtataacacatttctttttctgtgattatcttggccaaaaattaatttaaattaatgatatgcccagttttgtcaatgattcactaataaggacgttcttatacttttctgaggggcacgtaaaatggttcaacactactggatagcaatttggaaataactatcaagagcctgaaaatatattcatgatttatgaactaatcatccttcatcctaaattgtatcttaaggaaataatcagag

SEQ ID NO: 695690 - DNA, 647 bp, Homo sapiens
taagaaaattaaaactctaataaaagaagaagcagccgggcgcagtggctcatgcctgtaatcccagcactttgggaggccgaggcaggcgtatcacctargttgggagttctagaccagcctgaccaacatggagaaatgccatctctactaaaaatacaaaattagctgggtgtggtggcacatgcctgtaattccagctactcgggaggggaggctgaggtaggagaattgattgaatctgggaggcagaggttgcggtgagcagagatggtgccactgcactccagcctgggcaacaagagcaaaactctgtctcaaaaaaaaaaaaaaaaaaagcaatttgctagaagaattacaaatggccacaggaaaaatggagctttataagttaccagataaatgtataacacatttctttttctgtgattatcttggccaaaaattaatttaaattaatgatatgcccagttttgtcaatgattcactaataaggacgttcttatacttttctgaggggcacgtaaaatggttcaacactactggatagcaatttggaaataactatcaagagcctgaaaatatattcatgatttatgaactaatcatccttcatcctaaattgtatcttaaggaaataatcagag

SEQ ID NO: 695691 - DNA, 647 bp, Homo sapiens
taagaaaattaaaactctaataaaagaagaagcagccgggcgcagtggctcatgcctgtaatcccagcactttgggaggccgaggcaggcgtatcacctaagttgggagttctagaccagcctgaccaacatggagaaatgccatctctactaaaaatacaaaattagctgggtgtggtggcacatgcctgtaattccagctactcgggaggggaggctgaggtaggagaattgattgaatcygggaggcagaggttgcggtgagcagagatggtgccactgcactccagcctgggcaacaagagcaaaactctgtctcaaaaaaaaaaaaaaaaaaagcaatttgctagaagaattacaaatggccacaggaaaaatggagctttataagttaccagataaatgtataacacatttctttttctgtgattatcttggccaaaaattaatttaaattaatgatatgcccagttttgtcaatgattcactaataaggacgttcttatacttttctgaggggcacgtaaaatggttcaacactactggatagcaatttggaaataactatcaagagcctgaaaatatattcatgatttatgaactaatcatccttcatcctaaattgtatcttaaggaaataatcagag

SEQ ID NO: 695692 - DNA, 618 bp, Homo sapiens
aagcaactctatgcaaagactgatcctttgagggtctaggatttatttataagggttacactaataatccatgaatcaaaggttttctgattttatgtttccaagatactgaccccaagatttcatggttctgtggatctgagttctggtggtggttctgtgactatgagacagtgagtgtctatgagtcrttggttctaggatttcctgagtccctgcttctcggattctttgtctccgtcattccatgactttatggaatgtggttctgtcccagacaaaagctctgggagacttagggcatggaatagggggagggcagaatacctcggcagccaggactggccccctaccctccttctcttctcaggtcaaaaggatggtggttgccaggaggctggggcaggcagagggtggcctggaggggccagaggcatacatgtggctaatgttgggaggcgggggagggtttgctggaaagcacataatttctgctaagtcagactgcaaagcccctggatttcaaggccagagagtttttccaacagaggccactgttccttttctccataccccacttcctgacctgtccctaagcatacaaatatccagggtgct

SEQ ID NO: 695693 - DNA, 618 bp, Homo sapiens
aagcaactctatgcaaagactgatcctttgagggtctaggatttatttataagggttacactaataatccatgaatcaaaggttttctgattttatgtttccaagatactgaccccaagatttcatggttctgtggatctgagttctggtggtggttctgtgactatgagacagtgagtgtctatgagtcattggttctaggatttcctgagtccctgcttctcggattctttgtctccrtcattccatgactttatggaatgtggttctgtcccagacaaaagctctgggagacttagggcatggaatagggggagggcagaatacctcggcagccaggactggccccctaccctccttctcttctcaggtcaaaaggatggtggttgccaggaggctggggcaggcagagggtggcctggaggggccagaggcatacatgtggctaatgttgggaggcgggggagggtttgctggaaagcacataatttctgctaagtcagactgcaaagcccctggatttcaaggccagagagtttttccaacagaggccactgttccttttctccataccccacttcctgacctgtccctaagcatacaaatatccagggtgct

SEQ ID NO: 695694 - DNA, 602 bp, Homo sapiens
atatgtgtttaacccagaaagtccaaatttgattttcacattttgaaactgaatgtttcgttcaatgtctcccttttcaactggtttctgagttgtttgtgtgcaatgttatgaatggcatgagattcactttttggtgtggatctctggatgaaggctatcaccctttctaatctgtgtaatgccctgcacccagttaatcatggagtgtgtatccaaaaagtacaaacacagagtgaccactgggactcaacaccttgaacccggtatcaacagaaggcctgtatacactgaatcacagatgtgmatccacaacaaatccttcctatggctttgacccatttctctaaaccaggctgtctcccaagagaatctcaacaaagaattgtcttgaactcgagtcaaaaggatgcccttcaagcattgtttaagcagaactcctactctggcataccaaccagagaacaactggccaaagaaatcagcagtctggagtctaggatacaggtgggcttgtatttttgtttcatttccttggggtcaaagaaaaaagacaagctgggctaagcagtctccaattacaccatgttaagaatgaactg

SEQ ID NO: 695695 - DNA, 613 bp, Homo sapiens
tttcttagctattctatttttgttatytgattaaaaatatgattaaatatttaaggcagatctttatgacacaaccagactattgaaatttaacttaaatgtcagaaattcttaaaaggtggacacactaagctgaagacttctctggataaattcgatacttaggaaaatacaaaaagaagtccatgctatcaccactgggtccccattataatttaaaggaatcaagagagacatatttttatatcaaactatcaatttcttaactttttgactgtttacgtacacgctctgtatagttgctttttcttttttcttgtactaagaatgaaaaaaaaggtcacttctgatacaaatactataaaataagagtagtagttaatgtcttactgaatactcctaaatgaggaaaaattccatttaaaaattactttcaacaatttatatttaaattatctggcatgataaatctcataaagtaaaatctaaaaacttagttttactttttgaacccagtttgctctttgtttctattacatacacatgaaagaatccttgtgtacaaaagaaaaggggaaaaaatgaggccagatgaaaaagttagctaataaaa

SEQ ID NO: 695696 - DNA, 646 bp, Homo sapiens
atttgtaagttctctgaaatgctattgtcaataatctacttgaaatggatgaagaaacttatacaagtcagaataggctaggttatgctgcagtgacaaacagtccccagatctcaatggtttgagtagcaaatttaagattcatgttcattggtggcagatgaaggagtttactcaatgtcgtttacgcagagacccaggctagttacagcaggaggagggagagggaaaatgaggaatcatcattcactcttaatcccggaagctacaaatgttattttgctcacattgtattagcccacaagtcacacagttggtctaaattcaacagagaactggaaatagaaarttaagtattacattatgaacaagtgtaaaatttaacagaacagaaataaagatgtcttcagttttaaatcctaagctcatcatctaaatattccacacgaagacaaaagcaaagagaaaaataaaatattgtgaccctagacacatgttgagaatttgaattatatgatgtttagaagtaagatatttggggaacaaaaacatatattcacatcttactttatcgacgaaattcaagcagtttatgtgacttgcctaagatcacacaggtagttagcagtatagcagtctttgaaat

SEQ ID NO: 695697 - DNA, 660 bp, Homo sapiens
gaaagaaaaagaaagaaagaaaaaaggaatgttcatttcagtgatcctaattgaaaacaatctaagttatgctcatttgggcattggagaaataaacaatagaacaatcatttattaaataccatctgaccatgaagaaggttggggagattcctattgctggattgccaacaatctacgaaatgaaaaaggggtgttcatcgacttcccgcatccaaaacatcatgacatgtggccagccacatcccctcagcaacccctcgagtgaccacgtgtcacgacggccatcatgcgtttacctccacgtggaagcatccctctctcttcctcctctttcttgattgctcctctagcaaaaaagtcttcacacaacaaccaaactgagcctgtagaaacacaaaccagagsaggatacatccaaaccatttcctgtggtctgcgaagctctatctatgctggcctctgcctgtcacttacagtcatctcgccctacactccaccccgacactggctgtcttgctgatccttgaagcaccaatgtcatttctatccttcagcctttcaggggctgttcctctgtaggggattgggggtggggtgggactcatttcctagctctaaaaagcccaactgcttcttctgtcttagtttctctccaaa

SEQ ID NO: 695698 - DNA, 611 bp, Homo sapiens
tatttagaggggccagctcaggtccccccatcccctcactcgagatctgagaatgaccttcaccatccatgacacccactaatcctgaatgtgcgtgtttggtttcacttcttactcacgtgctagcttgagggtaagcctcagtttcctcatctataaaatgggggcgacactatctgtttcatgggagacttcctgaaagctgtggcacatggcctggatcatggtcatcactgaagttgtattagtgcctcctgtcccctcttggtcagtgcctatgcctggagagccaaaccaaaccacatagaaagcaaaagcaatgggcggagtgctggctaaactcagatgctcccagggcctagggaaggccccacatcacagcaggtgctccacaccagtgagtcacatttgtagcttgtcgggcctgggggacctcagaggggatggggtccacctgacagctggccttccattcatcactccaccgccatgcaagtgactgagagacttgtacacacatttgtaacaccaaaaagaaaaaaatataaaggcaatstgaattcatcaatatgagaatacaaagagtataattcatacaatggatataattc

SEQ ID NO: 695699 - DNA, 657 bp, Homo sapiens
tgagtctcaaaggtttgaagctcctatcagaagtgacagctagaaagttgtagactcaaatcccagtgtgacaccaacatttcaagtgcttttgattccccccttattgatatctggaaccagagatggatgttttgagtcgtttcttcttcttttcagctaaacagtagcctaggatgaaacccaacaaaccaaccagccagccttcccctgccctctgctgctgactctcaccagcatatgtccatgcccagctgccttcaggaccccagtgggagagggagctgatggttgggcctcagaggcagttggaacagagaggaaaataaatagttcatggtctgcatggcgaagggagacaggcagctccagccgcgtccaggagagccagcaggccaagcccagcccagacatttcaaaaacaaacctccgtccaggtttccatctcctggggcaggccccaccctccaggaagaaggtaacttcaagcagcccaggtttctttcttttggaatctttgtttttagtttcccctttcccctaattaggtttcagagcccagaatcatccaggcagcttcctygtgttcagcagggttggatgtgcactctggtgtttatttaaaaaatgttcccaaagagggatagtggttcaggg

SEQ ID NO: 695700 - DNA, 617 bp, Homo sapiens
aacatggtgaaacccccatctctactaaaaacacaaacattagcccagcatggtggcgcgcacctgtagtcccagctactcgagaggctgaagcaggagaattgcttgaatccaggaggcggaagttgcagtgagccgagatcacgccactgcactccagcctgggccacagagcaagactccgtctcaaaaaaaaaaaaaaaaaaaaagaaaagaayggttcaaatgacaaataataggttatggatattttatgataatataaaactcattattagctcctgtggtgtcttgcaagtggatgaaagataagtcttcagtaacaatgatttcaccagtgatggcagacagggaaacacttcttcacttttggaaggttattgattgatcggcccagcagggcatggaaaagaccagctcttcacacatcctgggcttggctgggaagcagagcagaccccagacacctccgcgctctggggatgtatgtttaacttggaggtcagtggagctgtgtcttttctctcaaggaacaaactgatagttgtgtccactgtgacgggcgtcagctcctgggccctttctgagagctatgcccctgtctagaaggttgaggg

SEQ ID NO: 695701 - DNA, 1355 bp, Homo sapiens
tctcctcattcccgacatgtcctgggctccgaacgtctcctggggagcggcatgattgaatcagggattccctagccccaggtccccttctccgtcattctcaggacgaggctgcccagttctcaggtaatctgaggctgatgcccccgagaagcctcagttgccaccacgggacagggtgggcttggagatttgggaggcactggaagttaaggggtgaggaggccggtcatctccggggcctggggcatttagggggccagggcgagaggtttggcggtcatggggctgggagatttggggccctgggtgaggattttcaggggctggggtcacctggagggggggctgagaggggtcagcgcagcctaaactcccgccctccctggctccaccccggaaacggaccgttactattacgtcacagggatgccgttgcgcactaggtttgcctrtcccccggaaggggtggggtgttcatgtctcccagaggaggcggagtcgaaacgtcatcttacggggtgaggccaggggcggggtcggttgattaagatgcgggcaaaggaccctcttttataggtgtcaggtcaggttttggagctacaccttggggggccgaggcttccgcagcaggcagcaagaaaagagagttgggactaagtccagtactgttttcttaatccccacgtctcctctacccctccctgggcttctgccctgccgagtgcctctcttgcctgccttcctccccttgtatgaccctgggccgaggaggaataggtcctcagatagagtccagtctagaaaaggccaggctacggaaatacctagttgagtggcctcggctaagtcactgaatggccggagggtcattgcccttcctctctggtctgagacctatcttcttgtgattttttttttttttttttgctacattcattcaatcaacaaatatttgctgaatgaccacctgtgtgtcaggcactgtgctgggcatggggatgtagtagtaaagaagacaggtggccgggcacggtggctcacgcctttaatcccagcactttgggaggccgaggtgggtggatcacgagttcaggagttcaagaccagcctggccaagatggtgaaaccccgtctctactaaaaatacaaaagttagccgggcgtggtggcaggcgcctgtaatcccagctactcgggaggctgaggcagagaattgcttgaaactgggaggcggaggttgctgtgagctgagatcgcaccactgcactccagcctgggtgacagagtgagactccgtctcaaacaaaacaaaacaaaacaaccaacaaacaagacaggcaccttgtctgccc

SEQ ID NO: 695702 - DNA, 3503 bp, Homo sapiens
tgcctctttccattggccaaagggagcatggagtcctgtccaaaatcaaggggaagagaactagactcctcatcttgatgggagaagccataaggaagagaggctattttccagtctactgcagctaaggccacctgagattccaggggattggacagaccrtcagccctgacacaggtcctctagaatgtagactgagatccaggtgctaaggtcttcaaagagggaggggaggtgacacagagcactgaagatgacaatatcaggaatggcagaagccattcaggcccttacaggagagaatgtgtgtgtttgtgtgtgtgtgtgcatgcatatgtgtgcacatgaagaagaaagccaacctctgatgagggtgcaggggtgagcgcagtgacaaccctgggaaatagttcctggtactttgcagattcatagcattagcaattcagtccctttcccctgccccattcctccgctggtaactgacagaaggtcacggcccatcaaggtgctgcccaggggaaggttgctacatcagctctttcttattgaccggactgtcttcactttctttcactcaacaagtaattattgagcatcagtcatgtgccaggctctgtgtgagggacaggaaagaagacacagtctctgcccttggggaactcaaaatttagacgttacagccaaggtgtatctacgtacacatgtactcacatgggtgtgtgtgcatgtgtgcacatatacacacattcaataccccctgcacccacagatgatttgtgggttaaaatatataaatacacttgcaaactaaaaaaaaaaaaaaaccttcaaaatcatcctgatcatttatctttctgtttaatctctgacaagtttgagatttttcttctttcttttttttagagatggggtctcaccatgttgcccagggctggtcttaaactcctgggctcaagaaatctgctctccttggcctcccaaagtgctgggactataggcatgagctactgcacccagttgagatttttctagaataaaaaactgtattttaaaaagtaatcacagattctattcaatggtttatttgaaatgttccatattcaggatggctctagaatatatttctgtgaataaagggatgccaggaactctcttcccccaaaataaaatatataaaaataacaatgcagcaataataataataacttccttgtgacactctgcaattccaaaagtccaatcatgcgtgctatatcagttgtcctgtaaatggcatctcaaagttggcctcagaatccatgggaggtttatgagaccaagcatggattaagtcctgcccaaactgaagggtaggctggcagggtctttttttttttctttctttctttctttttattttttttcagacggattcttgatctgtcgtccaggctggagtgcagtggcacaatcttggctcactgcaagctccacctcccgggttcacgccattcttctgcctcagcctccccagtagctgggactacaggcgcccgccaccatgcccagctaattttttatatttttagtagacacagggtttcattgtgttagccagaatggtcttgatctcctgacctcggtgatctgccctcctcggcctcccaaagtgctgggattacacgcgtgagccgaaatgctagccaattttggagggtcagggtaagccctttaaaggaaagcgatgcctcctctattccccagtcctgttgcctctcccttgggcaggagttggctctcagcaaagggctctagagctagggccagcactgggttccatggttctccttggccagagtcacagatggacaagatccagtaagagtcattgaatcaaggaatgggggaactgtaaggagtttaggagacctctgagccttagttatcatctgtcaaatagggctagcatcacacctgactttggggttgctacgaagtagagatactatggactgggatggtgctggggcaggtgctctatggacactatggatgtaaggcagtgtcaaggctgttggtccccacttcccccaagtgagatctagatgaaacctgtgactctaatcaccgagtccatggcaccttctctggagactgtgactgggtctttaactacatgctttccagaggtgccagagtgctctaagcttcttctcaatctatgtcccagggaactgaagatcatacccaaaggcatgccctgagccaactcagatgcagagaaacttcatccatcctcttagccaacaatgtgtgatcttatgcttagggttaggttaagtgctgtgctggagatagagacagattggtcatattccctgcccgcatgaagctcacagtttgcttggggagacagacaagattacaggtgatcccaaagcagagtgatacaaaaccaatcagagaaggaaaggaaatagcctgctggagcaatcagggagggcttcagttgaataggaattccctgagtggcaaaagtggggaaaggcaggagctgcctgtgcataggcaggagcatgtgaacaggaggttatgtgaggaggcagggcaagaaatgagaccagaaaagcaggcaagggttagctggcgtagggccatgatgagacttgctaagcagcctaggctttatcagggaggcaactgcagccattgactagagttttagggagcacccagtatatgccaggctacagcatgaggcatatttgatatggctgttttgctacccaagtggctgcatcaaagtgtgaaagacactgttttccattaccaagtcacgtgactatcaggcatgctccactaatcctcatctctttcctggtccctcactctctctggtctctcctatcttttctcaagtctcttcatatatatatatatatatatatatatatatatgaagagacttgagtcttgagtactatatatatatatatatatatatatatgagttttgtgtttttagtaaagacgagtttcaccaagttggccaggctagtctcgaactcccaacctcaggtgatctgcccacctcagcctcccaaagtggtgggattacaggcttgagccaccagcctcttaccatcttttattgcatcctgaagcctcctgtatccttcaggcccaaggatggaatgatgctctgagatggctatcatacctattatttgataacaacaaagaacaaaatgttaaatgatttgttttataagccgcatcaaaaatccttcctggagatggctccataaaaatctctaagtctgttgcagtgagctgagatcgcgccactgcactccagcctgggtgacacagcaacactccgtctcaaaacagaacaaaacaaacctctaagtgtcacgaaaccattctaggcatgaagccaggcactgcagagacaaagaggaatgagtgtggttcctctcaggtagcttccacttaatgagggggatggacaaggaaac

SEQ ID NO: 695703 - DNA, 627 bp, Homo sapiens
ttggacagacgaaatttcctgaagtttttcaagttccttttttctgagcatattctatagatactctacttttctcacatctttatagtcagttatcaattacgtttattgatgaataataaatctaggcattgtactaagcacttctacatatatcaatgaactcatttagtatcacagttttgaaaaggaaaagttwaaaaaaaaaagcagctgtatgattttccctgggtcttctgactctatttatagtgttctttcactaaatcagttatttctgtggtataaatatttaaatacaaaagaagccttttattttacaacactaatggtaaataggacaaaatttgtagagttcctcttggaaaatcacgagattatttgttgtcgcaataacttttgtttcctcttcataatgtttgaaaatgtaataatgtgaaacagggagaaatatgctgaactgttttactaggaacaaaatacttatcactaaattatcactaactatatatcatggcatatcattgtttcaaaagctctttgtaccaaaataagatactacttgcagtaaaccattactcttctcaacagtgagaagaataacatccaaaatatgtcactgaactg

SEQ ID NO: 695704 - DNA, 1415 bp, Homo sapiens
ccttggtggttggtgcaggttcagcgcagaatagcagatttctggaggttattcctctcacttaacattaacagaaacttttctctgttgagagctcccacttcctagccctggaagcctcccttccagtctttattgttgtgatttgactattttcaacacctcatagaactggaatcatgcagtactcgattttctgtgcctggcttatttcacttagcatggtgtcctcaaggtccatccaggctgcaaatggcagaagcacctgtgtctcgcggctgagcggcattcgtcagatgtgcacaccacattttctttctttttgagatggagtcttgctgccacccaggctggatggagtacagtggtgtgatctcagctcactgcaacctctgcctcctggggtcaagcgactctcatgcctcagcctcccaagtagctgggactacaagtgtgtgccaccatgtccagctaattgacaccacattttctataaacattcatcacctgtttattttaaggctttcctgtggatcagacaaactggagtgcatatgtttcagggagtggagagctggctgggtccgggtgggctggagtgggtggtaggtgccagtgggaacagccagggtggggaaccctgagaggaggtgagaggatgagggcggctgtatgcaggatcccggcagcatgggctgtgttctgggagctgctgccccggacgggcacagcggtaaacaccaggagccagtgtggcccctctgccgcgtgtccccacgccctaggaggtgcatcttctggtgttgggagtatgggagacttggctggggctgggccagcaaggccgacacccccactcctttcctgcggctggtggcatcattgagcaccacggtcaggaaagctggaaacatagcacgctggccccgtggcccaggctgggtgggcatgtgagctgctaagagaatttcatcgtccgttatagctggcctgaactgtcgcgtggcyagcctgtgccagcagacacctgctctgcctgggatcccacctcaggcctcttccatggctgcttgtgtttcttttctttctatcctttcttttctttcttttttctttcttttcttttttttttctttgagaaaaagttttgctcttgttgcccaggctggagtacagtggtgccatctcgggtcactgcaccctccacctcccaggttcaggtgattcttgtgcctcagcctcccgaatagctgggattacaggcatgtgccaccacacctggctaatttttgtatttttaatagagtgggggtttcaccacattggccaggctagtcttgaatcctgacctcaagtgatctgccagcctcagcttcccaaagtgctgggattttaggtgtgagccaccgtgcccc

SEQ ID NO: 695705 - DNA, 1086 bp, Homo sapiens
  misc_feature 389, 390, 391, 392, 393, 394, 395, 396, 397, 398, 399, 400,401, 402, 403, 404, 405, 406, 407, 408, 409, 410, 411, 412,413, 414, 415, 416, 417, 418, 419, 420, 421, 422, 423, 424,425, 426, 427, 428, 429, 430, 431, 432, 433, 434, 435: n = A,T,C or G
  misc_feature 436, 437, 438, 439, 440, 441, 442, 443, 444, 445, 446, 447,448, 449, 450, 451, 452, 453, 454, 455, 456, 457, 458, 459,460, 461, 462, 463, 464, 465, 466, 467, 468, 469, 470, 471,472, 473, 474, 475, 476, 477, 478, 479, 480, 481, 482: n = A,T,C or G
  misc_feature 483, 484, 485, 486, 487, 488, 508, 520, 526, 548: n = A,T,C or G
tgaggattttatctttagctctgaaatggaatagtttcaccagcatgtctcaaagttggtggtctgggttgattttctagcggctggcgagctctttgcaccgtggattcgggtctgtttctatgtagggacggtcttccgrgagcacagctatagctatgagcactgacccacggctttgcttcccttccttagggctgggagtgctgccctcctcctcaccttccacttcctcctctttcttgctgacctgttacttttctctttatgtcattttattttcttgtttctccccttgcctattcttcaactgcctcttattaaattgtcgtttgtgttattctccccttgggcatcttacaatttatttctcatttttgagatgctannnnnnnnnnnnnnnnnnnnnnnnnnnnnnnnnnnnnnnnnnnnnnnnnnnnnnnnnnnnnnnnnnnnnnnnnnnnnnnnnnnnnnnnnnnnnnnnnnnngtttggaaaccctgggaaantacggtcgttcngggaanattgaacgctccccttaaatgncgtttgttgttctcccttggcaaaaacccttcttctatttttgagagcttttttttttcctgagttcaatacattcttttttcatttctctgattttttgccctaactgttgaattcctaaatcggggtgtttttccatatccttgaatgctgtttgcgtgtgcccggttctgtttgaatgtacaggtttcttctgccttgtgttttttcttttttaaaagtgggggaggtctcactatgctgcccaggctggcctccaactcctgaattcaagtgatcctcccaccttggcctcccaaagtgctgggattacaggagtgagccacccttcccagccctatggtggtttttaacagggagggaatttgtatcagttctttttcctgattttcttccatagtcttctgtgacgtttttgttttggctatttttgatattgggatattttacaaggttcccagcttaatgaatcccttttctgtcagcctggcgatgtccacacattttagtgaggtttttttgtttcgttttgatgatg

SEQ ID NO: 695706 - DNA, 586 bp, Homo sapiens
ccagggaccccccagacaaccttctcagggggctcctgggtgttttggtgatgagctccgatggggaggagttaggacttgggctgaagctctgctgtttgaagctgtctcacatgtaggtctggcatccccccctgcgtgcaggtctctgtggtcaacctcctgttgtgtccagcggccatgtccatttcagagtttcattaaagagcgcaattggcaggtgcatagcacctgatagcctgcagcatggctctggtctcagagtgggaagaagaggaaaccatggacagaaggaccttccagtgacatttagcaaaaagaagcaaagtgtgaaagtgaggtggtgatgttgggttgggaaggtgggggcttcctgagcccgcccttgctgcttatccattccaccaatgttcactggtaccagcaccctgtgtgtgggcactgatggcatagggcacaatgggagcacagacrgggctcggtccccagtagagtgtgacccacatggggagttctgcagcctaccctgtaccttagagagtgacacggggctggcaggtggccggtggcatcaggagcggtgaga

SEQ ID NO: 695707 - DNA, 607 bp, Homo sapiens
tgacccttgtttactaggagaagccccaggcaatgggctgattcttggagtacacaacgttcccggctccctcctcagctctgggggcagctggggcaagatgggcagggccatactgggcaggttcacctacaagtcccccagtggcaggcacargcacaagtacctaaggagaatccagtgggtggccacctagtgcccatggaaagtggtttttcagaaacaattcttgaggctaaatctaatggcagaagtaagtccaaaaattagaagaaatttggaggagataatgaaactttgaattaagaaagaagaaattaaaaatgtgaaggacaaaatatacctgacagacatttaaagtttaatcacttaataacactgtgtagggcctgacaggatgtagaggttgaggaataaaacagcgtctaattcaattaggaaaagaggaagtcaaagtgtccctgtttgcagacgacatgattgtttatctagaaaaccccatcgtctcagcccaaaatctccttaagctgataagcaacttcagcaaagtctcaggatacaaaatcaatgtacaaaaatcacaagcattcttatacaccaacaacag

SEQ ID NO: 695708 - DNA, 607 bp, Homo sapiens
tgacccttgtttactaggagaagccccaggcaatgggctgattcttggagtacacaacgttcccggctccctcctcagctctgggggcagctggggcaagatgggcagggccatactgggcaggttcacctacaagtcccccagtggcaggcacaagcacaagtacctaaggagaatccagtgggtggccacctagtgcccatggaaagtggtttttcagaaacaattcttgaggctaaatctaatggcagaagtaagtccaaaaattagaagaaatttggaggagataatgaaactttgaattaagaaagaagaaattaaaaatgtgaaggacaaaatatacctgacagacatttaaagtttaatcacttaataacactgtgtagggcctgacaggatgtagaggttgaggaataaaacagcgtctaattcaattaggaaaagaggaagtcaaagtgtccctgtttgcagamgacatgattgtttatctagaaaaccccatcgtctcagcccaaaatctccttaagctgataagcaacttcagcaaagtctcaggatacaaaatcaatgtacaaaaatcacaagcattcttatacaccaacaacag

SEQ ID NO: 695709 - DNA, 857 bp, Homo sapiens
cctaatgcaaataacattttgtttgacaaaatgtgaccagaggcttgcaggggcctaatcttgtattttctcaagatgcaacagctcagtattcacaaatccagtgtttgtagcgattttataaaacataattcctgcaaataatgagaatgagctacacgtagcattactttattccatagtaatgagtagtagccttttaatataaatatctactattgctcttggataagtattttctcrtatttattaatatatcagagacataataaggatataaatgcactagactttgaatgacatatataaaaatttaaaatataataatacatgtatcttagattgccataaaatcaagattgtacatgtcttcccaaagcagacatctcttattactatttcaggtagaatttctataaaaaattaatgtagcaattgattttggaaagtatatttgttatatatatatatagaaagtatatatatatgttatcgcatctttgaatcattaattggataaagattgtggggatttacttaacattatttaaccagattttcaaacatacgaccaagaaaactgttttgaaacaacatctaccaaagagcagtagaagtcatgtatgtaaaaaaggagcaaatcaaaacaattttgggaaaaacagattcaattttctttaacatataaattgaggcatttgaaaccctcttgttaaattatccattgcataatgatttcttcatactgattatcaatgtattctaattagttttaagtaaatatttttctctgtataagttaccaaagcaaacattttgtttattttgggtttttaacttctgtgtagaatttttaa

SEQ ID NO: 695710 - DNA, 1397 bp, Homo sapiens
tcatttctaaaactaagaaataataaatgtaactatggccatttattttgaggctctgaatctcttttgtattttcacaagataattttataacagaagtgatattatttccatggttactcagtatgttaatgcttgtgctggttaaagcttgtrtgtcagatatcgactagattttctatttatagaaacagacactagcacaaaattatttatgaacttcccaaatttagcacaaatcatgtagttaaatgtaaaatgcagattattttttgagttctcattatctttctgaggcatctttaattgctttcggttaagtgttctgaatctctaagtttcatctattagtcttggcagctgatgatatggctaggtttgctgtatagcctccattaaaaaaatgaagagacccaactgatgctttacagttttagaaaaatgaatgacattaactagaaatggccctaattattgcaaatcacataagaaaattatgctacgacaacctgttatgaccttcatgttagatcttgaacatttggtcttcaaactatttttctaatatttgctggcttttctctatttgtttttagacagtttgataggccctcaggatatttaaagtgcttaaatataaaaaatattttttactttcctttcttcagacctactgtgcattatttttatattattctaattaagtaaaatgtgttatctgactttaaaaaacaaattggtctttattgtagatcatttatttatgaagatagaagagattattatatcaacttgatgcttaattttgctttatttaacaaaatttattttctattttgcaactgaaagactaatgagctcttgttcttgtctatatgaaaatgtgaactaaaaagtactattttctgaaagaaaaggatccagtcataaattgtgaatgagagacaacagtgactatttttaacttataacatataaatattagcttaagcccacactgatttctcagtataaaaagtatcatatgtgggagtggaggcagttaaatatgaaatacgaggcttatattttcaaggaaatatgaaatttacactcaaagttattattctgcaatctggggtcactgttaattctatatattgtcaggaaataaatactaaacagtatttttacacacagtagaatatagtaaacaaaatgtatgtcttgttgctacttgttaaatatccatgtctctaaattagtttataatcttagtaggatgttccttttgtaactaatttttaataatggagatttttacatgagatacacttattatctattttagcaaaaaatagcttattgaacaaataaactttaaataaattgagtaattcttttgtatatggagagat

SEQ ID NO: 695711 - DNA, 1397 bp, Homo sapiens
tcatttctaaaactaagaaataataaatgtaactatggccatttattttgaggctctgaatctcttttgtattttcacaagataattttataacagaagtgatattatttccatggttactcagtatgttaatgcttgtgctggttaaagcttgtgtgtcagatatygactagattttctatttatagaaacagacactagcacaaaattatttatgaacttcccaaatttagcacaaatcatgtagttaaatgtaaaatgcagattattttttgagttctcattatctttctgaggcatctttaattgctttcggttaagtgttctgaatctctaagtttcatctattagtcttggcagctgatgatatggctaggtttgctgtatagcctccattaaaaaaatgaagagacccaactgatgctttacagttttagaaaaatgaatgacattaactagaaatggccctaattattgcaaatcacataagaaaattatgctacgacaacctgttatgaccttcatgttagatcttgaacatttggtcttcaaactatttttctaatatttgctggcttttctctatttgtttttagacagtttgataggccctcaggatatttaaagtgcttaaatataaaaaatattttttactttcctttcttcagacctactgtgcattatttttatattattctaattaagtaaaatgtgttatctgactttaaaaaacaaattggtctttattgtagatcatttatttatgaagatagaagagattattatatcaacttgatgcttaattttgctttatttaacaaaatttattttctattttgcaactgaaagactaatgagctcttgttcttgtctatatgaaaatgtgaactaaaaagtactattttctgaaagaaaaggatccagtcataaattgtgaatgagagacaacagtgactatttttaacttataacatataaatattagcttaagcccacactgatttctcagtataaaaagtatcatatgtgggagtggaggcagttaaatatgaaatacgaggcttatattttcaaggaaatatgaaatttacactcaaagttattattctgcaatctggggtcactgttaattctatatattgtcaggaaataaatactaaacagtatttttacacacagtagaatatagtaaacaaaatgtatgtcttgttgctacttgttaaatatccatgtctctaaattagtttataatcttagtaggatgttccttttgtaactaatttttaataatggagatttttacatgagatacacttattatctattttagcaaaaaatagcttattgaacaaataaactttaaataaattgagtaattcttttgtatatggagagat

SEQ ID NO: 695712 - DNA, 798 bp, Homo sapiens
ttcacctcatgttacttataccttaattcagccatttaagaaatctatattataagatttttgataatactttgtctatgcatatccctctttaggatgtgatctcctttgatatgaggatataactaattaatatttgacttcagtgcttgaaaataacagccatcccataaatatatgttaaacaaatgaatgacaaaatactgccctgcagaaaatrttgactaggattggcagtctaaatttttgtttctcagtgttcttaagaaagataatagtacaaaaaagagaaaggtggttttgtattttcttctcaggcagctgattaatcctttacaatgttttgataactgcaaagtatctttatgtacattgtgtcatgtatctaagtctgagaactggattggcattttcattctcatgttatagaaaagaaaggtgaagcgcagtgagagcaaatgaattttcccaggtcctattgctaatgatgaaattttccttttaagaaaacatttgatatttaaacagctgtaatgttctattcctcagggggatggaatgagttttctaaaattacatcttttctttgaggcttaaatagtatcaaagatggcagaggatagagacggctaattgttcctcaatatcttctctttcattcatcctttagtaagagactctcctaagacttaactgcctgttcttccttgtagctaattatggccctgtggcttagtctgagccaatattgtgtgatggaaatgaaatatgtgacttttaggttgtatctttaagaca

SEQ ID NO: 695713 - DNA, 600 bp, Homo sapiens
taatttcaatcatacaagaaatacttcaaatcccaagcatgaaaatacaaagtaaagcacatctggtcacatcaaaataaagytgccaaagaccaaaggcaaagtcttaaattaacatcgggtagaattttaaaaagcatacttccttcaaaaagcaacaattagattgatgctgacttctcaacagaaacaacagaaaccagactaactgaaagaaaataacaactaacctataattctctaaccagtagaaatacacttcaataatgaaggcaaatgggattataaaggataatacgtctgaataagaaaacaaaggcacttctatttggatttcagtgttgtgtagtacctaattatgttttcttcctttctattaaaaacttagagccaatactatgataatacaaattcatcagagacaaatgttgattttgttatcaattgtttacagagattaaaattcatttcttatctatgttttgaaatcacattactatgaaattctctataatgtaaagaacaggaaaatgaaagtggcatttgtttacacagcagtggaaacacactaagcaaaccattctaccgataacacctgtt

SEQ ID NO: 695714 - DNA, 607 bp, Homo sapiens
caaatgcgcctttatgtgataaactcacattggatttatatacatgctttatcaaactgattctgtcctaagagaattctaagaattaaagttttagggtagatcctaatatatttgaaatgagaatatttttttttcatattttagtttataacatataactttctaaaaaacatataaataatggtagtggtataatggttacccttagagacaatatttgttggtacacatggtatttctaccaaattttacratattctgggtcatagagtaaacctcaaatgattacaaaaccttgaaatagttttgagttcactgttaattttaaccccaagacagaggagaaagcagtcagcacaatgttagaaaaaaatctcctcaatatattcagggtgtttcaggctcttatgctgatgatgtgcttaatgtctattttaaatgtgtagtcttttttgatatacttattgatattctcccaactttttaaatcccctccttaaaaatataatgggcatagaatgatccagaaaggaagatggaaaaaataaatttctgcttcccttctcaatatctgttgttcattttcaatgcaaaaaaaatttta

SEQ ID NO: 695715 - DNA, 2492 bp, Homo sapiens
tcctggctaacactgtgaaaaccccatctctactaaaaatacaaaaattagccgggtgtggtggtgggcgcctgtagtcccagctatttgggaggctgaggcgggagaatggcatgaacctgggaggcggagcttgcagtgagccgagatagtaccactgccctccagcctgggtgacagagcragactctgtctcaaaaaaaaaaaaaaaaaaattaggaaagtaaaatcttttattcttaatgtgcagagaaaaagtgccccttgaaaactgatttatcccaatttatgttaactcattggtatgtctcactcaggtgagtagtgatgcatcattcttggcaagatattttcaaacaataatggttctctttctcatatgagagcatttgaatgttttgacttttctagtctttataactaatgtttaataaacctgtgccacttctaaaggaataccaggacaccaggaagaatattttgtggtgttactgttttaacctcaacttcacagttttcacaataatgctaggtagaaatccatcactgaaactcaattccccatctttatttgtaaaaatattattaaccttcttacagaaatggtttgattttcaacgcttcatgtccacaatgttaaaacggttgaaagtttccagaaccataagtctaaccaacttttcttcacatcatccgtagcaaatcatattactttagggtatcaaggagtcacaatgaggaaaaaaagaagaacaaagattgtttttgcttttataaccctttgctctcacaattcaacagtaaatcaacagtgaacatttggtttgcccgaggcaaacatgaaatcggcttgcctgtttggagcttatattatcttttgttcttatctgtagagtcttcaaaataagcacaaattcttctctcttagagactctcagaaccagtggtagtccccactgaatttattcatttcatcaaaatgatatgaatttcagctgcccaattttgtattcgtgaagaatattggtaatctagttcaaaagaaagccatagagaagaattcattgcagcaaacagataatttcccctatagctaattctatttttattcagacatacagacttgcctctgcaaggctattgttctctcaagggagaagacaagtttgttgcaggaaaactatctgactgaacagataattaagcataccggcaaggcaagaagaaaaagaaaaaacaacaacaacaacaaaacaaaaccaaccccaaaccctcttactctagatgattttcttgccaataaaatctgagagtccccatatcattcctctgttcaatgccacattcaaactttaatagtgaccaaagaaaatattaagaaggtggaacagatcagcaatggtttaaaaatgttgctggtggaaggtatctgagtcattggcagcaagtccatatggatttctagtaacttcaattcttgcctcctcagaagaaagaaatctagtgaggggcataatgcagaagagactcaggcaactttcagagcaggagtggaagtttattttaaaagggtttagaggccaagcgcagtggctcacgcttgtaatcccagcactttgggaggccaaggcaggcagatcacctgaggtcaggaattccagaccagcgtgaccaacatggtgaaaccctgtttctactaaaaatacaaaaaaaaaaaaaaaaattagccacacacacctgtaatcccagctactcgggaggctgaggcaggagaattgcttgaacctgggaggcggaggttgcagtgaggcaagatcaacccattgcaccccagcctgggagacagagcaagactccatttcaaacaacaacaacaacaaaaaccacacacacaaaacaaaacaaaaaaacaaagcgtttagaagaggaaaggaaaattcacttggaaaagacccaagtggtcacctgaaggtcaagggcagtgtttaaccttgatcctaggactttataggttggcctctttaccataattcttcactgagggtgggctgctggcatgcacagtgcccccattgcccttggaaagtgagcatatgcagtgtgtttaagaagttgtgcccattttgtggctttcttccctttttcagtggagtgcccccagaaagttacactccgccattttgtctcttaatgcacatgcccaggaagttgcttctccctggcatctacattcagttaacactttagtgcaacaagtgtggaccatcaggaaatggcctctacctggatctgattgccaatttgtcacttttagaaaggcaatgtgataactgctgaaccatcacctgacatccctggtgggtgggagagccttctcctgccccactcatgcctgtctaactatctgtaacaaaaaccagtaagaggaagcagagacaaagagtttgtcatggagaagcccaaactgatgggcctatttgagctggcggctg

SEQ ID NO: 695716 - DNA, 2492 bp, Homo sapiens
tcctggctaacactgtgaaaaccccatctctactaaaaatacaaaaattagccgggtgtggtggtgggcgcctgtagtcccagctatttgggaggctgaggcgggagaatggcatgaacctgggaggcggagcttgcagtgagccgagatagtaccactgccctccagcctgggtgacagagcgagactctgtctcaaaaaaaaaaaaaaaaaaattaggaaagtaaaatcttttattcttaatgtgcagagaaaaagtgccccttgaaaactgatttatcccaatttatgttaactcattggtatgtctcactcaggtgagtagtgatgcatcattcttggcaagatattttcaaacaataatggttctctttctcatatgagagcatttgaatgttttgacttttctagtctttataactaatgtttaataaacctgtgccacttctaaaggaataccaggacaccaggaagaatattttgtggtgttactgttttaacctcaacttcacagttttcacaataatgctaggtagaaatccatcactgaaactcaattccccatctttatttgtaaaaatattattaaccttcttacagaaatggtttgattttcaacgcttcatgtccacaatgttaaaacggttgaaagtttccagaaccataagtctaaccaacttttcttcacatcatccgtagcaaatcatattactttagggtatcaaggagtcacaatgaggaaaaaaagaagaacaaagattgtttttgcttttataaccctttgctctcacaattcaacagtaaatcaacagtgaacatttggtttgcccgaggcaaacatgaaatcggcttgcctgtttggagcttatattatcttttgttcttatctgtagagtcttcaaaataagcacaaattcttctctcttagagactctcagaaccagtggtagtccccactgaatttattcatttcatcaaaatgatatgaatttcagctgcccaattttgtattcgtgaagaatattggtaatctagttcaaaagaaagccatagagaagaattcattgcagcaaacagataatttcccctatagctaattctatttttattcagacatacagacttgcctctgcaaggctattgttctctcaagggagaagacaagtttgttgcaggaaaactatctgactgaacagataattaagcataccggcaaggcaagaagaaaaagaaaaaacaacaacaacaacaaaacaaaaccaaccccaaaccctcttactctagatgattttcttgccaataaaatctgagagtccccatatcattcctctgttcaatgccacattcaaactttaatagtgaccaaagaaaatattaagaaggtggaacagatcagcartggtttaaaaatgttgctggtggaaggtatctgagtcattggcagcaagtccatatggatttctagtaacttcaattcttgcctcctcagaagaaagaaatctagtgaggggcataatgcagaagagactcaggcaactttcagagcaggagtggaagtttattttaaaagggtttagaggccaagcgcagtggctcacgcttgtaatcccagcactttgggaggccaaggcaggcagatcacctgaggtcaggaattccagaccagcgtgaccaacatggtgaaaccctgtttctactaaaaatacaaaaaaaaaaaaaaaaattagccacacacacctgtaatcccagctactcgggaggctgaggcaggagaattgcttgaacctgggaggcggaggttgcagtgaggcaagatcaacccattgcaccccagcctgggagacagagcaagactccatttcaaacaacaacaacaacaaaaaccacacacacaaaacaaaacaaaaaaacaaagcgtttagaagaggaaaggaaaattcacttggaaaagacccaagtggtcacctgaaggtcaagggcagtgtttaaccttgatcctaggactttataggttggcctctttaccataattcttcactgagggtgggctgctggcatgcacagtgcccccattgcccttggaaagtgagcatatgcagtgtgtttaagaagttgtgcccattttgtggctttcttccctttttcagtggagtgcccccagaaagttacactccgccattttgtctcttaatgcacatgcccaggaagttgcttctccctggcatctacattcagttaacactttagtgcaacaagtgtggaccatcaggaaatggcctctacctggatctgattgccaatttgtcacttttagaaaggcaatgtgataactgctgaaccatcacctgacatccctggtgggtgggagagccttctcctgccccactcatgcctgtctaactatctgtaacaaaaaccagtaagaggaagcagagacaaagagtttgtcatggagaagcccaaactgatgggcctatttgagctggcggctg

SEQ ID NO: 695717 - DNA, 2492 bp, Homo sapiens
tcctggctaacactgtgaaaaccccatctctactaaaaatacaaaaattagccgggtgtggtggtgggcgcctgtagtcccagctatttgggaggctgaggcgggagaatggcatgaacctgggaggcggagcttgcagtgagccgagatagtaccactgccctccagcctgggtgacagagcgagactctgtctcaaaaaaaaaaaaaaaaaaattaggaaagtaaaatcttttattcttaatgtgcagagaaaaagtgccccttgaaaactgatttatcccaatttatgttaactcattggtatgtctcactcaggtgagtagtgatgcatcattcttggcaagatattttcaaacaataatggttctctttctcatatgagagcatttgaatgttttgacttttctagtctttataactaatgtttaataaacctgtgccacttctaaaggaataccaggacaccaggaagaatattttgtggtgttactgttttaacctcaacttcacagttttcacaataatgctaggtagaaatccatcactgaaactcaattccccatctttatttgtaaaaatattattaaccttcttacagaaatggtttgattttcaacgcttcatgtccacaatgttaaaacggttgaaagtttccagaaccataagtctaaccaacttttcttcacatcatccgtagcaaatcatattactttagggtatcaaggagtcacaatgaggaaaaaaagaagaacaaagattgtttttgcttttataaccctttgctctcacaattcaacagtaaatcaacagtgaacatttggtttgcccgaggcaaacatgaaatcggcttgcctgtttggagcttatattatcttttgttcttatctgtagagtcttcaaaataagcacaaattcttctctcttagagactctcagaaccagtggtagtccccactgaatttattcatttcatcaaaatgatatgaatttcagctgcccaattttgtattcgtgaagaatattggtaatctagttcaaaagaaagccatagagaagaattcattgcagcaaacagataatttcccctatagctaattctatttttattcagacatacagacttgcctctgcaaggctattgttctctcaagggagaagacaagtttgttgcaggaaaactatctgactgaacagataattaagcataccggcaaggcaagaagaaaaagaaaaaacaacaacaacaacaaaacaaaaccaaccccaaaccctcttactctagatgattttcttgccaataaaatctgagagtccccatatcattcctctgttcaatgccacattcaaactttaatagtgaccaaagaaaatattaagaaggtggaacagatcagcaatggtttaaaaatgttgctggtggaaggtatctgagtcattggcagcaagtccatatggatttctagtaacttcaattcttgcctcctcagaagaaagaaatctagtgaggggcrtaatgcagaagagactcaggcaactttcagagcaggagtggaagtttattttaaaagggtttagaggccaagcgcagtggctcacgcttgtaatcccagcactttgggaggccaaggcaggcagatcacctgaggtcaggaattccagaccagcgtgaccaacatggtgaaaccctgtttctactaaaaatacaaaaaaaaaaaaaaaaattagccacacacacctgtaatcccagctactcgggaggctgaggcaggagaattgcttgaacctgggaggcggaggttgcagtgaggcaagatcaacccattgcaccccagcctgggagacagagcaagactccatttcaaacaacaacaacaacaaaaaccacacacacaaaacaaaacaaaaaaacaaagcgtttagaagaggaaaggaaaattcacttggaaaagacccaagtggtcacctgaaggtcaagggcagtgtttaaccttgatcctaggactttataggttggcctctttaccataattcttcactgagggtgggctgctggcatgcacagtgcccccattgcccttggaaagtgagcatatgcagtgtgtttaagaagttgtgcccattttgtggctttcttccctttttcagtggagtgcccccagaaagttacactccgccattttgtctcttaatgcacatgcccaggaagttgcttctccctggcatctacattcagttaacactttagtgcaacaagtgtggaccatcaggaaatggcctctacctggatctgattgccaatttgtcacttttagaaaggcaatgtgataactgctgaaccatcacctgacatccctggtgggtgggagagccttctcctgccccactcatgcctgtctaactatctgtaacaaaaaccagtaagaggaagcagagacaaagagtttgtcatggagaagcccaaactgatgggcctatttgagctggcggctg

SEQ ID NO: 695718 - DNA, 833 bp, Homo sapiens
taatcttttaagaccaggccaaagagattaagtttaaaaataaagaaaaggatacaacttggggtagagagccaggttgaagtttgcacagttcaatgaggagtgttgtgtacatcacatcaatgtgagggggtgctggaagttgaaacagctctgcaaagatcacctacaaaagaatcatgagtcacaattcaatccaactgctatctttgcacttctattagaaagaccttaacattctaaatctgagctctaactccatggcattcatatgaaaatggaattactttttaatatttaaaattatgctctttcaaacacaaaaatctaaaactgaaaactgtaatgaaaatttcttctctctataattcgatcaaataaaaacacacgacactaatgcttattygatctacactcctcccagagaactatgcaattaaattccaactttgaaagcaccacagctgagccaggatgtacagctttttgaggggctcaaaagatccatgacagtttcattcctataaataacaagaactcttaggctgggcgcagtggctcacgcctgtaatcccagcactttgggaggctgaggcaggcagattacttgaggtcaggagttcaagaccagcctggccaacacggtgaaactctgtctctacaaaaaatacaaaaattagccaggtgtggtggtgggcacctatagtcccagcaacttgagagcctgaggcaggagaactgcttgaacccaggaggcggaggttgccctgagttgaggtcgtgtccctgtactccagcctaggcgacagagcgagactccatctcaaaaaaaa

SEQ ID NO: 695719 - DNA, 650 bp, Homo sapiens
tgtttaagatgaaactttttcacatttctaacattacaattagatgcatcttacaatcaatggtaagacgtagttgaattggcagtgtttttttttttaatttgagaaaataatgtggagtcttaaaactaatgctatctcacgtgaaatacaggaggtgatgataactaccatttattgcttatgcggtctcaggcactgttgcaagcaccttgcataccttatttaatatttacaactaccctacaaagtaagtattattagataatttttacagatgaggaaastaaagcctggataatttgagtatacttgcccatgccactaattttaaatgttaggttttgaatgcaggtacgcgtggtaccaaagcttgatctgttaagagttgcttaacaatacagagaatcaatgtaaaaaacaccaacttacgttcatttttgcctaaaagcctgcatttggaaagtattgtaatttctgtatggtactcttgccatgacagtagagttagattaatgagatcatcattagatgatgaaactcatctaaatttctgtaaagcatcagcatgttcagacaaaataacttgtctttcttcagttcacatttgctgtggattttctttagaccacgcacagagatgagcaaat

SEQ ID NO: 695720 - DNA, 866 bp, Homo sapiens
tttaaaagccaaaaacaaaacaaaacaataaaaaaaaaccctggtgatttgatgctggtataagctggggctaaagttacataaaatctcatggaaaattttgtaggatatttctaaaacagtgagactcaggaccttgtcattgactgacaccagcttcacacaacttccaccagagtgtatggagaaagtaaggaggcaggtgtaaagacacatggcaagaggtagtaaggaatcaccttaattcctcagccaaaaaactcaggccatttggcctmtaatattatatctctttccatgcaaggtgactggtagtgtttatctagtaagtagttatagttattttagcataaagttatacaattaggattatactacaaataagagtcattttctactgtttatgctcaggggcaaccttttcaaccatgacttattttgtttactctcaattattcatatgtcaaatcagaaagtgggatttttacatacatacacacgataatttttccaaaattcttatttgtacattttccacaagaagttattcttacaaatgagactagacatacaattttagatctcagaaaatcctattccaaaaatagaaaacaccttataatattaatttacactactttttaacttaaagctatacaaatttttctactcttcctcaaaacacactcacctctgggataggattcagcatttgcttaataccattgtatccagaatattagaaaaggcaatgtgaaaaaacaacgatatatataattgaaactatacagggaatgtagaggggaaaaaatcagtattaaaactgatcaggggttgccagggatcagtgggaaggaaagaataaa

SEQ ID NO: 695721 - DNA, 866 bp, Homo sapiens
tttaaaagccaaaaacaaaacaaaacaataaaaaaaaaccctggtgatttgatgctggtataagctggggctaaagttacataaaatctcatggaaaattttgtaggatatttctaaaacagtgagactcaggaccttgtcattgactgacaccagcttcacacaacttccaccagagtgtatggagaaagtaaggaggcaggtgtaaagacacatggcaagaggtagtaaggaatcaccttaattcctcagccaaaaaactcaggccatttggcctctaatattatatctctttccatgcaaggtgactggtagtgtttatctagtaagtagttatagttattttagcataaagttatacaattaggattatactacaaataagagtcattttctactgtttatgctcaggggcaaccttttcaaccatgacttattttgtttactctcaattattcatatgtcaaatcagaaagtgggatttttacatacatacacacgataatttttccaaaattcttatttgtacattttccacragaagttattcttacaaatgagactagacatacaattttagatctcagaaaatcctattccaaaaatagaaaacaccttataatattaatttacactactttttaacttaaagctatacaaatttttctactcttcctcaaaacacactcacctctgggataggattcagcatttgcttaataccattgtatccagaatattagaaaaggcaatgtgaaaaaacaacgatatatataattgaaactatacagggaatgtagaggggaaaaaatcagtattaaaactgatcaggggttgccagggatcagtgggaaggaaagaataaa

SEQ ID NO: 695722 - DNA, 1263 bp, Homo sapiens
tgcatctccaggactcttcagcatttgtttacacaaaccatgcaatccttgtgttcccccattcccacattctgctcccttgccttttctccctgaagaatgagatcgccatagcacttccatttcctgtcttgtcagttaagatcactgccatgctgtgaatgggataacactacactgtgcgcctgctccctctaacactgagggcatcgtgtgtgcctctccacacagctgcttccctcactgctctattttctggaagaccgatcttccagacttcaataagttcctcccagacccagttcacaatacaagatgtttctgccaaaaagcaaatgttttctgtctttgtgtttctcacataggtggctttaactttcttaccttacatttgttaatatgataatctgacactgttagtacttggaatcattctattacttagcctaaaaatcctctatgttcaaattcaaacacattgagcatacatactacatgccaagcagcaactgtatctttcacatgatctctctcatttgatttttaaaataaccttacagggtggatgtcattggcctcatttgtagatgagaaaaccaaatttcaaacaggttaagtgactttagagcccaagatcacatggtgagtaaatgggaaaataatgatttaaacacgggtctctctttaagtccaggattaattccactacacctcagatacctagagaaataagttataatactggattttaaattcactttgcaactataacacaaataaattacaatactggagaacatggctttggagtcagagtagcctagactcaaattctaactatcacttattaaccatgtgactgtagaaggtcccctggttcattgtctgtaaatagggataccacgaactcaagaatcactatgaagttcaaagacataaaatgcctaaaatagttcctgacatacaattgtcactttaaaaaataacagtggtattcactttaaatcatatgaattaaagtctttttttaattaaaatactacattttctaaagtcaaataagtagttacttcatatcattggtgaaaatggaacattataatcttgaagtataatctgaaacatgtctgtcctacaatcaaaatgtttatctaatttctcataatattcattaaatggtcaaatctgatctttttaaaaattctggcwtttttatatatcaaaatttatttaccatacgttgtgttgacattattttgcaac

SEQ ID NO: 695723 - DNA, 1153 bp, Homo sapiens
cattttaggttcaggggtacatgtgcaggtttgttatataggcacattgtgtcacaggggtttggtgtgtcacccaggaaataagcatagaaatcttgtaaccaattgctttctcttaaactgtgactttatatacttaataatatgtattttactgtaattaaatgttattttttacctttgtccaccagacagggaaaaaaatgtttttattatacttattcaaagtgaataatcaaaggagttgttctgagctttttatagttattttagcttcaratattctgttcttttacctttctgtatgtcaaacaaatagtttcacttgaaacactcacctacactcttgaccatccgctgaaagaaaacaagcatacaagcatatattctactaggttctgagtacatctttgtatttattaattgacaccataatggctaattcttagctttctttcatctcgtttctaagacctttcagtcatgagtgttcatttaacatcctaatcctagtattactatttttcatttgtatatcacttttacagcttttgtttagctttcatttatattaagtgaattgcttctacccttcaagtggatgcagcagatatttgggcaagaagagcctgggctcagatgtgacagggcttctttacagttaggactaataaattgtagaccctagaccagaacttgggtatgaatgttgcttttacacaggttttaggtgttttgttgagacagggtctcactgttgcctaggctggagtctacatagttcttaagaactcctgtgaattctttattgtgaaattttgccatcgtttatttttcattgttaaaagatgtgacctgttgtcattttttctgtcaaactgattgttcaacatatatttattgtagacctcatgcaaagagaaaactgagtatctacagaaaatggttcagaggaatgaaagatataaacaagatgtggagaggttctatgaacggaagcgacatttagatttaattgagatgcttgaagcaaaaaggccatgggtggtaagtcataatttttagaggcaaagtacgtgtttctttaagtagcagagtaattatgatgaaagtattagttactgtgtattcaagttaggtgcttctttttcat

SEQ ID NO: 695724 - DNA, 1414 bp, Homo sapiens
tggctttctacagttgctacatgaaatttaattaaacactactctcctttaggyaagcttttatgattcttcaaaatgttatttcgctttacccattccaacttatctccctcccctccccaacatactcgtccttgtaccattctggccactctctacagcacccgctgaatttgtttgttgttgcttccatcctttgttcttttctcttcgaggcaacatggtgtagtggaaagaacatggactttggtaccaaacacatcttaacacttaatatctgtgattttaggcaatttacttcacttacctgagccttagtttcttcatctttaaaattgagaacatactattaacttttaggattattgtgttgtgttttttgtttgttcgtttctggtttttagctattaactctccccactttagctccttaagggaagtgactgttttataaacaatattaatagcaacagaaacaacttatattgattgatcggttatgggccaggcactatatatctgaaaagtattgctaaatatatcccagaaaactgggggggacctaagaatttgggatcaattcttatgtttaacactgatttcttcattattatatgtgtcatacagtttaaagctgatggaacaggatacttgcaatcttgaagaggaagagcgaaaagcaagtaccaaaatcaaagaaataaatgttcaaaaagcgaaacttgttaccgaattaacaaacctaataaaggtaaggtattgttttaattttagtcattttttaaaggaaatagcgggcagataagatagtaaaatctttagagggagggaaggttttgattaaggtttttgacattttagttatataagcaagagatctttatcatcagtttcagcttgcttagttgcttgacattttctttagaggtaataaataggataaaagcactcattaagctaaatgtgtttattccagatgactctcttaaaaacaaaggaaaacactttctaaaaaattgttacaagaactgtttgagagagatgtcaggcacaataggaaaattattttttcatggtttataattttgttttaaaaaactatacattttttagttctaaaacataggtaacataaaaattaactcttaggggtttttgttcctagatttgtacttctttgcatatacaaaaagtagatttaattctccaaaatactacagtgatctctgagaagaacaaattagaatcagattatatggccgcatcttcacaactccgtcttacagaggtaaaatttttgcctttactttttattttgaggttctaacctcagactggtttgaaaatatatatcgtgtcatcactagcaatatatagtttgttgttttatgctatttaacttacaaatttaatg

SEQ ID NO: 695725 - DNA, 629 bp, Homo sapiens
ttgattgccaaaaaagggaagaaaaaaaaggactgatcattgtacaaaaatgatgactagctccctgccctcagctcccattactaatgtctataattcttatttgttcatcagggtagattcccctaaatgtagtaacttcatcaaacaatctgacttttctacagctcttgaagcagagcctttacttttcaaaaaattcatgctagcaactcagggaaggacagtattgtgccctcctgagcactgagtkttttcgttactcaccgccatttgaacagtttaaaaattattctttatttttgttgcagtctcaccaacgcaccttaacgtagcagtttctcattgtctgaactagtaccctgggttctttgtcctcacgtccaagaaaattaaggaacgtggacacaaaggtggggttggagcaaaagtttaataagtgaaagaaagaaaagaagctctctgcattagagaggggagtctgactggactgccaagttgtagtaaaaacgtcagggtttttataaatggactagtgaggaggggtgtcttatcttcccagggcctgaagatttagttgggaccaggtgtgctatcggcatagagcagagttcctaacagcctttacc

SEQ ID NO: 695726 - DNA, 807 bp, Homo sapiens
gaaggcagcgcattccagctcagggatttctagaaacctcgggggcggaagtttaaccagagaattaggaggcaaggggaagagtagcaatgaggttaacctgtgcagtgtagtcatttcacgagtttgagaacgcctagcacgatgccttaacggagcgtcgggcacagagtcatttgggaggatttctttttcggatttttgagacaggaacctgatttgaagcaacagggaagaacaccaagaggacgaagagccaasgacgggcgtgcccgggagctctcacctggaaggggtgggagcaagcagggcctgacgtcctcccgccttggcggccgtggacgccccaggtgccacccacagcagcctcccaccacacatgactgaggctcgggaagcaataaagtggctttcaaaatactaaacgcaattgagattttttcctgagttaaaacaaaaaaaaaaaggaactgaatgccgaaatatacggagaagaaactccagttgccacgtccccgaacgtctccacccagtcctgcctgctgtttcgccctcagtctgggcctcgcacagcgcggcggagcgcgggaggggcggggcgggcctgctgacgtcgccggacctgaactgcgcaggcgcggcgcgagatcgcgggagcgagcgcgcggtaacagttcgcggcagttcgcgcgggagcggggcgcctgggtggatgggcgcttgggcgcctgggctgccggacggtgggaacggaagtcgctgtgggacgctgaggaagccaggatggcgactccgagcaagaagacg

SEQ ID NO: 695727 - DNA, 615 bp, Homo sapiens
ctgaggcttcaaggaacacagtttgaaaaccattgagcaagaaagcctccaactccacccattttacagttggggaagctgaggtctcaagaggtctagatgtgcccagttgcctcacttgccacttatttgtttgcacttatcataactggagttacaagtgacctaaaagggcacctccagctggctgaaatcagtacttagacctcagtgtgcatacagakcagctgggggggatcttgaaaaaaaatgcagattctggctcagctgttctggggtagggcctgagattctgcatttcttttcctttttagagatgggtctcactatgttgcgcaggcagaacacaaacaaactcctgggctcaagcgaccctcccacctcggcctcccgagtggttgggactccaggcaccatgccaccatgcctcactcagagattctgcatttctaacaagctctctcaggtggggccagggctgctgggcctcaaactacgctttgggcggtaagggtttcgtgctttgatgtacgcgatatccagtgctgttcccttcgttcctaggcaagaaggcttgggatcttgtccaggctcttccccgctcctgctttacaa

SEQ ID NO: 695728 - DNA, 615 bp, Homo sapiens
ctgaggcttcaaggaacacagtttgaaaaccattgagcaagaaagcctccaactccacccattttacagttggggaagctgaggtctcaagaggtctagatgtgcccagttgcctcacttgccacttatttgtttgcacttatcataactggagttacaagtgacctaaaagggcacctccagctggctgaaatcagtacttagacctcagtgtgcatacagatcagctgsgggggatcttgaaaaaaaatgcagattctggctcagctgttctggggtagggcctgagattctgcatttcttttcctttttagagatgggtctcactatgttgcgcaggcagaacacaaacaaactcctgggctcaagcgaccctcccacctcggcctcccgagtggttgggactccaggcaccatgccaccatgcctcactcagagattctgcatttctaacaagctctctcaggtggggccagggctgctgggcctcaaactacgctttgggcggtaagggtttcgtgctttgatgtacgcgatatccagtgctgttcccttcgttcctaggcaagaaggcttgggatcttgtccaggctcttccccgctcctgctttacaa

SEQ ID NO: 695729 - DNA, 615 bp, Homo sapiens
ctgaggcttcaaggaacacagtttgaaaaccattgagcaagaaagcctccaactccacccattttacagttggggaagctgaggtctcaagaggtctagatgtgcccagttgcctcacttgccacttatttgtttgcacttatcataactggagttacaagtgacctaaaagggcacctccagctggctgaaatcagtacttagacctcagtgtgcatacagatcagctgggggggatcttgaaaaaaaatgcagattctggctcagctgttctggggtagggccygagattctgcatttcttttcctttttagagatgggtctcactatgttgcgcaggcagaacacaaacaaactcctgggctcaagcgaccctcccacctcggcctcccgagtggttgggactccaggcaccatgccaccatgcctcactcagagattctgcatttctaacaagctctctcaggtggggccagggctgctgggcctcaaactacgctttgggcggtaagggtttcgtgctttgatgtacgcgatatccagtgctgttcccttcgttcctaggcaagaaggcttgggatcttgtccaggctcttccccgctcctgctttacaa

SEQ ID NO: 695730 - DNA, 796 bp, Homo sapiens
taaagcaattatatgtgactgaatatgaattggcaaatttgaacaaagggtatgcaaaaggtctttgtcctattcttgcaactgttctataattttgaaattatttcaaaataacaagttaacaaaagtgaaatatttaatatgtttgaaaaagctagaagcctacactgaaactattttcattggaatggaatcttttcattgtatattcaacggaaaaaaatttgattcattgatcagtggcttgtcaacatcaaaatttgctgattatctttcttcgtaacatgaatatgttcttttgtagctgttattcccatgaggtccaattttcctaggcaaattttatgatctcaattttgtcatgcagatgtagggtcttcccatccatgtttagtcaatatttactggacgcagtgttagtctttgtgttttattttctgttgcttatttctaccaggtaaaagttattttaagttttgcaatttccagtgttcccagtaagctgtaattcttcaaacaggtttytccccccgtaaaattaactttgttgtgtatagtttagagggattctctaaccctggctaggcatctgaatttcctgggagcttttgaaaagtacaagttttccagcttctcttcaatctcaagattctgatccaggcggaatctggatatttgaaattttaaaagctccctgcctctcaggttctgtggtagtcactggcccatcacttggtgtggttaccaccttgccttgtgttattggttcttaaactctttgggccttgctattcta

SEQ ID NO: 695731 - DNA, 644 bp, Homo sapiens
cttgaacccgggaggcagaggttgcagtgagccaaaattgtgccactgcacaccagcctgggcaacgagagttaaactctgtctcaaaaaaaaaaaaaaaaaaaaaaaaaaaaaagaagagcattggactagattagagggggcaagcatgcttccatccccaactttaccatactcactgcagacattagtaatcaatcacagcactctttctaaccgagctctgctgtgacctcagaatctttctcaacacatggtcccaggcagccactactaaatggttagaacaggccattcttaaactagatgaaatgattccttggaccccattcaccactctggctctctgactattggaactacaattcctttatgttttaaaccagttgactgacttttatgaagcctcatcttgacgtaacacatccttaggcctaggtactatggagccacagagaagctgaaaacagcargccaccctcacggaaactacagtttggtggggagcaaggctgcagagtggcgatgttcttaggtgtgctcaggcaccttcttggtgctctaggatgttgtcctgtggtcagggaaggcttcctagaggtggttagagtagactgtcgtctaggcagtgagacagccttagc

SEQ ID NO: 695732 - DNA, 647 bp, Homo sapiens
ccttgggcaatgacagcaagaagaccccactggaaccaagctaggagtaaaatcaaggcactgagggttttcagccaggaagggcatgattagatttgctttttatagagatcactctaagagcagtgtggaaaatggagtggctgggaagaaactggtaacagaaggatcacgttccagaatgtttaaataacagtccaagagaaagatgaagaccagacgaaggcggaggcagtgtgggcagagcaccgactggagagggggttctaacttgggacactgagcagagagctgttctgttaaaccaagatctggacagaagacaagtggcagaattctctgtcccatccctgttcccagcaacctgggatgctggggcagcagggcttcttagagatgaaraaaatcctggacatttccatgtttgatgcttttagaattttaaataagaagagaaaaaaaatcaaaaacagggccaaataaacagtggtatctcttaaatatttgcttttttaaaattatggcttttaaatcacatgcataatgcactgtatgtctgtttactcttcaaagacaatcatagaagcccctccacccccacttttttaagcatcaattcatcaattataccatcagggctctagtcc

SEQ ID NO: 695733 - DNA, 1599 bp, Homo sapiens
  misc_feature 2, 3, 4, 5, 6, 7, 8, 9, 10, 11, 12, 13, 14, 15, 16, 17, 18,19, 20, 21, 22, 23, 24, 25, 26, 27, 28, 29, 30, 31, 32,33, 34, 35, 36, 37, 38, 39, 40, 41, 42, 43, 44, 45, 46,47, 48, 49, 50, 51, 52, 53, 54, 55, 56, 57, 58, 59, 60,61: n = A,T,C or G
  misc_feature 62, 63, 64, 65, 66, 67, 68, 69, 70, 71, 72, 73, 74, 75, 76,77, 78, 79, 80, 81, 82, 83, 84, 85, 86, 87, 88, 89, 90,91, 92, 93, 94, 95, 96, 97, 98, 99, 100, 101: n = A,T,C or G
annnnnnnnnnnnnnnnnnnnnnnnnnnnnnnnnnnnnnnnnnnnnnnnnnnnnnnnnnnnnnnnnnnnnnnnnnnnnnnnnnnnnnnnnnnnnnnnnnnnttgcttagacctcagaaacaactcagaactagagcagtygatgagaaaatcatcaacatttagatggaaatatatagcgatggcatgaacaaaactgctcgaggagagtgagattgaggagagacatccacattcaataaggaaacttcagagagggagactcaggagtctgtgagagaggggcaatggaagtgctaagggcccaggccaggtgcagagactggccttgagtaggaggatagtctccctttgaactgtatgagatggggagtggggttacatgggaatagcacagccagtgtcttttctcctctctgaacaaagtaggagtcaagggcatctttagaggtgacggtctggaggcaggaatgccaccttgataagaatataattggaagttctgctgtgggaagtgattcagggaagggagaacataactaggactgagttacagcagctgaagttggataatttatctcaaggtggagtccatcactgcatttgtgtgatttccttaagtgggatttaatagtttggagtgggaataaaaatgaataaaaaggaggagatgacctccaatcccattacatttcctcttgcttgctctacattttgccctccttcctgttccttgaatacagctggaataccagatgtcccacctgcaggaatttttccggaaagctaactgcttgatttacttcctttctgtcattgctcgtatctgaccttctccatgaggtctaccctgaccatcctgtttaatattttaacttcaattttctacatttctgatctcccatcctctctaccccttcttttacccatcacacttacctcctaacatattaaataatttactcatttatcatatttactgtttattctctgtctcccttcactggtatgggagctccatgaggacaggaatctttactctatgatgtatcctaaatggtcagaacagtacctggcacataatagtggttcaataaatatttgttgaataaaattaggttgactgaagaaatgtgggtgtcagtgaaggcatatattgtttattagttttggtcgaaccagaaacagaaaatccgtatgaaacctaaactttttactgttatcttttttatttactttgtaacaaatttcttaggttataaaattaaattatgccctctccctcttcagatacccccttctccctctccttccatgttcagttgtagttataacctactctgttagatcactcactcacatctaagaataaaatcatctcaatatgattgtttttcatacaggcattttgccttctaaatttctctctctcactctttccttatctatctagaccactgttaattccagtagtctagaagtgtttggaagttggaggaggtattttgttgtaggtggcagtagtggggaagaccatgatgaccatggcataggaagaacttcttcttctacctttacatgaaatggcacttttttcctg

SEQ ID NO: 695734 - DNA, 1599 bp, Homo sapiens
  misc_feature 2, 3, 4, 5, 6, 7, 8, 9, 10, 11, 12, 13, 14, 15, 16, 17, 18,19, 20, 21, 22, 23, 24, 25, 26, 27, 28, 29, 30, 31, 32,33, 34, 35, 36, 37, 38, 39, 40, 41, 42, 43, 44, 45, 46,47, 48, 49, 50, 51, 52, 53, 54, 55, 56, 57, 58, 59, 60,61: n = A,T,C or G
  misc_feature 62, 63, 64, 65, 66, 67, 68, 69, 70, 71, 72, 73, 74, 75, 76,77, 78, 79, 80, 81, 82, 83, 84, 85, 86, 87, 88, 89, 90,91, 92, 93, 94, 95, 96, 97, 98, 99, 100, 101: n = A,T,C or G
annnnnnnnnnnnnnnnnnnnnnnnnnnnnnnnnnnnnnnnnnnnnnnnnnnnnnnnnnnnnnnnnnnnnnnnnnnnnnnnnnnnnnnnnnnnnnnnnnnnttgcttagacctcagaaacaactcagaactagagcagttgatgagaaaatcatcaacatttagatggaaatatatagcgatggcatgaacaaaactgctcgaggagagtgagattgaggagagacatccacattcaataaggaaacttcagagagggagactcaggagtctgtgagagaggggcaatggaagtgctaagggcccaggccaggtgcagagactggccttgagtaggaggatagtctccctttgaactgtatgagatggggagtggggttacatgggaatagcacagccagtgtcttttctcctctctgaacaaagtaggagtcaagggcatctttagaggtgacggtctggaggcaggaatgccaccttgataagaatataattggaagttctgctgtgggaagtgattcagggaagggagaacataactaggactgagttacagcagctgaagttggataatttatctcaaggtggagtccatcactgcatttgtgtgatttccttaagtgggatttaatagtttggagtgggaataaaaatgaataaaaaggaggagatgacctccaatcccattacatttcctcttgcttgctctacattttgccctccttcctgttccttgaatacagctggaataccagatgtcccacctgcaggaatttttccggaaagctaactgcttgatttacttcctttctgtcattgctcgtatctgaccttctccatgaggtctaccctgaccatcctgtttaatattttaacttcaattttctacatttctgatctcccatcctctctaccccttcttttacccatcacacttacctcctaacatattaaataatttactcatttatcatatttactgtttattctctgtctcccttcactggtatgggagctccatgaggacaggaatctttactctatgatgtatcctaaatggtcagaacagtacctggcacataatagtggttcaataaatatttgttgaataaaattaggttgactgaagaaatgtgggtgtcagtgaaggcatatattgtttattagttttggtcgaaccagaaacagaaaatccgtatgaaacctraactttttactgttatcttttttatttactttgtaacaaatttcttaggttataaaattaaattatgccctctccctcttcagatacccccttctccctctccttccatgttcagttgtagttataacctactctgttagatcactcactcacatctaagaataaaatcatctcaatatgattgtttttcatacaggcattttgccttctaaatttctctctctcactctttccttatctatctagaccactgttaattccagtagtctagaagtgtttggaagttggaggaggtattttgttgtaggtggcagtagtggggaagaccatgatgaccatggcataggaagaacttcttcttctacctttacatgaaatggcacttttttcctg

SEQ ID NO: 695735 - DNA, 1105 bp, Homo sapiens
agatacaatacactatgttaggtactggagacacagcagtaaagaagacagacaaggttcctgtcctcaacacccctacagtttccatgtaataaacaagtaaagtgttagatatggcagagaaacatttttgggatgagagtcatgggtaggaacagaaatgttctgtgtaagaaagtgacacttcaaccaaaactaaagatcagtagaaactgttcagatgaagaaatacagagaagcatctcatcaaagagaacagtttgcccaaggactggggttgggtcagacttgagagtggcaggtgggaagacctgtagcaygcaaagcacactgctgagggctggaaaaaggggagagacaggagcaggaggtggacctctgaaggcactgacaactgtgctcgggattctggattttccccagcatttgtaaggactgttgcatcgttgaagggttgttagcaaaggaggaatatgatcacatgcttatgttctcatagtttagaatggtggttcttaatcctgggtgcacatttgaaacacctaggatatgtaaacaaaaccttgttggtatggtctgaatattggcgttcccccacccccaaattcatatgttggagcccaatacccattgtggtagtattaagaggcgagggctttgagaagcaattaagttatgagagctctacccttataaatgggattagtgctcttacagaaaggattccagggggagctcccttgttccttccaccatgtgaggacacagctaggagataccatcttggaagcgtagagcatctgctggtacctagatcttggactttacagcctccaggactgtgagcaacaaatctctatcatttataaattacccagtagtataagttaccaaaggtattttgttatagtagctaagcagactatggccccaaaccagttaaatcagtctctatgggagtgaatactaggcatcagtatctattaaagttctttctgtgattccaatatactggcaaggttgagaaccactgatcttgagaagtaaagaaataaaaatatggcatcatgaggattaaatgatcaatttaaagacaagtgcattt

SEQ ID NO: 695736 - DNA, 1523 bp, Homo sapiens
tgttgtcacttgtatgagtgtacgcggtaaaactggaagggggagcagggttcccaggtaggacaggacagaagtagtgtacaaagaagccagagccataagggaaaatagccacgaggtcaggaaaacagataccccttgtggtatcacagaaattcaaaggagggcttcggacttccacmatctatggtgttggtagactgaaggcaatttaattcaaatctgaaaagttacaggaccccaactaatatctgatttcacatgtttaagatgatgcagtttctgcaggttttctgtgctcttgtcccccagtggccagtggttgactgccatttgatacctgcctctgcaagccttcccaggaaattctaaaaacagtctcactttggtcttccctcctgagtggagagctgaagactctgatcgagggtagggacctctggggcattgggagagactgtggttggcttgcacagagcagtaaagtatgaaacagaaaactgttgttcactagagtcctccgagagctaaactaccttcagcctaggttaccaacaggagagactttccaaactgtggaaatatttactatgttttgagcagtaaaataggtaattcctatgtgtaaaacttgaaatccagaatttttttaatctatcaaaatctcaaggaaatttattttcccaagtgctaaataatatccagttttctctagctattgtgtgtgagtttgcacacctgtgtcagacaagttattaatatatataaattgatgttaagggtctttttaaaatatttcaaaatgctaagagcttgagttaggaaggtgaaatagaaaagaagaggtgtatataaaagttgttggaaatgaaaatagaaccttgagagtgaccatttttagaattatggaagaatgaggaacaaaatatgatttcacctttcccagcttgggagttgagaatgaggaacagaagtagagaaggaggctggtttgccactggcttgcataaaggcagataagtttattttcctcttatttcttaagaaataagttgagaccttagttggtctcaactaaggcatgttggaccagtggaaatggccaatagtcaaatagaagtgtgggatgaagttgagaagataaatcagggctactgctgtaggtttaggaagcttccacatgaatcaactgaagtcggcagagtgggtgagacctccaaagaagagactgaaaagtcaacatacttcataacacaccatttaccttacttgaagaattaatgcttttcaaaaaggattgtcagcagaaggcgtgcataagttttgggggggtttcctttcactttatgggcatgcagtctaactttagttcatggattcctagagcacttgattccaggatgcagacaatctgatcaaaatagtagaaggacaaagaaagagatcttttaaagtagggccctgggcatgctttagaacttctacagaaaggaaaaaaaaattcctttagcagaagctaaaga

SEQ ID NO: 695737 - DNA, 1523 bp, Homo sapiens
tgttgtcacttgtatgagtgtacgcggtaaaactggaagggggagcagggttcccaggtaggacaggacagaagtagtgtacaaagaagccagagccataagggaaaatagccacgaggtcaggaaaacagataccccttgtggtatcacagaaattcaaaggagggcttcggacttccaccatctatggtgttggtagactgaaggcaatttaattcaaatctgaaaagttacaggaccccaactaatatctgatttcacatgtttaagatgatgcagtttctgcaggttttctgtgctcttgtcccccagtggccagtggttgaytgccatttgatacctgcctctgcaagccttcccaggaaattctaaaaacagtctcactttggtcttccctcctgagtggagagctgaagactctgatcgagggtagggacctctggggcattgggagagactgtggttggcttgcacagagcagtaaagtatgaaacagaaaactgttgttcactagagtcctccgagagctaaactaccttcagcctaggttaccaacaggagagactttccaaactgtggaaatatttactatgttttgagcagtaaaataggtaattcctatgtgtaaaacttgaaatccagaatttttttaatctatcaaaatctcaaggaaatttattttcccaagtgctaaataatatccagttttctctagctattgtgtgtgagtttgcacacctgtgtcagacaagttattaatatatataaattgatgttaagggtctttttaaaatatttcaaaatgctaagagcttgagttaggaaggtgaaatagaaaagaagaggtgtatataaaagttgttggaaatgaaaatagaaccttgagagtgaccatttttagaattatggaagaatgaggaacaaaatatgatttcacctttcccagcttgggagttgagaatgaggaacagaagtagagaaggaggctggtttgccactggcttgcataaaggcagataagtttattttcctcttatttcttaagaaataagttgagaccttagttggtctcaactaaggcatgttggaccagtggaaatggccaatagtcaaatagaagtgtgggatgaagttgagaagataaatcagggctactgctgtaggtttaggaagcttccacatgaatcaactgaagtcggcagagtgggtgagacctccaaagaagagactgaaaagtcaacatacttcataacacaccatttaccttacttgaagaattaatgcttttcaaaaaggattgtcagcagaaggcgtgcataagttttgggggggtttcctttcactttatgggcatgcagtctaactttagttcatggattcctagagcacttgattccaggatgcagacaatctgatcaaaatagtagaaggacaaagaaagagatcttttaaagtagggccctgggcatgctttagaacttctacagaaaggaaaaaaaaattcctttagcagaagctaaaga

SEQ ID NO: 695738 - DNA, 402 bp, Homo sapiens
ttttttgagacggagtcttgctctgtcgccgaggctggagtgwagtggcaccatctcggctcactgcgagctctgcctcctgggttcacaccattctcttgcctcagcctcccgagtagctgggactacaggcacccgtcaccactccagggtaattttttgtatttttagtagagacggggtttcaccgtgttagccaggatggtcttgatctgctgaccttgtgatccgcccgcctcggcctctcaaggtgctggcattacaggcgtgagccaccgtgcctggccaataattattcttgacacaaactatactcttatgtttaacacatgaaatatgacaatattttctaaaagctgtggaagttagaagaatcaaaatgaagtcaactgtgctaaaaaa

SEQ ID NO: 695739 - DNA, 402 bp, Homo sapiens
ttttttgagacggagtcttgctctgtcgccgaggctggagtgtagtggcaccatctcggctcactgcgagctctgcctcctgggttcacrccattctcttgcctcagcctcccgagtagctgggactacaggcacccgtcaccactccagggtaattttttgtatttttagtagagacggggtttcaccgtgttagccaggatggtcttgatctgctgaccttgtgatccgcccgcctcggcctctcaaggtgctggcattacaggcgtgagccaccgtgcctggccaataattattcttgacacaaactatactcttatgtttaacacatgaaatatgacaatattttctaaaagctgtggaagttagaagaatcaaaatgaagtcaactgtgctaaaaaa

SEQ ID NO: 695740 - DNA, 633 bp, Homo sapiens
taatgaataagtagaattgacatctaatttggttttgtagtcattatagtgcctagcccagtctgtcacatatacagcacacagttattggttaaactgatgttttaggttaaaagcagattatgtaccatgttagatatcacctacttacacataatatgagataattaaataccagtgatggttattagattatgtctagaaaatattaaagctaacaagacggcacagggtggaaaaaagccacacctactacagaggagggacagaggttgatggaaacatcagaaaattagggctcaaagttgggaaagtgtacttgataggaatgtgaccaaaaccarcttctcagtatgggtgccctttaattcagtttgctttagataattgcatataattaccctctaagactttatcaccacttcgagggagaaggggactcaaaggggggcctcttaaaggcaacagtatttacagatgttcctttgtgccctcttttatgttgaagtagcatgtcataaatactgtttttttgggagcaagtgccttcaataaggcttatccaagcagtggtccctcttccctcctcagtctaccatcattcttgtctttgaattttccttttaggccttt

SEQ ID NO: 695741 - DNA, 1444 bp, Homo sapiens
  misc_feature 822, 823, 824, 825, 826, 827, 828, 829, 830, 831, 832, 833,834, 835, 836, 837, 838, 839, 840, 841, 842, 843, 844, 845,846, 847, 848, 849, 850, 851, 852, 853, 854, 855, 856, 857,858, 859, 860, 861, 862, 863, 864, 865, 866, 867, 868: n = A,T,C or G
  misc_feature 869, 870, 871, 872, 873, 874, 875, 876, 877, 878, 879, 880,881, 882, 883, 884, 885, 886, 887, 888, 889, 890, 891, 892,893, 894, 895, 896, 897, 898, 899, 900, 901, 902, 903, 904,905, 906, 907, 908, 909, 910, 911, 912, 913, 914, 915: n = A,T,C or G
  misc_feature 916, 917, 918, 919, 920, 921: n = A,T,C or G
cattcattacttatcaaagggagattaaatctatgtagttttgacatctggactatgctttgagaagtcagatgtttgtgaaaaatgtctctggatttttttttcttttttcttttgatttctttgctgtagattagtttcctaaagggttaatgaaagatatattgacttttttagttatgcttttatttattcatcaccatgaaaatttatcagtacacttgtgaaaatttatcaattatcaattgtggaaaattgtgaatacacttgcactagaatgtttcattttattacctagttaaaccagccactttttgtaatttgtacttaagaatatgctgttttgattatatttctaagtaaataaatttttccattattaacatagaagtcttgtttgtgttatttgctgctgggaagatgctctgaagcttctgccattgtcctttgcatgtcatgtgggtggttatgctttttagacacttacatggtttttaatggaagagagtgatggatatactaccatgagaagcactaatatcctttttgaagttcaccattgactgaaacatctatagtacttacagcaaagtataaacttaagagagatgcatacagacgaatgttacataggaatatagaagccatttttagtcattaattagatgctgtatttatattaaagagtcagcacactttaaaatcatgtggaaagtctagtaaagttcatgtttcctataatcatgccatgcttcacaaagccttttcaataaaactgagtctgtgtccttcattacctccatcatgagaagttatgctgtnnnnnnnnnnnnnnnnnnnnnnnnnnnnnnnnnnnnnnnnnnnnnnnnnnnnnnnnnnnnnnnnnnnnnnnnnnnnnnnnnnnnnnnnnnnnnnnnnnnntataaggaaaacattgatctttcccatataatacatattttagaagtcacttttaagtacttacaatttattattatagataaccgtttattttctcaagtgaaatatataaagatgcaactatctaaaatgaatgccaaatcattagaagttgatatctgaccatttgtgacttagaaaatggcagttccgtgaggttcagtcaaatggacagtattggtaacaggaaaatgaaatgaaaaagcagagargaaagtacttaggtacttacagccattgtgtaaaaatgtatggatgtacaaaagattgcaatgtgatgttacacaaatagaataaaatgtttatagagttaattttttctcctactacgttgcttgaactcacaatgaaagaaaaattcaaaagtttgttttcttttaagccttaggaaaaacatctctattctttaaaaatgacaaagttaaaaacatataccaaatttagccatttaaccatgagcccttggaattttaaccatgtgtat

SEQ ID NO: 695742 - DNA, 1923 bp, Homo sapiens
atgaagtactgacacgtgctacaacgtgaaagaaccttgaaaacattatgcaaatagaaagaagccagtcacaaaagaccacatatcgtgtgactccacttacataaaatattcagaactaggaaacccacagagatagaaaagtggattagtaatagcctacagcaatccctaggagaaggttctgcggtcaaagtcaggagtgactgctggtgggtagagtgtctttttggggtgatgaagaaaatgtcctaaaatggattgtggttataactggttgcacacctctatgactatacagtactaaaaaccattgagttgtacactttcaatgggtgaattatatttcaatgaaggtgacaaaaatgccatatgcctatctagttctcaacattgaacaatacttgtatcctaggtagaaagcttgatgacaggcagcacgcctcacggcagtagagacagacaatactcccccataacagttaataatcaccatgcaggccaggcatggtcttatgcctgtaatcccagcattttgggaggccaaggcaggtggatcacgtgaggccaggagttcaagagcagcctaggcaacatggtgaaaccccgtctctactaaaaatacaaaaaaaaaaaaaaattagccgggtgtggtggtgcatgtctgtagtcccagctactcaggaggctgaggcaggaggatcacttgaacctgggaggtggaggttgcagtgagccgagatcatgccactgcactccagcctgggcaacagagagagactgtatctcaaaaagaaaaaaaaaaaaatcaccatgcagaaaagtcatagaatactcagtaacaatggctaacctgatcatgacaacttaaaaaatagtattaactctcatttactgaatttctttcctttcttcactggtgtcagacctatactgctgtccgaaggttatccctgtctactcctgttctcttctcccctctatccttcacaggagcttytcccaacaaatcttcacaaaagtaaatattctatgatcccatttttaggtgaggaaaccaagggtcagagagttgaaataagtagcctaaaagcacaaagctctttctactggttttctttttagagtttttctgactgccaccttggctcctgcagctgtcaactgcagctctccctagctacacagcttcccctccacatttacctcagcctggggaccaccctgctctgccttacccagcttgctctccctggaaaaacctggttatcattcgtgagaaactgcacatcagcatatgagggacggcggggtggagggaataaacacgtgagaaagaatttaggctgaggaactataactcaaggcttttttactgttatccaggacactccctggtctcagtggcattctccttcctatcatcaacttggaacaaagtctgggggaaagagcctagtctagccataaagtctatcatccccaaaaatgcccagaggaaaatgacgatagcaattatctaacgatcttgaagctttaggaagcggttcagtgggctgagagtgccaaggacagccaaggcttcttgcctttttcaggaacgtaaagaaattctcatgccataggcaggactagtcactagattttcttatttgggatatgccttccaggaggtcttgctcacacataactcatattcaaagaacaaaccaagtgcttattaacaatcaaactacagtatgcccaagcaagttaaattccaagatacttccaatataatcactcaactcctcccatctgtaaaaatgcaggaaaagataggggaaaaaaagaacatggggcttcaggaagggggttagtgaggaagagaaggaaggagggcattaaggattaaaagagaaatcagcaaacagaaataaaata

SEQ ID NO: 695743 - DNA, 648 bp, Homo sapiens
aagtgtcacttctttaaataaaaaatcagctttgcttattaaaataaaagaaaccatttaaataaatacatttgttaaattacattttaattagatttccaacatgattaaatttcagctaaagtgtgctgcctgaaaataatttagcctgaggcctgtttctgatctattaaaaaagggaactttagcaagcaaagagaggtagtcataacttactaatatagaactgataggatctccacagtgcamatagaatatatttccatgttactaatagccacactatgtagcacctgaaactatctctgttagtagcaagtggctgtctttaaagaagagtaggaggaaggaagaagttcatgtaggacatacacagagcagttctgcatctctgcttctgatcactgggagctggaggcaatgtacacaccattcccaggagaaggaaagcatgcaaggtagtggctgcacactgagagatattatgtaccagttagaaatgtcagataaaagtgtatccattgatgtggacagagtcttaaaatgttaagtgaaggaataagaaactgaataagatctatatcacaccatcatatatgtacattaagacatgatacatccaccataaacactgcacattttaaaaaa

SEQ ID NO: 695744 - DNA, 643 bp, Homo sapiens
cagttgatattagtgttaccattttacagatgtgaaaattaaggcccagacaggcaatgttacacaaccaaaacagctactggatggaaccctttggatttgctactacccaactatttctgacctaaaagagtggtgattccatgtggttcaaattaatagcaagtggcagagtaaagatctaacagtgtttgactgatgtagagcagatatcctcaaacattgcacagatgtttcttggatatttgtccatgttagtatttatcattcttcacaacaagtatctgtttacatgtctgctttctatacctgactgtgagctcattaagggcaagacctatccatcattggcttctgaaacaccccacsaccactaggctatcccatagcccgttcttacacttgttcaacacatctctgttgaatgcaagaataaatcatttagaaattaattctcagtcctcttggataatcactggctcccccagcatcttaactgggcaccagctaagccactgtgctgcctaaatggacaaccacttctcagttctggaattcttcaaacacctagggttaggagggtcttcgctttggcagttagagttttctcaattcttttatgacacaggttgcaccggactca

SEQ ID NO: 695745 - DNA, 1012 bp, Homo sapiens
ttttgttgagatggagtttcactctgtcgcccgggctggagtgcagtggcgcaatctcggctcactgcaaactccacctcctgagttcaagtgattctcctgcctcagcctcccaagcagctgggattacaggtgcctgccactacgtccagctaattttttgttatttttagtagagacagggtttcatcatgttggccaggctggtctcgaactcctgacctcgtgattcgcccacttcggcctcccaaagtgctgggattacaggtgtgagctactgtgcccagcccaagaatggttttttatactcaaaaaaaaaaaaaaaaaaaaaaaaaaaaaagcatgggtgcaggatatgccaaatgttaataatggctggtgatggtttttttcctttctctaatacaaattttcagtcctgtgcttatgtaacttttaraagaaaagaatttgctatgaatatatgtataaatcaatacaaatagtaagtgatcaactatcactggactcgtcaggaagattcaaattacctaaaaatataatgttaaagaaagactgttagtatctgaatggcctgcagttgcaaagaaatagtaaaactgtaatcaaggcaatctgaagcaaattctcatggtttgcaaaaaagggaaaggaaactttcctgctgaagtggctctaacaatgtatttactctatatgaaaggagcatggacgtacgtgaccccatcataagtagaggagcatttgtataggaaaagagtacataccctggagtgcttaactgaaggctccacctttcattaacagcataacttcagtttcctggtctataaaatggaaacaaagagggtcttctttcatagatatgaactaggttccaatctgagcaaaattgtgtcaattctgcctgcccaggcagatggggtttatggtaatacaaaatcatttgagtctcagtggctgaactactgttagtctacatctgtgccattcaaagcagtgtctttctttt

SEQ ID NO: 695746 - DNA, 599 bp, Homo sapiens
tgagacagccgctcttgttgcccaggcgagagtgccctgacatgatctcggctcactgcaacctctgtcaaggttcaagcaattcttgtgcctcagcctcacaagtagctggaattacgggtgcacatcaccacaaccaacagatttttgtatttttagtagagacagggtttcgccatgttggccaggctggtgttgaactcctgacctcaggtgatccatcaacctcggcctcccaaagtgctgggattacaggtgtgagccaccacacctggccaagttttttttttaatgatgatctcttcacttcttgaagtcatcatcaacttggaaccttatacaaggaagtgataaaatttaaaaccatcttaactactacttaaaatgtataaagtgttagaattatatttaaaaatataatagctcttttctttcatggtcaaaatrttgaaatttggggggaaaatgtgtttttttcccaaaagataacatattttcaccaaaactaatgaccatgggattccaatccattgcaagtatttcaaaataatgatggagtgctaactagagaatgcatgtacattattagaacagctacc

SEQ ID NO: 695747 - DNA, 599 bp, Homo sapiens
tgagacagccgctcttgttgcccaggcgagagtgccctgacatgatctcggctcactgcaacctctgtcaaggttcaagcaattcttgtgcctcagcctcacaagtagctggaattacgggtgcacatcaccacaaccaacagatttttgtatttttagtagagacagggtttcgccatgttggccaggctggtgttgaactcctgacctcaggtgatccatcaacctcggcctcccaaagtgctgggattacaggtgtgagccaccacacctggccaagttttttttttaatgatgatctcttcacttcttgaagtcatcatcaacttggaaccttatacaaggaagtgataaaatttaaaaccatcttaactactacttaaaatgtataaagtgttagaattatatttaaaaatataatagctcttttctttcatggtcaaaatattgaaatttggggggaaaatgtgtttttttcccaaaagataacatattttcaccaaaactaatgaccatgggattccaatmcattgcaagtatttcaaaataatgatggagtgctaactagagaatgcatgtacattattagaacagctacc

SEQ ID NO: 695748 - DNA, 599 bp, Homo sapiens
tgagacagccgctcttgttgcccaggcgagagtgccctgacatgatctcggctcactgcaacctctgtcaaggttcaagcaattcttgtgcctcagcctcacaagtagctggaattacgggtgcacatcaccacaaccaacagatttttgtatttttagtagagacagggtttcgccatgttggccaggctggtgttgaactcctgacctcaggtgatccatcaacctcggcctcccaaagtgctgggattacaggtgtgagccaccacacctggccaagttttttttttaatgatgatctcttcacttcttgaagtcatcatcaacttggaaccttatacaaggaagtgataaaatttaaaaccatcttaactactacttaaaatgtataaagtgttagaattatatttaaaaatataatagctcttttctttcatggtcaaaatattgaaatttggggggaaaatgtgtttttttcccaaaagataacatattttcaccaaaactaatgaccatgggattccaatccattgcaagtatttcaaaataatgatggagtgctaactagagaatgcatgtrcattattagaacagctacc

SEQ ID NO: 695749 - DNA, 563 bp, Homo sapiens
acatccttttagaaatgaccagatttttcttttcaaaaaggaccaattacaacaatcactttcaatatactagctaaatgcatttattgatactatgatataacaagaatgttttgtagttatataggtttccatttcagttaagaaaattcaagcattacataataagtagttgatgataggaaaccttcagtgtttcctataatggaaaagaaggaaaattattatcttaaattttcaagttaggtaataacagagcagagattacattattcgctgcagggcagagcatgaatcatgacacagccattcagataatctcagacatggaaagaccacataatattttaaatckttactagaaaaatatgaataaaatgagataacatattactctattaaattacactaattactttcactaatgtcctctttcaaaacagaattgtaataattctgtgtaatttaacaatttttttttcattttccactagggattttgttggagaaaaaaaattatattgttagaatcaaaattatcactgccttaattccatatttca

SEQ ID NO: 695750 - DNA, 1818 bp, Homo sapiens
tcataagtacatgaggataaacaaacactattctcagatgaattagtctgtataatagacatttatgggaagtaaattgccaagaaaacatttacagtgaacatgagtttgatgataagttgtacctttaaaatagaaatcaaaaatggcagggcatctaatttttatattacagacttgggaagagacatttctcatttgaataattaagtgtgttgtcaattgcagrgcaactaaaaacttaccagttacaattgacaacactgttggaaagatcaaccctagagaaagtcttgctttttttccttagttgctaaaaagcttctctagtagctaaaaactgacttactctaccaataatacctcataaagacaaatctgtacaaaagctttgtatgatcatgttcagatactgcaaactttcaggctaatgaaaaagtcaaatgtaagctctgtgaagctcaaaatcagtgacattttgaaacacaaatgttgacaattattcaaggatttgtaaatatgagacaaaagtttacatttggaattttctaattgactcaacattattttcctgataattgttttggttaaaaactgaggaaggatagagttgacaggcaaatctacttcaagaagaagaatcattctgaggtttaactaggggcttactgaaactgtttaaattatatagaagacaatatatttctcattccctctatttctctcagtattaatcaggagtcatggtgatttttcagttgttctgtacttgtattttgttaaaacaagcaatctgcgaagatgctaaaggaaatttaggacttttcaaactgagatagcaaaaaaagaaggcataatatggcactaatgtactcccataggattgatactttgccttttaagcagtaagaaacatgttagattctcctctgtcaatttctgacaaagcctaattgtacattcaccatttaaaaataattgtggatcactaataagttcttgacactgtgcaagatgctgataaaacagaaaagaataagaaaggatccacattttcatagggatcataatctcatatagattccaagttagtaaatcatatttgcatgatgatgtgatagatacagtagtaaatataatgcaagtagaatcaacacaatgaagaaaatctgatcaatcccacttgagaatgagttgttaggaacacagaaagtttcacaaaaaaaaggtgacatttgagctgaattttgaagaaccaaaaagattttgcaagatgtaatagaaagagacaggaattttagaatgaagaaatgcaagcagtacctattatactacaggggcttataattgaattgaatatattgaggacacagagtaaaatacagtaaaagcttattggtggtaggggaaggaaatgactgataagtggaacccacaataataaaaatgtaagttaaaaaaagctaaggtttcctttgaatgtaatgtttctataggggtcaataatatgaagcctaatttgaaatacattatcccctaattttaagtgtgaagactgtagaagcattttcaccacctttaccaggagcctattaaatattaaacaaacaaaaatataatcacataacgtacaacactttactgctgatttctgtgtgacttcttagtaaagaattttctttatgcactggtgttaatagtctgatcacgtattttaagaacagagaattgcatttctaatatgtcattgaaagcaattgtgaggtagtttcagactgttatcttctgaaatattataggatttctttgcattaacct

SEQ ID NO: 695751 - DNA, 1818 bp, Homo sapiens
tcataagtacatgaggataaacaaacactattctcagatgaattagtctgtataatagacatttatgggaagtaaattgccaagaaaacatttacagtgaacatgagtttgatgataagttgtacctttaaaatagaaatcaaaaatggcagggcatctaatttttatattacagacttgggaagagacatttctcatttgaataattaagtgtgttgtcaattgcagagcaactaaaaacttaccagttacaattgacaacactgttggaaagatcaaccctagagaaagtcttgctttttttccttagttgctaaaaagcttctctagtagctaaaaactgacttactctaccaataatacctcataaagacaaatctrtacaaaagctttgtatgatcatgttcagatactgcaaactttcaggctaatgaaaaagtcaaatgtaagctctgtgaagctcaaaatcagtgacattttgaaacacaaatgttgacaattattcaaggatttgtaaatatgagacaaaagtttacatttggaattttctaattgactcaacattattttcctgataattgttttggttaaaaactgaggaaggatagagttgacaggcaaatctacttcaagaagaagaatcattctgaggtttaactaggggcttactgaaactgtttaaattatatagaagacaatatatttctcattccctctatttctctcagtattaatcaggagtcatggtgatttttcagttgttctgtacttgtattttgttaaaacaagcaatctgcgaagatgctaaaggaaatttaggacttttcaaactgagatagcaaaaaaagaaggcataatatggcactaatgtactcccataggattgatactttgccttttaagcagtaagaaacatgttagattctcctctgtcaatttctgacaaagcctaattgtacattcaccatttaaaaataattgtggatcactaataagttcttgacactgtgcaagatgctgataaaacagaaaagaataagaaaggatccacattttcatagggatcataatctcatatagattccaagttagtaaatcatatttgcatgatgatgtgatagatacagtagtaaatataatgcaagtagaatcaacacaatgaagaaaatctgatcaatcccacttgagaatgagttgttaggaacacagaaagtttcacaaaaaaaaggtgacatttgagctgaattttgaagaaccaaaaagattttgcaagatgtaatagaaagagacaggaattttagaatgaagaaatgcaagcagtacctattatactacaggggcttataattgaattgaatatattgaggacacagagtaaaatacagtaaaagcttattggtggtaggggaaggaaatgactgataagtggaacccacaataataaaaatgtaagttaaaaaaagctaaggtttcctttgaatgtaatgtttctataggggtcaataatatgaagcctaatttgaaatacattatcccctaattttaagtgtgaagactgtagaagcattttcaccacctttaccaggagcctattaaatattaaacaaacaaaaatataatcacataacgtacaacactttactgctgatttctgtgtgacttcttagtaaagaattttctttatgcactggtgttaatagtctgatcacgtattttaagaacagagaattgcatttctaatatgtcattgaaagcaattgtgaggtagtttcagactgttatcttctgaaatattataggatttctttgcattaacct

SEQ ID NO: 695752 - DNA, 1818 bp, Homo sapiens
tcataagtacatgaggataaacaaacactattctcagatgaattagtctgtataatagacatttatgggaagtaaattgccaagaaaacatttacagtgaacatgagtttgatgataagttgtacctttaaaatagaaatcaaaaatggcagggcatctaatttttatattacagacttgggaagagacatttctcatttgaataattaagtgtgttgtcaattgcagagcaactaaaaacttaccagttacaattgacaacactgttggaaagatcaaccctagagaaagtcttgctttttttccttagttgctaaaaagcttctctagtagctaaaaactgacttactctaccaataatacctcataaagacaaatctgtacaaaagctttgtatgatcatgttcagatactgcaaactttyaggctaatgaaaaagtcaaatgtaagctctgtgaagctcaaaatcagtgacattttgaaacacaaatgttgacaattattcaaggatttgtaaatatgagacaaaagtttacatttggaattttctaattgactcaacattattttcctgataattgttttggttaaaaactgaggaaggatagagttgacaggcaaatctacttcaagaagaagaatcattctgaggtttaactaggggcttactgaaactgtttaaattatatagaagacaatatatttctcattccctctatttctctcagtattaatcaggagtcatggtgatttttcagttgttctgtacttgtattttgttaaaacaagcaatctgcgaagatgctaaaggaaatttaggacttttcaaactgagatagcaaaaaaagaaggcataatatggcactaatgtactcccataggattgatactttgccttttaagcagtaagaaacatgttagattctcctctgtcaatttctgacaaagcctaattgtacattcaccatttaaaaataattgtggatcactaataagttcttgacactgtgcaagatgctgataaaacagaaaagaataagaaaggatccacattttcatagggatcataatctcatatagattccaagttagtaaatcatatttgcatgatgatgtgatagatacagtagtaaatataatgcaagtagaatcaacacaatgaagaaaatctgatcaatcccacttgagaatgagttgttaggaacacagaaagtttcacaaaaaaaaggtgacatttgagctgaattttgaagaaccaaaaagattttgcaagatgtaatagaaagagacaggaattttagaatgaagaaatgcaagcagtacctattatactacaggggcttataattgaattgaatatattgaggacacagagtaaaatacagtaaaagcttattggtggtaggggaaggaaatgactgataagtggaacccacaataataaaaatgtaagttaaaaaaagctaaggtttcctttgaatgtaatgtttctataggggtcaataatatgaagcctaatttgaaatacattatcccctaattttaagtgtgaagactgtagaagcattttcaccacctttaccaggagcctattaaatattaaacaaacaaaaatataatcacataacgtacaacactttactgctgatttctgtgtgacttcttagtaaagaattttctttatgcactggtgttaatagtctgatcacgtattttaagaacagagaattgcatttctaatatgtcattgaaagcaattgtgaggtagtttcagactgttatcttctgaaatattataggatttctttgcattaacct

SEQ ID NO: 695753 - DNA, 644 bp, Homo sapiens
atagcaactaaaaaccatccattgaccagctcgggagtagcaaacagagcaagccattcttggtgcaacctgtttctaggtaattaacttgaaaatattttcaatattcaacaaagatggttcatttaagatgactgaagccacatcttcacagatgcagaagatctgaatagctttcctctttagattgaatagttctagaacaattcattcctaaaagtgacttccattggggaaaatatcctattcagcttgagtcacttaattatggttgttattggtataaaatgtctctgttttccctaatatatttttaaatctcttttttccttttagaatgaattctggaataaatacaaaggtcagtattttttctgttttaaccttcagtgagaggggttcatcaggatatttgaattttgaaaatagttcctgaatttcctttctgcttttgttctmattttactcatttaagactttttccctcagggtgtttccataatagttattgtaaaagagtttttagagtaattttatactaatcctagttttgttattgagttagagatatatatttaaatcagttcattctcatttgaggataccaaattccatgataacttttcttaaataaaagtgtattc

SEQ ID NO: 695754 - DNA, 1808 bp, Homo sapiens
gatttcatttgaatctggtgaagcttatgtttcaggtaccttcccattaatagaccctttcgaagcctctgtacctaattgtgcctactcacaattgtgtagaatatttgttaaagggagtcctgtaaattgcatcagcatcaatcctcatagaatctgggtctatcactgtaggcactaaacctggaggaaggctgcctggatttggaatcccagctccatcaccttggaagttacttaaatttgctgtgcctctgtttccctaaatgtaagacgttgatgataataataactacctcataggactgttgacaacatgaaatcagttaatataagaatcccttggaatagtagctgactgatagtatttggtgttagcttttaaatattctttaaaaataattataaacgtaacagtattttgcagtgtagatttatccttcttgtgagattttcaaatcctttttcattttagctcatataaataataatgggatggatatctttgtacacaaatctttgaccttacctttgtaattgaactatttccttttattagtgttattttctactgaagcatctttcatgtcactatttatttaaaaaagactttgctaataaatatcaaagaagttaaaacttatattttaaaaaatataagtagtttagactgggtgcagtggctcacgcctgtaatcctagcactctgagagaccgaggtaggtagatggcttgagctcaggagttccagatcagcctgggcaacatggcaaaacaccatctctgcaaaaaatacaaaaattagcccagtgtggtggcgtgcacctgtagtcccagctacccaggaggctgaagtgggaggatcctgggagcccctggaggggaaggttgcagagccgagatggtgccgctgcacttcagcctgggtgacagagtgagaccctgtttcaaaaaataatgtatagatagatagatagatagatagatataaatttataaaaattatacctataatatctattatagatataatttattagttatacctatatatataatacataaatatataagtatatataaaataaaaacataaattatatacttatatattatagatgtatttaattatacagtatatataattttatatgttaatataaatcatatatatttattatatgtatatattatatataataatttatatatacacacacacatagtttaaaacaactcagaaatgaaggtaggatatagtagaatatacaaaaatattacttttcaatttctttttttaaactctcataaygttctacttacatttgctcttatttagacatctgtggaacaaggtaaatttttttattctgtgaattttcacatttttcagtattgccagtttttgatggaccagaaagatataacctaaaaacttagctttcaattaagatgtaatattttcacaaaatttttatatataattatgcttttacaactcagcatttctcaataccttcagtttttgttgtctatgttatgtgcttaaatgcaccctaggtgggccgtgactggcattccttttcccctggtcattaattagctggaggagtatcaagccctgttctttcctcttcccatggtatacccatccttcccgcatcgtgggacaagcccattgtcctgtaattgatgtaagcagagggagagttgagagagagtgctgggtgctgataaatgggaaagaaatggaggagaaaggaaaagataccagcacagtcttgtcctcagaagcactgctagtgttc

SEQ ID NO: 695755 - DNA, 2183 bp, Homo sapiens
cgggtgcctgaggcctggcagcgggtgggtgaggccgggcctggagaccccacaggaggagctgcatcctttcctgctgtgtagctcagtgtggcggccaagtcactggggcaaagcccagctcagcagtccaactgcagagaggggaaggatyggacgaaggaggttggtgcaaattccgagggaaccgagcgtccccagctagatgagatgccagggctcaccattttccaagtcgaagctcctctctcagacactgtgactgcctccctgcatttttgacctcccctgtgggacgtgctggaggatccaggggttcactgctctctcctgttgtccccagcacaaaagcaccgccatgtggaacctcacaaggtcccgagctgatggcagacctcggattcctctgtggctagacccagagcgagacatgccctctctgtggtgatctcaggctcaaggatgagaggcaccatggaaaggggcttgctgggcacccctagactgtactcagtttctcctgagcaacctgagctccaggacagttcagaccctcgttcgggtctgatggtgtgagtttgcagggccccgtggaatacatctgatacccacagcagcagggccagcaagaagaatgaaatgaagctggttcatgcctcccgggcaggacgcctctgcgggcaactggcctgtaacctccggcagaggcagggtatgtgtcttcagttaatcctctccttgttcggtgacctctgtgcctactgcataagttgctaattactctaagtaggtattaattctgaatcaacattaccaatctggaggcacggcttcaaagcattcaaattctgctctcagaaaacatggctgttttgatccttctatgcagccaggcagtgaaaacgttgcacatattttctgcacctatccaaagaaatctatctttcactccctacttcatgccatatgctgggagctgaaagaatgaaggatttagctgttagtctctgaaggcacaacaggcctcattccagctctccggcggcgcacgggatctgaagctatgacatttcacttcggcttctgtcagcactatctgccgcgtatcgccagcgctcggcagagcaggcttgtgaaggtggctcccgtgcagaggagaaaaccgcctgctaatctcctcttcacggtgccaggagacaggagtggcttctcatctctaaagcacgcaggagactggaaatctaaggtaccctcacacccctgtgtccaactgtggggctggcagcccctcctcctggaggtgcctgtttttaggagtttttacttctatcccagaaccccagttcagccttcctccaagtgtgctcattatcttgggtgagccctggcatccccaaggtgcacagcctccatccgagaaagcattctcttttccagtttgaaatccaaattcacattttatctggcaaggatgatttaaagatatgtttacctcctcatttccctcagtcaaagggtcatcttgaaagctgcaccttgaccaccctgcgaagtgattttctcctccgcctcaagcctgggaaggggcacagtccagcagtgttgatgcagaaccagtgcctgtagctcctccgtaaaggagggagtagaaacagcagtgcctggtccataaagaatgccaggcaagtcagtgtggcttcctccttcccactctacctgcgcctcttcccgacaccctgcacgtttaggaaacggtgcctttatgagtgtctgggtctgggcatggtggctcacacctgtgatcatagctgaggagagtggatctcctgaggtcaggagttcaagaccaacctggccaacatggcaaaaccctgtctccactaaaaatacaagaaattagctgggtgtcatggcgggcacctgtaatcccacctactcgggaggctgaggcaggagactcgcttgaacctgggaggtggaggttgcactgagccaagtttgcaccactgcactccagcctgggcaacagagcaagactctgtctcaaaaaaaaaaaaaaaaaaaaaaaaaagaaagaaagagtgtctgagaagcgttttcagtaggaaggtgacttggagctgtgagtgacaattcgtttctgataaatagcaccaagtcctgcctcatacaattatgggggg

SEQ ID NO: 695756 - DNA, 2183 bp, Homo sapiens
cgggtgcctgaggcctggcagcgggtgggtgaggccgggcctggagaccccacaggaggagctgcatcctttcctgctgtgtagctcagtgtggcggccaagtcactggggcaaagcccagctcagcagtccaactgcagagaggggaaggattggacgaaggaggttggtgcaaattccgagggaaccgagcgtccccagctagatgagatgccagggctcaccattttccaagtcgaagctcctctctcagacactgtgactgcctccctgcatttttgacctcccctgtgggacgtgctggaggatccaggggttcactgctctctcctgttgtccccagcacaaaagcaccgccatgtggaacctcacaaggtcccgagctgatggcagacctcggattcctctgtggctagacccagagcgagacatgccctctctgtggtgatctcaggctcaaggatgagaggcaccatggaaaggggcttgctgggcacccctagactgtactcagtttctcctgagcaacctgagctccaggacagttcagaccctcgttcgggtctgatggtgtgagtttgcagggccccgtggaatacatctgatacccacagcagcagggccagcaagaagaatgaartgaagctggttcatgcctcccgggcaggacgcctctgcgggcaactggcctgtaacctccggcagaggcagggtatgtgtcttcagttaatcctctccttgttcggtgacctctgtgcctactgcataagttgctaattactctaagtaggtattaattctgaatcaacattaccaatctggaggcacggcttcaaagcattcaaattctgctctcagaaaacatggctgttttgatccttctatgcagccaggcagtgaaaacgttgcacatattttctgcacctatccaaagaaatctatctttcactccctacttcatgccatatgctgggagctgaaagaatgaaggatttagctgttagtctctgaaggcacaacaggcctcattccagctctccggcggcgcacgggatctgaagctatgacatttcacttcggcttctgtcagcactatctgccgcgtatcgccagcgctcggcagagcaggcttgtgaaggtggctcccgtgcagaggagaaaaccgcctgctaatctcctcttcacggtgccaggagacaggagtggcttctcatctctaaagcacgcaggagactggaaatctaaggtaccctcacacccctgtgtccaactgtggggctggcagcccctcctcctggaggtgcctgtttttaggagtttttacttctatcccagaaccccagttcagccttcctccaagtgtgctcattatcttgggtgagccctggcatccccaaggtgcacagcctccatccgagaaagcattctcttttccagtttgaaatccaaattcacattttatctggcaaggatgatttaaagatatgtttacctcctcatttccctcagtcaaagggtcatcttgaaagctgcaccttgaccaccctgcgaagtgattttctcctccgcctcaagcctgggaaggggcacagtccagcagtgttgatgcagaaccagtgcctgtagctcctccgtaaaggagggagtagaaacagcagtgcctggtccataaagaatgccaggcaagtcagtgtggcttcctccttcccactctacctgcgcctcttcccgacaccctgcacgtttaggaaacggtgcctttatgagtgtctgggtctgggcatggtggctcacacctgtgatcatagctgaggagagtggatctcctgaggtcaggagttcaagaccaacctggccaacatggcaaaaccctgtctccactaaaaatacaagaaattagctgggtgtcatggcgggcacctgtaatcccacctactcgggaggctgaggcaggagactcgcttgaacctgggaggtggaggttgcactgagccaagtttgcaccactgcactccagcctgggcaacagagcaagactctgtctcaaaaaaaaaaaaaaaaaaaaaaaaaagaaagaaagagtgtctgagaagcgttttcagtaggaaggtgacttggagctgtgagtgacaattcgtttctgataaatagcaccaagtcctgcctcatacaattatgggggg

SEQ ID NO: 695757 - DNA, 641 bp, Homo sapiens
actggttttctctggtcaccagggagttctgttatcatattttacttccttccttttacctttctgtgttttttttttttttgagacggagtctcgctctgtcgcccaggctggagtgcagtggtgtgatctcggctcactgcaagcaccgcctcccgggctcatgccattctcctgcctcagccccctgagtagctgggactacaggcgcccrccaccacgcccggctaattttttgtatttttagtagagacggggttttaccgtgttagccaggatggtctcgatctcctgaccttgtgatcctcccgtctcagcctcccaaagtgctgggattacaggtgtgagccaccgcgcctgaaccctttctgtgtttcctaaacgtgatagtgcacatgactcctgcggctgacagcgccaacagaacgtcacgcgtatatgcggcgtccatgcgtctgccacatcggggccagtgcagggtgcccacatggcatggcatgcctctccagtcttcgtggttgatgctcattttatctgaattgcagaggcagtaggatatgagagttcacgtggtggagaatggaccttgcaccagggcagcccaaggcagggaggacaaagctggccgggaggcatctgac

SEQ ID NO: 695758 - DNA, 641 bp, Homo sapiens
actggttttctctggtcaccagggagttctgttatcatattttacttccttccttttacctttctgtgttttttttttttttgagacggagtctcgctctgtcgcccaggctggagtgcagtggtgtgatctcggctcactgcaagcaccgcctcccgggctcatgccattctcctgcctcagccccctgagtagctgggactacaggcgcccgccaccacgcccggctaattttttgtatttttagtagagacggggttttaccgtgttagccaggatggtctcgatctcctgaccttgtgatcctcccgtctcagcctcccaaagtgctgggattacaggtgtgagccaccgcgcctgamccctttctgtgtttcctaaacgtgatagtgcacatgactcctgcggctgacagcgccaacagaacgtcacgcgtatatgcggcgtccatgcgtctgccacatcggggccagtgcagggtgcccacatggcatggcatgcctctccagtcttcgtggttgatgctcattttatctgaattgcagaggcagtaggatatgagagttcacgtggtggagaatggaccttgcaccagggcagcccaaggcagggaggacaaagctggccgggaggcatctgac

SEQ ID NO: 695759 - DNA, 675 bp, Homo sapiens
agtcagaagaagacacaggtccctcccttcccaaagtgggttccttggcacacctgtcttgcaagctttccatggagaagggttccttggtcagacagtttggggaaacttgcagactggtctcactcagaggcttacacagcacatgagtcatgaggttctgggaaacccacggaaaggaatctgcttgcctctgcttaacgctttacttcccgagggcccttttccgagggagtgcccatgattgctagtggccgccgccttgcgtggtgatttcctttgctcaccgtatctcaaacgaccccatagaggcctcatgttaactggggggatctggaggggttggcacacattctttccaccactggggcccctcaggcaggcagctgcaacagctggacctgcaggctggccttccttagtgctctccyacaggccgcctggttgcagcttcttcagcagcctccacacctgaaggctggcgcagtggctgcaaccaacgccaggacactcaaggcgaaggggacctggccacttccccgtcaggcacggggaacctaacagctagaactggggatgaacgcaggttgttcaggagcctggtgctggattgctggaatatgccaggatgaaagggagcctcaggacagggcatggtgaaggcgcccctccctg

SEQ ID NO: 695760 - DNA, 618 bp, Homo sapiens
tcccctgaggcaatgtcttgcaggatacacacctttctacttcatctcagatttcagtgtctcctccacatcctgccagagcctctctggcctggctgcccctcccctctytggcaggtttgggagaaagaggcttggagttcccccatcctagatagcgggacagattcctcatctcgtgaggctgaccctgatctgggggcctgttattaataatggcctgcagggctgtgtcatccagctagtgattcaggactccagggtcagcaccctccccatcctgatggagctacctcagtgaggggcttagagtctaagctatgactctacgtgagggtatatgctgttctctgcctgcactcccagggtcttggctaaactctattgtggtattaaaaagagaggctgggggaagtggggaaggggatgtggtaaccagaaccacttcctgccactgcagtgttgaaagccaagctctgtccaagttccccttgatgggggttggggagccaggaggtaaaggaggaagttgatgggagttgggggggatgttaaaaaaaggaggattcttatttggattgactccaggaatcaagatctgggtttcctggctgctct

SEQ ID NO: 695761 - DNA, 618 bp, Homo sapiens
tcccctgaggcaatgtcttgcaggatacacacctttctacttcatctcagatttcagtgtctcctccacatcctgccagagcctctctggcctggctgcccctcccctctctggcaggtttgggagaaagaggcttggagttcccccatcctagatagcgggacagattcctcatctcgtgaggctgaccctgatctgggggcctgttattaataatggcctgcagggctgtgtcatccagctagtgattcaggrctccagggtcagcaccctccccatcctgatggagctacctcagtgaggggcttagagtctaagctatgactctacgtgagggtatatgctgttctctgcctgcactcccagggtcttggctaaactctattgtggtattaaaaagagaggctgggggaagtggggaaggggatgtggtaaccagaaccacttcctgccactgcagtgttgaaagccaagctctgtccaagttccccttgatgggggttggggagccaggaggtaaaggaggaagttgatgggagttgggggggatgttaaaaaaaggaggattcttatttggattgactccaggaatcaagatctgggtttcctggctgctct

SEQ ID NO: 695762 - DNA, 653 bp, Homo sapiens
gaatccaaagatttccaccagaaccgtaaacatgtgtacagacacatgccttagctggttgtgaaatcaaagatgccgtttaagtgctaaacaagagaataatatttggagcctttttgtttttcaacacwcacagatctaggatgcctgtcctcagttgctgtggttttccacaattaaagggcggcctggtgcttgggctcaggtgatccgtaaagggggtgggctatggagaaatggcgtacccagccgcctgcctcggtggctcagcctttcatgatcgccactctttgttgagaattgttggcagtggcagcggtttgcagcttcagataacagccgccgttctcaggtaatgccttcgatcagagccctgatgacagactgtggagtgcaagttttttcaggtgctctgtttgctcagtaatccttcagtgccaatctcctccaaagagtgagcaagacccatccgtaatggacatcagccattaagctcatagtatttgtcgtctatcaggttactgctttgttactctccagtgatgaatggatgctgttatggtttaagaaaataaagcaatgctgtaaatgtgtccagactttaaaaagtggccattttattccttccatttcttgagaaataaacagagtac

SEQ ID NO: 695763 - DNA, 626 bp, Homo sapiens
caggaaccccactagtacttttatatcaatggaaccagttctttcctatttattcatttttacttatcaagagctatgtcactggcaaacatatttaaatttttaaaataaaaacagaaaaaaagtagataactagatacaattaaatatcatccaatatattcctaattgaggaagagtttacttttctctgagatatttccgagattcttttaatatttttataacaccatttttaaaagattggccatttgcttgttggatatcttagccctaacgctatttaactgaaatcatataccctttgaccaacatgcacccagccttttcacaaaacagccccagctcatggcagccaccaataaattatctacttttataatacaaatattttcaggttctacatatgattgagattgtgtagtatgtgtccttctgcacctggcttatttcatttaatataatgtcctttaggtttatccatgttgttccaaattacagaattttctttttwttacggctggctagtattccattttgtatatatgtcatattttctttatccatccagccactgatggatacttacaatgactctgtataatgcctattgtgaataatgctgc

SEQ ID NO: 695764 - DNA, 660 bp, Homo sapiens
tatcaattaaaatccttaaagagtaagtataagagaatttagtaggtttataaaagtaattaaaatgtttttcatattttttaaaaaattagataataatagtttcaatagggatgtttaatgcttttacttaattcctttgctctctttactattttaatctttatatgcactctgaataatgtgtatctaagataaatagtcacattaagaatacaaaaattatctcattttagtattgtttactctgcacatacacatagaacagattaaggacaattatatcaaaaaaattacagatattgatgcaggtatttmcagatcatgtaatagcaagaattttaaataagtcattttcaattttattttattctactttatttttaaaaaacttttggtgtttttaaaaaatttcttagagatgaaagataaactctttttttgttttctttttctttcttatattttttttgagacagggtctggctggctatgtcactcgggctggagtgcagtggggtgatctcagctctccgcaacctctggctccctggctcaagagattcttgtgccctcagccacccaaatagctgggactacagggacttgccaccacgtctggctaatttttgtattttttatagagacaagttttcacca

SEQ ID NO: 695765 - DNA, 1971 bp, Homo sapiens
agtgggagataaaagaatcatggaggtggtttcccccacactgttctcatggtagtgaataagttttataaggggaatggttttataaggggaaacccctttcacttgactcttattttctctcttttctgctgccatgtaagatgtgcctttcgccttccactatgattgtgaggcctccccagccacttggaactgtgagtccattaaacctctatttctgtataaattactcagtctcaggtatgtctctatcagcagtgtgaaaatggactaatacatctgatatgcacttttacccaggatacgcaaagtattataaatcaataataagaaatagtcaactaactttagaacgtcagtgaaagtggaacagaaaaaaaatgaacattgttactaaagaagaaacatggatggcaaatagcacatgaaatatattagatcacatgtagcactgaaacttttaacaatttgaaaggcaagaaagtatattcttttataattgaatacttggcaatgtttttaagtaattttttaaaagtytttatattaatgtattctctagcaatattacattattcttgtttattatcttattctttgtatcaattttggcaaattgtatttccttaaaaactgataatatgcactgtttttcaagtttatgacgaaaaattgtataaattatttttagtttaaaaatatctaacattatttatttatttcaagcctttttattttatacatgtgccttacaatcaatatatccaaataaggccaggtgtggtggctcactcctgtaatcccagctctttaggaggctgaggtgggaggattgcttgagctcaggagttcaggaccaacatggcaagactctgtctctattatatatatatattatttcaagatatagatatataataattttacttgatatgcttttagtaatttctttattaaaatagcattctaaaatatatatcaaaatgattgtttattttatggtaacttcaatcatattatattttaatatgtgatctatgttgcaataaagacacatttttctcaaagaacatatcccaatattttctcatctacaaatgaagaaaaacagaactcactttttaaaaaatgaaacattattagcttagtatcttcttataaacagaggtaacatcaatgacaatgatgtctaaaaatctcagattttctatttgcagtcttagtcaagaaacttcatttctttttggcaaacagattttaatgtatgtaactaaagaaaattttaggtggtaattgtcacagtcatcaatatattgcaacactcatcaagatcttatgttaacatactccaaaattttttttgactcaatattctgtatgaacaaaacactctctttcaagtgagtcataacagttttggaaggaaatcatcaataaattcagagccttaggagctacttttgaatagtatgctatttcagagttaatgaaatcacttactatgcagacaaaggataacaattagaacgctaggaaaaatgcctcctgtgaattgcaatcaagaaatcatcgttttttcctttcttttttttgtattggtctgcaaactaaaagaatcttcttattaagttgtgtccatatattacactcattgaaagtttatggcatttataatttctaaaatgtatcttgagtgatattttttgtttcttcttggtttagcagctgaattctttaatcatgaggaaaaaatagcatgcttatatatttttttccttaacaacagctcattgtatgttttaatctctatttaacaatacactaatggatagagaaaagtgtctgagtcaacatgaatgtcgatcacaacagtacctaaaatttcatagtgttatgctaatgccttctgtacctattttattagaaaactagttaacttttgtgagaatctagatgatttttataaaa

SEQ ID NO: 695766 - DNA, 642 bp, Homo sapiens
acgtgtcattccatgtatataccatggaatactacacggccataaaaagagcaaaatcctgtcttttgaagcaacatgggtgcagctggaagcctttatcctaagcaagttaatgttggaacaaaaaaacaaatattgcatattctcacttctaagtgtgagctaaacgttgagtacacgtggacataaagatggggacaacagaggactactagaaggggaaagagaggaaggaggtggtggtagtgtttgaagctaggaatctattaagtcagacttctactacagagccctggcgatagaggctctatctttctcgactattacatttcaaaaggatagctcccaagtatttgagataggcattcctrggatgtgagctggaaaatgcctttatatctcacaggagcagcaggaggaaagatcattgcggttaggctgtcttaattcagtaacagaaggaggtccgagacctagaggcagagagaagcctctccaatattgaaccaagctttgggaagcattaaggtcctcttgatcttgataaaccctcagccctgtttgccctccagtcctgtgctgagtaacaccaactgttcccatataaaaagataactggccaacccagaaaaattccctatt

SEQ ID NO: 695767 - DNA, 660 bp, Homo sapiens
tgaattaaccaagcatattccccataaagtccaatttcaaattagagtaaaggaaaatgaagagcatggaagctatatactctgacttgagtaacctagcactggaaaaagaaacactggacagacaccttagttttgaatcaaattctaccacaaactgtgtgactttgggcaagataacttaatggccttaaatcttaatttcctcacctgtaaaatagaaaatacaatatctaatctctcaggtatattgtgaaaaatacatataattataaaataactagcacagaatctagcatataataatttctcaggaaacagggctttccttttcagccttttttttttttttttttttgagatggagtcttgctctgttgcccaggctggagtgcagtggtgtgatctcagctcactgcaacctatgcctcccyggttcaagcgattctccttcctcagcctcccgagtagtggggactgcaggcacatgtgccaccttgcctggctaatgttttgtatttttagtagaggcggagtttcaatgttggccagggtggtctcaaactcctgacctcgttatctgcctgcttcggcatcccaaagtgctgggattacaggcgtaagccaccacactgagccttcagcctttcaaagtagtca

SEQ ID NO: 695768 - DNA, 746 bp, Homo sapiens
ctagagtccttagcacattaatcacaattatttaaaatatctgctttgataattccaacattcctgccatacttgactctgcttatgatgcttgttcatacttttcaaacygtttttttctttgcatttcagtctatcttggaattttttttgttgaaaagtgaacacaatgtactaagtaaaagcagctatagtaaataggcctttagtaatgtagtgatagagtgtaaggggaaggggagcattctatagtcctatgattagggctcagtcttttggtgagactgtgccccttgactgtgaacttcatcagtgcttctcagttcctccccgactttagatgagacataatggctgaagggaggacgaagttgtatatttccctttttccatgtggaaatctaaaagggattgtagttgagtgtttctcttcccccacatgaaaggccagaaggagatggagttatttattcccttttgtgcatgtggaaggctacagccagttgagtattttccttctgtcacatatagtaggctctgataaaaccccagcagattaggccctagtaaaatagtttctcctggtgcaggtcttgtgaaaaagaactgaatactccagcatgtttccaaatggttcctttccccttcctcctgccagaagcatgaggacattttttccaacattcactgagaacctagtagagtttctggaggcataattcacaaaagtatggagaccttcaatg

SEQ ID NO: 695769 - DNA, 746 bp, Homo sapiens
ctagagtccttagcacattaatcacaattatttaaaatatctgctttgataattccaacattcctgccatacttgactctgcttatgatgcttgttcatacttttcaaactgtttttttctttgcatttcagtctatcttggaattttttttgttgaaaagtgaacacaatgtactaagtaaaagcagctatagtaaataggcctttagtaatgtagtgatagagtgtaaggggaaggggagcattctatagtcctatgattasggctcagtcttttggtgagactgtgccccttgactgtgaacttcatcagtgcttctcagttcctccccgactttagatgagacataatggctgaagggaggacgaagttgtatatttccctttttccatgtggaaatctaaaagggattgtagttgagtgtttctcttcccccacatgaaaggccagaaggagatggagttatttattcccttttgtgcatgtggaaggctacagccagttgagtattttccttctgtcacatatagtaggctctgataaaaccccagcagattaggccctagtaaaatagtttctcctggtgcaggtcttgtgaaaaagaactgaatactccagcatgtttccaaatggttcctttccccttcctcctgccagaagcatgaggacattttttccaacattcactgagaacctagtagagtttctggaggcataattcacaaaagtatggagaccttcaatg

SEQ ID NO: 695770 - DNA, 1348 bp, Homo sapiens
  misc_feature 832, 833, 834, 835, 836, 837, 838, 839, 840, 841, 842, 843,844, 845, 846, 847, 848, 849, 850, 851, 852, 853, 854, 855,856, 857, 858, 859, 860, 861, 862, 863, 864, 865, 866, 867,868, 869, 870, 871, 872, 873, 874, 875, 876, 877, 878: n = A,T,C or G
  misc_feature 879, 880, 881, 882, 883, 884, 885, 886, 887, 888, 889, 890,891, 892, 893, 894, 895, 896, 897, 898, 899, 900, 901, 902,903, 904, 905, 906, 907, 908, 909, 910, 911, 912, 913, 914,915, 916, 917, 918, 919, 920, 921, 922, 923, 924, 925: n = A,T,C or G
  misc_feature 926, 927, 928, 929, 930, 931: n = A,T,C or G
ccccaatactgcctgagtttctcaggcagggaggagccatcctcagctccagcatgtaaggtttggctaaataaaccagaacacatttgtccttgaaaacatttggttcaggagtggaaatttgccctcattctatttgaggtaaagattgcagaggcttctgcaaatgttctttctcacttttacgaggaaccgtaagtagccattttctccctctctgcctcagtttctacctgtggctgccttatgaccatgggggaagctactctgagaacaaagctgatgcccagagaaaagcagatggagaaaatctcagcaaaatgtagggagagtcctgatttcatggtattagaatctgcccagtctctggatgctcagttatatgagaaartacaactttttgtttaagccatctgagtcagcttgaatcatcccaactgatttagggttttagacccagcatggtgtaaagtgacctagtgaaagagaactccagtaggaatcagaggacctggcctagagttataggtactaagtatgtgtctggagcaagcgttgtacacctttggcagttgatccctcggttaaaggcgtgtactgatcacagtgcgatgtcacaaggctgagtgaagatggaatatgagaaagttacaaaccatgcggagcaaaatattatgattaccatcgtatctcgcgtgaatccatgaatccatcataatgaaaatagcaatagtgtttaactttataaagggattatgaagtgttagaccatgagctaagtgcatgaatggcttagctcacttcacctgcaatgcaatcctgtaaagtaggnnnnnnnnnnnnnnnnnnnnnnnnnnnnnnnnnnnnnnnnnnnnnnnnnnnnnnnnnnnnnnnnnnnnnnnnnnnnnnnnnnnnnnnnnnnnnnnnnnnnctgtgattaaccatgggtaattgaaactatggaaagcgagcaaaactgcagataaggggagacgactgtatttgtgatgtacttcaaattatactttaaaatttgtctatagaaaattgtttgtgtttattcttacagatctgtggaaccaatttttaaatctcctaggcaggctaaaataattgcttttgctatctcattttttataaacatttatttgtgagataaatctttacttttatcttacaaataaaaaagataaagagataaagaatataataaaatatatttgcacttctaaaatttgtattattaagctttaaataaaatacaggaaaatagttctactatactaaactaaggaattttcttctaagcctcaaatctaaaaatctataaactaatctgaaagaaaag

SEQ ID NO: 695771 - DNA, 613 bp, Homo sapiens
gttacctggaaattaaccagggctggaagatctgttttctagaaggctcatttacgtggctggcagattagttctacctattggcaggaagccttagttctccaacagcctggaaaaaagaaacgtagcttgacattgtactctagagtgacaaagttgataaataatgacaactgagagagggagaaggaaagcactatagtagaaataaaaatattgttaaaaatgaatattaataaaaattataataacatctggaaggtgaatggatagacaaaatgccataaatatacaatggcatactattaaatgaaaaggaataaattgtcatatattacrttaaggatgaacctcaaaagcattatatgaaatgaaagcaaccagacaacatcatgatattgtatgatttcatatttatgaaatgttcagaaaaggcaaacagaatggtggctgcttgaggctgcattgggagaaggtattaactgtaaatggtaatgaggcatcctgttggggatataaaatattctaaaactgatttctggtgatggttgcatcatttggtaaatttagtaaaagtcattgaattgtgcatttaaaatggatgaattataaa

SEQ ID NO: 695772 - DNA, 1065 bp, Homo sapiens
aacccatcataactcttttgtccatgcttttatgaatgtaccgttagaaatttcaagaatgggccgggcactgtgactcacgcttgtaatcctagcactttgggagggagaggagggtggatcacaaggtcaggagttcgagaccagcctgacaaatatggtgaaacaccatctctactaaaaatacaaaaattagctgggcatggtggcgggcgcctgtagtcccagctactcgggaggctgaggcaggagaattgcttgaacctgggaggtagaggttgcagtgagccgagattgcaactctgcactcaagcgtggctgacagagtgagacttggtctcaaaaaaaaaaaaagaaatttcaagaatgctgacaacactcaagtatcagtagtctttcctggcaacagtttcatatgtacaatattctaatttactaactaagactgcaatactgaccatataaaccatgatggccaattgcaccaatccacataaatctattccaccaaagagagaccatattgaaggtgagctgtattaaaaataaaaacagaagggaaaaaataactttccgctcttcctcctaggaaaatattcaaagactttttcatgtgagaagcctttcagtttatatcatttgtaataactcctttcatttattccatcacaatccatgaaaaactgtaggatgattaaatgaaaaaaaaaaaaggtctttccacttggtattggtactattgattcacagtgtccttcatagctgtgaaatttacaatgtgttaatagttaatggaaaacaataggaagtctggattttttatattctggctgtcaatattaattttaattttataattttaagaaaaataaaataaaaaaataactgtaatatgtctaggratgcccactgattttatcttgtcattgtgttgattctttctgatgttttcactggaatgtacatattatacaatgtgtgtgaggatagttactatcatacatatatgccaatagctatatgtgtaagaaatctgatctatgaaccttaaactctgatatgcta

SEQ ID NO: 695773 - DNA, 604 bp, Homo sapiens
actcgggaggctgaggcaggagaatcgtttgaagccgggaggcagaagttgcagtgagccgagatcacaccattgcactccagcctgggcgacaagagcgaaactctctctcttaaaaaaagaaaaaatctttaaagacacagtttctcaagatccgattttaaaactacaacattaaagtatcaccacctaatagtattgtcacaccctccactcttgtgacaaattgttttatgactattccctccccagttctcacactaagaatactataagagcagttaaaaaaaaaaatcttggtttcaagttttcttaaatcagctacagttcaacaacctgaaataattaaaaataaattagaacctaatgttcagtaacccaatcatagcatgtggctaattgtgagtatccagtcaacaccagcaccaagttytgatgaaataaaaccatcccactgacatatccccggcacccaccacccccaagactcttaggatacaatgtctatctatcacttgccagggttacttccttctgttaccacaaacactcccattgccagcaaaagccttaatcagtcttgagaaaaaaaaaaaagtaagcg

SEQ ID NO: 695774 - DNA, 594 bp, Homo sapiens
catagaaaaacagtttactaacctgtgaaaataccattcattctctgtttacctctggtccacagctaagcaatcagtaggatataaatgtaccctatgttcactattcagtattcataagtatactacttatgaattggaaatmtgacacaacatttacaagacctaattttgaaaatttaaaatagtgtaaggcccctaggcttaattttacaggggaaagattaaagggacacaagcaaacatatagtctctctctgtgctgtgggacactggtaattttttgacttaaaatatttgatacttaaaatgccaaacttctacatttctgcagtaacaaggcagttatcatattgaataccatttctttctctccagtaagtagagttaatattagcacatgaactgaaaatattaagtgattataaaaaagtccaaataaattcattaaaatttagcttggcaaaatgttagtttcatgttcttggtagaagtccttttatatttatattcaaatgaaatgaacaattaacaagcaaaggaaatggcatcaaatatttgacaccctgcctcccaaggtgtattgattcatgc

SEQ ID NO: 695775 - DNA, 594 bp, Homo sapiens
catagaaaaacagtttactaacctgtgaaaataccattcattctctgtttacctctggtccacagctaagcaatcagtaggatataaatgtaccctatgttcactattcagtattcataagtatactacttatgaattggaaatctgacacaacatttacawgacctaattttgaaaatttaaaatagtgtaaggcccctaggcttaattttacaggggaaagattaaagggacacaagcaaacatatagtctctctctgtgctgtgggacactggtaattttttgacttaaaatatttgatacttaaaatgccaaacttctacatttctgcagtaacaaggcagttatcatattgaataccatttctttctctccagtaagtagagttaatattagcacatgaactgaaaatattaagtgattataaaaaagtccaaataaattcattaaaatttagcttggcaaaatgttagtttcatgttcttggtagaagtccttttatatttatattcaaatgaaatgaacaattaacaagcaaaggaaatggcatcaaatatttgacaccctgcctcccaaggtgtattgattcatgc

SEQ ID NO: 695776 - DNA, 594 bp, Homo sapiens
catagaaaaacagtttactaacctgtgaaaataccattcattctctgtttacctctggtccacagctaagcaatcagtaggatataaatgtaccctatgttcactattcagtattcataagtatactacttatgaattggaaatctgacacaacatttacaagacctaattttgaaaatttaaaatagtgtaaggcccctaggcttaattttacaggggaaagattaaagggacacaagcaaacatataktctctctctgtgctgtgggacactggtaattttttgacttaaaatatttgatacttaaaatgccaaacttctacatttctgcagtaacaaggcagttatcatattgaataccatttctttctctccagtaagtagagttaatattagcacatgaactgaaaatattaagtgattataaaaaagtccaaataaattcattaaaatttagcttggcaaaatgttagtttcatgttcttggtagaagtccttttatatttatattcaaatgaaatgaacaattaacaagcaaaggaaatggcatcaaatatttgacaccctgcctcccaaggtgtattgattcatgc

SEQ ID NO: 695777 - DNA, 594 bp, Homo sapiens
catagaaaaacagtttactaacctgtgaaaataccattcattctctgtttacctctggtccacagctaagcaatcagtaggatataaatgtaccctatgttcactattcagtattcataagtatactacttatgaattggaaatctgacacaacatttacaagacctaattttgaaaatttaaaatagtgtaaggcccctaggcttaattttacaggggaaagattaaagggacacaagcaaacatatagtctctctctgtgctgtgggacactggtaattttttgacttaaaatatttgatacttaaratgccaaacttctacatttctgcagtaacaaggcagttatcatattgaataccatttctttctctccagtaagtagagttaatattagcacatgaactgaaaatattaagtgattataaaaaagtccaaataaattcattaaaatttagcttggcaaaatgttagtttcatgttcttggtagaagtccttttatatttatattcaaatgaaatgaacaattaacaagcaaaggaaatggcatcaaatatttgacaccctgcctcccaaggtgtattgattcatgc

SEQ ID NO: 695778 - DNA, 594 bp, Homo sapiens
catagaaaaacagtttactaacctgtgaaaataccattcattctctgtttacctctggtccacagctaagcaatcagtaggatataaatgtaccctatgttcactattcagtattcataagtatactacttatgaattggaaatctgacacaacatttacaagacctaattttgaaaatttaaaatagtgtaaggcccctaggcttaattttacaggggaaagattaaagggacacaagcaaacatatagtctctctctgtgctgtgggacactggtaattttttgacttaaaatatttgatacttaaaatgccaaacttctacatttctgcagtaacaaggcagttatcatattgaataccatttctttctctccagtaagtagagttaatattagcacatgaactgaaaatattaagtgattataaaaaagtccaaataaattcattaaaatttagcttggcaaaatgttagtttcatgttcttggtagaagtccttttatatttatattcaaatgaaatgaacaattwacaagcaaaggaaatggcatcaaatatttgacaccctgcctcccaaggtgtattgattcatgc

SEQ ID NO: 695779 - DNA, 594 bp, Homo sapiens
cttagttaatcactattctgatgtctattcccataggttacaattgcctgttcttaaagttcacatgagtgaatggacatatcttttgtatctggccttttttctgcaggtatgttcattatactcatgagatatatccacgtagtttcatagatcacttctcaattttggtgttattgaattcttgtgatgaatattcttctacaggtctttttgtgcacttgagattcatggaagtacttcaattgctgggtcacgacctgagtacaagtttaacattagtataaattgccagtcttctagaatgttttttcaccagcaatgacagttgaagtggcaccaaattcttgtcagcatttggtgtactaactttttaaaatgtagctatgctctcagaccaaactggccaacatggcraaaccccgtctctactgaaaatataaaaattagccaggcatggtggcatgcacctgtagtcccagctactcaggagggggaggttgcagtgactcaagattgcaccaatcgcaccattgcactccagcttgggtgagagagaccctgtctcagagaaaaaaaaaaaagtagccacac

SEQ ID NO: 695780 - DNA, 609 bp, Homo sapiens
aaatacatactatatgattccaagtatatgacatcatagataagtcaaaaagatgaaaaaaagaaaatgattagtgattgctggggtaatgggggagaggatgatgaataggtgaagcacagggtatttttagcacaaggaaacgtttccatgtgataccatcatagtagacatataatatgtatatgaataatcattatacatgtcattacacatttgcccaaacccacaaaatgtacrgcaccaagaataaagagtcaaccctgtagtaactacggactttggttgataatgatgggttaatgtttgtccattgattgtaacaaatgtactattatagaggggaacatcaatggtggaggctgtgcgtgtgtagggggaggaggtatgtgagaaacttcatatgttttactctatttttctgtgaagctttattcttatttaccataaaaagaaagtcttagtaaaagataaggaacacaattatgtaaattaaagatgtacactattaaacctaatgcaaccactgaaatcatgtcatagcattataaatcataagcaacttaagagaaaatgaaatcataaaactatgtaagtactctaaaataa

SEQ ID NO: 695781 - DNA, 609 bp, Homo sapiens
aaatacatactatatgattccaagtatatgacatcatagataagtcaaaaagatgaaaaaaagaaaatgattagtgattgctggggtaatgggggagaggatgatgaataggtgaagcacagggtatttttagcacaaggaaacgtttccatgtgataccatcatagtagacatataatatgtatatgaataatcattatacatgtcattacacatttgcccaaacccacaaaatgtacagcaccaagaataaagagtcaaccctgtagtaactacggactttggttgataatgatgggttaatgtttgtccattgattgtaacaaatgtactattatagaggggaacatcaatggtggaggctgtgcgtgtgtagggggaggaggtatgtgagaaacttcatatgttttactctatttttctgtgaagctttattcttatttaccataaaaagaaagtcttagtaaaagataaggaacacaattatgtaaattaaagatgtacactattaaacctaatgcaaccactgaaatcatgtcatagcattataaatcataagcaacttaagagaaaatgaaatcataaaactatgtaastactctaaaataa

SEQ ID NO: 695782 - DNA, 1388 bp, Homo sapiens
cccatatcaaaacaaagtggggaatcacatgaggctattccatggagaacaattcaattatttttaagatgaataaaatttaagattcttggttgtaaacagcaacactctttgaattatctttgtacacattggtagcatatgatagtaaatcaacatattaaacgtattacatgattctaaagtagatggtaaaggctttccattattatcatttttatataagtagacaggattgcttttctgactggaggacctcctattcaagaaacaggatttgatatatgtgacaaattggaaattattgctattgttaagaaaataattctgtgtttgtaattytctagttcataccttgatttccctaagggatttagtttcaagttgtgggcctattaaatttagatgggtttgtatgtaggagaatgtatataatcacatatgcatacatgcaaaatatttgtatgtctatcagcacacagttgtatatttatacacgtaattttagggtacattcagtgtatttattcgtatatatgttattgtcatccttagaattttttctcatttctttttgtccaaaaggtggccctgttttaaactgtagaaagcattatcaccagtagaattggccaatagatcatggaaacagacaatagtattttgttgcctggcaaccacctactgtgaatgaaaaacaaagcagtgacagctgcttccacatcctgatactcacactgtagctcaggcattgcaaccctccaaatgagacagatccactaagtttcatttgagtaaggtgaagctgtttctttttttttggatgttttttaaggaatattaaatgttttattataataagaattattgtgggatgaaatgaagcatctaacttcaattgccctcttaagcctagtataaactgaaaaatgcaagattgggaggattgtttagacccttctcattcttcccttttcactcattaaacatcgtaagcaaattttctgctgctgccaggtgctcttaggatattacaaaaagctgagttttctataatacctaaatagatggcaggattttcctgctaggaatgaagtagagactgaggctctagcctgaccctttaatattaaggaacactgaggcatagtgagattatgtgacacaaccctggtgacagacccagtctcaggatgtcttcccctgggtcacacttgaccatttccccctcatttctctccttgattattctttctttgttttttatttacataacatttgcaaccaagatttttatcttaataaaaaccttataatgtaatttctaatattgtacttagaaaatacattagcatttgagagtaaaaaatcaacattgacatgctagg

SEQ ID NO: 695783 - DNA, 578 bp, Homo sapiens
ggaatcctcctgactcagcctcccaaagtgttgggattacaggtgggaaccactgtgccttgttacatgtcccatgatagctacagacagcagttattattttctaattattctctataatatgataatatagataatagctattatatttataatacatattatctattacatagataataatcagaaaatatcaataatgagacaggattgtctcctgcacccctagaggcacytgggccttgtcatacggggaactactctatcccacttgctggtcttggcttctccttctgggtcctctgacacctttgttccttcctgagcacctgacctttaggctcatggtgacctgcaagggggtgttttaaactgggctgtgcacgcgagtcacctggtgtcttcacaaggcaggttcgggtcggagggctgaggtggggacccgggagtatactgggctgcagtccacatcctccctaggcagggcggctgagtcctgctgctggaggcccacaggtgtgcaaggcagcgccgctggcctgtccttgccaagcctgccaggtgctcagtcctgttct

SEQ ID NO: 695784 - DNA, 459 bp, Homo sapiens
atggtttgggtaatgaagatgtctgccctgctaatgagaacaagaatgcttaacaggaggctgctgggcttccttgctgattattatccactactcctgcttgaatggtgtttggggttaaatgtgagaatctgtgctctctgcctctccctttctcttcctcctccttcctctctttttgcttgttgattgtrcattttatagttagtgctcagggtcagggggattaggaaaaacgtaactctcaacggaaggtaagaatagtaatgctcctcggagaaggcatcatacagcaaaggccatgcattccagggatgtgtggctttttctcctcagtattgccacagacacctgacgtaggtacgagattgatctgcacaccagccctggagcctgtgtttggttcatcagcaggatgcgctccccttcgcttgcatgtcagaacatcaaaatcaattc

SEQ ID NO: 695785 - DNA, 459 bp, Homo sapiens
atggtttgggtaatgaagatgtctgccctgctaatgagaacaagaatgcttaacaggaggctgctgggcttccttgctgattattatccactactcctgcttgaatggtgtttggggttaaatgtgagaatctgtgctctctgcctctccctttctcttcctcctccttcctctctttttgcttgttgattgtacattttatagttagtgctcagggtcagggggattaggaaaaaygtaactctcaacggaaggtaagaatagtaatgctcctcggagaaggcatcatacagcaaaggccatgcattccagggatgtgtggctttttctcctcagtattgccacagacacctgacgtaggtacgagattgatctgcacaccagccctggagcctgtgtttggttcatcagcaggatgcgctccccttcgcttgcatgtcagaacatcaaaatcaattc

SEQ ID NO: 695786 - DNA, 958 bp, Homo sapiens
tatgtgctgggcacattgcatgcaacataacaaagcttcctgaagagacgcagaaagccaagagctgagcaagtcctatgcacacctgggacctgctcccggataccacaccccaagccttccccaggccagygccccaagcctttcccgggccactcctgtcagggctcagagaggaagcaggaccccagcagctgtgccgagagcagagcagggcctcccattagtctcccggggctgctgtcacaaaggccacaggccaggtggctcgcagcaacagacgtgtgttccctcccagttctggacaaagaaggccaacatccaggtgggctggcttcttctggggtgcaagggagactctggtcccttcctctcaccagctccaggggccccacgtgctcctcatcttccctgcacttctgtggacacaatccacctcctaatgctccctgagtaacagacctgtgggtgtctccagccccctttcatcctctccgtagcagtcaccaaaacccacctttcttcagctccttcacccactactctgggcttcccccctggaagcttctcctgaaaataaagtcccaaagcaacgcactcctgctgagtcacacccccctgcaccgagcgaggtgcatagcggctgagcctggccccgggagctgcagactcacacctgctcagccagctccttgccccaaggtccgcacacagcccccgacccaactctcatgatggtgggggcatgtgtccctcccctcttacaggcttagagaaggtctgtgatgggtgcgaacttgtgcagcctggcccagggttccaggatggtgtctccatagggaaaggccaatgtgccagggagcagcatggtggatgaaggccatgctggatgatagcaacctctgcgtcatcatgctcgcctttgtttaggaagtctactctccacttctggccttca

SEQ ID NO: 695787 - DNA, 1306 bp, Homo sapiens
ggaggtgagtgtatagtctaaagataaaagctccaaatgggctttcwgtgtcccttcatctccaagctgaatgaacaggatgtaatcacagcagcgcatgagagggcaatttgaacagagtggatactaagtaacatttgaagtcaaagcaaaatcaaaagaaaattctcttaatactccctcctcccaatataattaacgttaaagtattctttttaattaacataattagaggcttaattattgaaagtcgggttaaagatgaaaagtatcatataattaaaataattatttttctttaacctccaaaggaaaacaaagcagtttttctctcatagtcatttaaacttcagtaatatttcttatataaaagtagttataagatttaatacagacattggtaaaggagtggggtgaatagagtttgtgaagactcttactgtacacaacgagaagatgtttttaatctctctttggtcacaaaggagttcaataatttaggttttaatgatagtactattgtcatgcacagaacatgtcaaaataaattggtacaatcttttcataaagagatttaaaaataaaggttctaaaaaattcaaaatacagaataaaaactatgaacatacatgcatcacagccttactcgtaatatagaaattctggtaaaaaatattgcacattattggaataaagactatgctactgtaataacaatgccctaaatacagcttggataagagagaagtttattcatgtcttacacaagagtctggttaataacttagacaattttgttcataagaacagaaagtactgttcttaatagacagttatgttctataagattcagaaacttaggttgttttaattttcctcctctgctgcctccatgtgtaatttctctctctagatagtcaaagctgggtcactaccacctctggcattcagcctgaggaaagaggaaggagcatgagcaaagattgcttttaagatgcaggtttgggctggtcgcagtggctcacacctgtaatcccagcactttgggaggccaaggtgggtggatcacctgaggtcaggagttcgagaccagcctggccaacatggtgaaaccccatctctactaaaaatacaaaaattagccgggcgtggtggcacatgcctgtaattacagctactcgggaggctgaggcatgagacttgcttgaacccaggaggcggagcttgcagtgagtcgagaacgtgccactgcacttcagcatgagtgacagagcgagactgtctcaaaaaaagaagaaaaaaaaaa

SEQ ID NO: 695788 - DNA, 1306 bp, Homo sapiens
ggaggtgagtgtatagtctaaagataaaagctccaaatgggctttcagtgtcccttcatctccaagctgaatgaacaggatgtaatcacagcagcgcatgagagggcaatttgaacagagtggatactaagtaacatttgaagtcaaagcaaaatcaaaagaaaattctcttaatactccctcctcccaatataattaacgttaaagtattctttttaattaacataattagaggcttaattattgaaagtcgggttaaagatgaaaagtatcatataattaaaataattatttttctttaacctccaaaggaaaacaaagcagtttttctctcatagtcatttaaacttcagtaatatttcttatataaaagtagttataagatttaatacagacattggtaaaggagtggggtgaatagagtttgtgaagactcttactgtacacaacgagaagatgtttttaatctctctttggtcacaaaggagttcaataatttaggttttaatgatagtactattgtcatgcacagaacatgtcaaaataaattggtacaatcttttcataaagagatttaaaaataaaggttctaaaaaattcaaaatacagaataaaaactatgaacatacatgcatcacagccttactcgtaatatagaaattctggtaaaaaatattgcacattattggaataaagactatgctactgtaataacaatgccctaaatacagcttggataagagagaagtttattcatgtyttacacaagagtctggttaataacttagacaattttgttcataagaacagaaagtactgttcttaatagacagttatgttctataagattcagaaacttaggttgttttaattttcctcctctgctgcctccatgtgtaatttctctctctagatagtcaaagctgggtcactaccacctctggcattcagcctgaggaaagaggaaggagcatgagcaaagattgcttttaagatgcaggtttgggctggtcgcagtggctcacacctgtaatcccagcactttgggaggccaaggtgggtggatcacctgaggtcaggagttcgagaccagcctggccaacatggtgaaaccccatctctactaaaaatacaaaaattagccgggcgtggtggcacatgcctgtaattacagctactcgggaggctgaggcatgagacttgcttgaacccaggaggcggagcttgcagtgagtcgagaacgtgccactgcacttcagcatgagtgacagagcgagactgtctcaaaaaaagaagaaaaaaaaaa

SEQ ID NO: 695789 - DNA, 1306 bp, Homo sapiens
ggaggtgagtgtatagtctaaagataaaagctccaaatgggctttcagtgtcccttcatctccaagctgaatgaacaggatgtaatcacagcagcgcatgagagggcaatttgaacagagtggatactaagtaacatttgaagtcaaagcaaaatcaaaagaaaattctcttaatactccctcctcccaatataattaacgttaaagtattctttttaattaacataattagaggcttaattattgaaagtcgggttaaagatgaaaagtatcatataattaaaataattatttttctttaacctccaaaggaaaacaaagcagtttttctctcatagtcatttaaacttcagtaatatttcttatataaaagtagttataagatttaatacagacattggtaaaggagtggggtgaatagagtttgtgaagactcttactgtacacaacgagaagatgtttttaatctctctttggtcacaaaggagttcaataatttaggttttaatgatagtactattgtcatgcacagaacatgtcaaaataaattggtacaatcttttcataaagagatttaaaaataaaggttctaaaaaattcaaaatacagaataaaaactatgaacatacatgcatcacagccttactcgtaatatagaaattctggtaaaaaatattgcacattattggaataaagactatgctactgtaataacaatgccctaaatacagcttggataagagagaagtttattcatgtcttacacaagagtctggttaataacttagacaattttgttcataagaacagaaagtactgttcttaatagacagttatgttctataagattcagaaacttaggttgttttaattttcctcctctgctgcctccatgtgtaatttctctctctagatagtcaaagctgggtcactaccacctctggcattcagcctgaggaaagaggaaggagcatgagcaaagattgcttttaagatgcaggtttgggctggtcgcagtggctcacacctgtaatcccagcactttgggaggccaaggtgggtggatcacctgaggtcaggagttcgagaccagcctggccaacatggtgaaaccccatctctactaaaaatacaaaaattagccgggcgtggtggcacaygcctgtaattacagctactcgggaggctgaggcatgagacttgcttgaacccaggaggcggagcttgcagtgagtcgagaacgtgccactgcacttcagcatgagtgacagagcgagactgtctcaaaaaaagaagaaaaaaaaaa

SEQ ID NO: 695790 - DNA, 1026 bp, Homo sapiens
ataaagttcacgatgaacatctattattgtgcaaagattggactgggcatgtgagggggaataaatgattacagaactgcacatctttttcaagtgcaggttatagcagaattattagttacctaaaatgtacctgagaatgctaaattrctttagtacaaggcattttaatggaaattataaccctgaatatcaacactttcaaatgtctcaactattcctctttcattcacttttcacaatcttatactttcatcatccttattttacatccatttttccagggatactgtcatagatactttgcttttcacatgtttgtgtaaattaagtctctttaaatacatgaaagagcagggcagtaactataaggggcatatttaaataggctattaaacaccaatgtgatttttaaaagcaggcaacccctatggataaacacactccttaagtacataatttatttataattttaaatatattttctgaaaagtgaaagagatgtgtactagaaatagtaaagtgtaagaatagactagtctttcaagaaaattcttcattcctttgtgttaaacatgaatgctttttttttactacatgcgtacacactctctagtttatactgaagaaagggaaaatacatctaatatttactaaatgcctactatgtagcaggaactgtcacatgtggcttctaattctaacaatgcttcaaattattattatcctcattttctgtattaaaaaaatgagacattgagaggttaagtgatttgcccaaaattacacagctggttatcatggaggaaatgactccatgctatcttcccacagtgtgctggagttggatttaaaaagagaacaacacaaatgtaattgtgataacgttttttagacacatagattcagttttaaatttctaaaacctgtgtattacttttttaaacgacccttttacatgttagtatgttacattgttatatttatatattaattttttattatctaggcagtgttttctagcaa

SEQ ID NO: 695791 - DNA, 1026 bp, Homo sapiens
ataaagttcacgatgaacatctattattgtgcaaagattggactgggcatgtgagggggaataaatgattacagaactgcacatctttttcaagtgcaggttatagcagaattattagttacctaaaatgtacctgagaatgctaaattactttagtacaaggcattttaatggaaattataaccctgaatatcaacactttcaaatgtctcaactattcctctttcattcacttttcacaatcttatactttcatcatccttattttacatccatttttccagggatactgtcatagatactttgcttttcacatgtttgtgtaaattaagtctctttaaatacatgaaagagcagggcagtaactataaggggcatatttaaataggctattaaacaccaatgtgatttttaaaagcaggcaacccctatggataaacacactccttaagtacataatttatttataattttaaatatattttctgaaaagtgaaagagatgtgtactagaaatagtaaagtgtaagaatagactagtctttcaagaaaattcttcattcctttgtgttmaacatgaatgctttttttttactacatgcgtacacactctctagtttatactgaagaaagggaaaatacatctaatatttactaaatgcctactatgtagcaggaactgtcacatgtggcttctaattctaacaatgcttcaaattattattatcctcattttctgtattaaaaaaatgagacattgagaggttaagtgatttgcccaaaattacacagctggttatcatggaggaaatgactccatgctatcttcccacagtgtgctggagttggatttaaaaagagaacaacacaaatgtaattgtgataacgttttttagacacatagattcagttttaaatttctaaaacctgtgtattacttttttaaacgacccttttacatgttagtatgttacattgttatatttatatattaattttttattatctaggcagtgttttctagcaa

SEQ ID NO: 695792 - DNA, 1026 bp, Homo sapiens
ataaagttcacgatgaacatctattattgtgcaaagattggactgggcatgtgagggggaataaatgattacagaactgcacatctttttcaagtgcaggttatagcagaattattagttacctaaaatgtacctgagaatgctaaattactttagtacaaggcattttaatggaaattataaccctgaatatcaacactttcaaatgtctcaactattcctctttcattcacttttcacaatcttatactttcatcatccttattttacatccatttttccagggatactgtcatagatactttgcttttcacatgtttgtgtaaattaagtctctttaaatacatgaaagagcagggcagtaactataaggggcatatttaaataggctattaaacaccaatgtgatttttaaaagcaggcaacccctatggataaacacactccttaagtacataatttatttataattttaaatatattttctgaaaagtgaaagagatgtgtactagaaatagtaaagtgtaagaatagactagtctttcaagaaaattcttcattcctttgtgttaaacatgaatgctttttttttactacatgcgtacacactctctagtttatactgaagaaagggaaaatacatctaatatttactaaatgcctactatgtagcaggaactgtcacatgtggcttctaattctaacaatgcttcaaattattattatcctcattttctgtattaaaaaaatgagacattgagaggttaagtgatttgcccaaaattacacagctggttatcatggaggaaatgactccatgctatcttcccacagtgtgctggagttggatttaaaaagagaacaacacaaatgtaattgtgataaygttttttagacacatagattcagttttaaatttctaaaacctgtgtattacttttttaaacgacccttttacatgttagtatgttacattgttatatttatatattaattttttattatctaggcagtgttttctagcaa

SEQ ID NO: 695793 - DNA, 1026 bp, Homo sapiens
ataaagttcacgatgaacatctattattgtgcaaagattggactgggcatgtgagggggaataaatgattacagaactgcacatctttttcaagtgcaggttatagcagaattattagttacctaaaatgtacctgagaatgctaaattactttagtacaaggcattttaatggaaattataaccctgaatatcaacactttcaaatgtctcaactattcctctttcattcacttttcacaatcttatactttcatcatccttattttacatccatttttccagggatactgtcatagatactttgcttttcacatgtttgtgtaaattaagtctctttaaatacatgaaagagcagggcagtaactataaggggcatatttaaataggctattaaacaccaatgtgatttttaaaagcaggcaacccctatggataaacacactccttaagtacataatttatttataattttaaatatattttctgaaaagtgaaagagatgtgtactagaaatagtaaagtgtaagaatagactagtctttcaagaaaattcttcattcctttgtgttaaacatgaatgctttttttttactacatgcgtacacactctctagtttatactgaagaaagggaaaatacatctaatatttactaaatgcctactatgtagcaggaactgtcacatgtggcttctaattctaacaatgcttcaaattattattatcctcattttctgtattaaaaaaatgagacattgagaggttaagtgatttgcccaaaattacacagctggttatcatggaggaaatgactccatgctatcttcccacagtgtgctggagttggatttaaaaagagaacaacacaaatgtaattgtgataacgttttttagacacatagattcagttwtaaatttctaaaacctgtgtattacttttttaaacgacccttttacatgttagtatgttacattgttatatttatatattaattttttattatctaggcagtgttttctagcaa

SEQ ID NO: 695794 - DNA, 1336 bp, Homo sapiens
gcagtcttttttgttagatttttgcttgtcttttgggagttagtgttcttcactaacacaagagcatctagcatttacttttcttctagttttttgacagtggatccaacaacagctagagtggcgggcttgaaagacccgctccacattccccataaatgagtacccaatgaaggagccaccctgcgccattttcattttcctcacagtttttcaggagatgaaaaatcttaagcttattgctcttgggccgtttcttttggggagtagtgtaggacttcattctggtcttggaatcacaacattgagctttaacayaggatgaaataggagctccttctaaaggccaaagccagagagaatgcaaccatctctcaggaacttgccagtaaaacctgatctgctgatcagtagaatcttttttttaatcctgaacttggcctctacgttgtccattatatccaaaggttcatactcaagaatgatatttttccccctttagcttttgtatgaatatttctgtccttctgggggttccacttgcagaaatgggaaaaggtgagtttcactcaatggaacagtagggcatatggcaaaggtttctagccaacatgcagcaaaagagagtcatgccaatactgtacttattaaaaactgaaagtttttaatcataaacaactttgaaaatctgagaaatgttattttccttatctctggaacaaatttacacatgcaaatacaaatgctgcagtcaaggcattcatagaatgtgtggtgtccatgtatgggcatggatttcaagatccctagatcaaacactctaaaaaaaaatagaatacaattttgaaaattaaaactctcatgggaaagtaaatagaaatacgtattttaaaaatatgccaacctactcaaaagttcagactcagcactcaacacattagtgccatgcattgttcttcctccacttaaggaactgtcatcaacaatgcctttcacttttccaggtagcatattcactgaagcaagacagtgcaaaaagaaaccaacacaaaaaaagaataaaaaaaagaaagaaatctcagcaaatttaagatcatgcacttgataaaactgttttcttagctagacacagtgtgaaattcttttcacggttttcagtctaagtaatttgatcagatcactattccgcttcagcatgtcacccagtactgctcacttactctgagtgcctccttgaacatgtttcctctcattcaagttcctttccactgatggaacaagaagattaacaggattaggtatctcttattttttcttattcagactgggaaaattg

SEQ ID NO: 695795 - DNA, 1706 bp, Homo sapiens
cctgccgtaaattgtggagttttatctactttgtggtcttttgtgatgaattggattacagtttcggaagtgagaagtaacatagaaaccaaaattttgcattgattcatgacgttagggcatgaggagggacaggtttatgcaatttaaaggaaattcagcaccctgggaacttacaccagctggttttatgcctaagaagtaggtacagggtggaaaaaaaagagaaaccaactacaagccaaaataaagctaaccctctgaggctagtcagtgattcactctggaatttcaaaactgcagaaattgcataggacttccatgcctcatgaacggcactccctgtgggaaagagccagcggactgttgcattcataaaaaaatgatacatgacgtgctctcagcacccctccataggatccaatagattgtctaaaagtcaacatcctctcatgttagaaattaagtctcttaaatattatttttatctttaggcttaaaaattatatctgtatatacccatgctctctaaaatatttttgtttctttagtgtactagtatacatttttaatggtaaaacccacataaggcatttttctctgtttttcctttttttctctaaacttaattagggcacacagttttgatttgtagttttttatggagagaataaataacaagtcataatatatttttatacaaaaatgaccaagagttcatagatttaacaatttttttcaatacaggcaaactgaatgacattaaaaaaaacctgtattcaggtctgattttcagtttgaatttctgcatggatcacattaattgggtgttttaatttccattttgtatgtgttggatatgaacacatactaattcatgtcatataatctatgctgtattgccccatatctatccattaaacacatataagttgagagcctgataaaagaaggacactgcagcaaagagagcaatgaatcaaacacagattccttctcagaagttggatactttgcagagatggtaaggcccaataactagcatcaagtgcagtcctgaatccctgtttgggccaaattttcaatttgccctagagccttaggataggcaaaagacagccctgagttctcttcacccatcctacccctgcctgctcagggcactaccaagtgggagcaatcatggctccatgtgatcactagggagaaggatctggaaatgaaaggataggggagggggatcatttcattacagccctctttattacgccattggtattttcccctacaaagtcccaacaacttaaccaatcatggtagagaaatttcaattccatgtatgtggatttctacagccaagcagaaagtgatgcattcttcatgctgctttaggaagatggcagtcaaagaagagtctgaaccaaagcagtgccatctctggatgggcaaagcttctgcagcaacggtttacagatgccccagcaggagcactagaaagggagccaatcgcattactgagagagctggggccagagagctgggacctgagagcaggtaatatgtgaactaggacgctgattgcagatggcacctagcatgtgaggaaagggtctagctgagctgggagtcattccatgtgacctgtagcagctgcacccagtcagagacaatcacaggactgcaatcaggaagcctagtttgtrtcc

SEQ ID NO: 695796 - DNA, 2433 bp, Homo sapiens
ctgatttacttaataggacgtaatatgggtttttgaataataaatctagtagtagtaggttttactatctaaatacctttttgaagacaaatttgctgtcttaatcacctttatattcccaatcaattttattaagttaaataaaatatcaatcgtagttatttacatagtaaatctgaattaaacagatctttggctatacatagttattagttcctttaactgggtgatattagcacaataaaggaggaaaatatttttataggttctaaattacattctagacattggtgttgatacttttataggcagatatagtcctctctcttatgacgttctaacttccacttacttttttttgaagtcattttaagtgaaatcttataccattcacacaaagtgtaatgtgtaacttatataaaacgtccaaaaagagaacataatctgaaagaggcaaacaaggctaatctgacactaccctccaactactccctgtctgacactaccctcccaccactccctacccaacaatcattgtgctggttttctttcctttccttgttgaaacttgctattagagatctattttgtaagcagaagttctttcagaaggccaaataaatattgatatattgaaaaggaggctgtcttcctacttcctatccattaatacattaragggcactcattcatcaagtcaactctgagaaggtaaaatatgaaagagtttagtttcaacaaggttattaaggaacataaagggcatggttgagtagacactgagcatcaggggaaacctaattacttttgcctgaggctgaggtgacccatcccaagtgacagatgaggccagtagattgtaaggatgaagcaaccagcagaggtcggtgacaatgaccaagggagagccaaccttcccaacgttggtttttaagagctgtcatattgctgagacttgtattcagaaaacaaaacttaagttaccatgtgtatttcaaatgatggctttagaaggagaataaaatcagttatgagaaaggctcaataatgaggaataatctcttagacttcatagcactatatgacattaaaccctgggaaaggtgtgttaaatggttaaaaccaaaaggactattacaaagagtttttcagtacaacaaacaacaaacctacttcttccttagaatagaacctttttcttcagcccagagcaaatgtttcagctgaattactttctggactttataaggtgttgacacaacttctacgtgcacatcgtaaatgtgccaccctaataatccgtgtttaattactgtttattgtaaatgaattttctcagcaatccaatgtggtgcttttcatttttctgtcagtgaggtttcctctctcagaacctttgcccccagctaccaacgatatgaccatccaaagtatgcacccatccagagactgagggggaaccgcacctggaatgctggaggcaacatctttgttgaaattcaagtacataaaaactaaatcagccttttaaaataataggaaaagctactgtgccttcagagcaaatgttttctaaagatgggattatacactcatgagttaacaccactcccattcagaccaaaacaccctttccttggaagactgacagctaattagaattaacagaaacaataattttccccatccagttgttcacatctaatgcaccctagactgacaacatggaaatacaaagaaaagatgtgaaataatttgttagtaccttctgtgtggcaaaatattctagaggtcagtccgaaattgaggcagtttttataaacaatcattctataaaataacatctggatttaatggaatgccaagggatgaatattagagtaacacagtatgcaggaattagaaaaaaaaaaacaagtcaattaatactgttttctctgcaaagatcagatatatcaaatactgtgaaagaaatacttgtgataagtaaagctcatggtaagacagtggtgctattcattatcaccagagaaggacattaccaacaatataagaagctgagattttcaaactttgggtaattaatttcaatcagggctggattcaaggtcagttgtgtaataccagccattattttccctttgctacctttggcaggcatttcacatggctcatccataaataattaaaaccaaagtatctgctgcataagcttaactattgcagggaaatgcagatgtccaagattttatttcacttggaacttctaataaaaagggaaacaaccttctctgtgtattaagaaatgagacttacttcctgcataaacaatacaaacatttctttttaagtgttcaatatgttcatttccatctggacctttctaagctgcttaagttgagaaaaattatgaaagcaaaagccttgcctgca

SEQ ID NO: 695797 - DNA, 673 bp, Homo sapiens
atggcttggcacaatacgattcttctaatatgtcttgggattcagctgatctatgaacacagagcccaattaaaaccctctgtagctgcagcaaacatgccaggaaaggagctagtcacagatcctggagctctggggaatttcttctagatacagagctttggggagcaggctagaggaagccactgaggcccacacgcagcctctgctcctgggagagccctgaagggccatgagatgcactcaaggagatgatactgtggtcacccaaggctccagcccaggctgacccccatggcctccttggcacactccattcccagccacatcagggcagtccccatcctcagagaaggctacacaacttgacagtttctgtgcctgggtctgtgctagccctttagcctggggtgccacccactccaccttccaatgattaaacccctctttcccttcaaggtactgtaaatgctccttttstgatgcccctggagcttctcccattgcagtcctataccatgttacttgcatgttgctgagtaaatcccgatcctggtttgggattcagtagtagtttccacgaccctctctcccactgaacaactttgccactctcctcaaggggagggaatcttcatttacgaattgcctggagcacagaagtcacggtacc

SEQ ID NO: 695798 - DNA, 673 bp, Homo sapiens
atggcttggcacaatacgattcttctaatatgtcttgggattcagctgatctatgaacacagagcccaattaaaaccctctgtagctgcagcaaacatgccaggaaaggagctagtcacagatcctggagctctggggaatttcttctagatacagagctttggggagcaggctagaggaagccactgaggcccacacgcagcctctgctcctgggagagccctgaagggccatgagatgcactcaaggagatgatactgtggtcacccaaggctccagcccaggctgacccccatggcctccttggcacactccattcccagccacatcagggcagtccccatcctcagagaaggctacacaacttgacagtttctgtgcctgggtctgtgctagccctttagcctggggtgccacccactccaccttccaatgattaaacccctctttcccttcaaggtactgtaaatgctccttttgtgatgcccctggrgcttctcccattgcagtcctataccatgttacttgcatgttgctgagtaaatcccgatcctggtttgggattcagtagtagtttccacgaccctctctcccactgaacaactttgccactctcctcaaggggagggaatcttcatttacgaattgcctggagcacagaagtcacggtacc

SEQ ID NO: 695799 - DNA, 673 bp, Homo sapiens
atggcttggcacaatacgattcttctaatatgtcttgggattcagctgatctatgaacacagagcccaattaaaaccctctgtagctgcagcaaacatgccaggaaaggagctagtcacagatcctggagctctggggaatttcttctagatacagagctttggggagcaggctagaggaagccactgaggcccacacgcagcctctgctcctgggagagccctgaagggccatgagatgcactcaaggagatgatactgtggtcacccaaggctccagcccaggctgacccccatggcctccttggcacactccattcccagccacatcagggcagtccccatcctcagagaaggctacacaacttgacagtttctgtgcctgggtctgtgctagccctttagcctggggtgccacccactccaccttccaatgattaaacccctctttcccttcaaggtactgtaaatgctccttttgtgatgcccctggagcttctcccattgcagtcctatascatgttacttgcatgttgctgagtaaatcccgatcctggtttgggattcagtagtagtttccacgaccctctctcccactgaacaactttgccactctcctcaaggggagggaatcttcatttacgaattgcctggagcacagaagtcacggtacc

SEQ ID NO: 695800 - DNA, 673 bp, Homo sapiens
atggcttggcacaatacgattcttctaatatgtcttgggattcagctgatctatgaacacagagcccaattaaaaccctctgtagctgcagcaaacatgccaggaaaggagctagtcacagatcctggagctctggggaatttcttctagatacagagctttggggagcaggctagaggaagccactgaggcccacacgcagcctctgctcctgggagagccctgaagggccatgagatgcactcaaggagatgatactgtggtcacccaaggctccagcccaggctgacccccatggcctccttggcacactccattcccagccacatcagggcagtccccatcctcagagaaggctacacaacttgacagtttctgtgcctgggtctgtgctagccctttagcctggggtgccacccactccaccttccaatgattaaacccctctttcccttcaaggtactgtaaatgctccttttgtgatgcccctggagcttctcccattgcagtcctataccatgttacttgcatgttgctgastaaatcccgatcctggtttgggattcagtagtagtttccacgaccctctctcccactgaacaactttgccactctcctcaaggggagggaatcttcatttacgaattgcctggagcacagaagtcacggtacc

SEQ ID NO: 695801 - DNA, 603 bp, Homo sapiens
gaatcctatctgtaaaacttcagctgcttctggcacaacacaatcctctctccccatgccagggttggagtttgatggtttacacatgttcatttcaatctcctgttattgggaaagactgtcgccacccaaggtctggagagccgacagacctttcagagggggttcacaagggcccattttgtagaggccacacatttctttagataaaattatgaggaaatgaggaaaggcaagagaaaatggctttcaaatagacctattatctgtgcatttcatgtgctcctaaatttctataaatgccratgactcttgattccagagaggtacagtatttactgctggttcaccttccattggttgtgattcctaacacattaatgttatgtctttcgggctattgagttatttaaaaaatcacactcagggctccagttaaatgtcagcttctttgtgatgtcattcctgacagtcctgtccttgttagaaataactgattcttactctgccctctgaatatgcagctatgtagaagttcccaatagatggtagatattaataacagatgtgtatgttttgaagtaatgttttataagagtatta

SEQ ID NO: 695802 - DNA, 788 bp, Homo sapiens
ccattcacagtccaaccagttgccttctgatgagaatgcatcacaccgcatgtggggagggccatgtgggaattctcacacctgttgcctagatgcctgtgtctggttagaaccactgcatgctttctttcagtgagtatttacgctaggcaccaaaaaacaatggcaagaacaaacattagtgtsatgtcagtaagaatgaaacctaagttactatacagattaaattataagtttctctggatgtaaaaaagttcccaaatgtagtgtaacaggttagaaattcacttctcaatcacgcaaaagtccaagcaagcatggggaccttgcttgtgatgtgtgtctttcttatgaattgaattttgtatctccccgcaaacctgcaaaattcatatgttgaacccctgatgtgatgacatttggagatggggtctttgagaggttaaaggttaagattgaatgaggtcataagggtggggcctttatgcaatagggtatgtgtccttataagaagaagagacaccagagatctctgtctgccttgtgagggcacagcaaaaactcaaccctctgcaaaccagcaggagagccctcaccaggaaccgaattggctggcaccttgatcttagacttcccacctccagaaataagctcccattgagaaataagctcccgttgttgaagccatcctatctgtggtattttgttatggcaacccgagctgactgagacaatcgtcttgcctgtcagccttgaccttgctgctctgtggcatccccatttccatg

SEQ ID NO: 695803 - DNA, 631 bp, Homo sapiens
catatttcacctcaatattaatcgttttttcttggttttatagatgtttcacttctctgatgaaaatttcctctttcagcagaattgtaaaaagagatggatgggggaaagaaagggagaggaagatgtgggggagagagagaaagtgagagagagagaggagaaatttcatataatctatgtgttttaacagaaataaagaaaatggagagaattcaggtataaaatattcaaatctttctataactaatatgggcaggcctgaatttaaatgcttcctgttaaccttttcattctcttcttgctcaacatactcactctctgtcagattttcctcatgcctgaacaataacatatatggagccaatattttgccttatgacaacctgtttaataatctgctgtaagaaatatactgtctctcaaatcagggaaaacttgtgtataatagaaacttactgaagcccagtgaagtttaatagaatgaaagttgttcaaatatacatgtaaatagcataggtgaaaataatacacgttatctaagagttagttacacacgtattgctcagcaaatgcatctgttactccaaatattttctaattgcayatacccaatctggtcaggccattc

SEQ ID NO: 695804 - DNA, 866 bp, Homo sapiens
caaaaagtcatgtaacacatctaattctaaaaaatctatgcaataacctgggaatttacaagactgtgtgtgatcaaatggtatttatatgcccgattctgtaaagatacaggtaagagtattaattttaaaacaaattctattaatataactcgatggagtttcctacatcacagcatgacagataaatactattagtgaaattaaatgacttttatgtaggaaagctgtagtatttcaastcactaacaagcatctattagccatacctttacgtttagtggcagaaagaaggtcatttgcattctctaattccttctccaatctccctattttctcaagcatttctttttccatttgatctttggattgctccacctctagaagatgatctagtattgctttgttggctaaaaaacaattttaaagaccaaatattcaaacatacagttaaattttagtttacaaaatgcaacagatcagtcacttctcccctcagcagataatattaaatttctagagaggcttcagctgacagtatctattgaaagttcttgctctacttataattttggaattgtcttcgcctggtgtttctccttttgatgtctcttacccacaaagaaaataaggaaacccacagggtaaaaagtggttctaggtatatctttgatttcgattttgatctttaatcctaagtaaaggaaattattggaaaagaccataaatataatacattgaaaaaagcaaaaatttgaggaaataaaagactttacaaaatgcaaataaagaggatgtcttatttataaagtaagagtattcaaacattatcagagtaaatgtttcaaaaaagaaaactttctcat

SEQ ID NO: 695805 - DNA, 866 bp, Homo sapiens
caaaaagtcatgtaacacatctaattctaaaaaatctatgcaataacctgggaatttacaagactgtgtgtgatcaaatggtatttatatgcccgattctgtaaagatacaggtaagagtattaattttaaaacaaattctattaatataactcgatggagtttcctacatcacagcatgacagataaatactattagtgaaattaaatgacttttatgtaggaaagctgtagtatttcaactcactaacaagcatctattagccatacctttacgtttagtggcagaaagaaggtcatttgcattctctaattccttctccaatctccctattttctcaagcatttctttttccatttgatctttggattgctccacctctagaagatgatctagtattgctttgttggctaaaaaacaattttaaagaccaaatattcaaacatacagttaaattttagtttacaaaatgcaacagatcagtcacttctcccctcagcagataatattaaatttctagagaggcttcagctgacagtatctaytgaaagttcttgctctacttataattttggaattgtcttcgcctggtgtttctccttttgatgtctcttacccacaaagaaaataaggaaacccacagggtaaaaagtggttctaggtatatctttgatttcgattttgatctttaatcctaagtaaaggaaattattggaaaagaccataaatataatacattgaaaaaagcaaaaatttgaggaaataaaagactttacaaaatgcaaataaagaggatgtcttatttataaagtaagagtattcaaacattatcagagtaaatgtttcaaaaaagaaaactttctcat

SEQ ID NO: 695806 - DNA, 866 bp, Homo sapiens
caaaaagtcatgtaacacatctaattctaaaaaatctatgcaataacctgggaatttacaagactgtgtgtgatcaaatggtatttatatgcccgattctgtaaagatacaggtaagagtattaattttaaaacaaattctattaatataactcgatggagtttcctacatcacagcatgacagataaatactattagtgaaattaaatgacttttatgtaggaaagctgtagtatttcaactcactaacaagcatctattagccatacctttacgtttagtggcagaaagaaggtcatttgcattctctaattccttctccaatctccctattttctcaagcatttctttttccatttgatctttggattgctccacctctagaagatgatctagtattgctttgttggctaaaaaacaattttaaagaccaaatattcaaacatacagttaaattttagtttacaaaatgcaacagatcagtcacttctcccctcagcagataatattaaatttctagagaggcttcagctgacagtatctattgaaagttcttgctctacttataattttggaattgtcttcgcctggtgtttctccttttgatgtctcttacccacaaagaaaataaggaaacccacagggtaaaaagtggttctaggtatatctttgatttcgattttgatstttaatcctaagtaaaggaaattattggaaaagaccataaatataatacattgaaaaaagcaaaaatttgaggaaataaaagactttacaaaatgcaaataaagaggatgtcttatttataaagtaagagtattcaaacattatcagagtaaatgtttcaaaaaagaaaactttctcat

SEQ ID NO: 695807 - DNA, 616 bp, Homo sapiens
ctcaggtgatccgcccgccttggcctcccaaagtgctggaattacaggcatgagccaccatgcccggccatgtccccatttactgaggatatactgtgtgctaggtctggtgctgtattttacccagtccactcaccaacactaagatggaagctgtcacgatgcccatttacagatgaggaaactggggcacagagagatgagagaatgcgccaaagaccatgtgctaatacgcagcagagctggatttgaacccaggcttgtctgagcagagcccatggtctccccactgtactaggaaggtagcaggcactgtgggctggatgcctggcctgtgctgaggttcagtgtcrttttcctgatcttacagagagggaggttaagtaacttgggcagggtcataaacccacaaatggcagagtcgggattcgaacccatgtctctgattccagagttcctcaccttaaaccacatctggctgcctttgtcgtgctttgctcctgttgcatgctgcaaagccaagtaggttaagacaggctaggttcctgcagggctgggttgcccgagacctgggagaggtcttccagaaggcactgctggccttcctcgcccaggg

SEQ ID NO: 695808 - DNA, 3425 bp, Homo sapiens
tgcggcacagcagctggctttgcagaggcagccacggctcacgtagatgatgaagacgtttgctccagagcagtcctaaagaggccatgctgcgtaggacatagagcagcaatcttgggtccaacagccccagctgtgtcatttaccagctgtgttacctggggcagggatgaccctgggcaagtccctgcctcaggccccatgtctgtcacatggaggtgatcacgcctccattgtacaagtgagggttagcttcaatagctaaatagcctcatagctaaagcctcagaggtcccttcccatgtgccaggctctgtgctaaggagtttacagtgaccctaagaggaagatctgactgttagcccattttccagatgaagaaactgagacgcagcatggttagatgaaaccgggccaggacctggactcctgcagtccagctccccgccagcctcactgaaccctgaggcttctcccaatctggtccctcggtgcctggggacacacagcacacggcagcctaaagccaggaacctgagctgggaagcctcactgtgcagctatccacagtgttttgcaaatgtagggcccttgcttgaggcagaagaaaagccctctttgaggtggtgttcagtgtggcctgcagctctgggtcttgcattccatggatttttggcccctgacttgggcttggcagctactacctcattgttctgcaacttggcaggagccgcgggatcccggggacgggcagtcctcagtgttaccccgaggtgcctgcacgcatgtgctaagggtcttttccctgctccgtgtggctcgtccttccacgtcccctttgccttggcctttctgcatctgaaccccctaagaagcagtttctgacaggaatttccagagcacagggcttgggtttctgttggggtgtggaccaatagaacaaaatgccctaaaatccaatacccatggagagccccaagaggcagtagattccttggaacaaagagggagtttagagtcactgagatctggatttgaatcctttctctgcagcttatcagcctaatggcatcgagcctcttcctctgagcctcggtttccccatctataaaatgggtctaccaatagccccgagggtgaatgggaaagacctggcccacaggaaccctcatcccttcctttctcccttcctccttccccctcgcgcctccccacctccttcccctcagcagggaccctctctggctctcggtgggtaggggcttgcagagtcctccgtggctgctgctttcctagaacagggaacatcaacacctgccggctcctccctggaggctaacggtgccgcaggttccattaggttctgaacagagcagctcgtaatgactggggtttggcagcaaaggcaccactggggtagacagtggtgctgcatcagcttgctgtggtcagtggggcagagtctccgggggctcctgcccctggggaccctgtggaggaaatgggcccttgtggtccgccagccctgagatcacccctgtgcatcagcagcacaggccccattctcaagtggagagagggcccattcggggtggagccagctggagagatgatggtgttgctgtgtaagaacctgtggggagtgcagtaccgtagttttggacaaatatgcagttgttggttcaaatcctggctccttttgtctgtgatccttgggacccgggcaaatctcttaacctcttcgtgcctcagttttctcatctgtgaaatgggaccataatagaccttacctcatggagttgttgacaaaatgagatgggctaatagaggtgaagagcgtagggcagggcccagcatgatcagggccctgcaattattagctcttattcccggtcccccttgcactgctcctggagccctgcccatgtgaggccacaggtgagctcctgagagtgtgcagaccatggcatctggctgcagctgttggagaatgcggtcagcgccacgtggggagggcaggaatgacattcccaagcacccgctaggctcctccccagtgggatttgcccaaggtctcagctggtgagtgacagggtctagattccactgccacagtttccagtacatgggaggccccagggcaggtgggcgggtaagccgatgtgtgcatgggtctcgcaggggtgacctgtgggccaaggctggtgccttctgagataaagatggaaccttctcactgaagacagttctccactctttccctggaggtctccctaagggcagaggacagtgagcatgtcaccctgaggggtctaggggtgcagctggaagcagctgcagagcctgcaggaggctcagttttatcttcaaattcatgcgcattttacattctgctctctctcatattccccctaacaaagatgcctggggaaggtgctcgtgtttatctgtttatcctggggctctttataccctgggtcttcccctgtgtcaccttgggatgtcacctgcgctccagtgcaagaactcggcacaaatggtggagacaccgagggtgccattttcccatctgcatttgagggcttggcagggagagcactgagcgctgggagacccaggtggggagatgaggcctgtgctgaggcagaggcaggggtggggagggaagaggcaggtgcacccataatgcccctccgtgtgacactgatctgacagtgctctgtgtgcacagactaaaaagacaacaagagacctactgactgatctgtccacactaggatgaaccacatcaaatggccaagtctgtgggtcaaagttggttgagtttctgcagcttcccaagcaggagactgcatgagccaggcttggcaggacttgcagccagcgagggcccccctgaccctgagttgggcgtgttctgcagtccataccatccacttccctgcagtctcacatcctgtcatctattttgagagagcaggtttaccccagaacagtctgtggaaggtgtggggcagggaggagagctgggccgccctgaggacacagagggagaagggtgctgggagccagcctgcaagttctggggagcctcagggtgcctttgagggcacaacttgggaggccaagctcagcgggtgagttagggtttggtggacatcctttgacatgtcaaagggtgtcacagayatccctggagcctgagaggtctggtcggcccaccactgtggctggaaacagactacagtggggaggaaggaagagtgacttgcaccctgagacacagtggccggacctctaggagctggctgtgacagcccggagggtgttgatgcctttcccacctcctggaacacccccgtgttaatgggggcgtgggtctacctgggagggagtggcagggctgctggcccagcagaccgggg

SEQ ID NO: 695809 - DNA, 601 bp, Homo sapiens
ttgagtctaggaggtcaaggctgcagtgagctatgatagcgccattacactccagcctgggtgacagagcaagaccttgtctcaaaaaaaaaaaaaaaaaaaaaaaaaaagaaagaaagagagggcatccctacacatcctgtgaccattaaaaagataataaggaagtattgtgcccaaagttatgaccacaaatttgacaacttagatgaagtgggcatattccttgaaagacacaaactagcaaagttctcaagaagaaacaaagggaagcggaaaagataactattgggtactgggcttcatagctgggtgatgaartaacctgtacaacaaacccccatgacacatgtttacctatgtaacaaaccttcacatgtacccccaaaccaaaaatacaagtttaaaaaaagagggaaaacattactttttctctcttttagtttgagaaactagcagttaattttttttttttttttttttttttgagacggagtctcactctgtcgcccaggctggagtacagtggtgccatctaggctcactgcaagctccacctcccaggttcacgccattctcctgcctcagcctacccggcagc

SEQ ID NO: 695810 - DNA, 601 bp, Homo sapiens
ttgagtctaggaggtcaaggctgcagtgagctatgatagcgccattacactccagcctgggtgacagagcaagaccttgtctcaaaaaaaaaaaaaaaaaaaaaaaaaaagaaagaaagagagggcatccctacacatcctgtgaccattaaaaagataataaggaagtattgtgcccaaagttatgaccacaaatttgacaacttagatgaagtgggcatattccttgaaagacacaaactagcaaagttctcaagaagaaacaaagggaagcggaaaagataactattgggtactgggcttcatagctgggtgatgaaataacctgtacaacaaacccccatgacacatgtttacctatgtaacaaaccttcacatgtacccccaaaccwaaaatacaagtttaaaaaaagagggaaaacattactttttctctcttttagtttgagaaactagcagttaattttttttttttttttttttttttgagacggagtctcactctgtcgcccaggctggagtacagtggtgccatctaggctcactgcaagctccacctcccaggttcacgccattctcctgcctcagcctacccggcagc

SEQ ID NO: 695811 - DNA, 659 bp, Homo sapiens
gcagattaaagaatagttaaaatcatacaaatctaatttcttttgttgttgttgttgttgttgctttattctgtaacatcttgatgctttaatccttagcatcagttttttattattaaacatatattaccaacataagaaagattgtgggaaaaacagtgacagccaggaaatgattygtgctcaaatggtacatgttaaagctctttcaaaatccataaatttttcataggttcatagaggtccgtgcctttaatcaattcgtgtcaaggggattttaaaataagcataaaggtaatggaatgctatcaatcataattggggctggaaagaaccatcacagcccatcagctaccgctcttgcattgtgtatgtctgtgtgtgtgtgtgtgtgtgtgtgtgtgtgtgtgtgtgtgtgtgtgttacgtgcacatatgtgttggcatggtgcatttctgttttctatttttgattactgccatcaatgggacaatttgaggactttatatacagatagacatgaatttaaaaataaaacttaattgtggctgcaatttcttcctttcttgccccttttataataattactatatctgtggtgatagtgacttgtctcatctgtgcaatagactagcttcatcagaacaaaagcattttca

SEQ ID NO: 695812 - DNA, 636 bp, Homo sapiens
tggcagtaaatattgtctttgatttctacattgtcatatgttgccttaaattttgttttagtagttttaatagatttttgtcatcactactaaggttacttgattaataatgaagttatgctcctttataggggaaatattttatgtcagttataactacaaatgctaatgtataatcatgtaatgatttaggctttttattattaaaatctagaaataatatcacatgaaaataaatgtcataaatcactcaatttgaagccacagatataatcaatttttaacattttagatataagcataattggatgtatcaaatcattccagatgtagagktcaagagttctaatttcttttttaaaaggatacccacatcggctgggcacggtggctcacgcctataatcctagcactttgggaggccaaggcgggtggatcacctgaggtcaggagttggagaccagcctgaccaacaagctgaaaccccctctctactaaaaatacaaaaattagccgggcttggtggcaggcacctgtagtcccagctacttgggaggctgagacaggagaattgcttgaacccaggaggcagaggttgcagtcagccgagattgtgccattgcactccagcctggg

SEQ ID NO: 695813 - DNA, 679 bp, Homo sapiens
ctacattgataaccaataaacaggaaaatgctagaaaagtccatggattttaaagcctatcaaatttaactgtggacggcttaatgttgttttaaaaagagaaggtggtaaatgtcagctatatttaaaaatccagttttacacaaattcaaattttctggaagcagcacttatttgtcaaaataaatgaaaaaaatttcaaacatgaaaaatgaaaaataatttatatgctttcctcaacaccaacttaccagaaaggaaatcagytgaaaatatgtaaggttctctggaatgcttctgatcacactaaaatattattgctaattacacaaaaaacaaaaaattcttatctacctatcagtcaaaaaaaaaaaaacacaaaaacataaacaaaactaggtgttatctttcagccagcccacataaagactacattgatgatctcagaaaacaggcacaactacaactttgccaaaacaattctcagtacaggccacactcgatgcttagctacacagtgactctttgttaaatcttatcactaccactgacagccttgtaaatatataaacaagcaattcaatcgttagcttatcttttttaaatattttaaagagctaaggaagagtacgtatatctaagtgctgaaattctgagagtggtctagaactccattcct

SEQ ID NO: 695814 - DNA, 635 bp, Homo sapiens
actgtccatataattgtatgcatggcccccaaaactgcttcttcgtttttttaatctcctgggtaactgtcagacttaactttgtcaatataaattctcacagggtgggcaaaaaagagtttccagaacggagcagtagattgagattratacaggcataaatccatacctgcgtattaaaaatctgaatctgtaaaattaattttctgggtgcttattcaacctcatttattatttgagtatctacaatacacagcaaccgttcatgaagaaacttagctagctaatcaaataagacaattcagaaacatcaccctacagtatttttcaaaacactgtatccatatccatgcacaacccaatcgttgggttatatacgtggaataaaatagtaaaggcacaatcctagaggggaaactcaattctgacattcatggtctcatgggtagggaaagatctcatatcttaaatcagcagaaataaaggcttcagcctgaagggaaagctagatcattgtttattgcactccaatttaacctccaccatggaagctgtcactacctgactggcttgttagctgtttatttcgtcgggagaggattccgtcttgcgaatcctaacgagttcgggaaaaa

SEQ ID NO: 695815 - DNA, 2208 bp, Homo sapiens
aggttatatttgattatgatagttaacagtgggcccatgaagatttagaaaggtaggttgctaatctactccaattcagtagtagccctcctctcctctttttctcctcctgctttgtctccttctttcctttctttttcctcttcctaccctacatccacctttttcccttttctttctagaaaagtatttctcgcattttgattcatgaaagaattacctgggaagcctattaaatgcagatctccaggctctaaccacagttacattttcttaggtcaggagtagggcccaagaatctgcatcttaacaagtataccagttgattctgatcccactttgcaaaacactatcttagaaaatgtagaagtcttcattttccttatctactaacatcaactgagtgaggtgtgaatggtgttatctacaacatcctccatttcccagtgatatttcctgatcctacaaactcaaacttatctcattgattcagacttcacatacattttgagatacagagcagcttctggcttgtttcaagtatgtactgcggctaagaaacatcttcccaaggcttcagtgtggtggcctgactcacagtgtggtgacttggtcttattacacatcataacaataattatcaccatgttatgaccacaacaactgccacttattaagcccctactgggtgccagattcagtaaaaaatattttactagcattgtctcacttaatactcacttaatacagcaattccataaggcagatattatcattagccccactatcccaatgaaaaaacagattaggagaggttatggtcaaggtcataaacttacaagtggtagagccacttgaacccaggcagctctaactgcccttccactaaggctcctaatttactattctgccaaatatttcctataacaataataactaccacattaataatagtaacactacattactacttgcaccaaaataaattccagaaggatcaaagttttwaaggtaaaaagatgaaacatgaaaagtattagaaggacttcaggtaccaggcaaaatgaagaaagcccactacaccctatctctccctaatctctagttacaactgaaaactatgaacaaaatatgaaaagcagttacctaaaaactaaacaaaagcatacagatagggaatgggggtcaaatttggagcagcaaaccaaacaaaaatacatttcccaagttttcctcccttttctcttttctcttatgcccagtcatagaactgttgtggtggcagtgcaggcagcccaaactgtttctctggccaggataattggggaaagaggcccctgtagtcgaaacatgtgagaagaaaccctgttgttgtttttctctctttctccttttgcttctttgcctttaaactgtgggtccagtcatggaaccgtgttacagcagcaatggtataacagatttaaaactctaagtaaaaccctattttcctggccagagcatcagaaaaaaaaaggtcctctgtgagctgggtcaaaggggaaaggaattccctaattctgtgtatgagactgcacaagtctcaggcttaatcttgagctgtgcatacacaggaaagacccagagcaacacagaaaaggttttgggaactgaattattatttaatcgccccagtttaatattaacccctaagtggcacaaacaattaggggttaatatgaggcttgggtgattaattagacagacccaaaacaccatagcaaaggtttgaaaaataaatttacattggaacaaccacccacggaaggggatgaagaacttgcaatttggatctaatgggatctgctggaacataaaaatcaacattttctatagattttaatgagacccagagtcataaaataatatttttaaatgtcccagaatacaatccaaaattactcaatatagaaaaaagaagaaaaacatgtctaattctcaatggaaagacaaaagatgccaacccttagatgacccagatgttgcattatcaaacaaagatgttaaagcaactatcataaccatagtccatgagataaagatgaacactcttgaaattaatagcaaggtaaaaattatcagcagggaaataaatcctataaaaagaaccaaatggaaatgctgaaatttaaaaatatgtaatctgaaatagatgattcactagatgga

SEQ ID NO: 695816 - DNA, 2208 bp, Homo sapiens
aggttatatttgattatgatagttaacagtgggcccatgaagatttagaaaggtaggttgctaatctactccaattcagtagtagccctcctctcctctttttctcctcctgctttgtctccttctttcctttctttttcctcttcctaccctacatccacctttttcccttttctttctagaaaagtatttctcgcattttgattcatgaaagaattacctgggaagcctattaaatgcagatctccaggctctaaccacagttacattttcttaggtcaggagtagggcccaagaatctgcatcttaacaagtataccagttgattctgatcccactttgcaaaacactatcttagaaaatgtagaagtcttcattttccttatctactaacatcaactgagtgaggtgtgaatggtgttatctacaacatcctccatttcccagtgatatttcctgatcctacaaactcaaacttatctcattgattcagacttcacatacattttgagatacagagcagcttctggcttgtttcaagtatgtactgcggctaagaaacatcttcccaaggcttcagtgtggtggcctgactcacagtgtggtgacttggtcttattacacatcataacaataattatcaccatgttatgaccacaacaactgccacttattaagcccctactgggtgccagattcagtaaaaaatattttactagcattgtctcacttaatactcacttaatacagcaattccataaggcagatattatcattagccccactatcccaatgaaaaaacagattaggagaggttatggtcaaggtcataaacttacaagtggtagagccacttgaacccaggcagctctaactgcccttccactaaggctcctaatttactattctgccaaatatttcctataacaataataactaccacattaataatagtaacactacattactacttgcaccaaaataaattccagaaggatcaaagttttaaaggtaaaaagatgaaacatgaaaagtattagaaggacttcaggtaccaggcaaaatgaagaaagcccactacaccctatctctccctaatctctagttacaactgaaaactatgaacaaaatatgaaaagcagttacctraaaactaaacaaaagcatacagatagggaatgggggtcaaatttggagcagcaaaccaaacaaaaatacatttcccaagttttcctcccttttctcttttctcttatgcccagtcatagaactgttgtggtggcagtgcaggcagcccaaactgtttctctggccaggataattggggaaagaggcccctgtagtcgaaacatgtgagaagaaaccctgttgttgtttttctctctttctccttttgcttctttgcctttaaactgtgggtccagtcatggaaccgtgttacagcagcaatggtataacagatttaaaactctaagtaaaaccctattttcctggccagagcatcagaaaaaaaaaggtcctctgtgagctgggtcaaaggggaaaggaattccctaattctgtgtatgagactgcacaagtctcaggcttaatcttgagctgtgcatacacaggaaagacccagagcaacacagaaaaggttttgggaactgaattattatttaatcgccccagtttaatattaacccctaagtggcacaaacaattaggggttaatatgaggcttgggtgattaattagacagacccaaaacaccatagcaaaggtttgaaaaataaatttacattggaacaaccacccacggaaggggatgaagaacttgcaatttggatctaatgggatctgctggaacataaaaatcaacattttctatagattttaatgagacccagagtcataaaataatatttttaaatgtcccagaatacaatccaaaattactcaatatagaaaaaagaagaaaaacatgtctaattctcaatggaaagacaaaagatgccaacccttagatgacccagatgttgcattatcaaacaaagatgttaaagcaactatcataaccatagtccatgagataaagatgaacactcttgaaattaatagcaaggtaaaaattatcagcagggaaataaatcctataaaaagaaccaaatggaaatgctgaaatttaaaaatatgtaatctgaaatagatgattcactagatgga

SEQ ID NO: 695817 - DNA, 1121 bp, Homo sapiens
gacttcaaatgaggtatataatagatttcaaagacttattttaaaatgcccccagttcaataattattttttaaaaaatcatatttgataactcaaatggttaccaaatatttaaaagaactagaatcgattacctcatggaaagaatgttcaactctgcatatagaatttcttttagtcattctagggagagtgatgaaaaagcagtaaattattattgcactcagtttttagtggatgaatctggaagcaatattaccaggatcagtgtaactctgtatgttaagtcataccatcatgctctttgctgttgcataatttagcagaaaatggtatgaagtttaacaaacaaacaaggtgcatttaaaaataaatattgctaaaatgtagctataaacttagaaaatcagtggatactatcaaatgatagcataaagtcccaatcccatttccaaacatctttatcggtacccagagattttctggatggggaatagagctagtttctagtgatgcaatwaagtgtgaaaaatggtcttgtactcagttgcttacttgtttgaaaaacagatcttgaacatgaaaaaaatgaacaataaatcacagaattttcacccaatctatttcttcttaggttatgttgattctggcaaaaagttgaaaggcagaaatgggaaaaaaaaaaaaaaaccatcaagccagggctggaaacacaattcagacagtttaagtgggttttcagagaaaaaattcaaaggaagggagaactaatttactttactgttaagtgtttagagagctttacttatagtaatttcttatgctgagtatcagagtttttaaacttttaaatagaatttaaattgaaatagctacaatttcctgacagattacaatgtgccaaacactttacataccttattttgcatccttacctcagtcttcattgcagagattattgttataattttacaaatgataaaatggggacttgaacaggttagatcacatagtgtagtagattatattactgttcaccctatttgcccctctttgtgtgaatccaggcatggtcatagcactgactttggccaatgaaatgtgagcagaaatgatgtgtg

SEQ ID NO: 695818 - DNA, 628 bp, Homo sapiens
tccccaatttggcaggaaatagaactttggctgagatgtagaaaagcgctgcccaagaatgtatagtggttggtcattactgctccccttacctccttaaaatagwgtatctacctcagttgtaagcaccttcacttcctcacatgtaaaggctcttgacctaggaacatgggcttttatagccactgctcttggtcccgggggttagtataaccacattgaacaaagttcatgcccagaagtcaccctaaagaattttcattctcgtgtcacttattcattcagcattcactaagaaaatttagtctgatcccattttgtggtagacagtcctgtagaacctttgcatcttcggtagcaatagacaatattgatggggcccaaggtataatatcgtgagtttcccaagtatgttgaatatcctatgggaaagtaaagggatgctttatttttagtggaggaaatgaaaggcttctcgcaatttcccccacacctacaccaccactgcattcctaggcaacgaaattcttttgtcatttaagattaggttcatattctctagaattttatgtaaatggaatcataccaaagatatacagtgtgtgtgtgcctggcttctttcatttag

SEQ ID NO: 695819 - DNA, 664 bp, Homo sapiens
aatttctgcttctcatggatcatggatctacatatgcagatgctgatgtggaaacagaaacttccacaatgctgacctggaaacagaaacttctacaggggtaactgctagaaaaagtagatcttaaaatacatagttcatcctctctggcataaccagtatgtatatagttaagtaatccaaaatcctttaaccagtaatttatcaacttgcgyaaccagcaacatgagataaatacttcttttatttcaacttttctatttgttcttggttttatggtaaatatgcacttaaaatggaaatggttttgatagtagaggggtagaagacaaatgatgagaagagaaggaaaagagccgaagtcaaagacaaagaaccgcccctgcgcccagcaaaaaaaccaaaaaacaaaaaaccaccttaggagataaaaatattgcaagatgagtaaaaacccagtatcggcagggaaaaggaaagggtcttacaactgaatacaattatttcaggtaattgttaggagcaacataatttttcagcataactatgcagatttcagcatgtgaagcaagagaaaaaataataaatccagatgatcctgaggaaagatggctataagaaaataagattaaatgttcatatataattaaatttaatagataat

SEQ ID NO: 695820 - DNA, 643 bp, Homo sapiens
tggaaaattctttcattctatttctgaatttaaaaatcaattatgaaaacattttaaaattgygtttttaaacatcctaacataaaaatttttaaacagttttgctaaaaattgattctggtgattcaatgttaattatgttttacataggtaagttcatatgccatctatttgctgattctcatgagatgtttgtgctaataatttgtgggttttgttactttaagttaggtttagtgtaaaagtctaggttcatcctatttatgaatcttgagaattgctgatgtgtctttgaatattgtttcagaattatgccattcttttactgaatacacatttatgcctatctttcccctttcctcatctgcgactcagtaaataatatctaagggtaccttcagatctaattgtctattattttacaccaacatcttcagaatgcactagccagaaaatactgcttcagtgatacaaaacatgaacaatgtctgtgtgagtgaaattggactgtgcaattatgttctcttttataaccctgatgatgtttctaaaataaagcttgtatgctcagactccccaaaggagtaaacatactagagtttcttcatcctttgaatgatcataattagataaaataggcacc

SEQ ID NO: 695821 - DNA, 630 bp, Homo sapiens
agtgactgagaaagggtttaaacaaggtgtatattgagtttctaaataaatcacagatatcgaagaagtgctctaggacactggttagggtacctttttttcttgttttttttttttkggggtggggtgttaagacctcaaaagcacagacaaccaaagcaaaaatagacaaatgggattgtatcaagctaaaaaacttctggaagcaaaggaaacaatcagcaaagtgaagagacaacccagagaatgggagaaaatatttgcaaactatctgcctgacaagtgattaaccaccagattatataagaagctgaaataactcaatagcaaaatgtaataataatgatctgattttaaaatggtcaaaacatctgaatagacatttcttaaaagaagacatacaaatgacaaacaggtatatgaaaaagtgttcaacatcactagtcatcacagaaaggaaaatcaaatctacaatgagatatcatctatccccagttaaaatgggctttataagaaggcacacagtaacagaagctggtgaggacacagagaaaggggaacacacatacattgttggtagaaatgtaaattagtacagccactatgaagaacagtatggaggttcctcac

SEQ ID NO: 695822 - DNA, 600 bp, Homo sapiens
ttttcattagcacatctcccctttttaaatctaatgcttattcagatattatcctgctcttgtttttcaatggcagttactaacraataatataattaaatagatcctagtttattatttttaataggcttacttgtacaaccttttaactgcagggttcttgactgtttttaggcaatttagcagaaagttaagagtttgactgttacaggcatattcatgtcttgggcacagactatttttaaaatggcttgagatttttgcaaaaggtgattaacgaggtcatatggcttcagtagttccttcttaattataagaacatttcccccctcataatggtctcttagcttaaatacagcttagatacacattttaaaatattatttgtttcttcttcaatctctgtttttctatagcagaaacataaagaatatatttagttaagtgttgttttccaaattttcagatacagtcatagaatttgtaatcaactgcttttaaagcagttttttttctttttgctaaagagtaatgaaaatgggtatttactgataggagatttttcaattacactcaaattttacttgaattattatgatc

SEQ ID NO: 695823 - DNA, 1240 bp, Homo sapiens
ctgcacagttctcaatgataatttatttaataattctatgcaatgagcttttgtttttgagacaggttctcactctgttgcccaggctttagtgcagtggcatgatcatagctcactgcagcctcgaatttctgggccaagaggacctctctcctcagccttctgagtagctggaactggcacaacaaattttcttgatattaaatgaaactcgtgtgttgtgtgtatatgtgactgtgtaatgtgtgtatcaaaatggtattgccaagtttgggatcgttccagaaaagaatatgtgagacagatgtttgcaagaggtagtttattggggattctctcaagaggtatggcaacctagaagatcatggcagctagaagagtatggcaacctagaagaataagacaaggatagaggcatccattcttggcaatccaaagatacattactgagctcgttcactgccatgaaaacccacggttaaatcctactgagacactgcaatatctaagtaaaataagcactcagaattgtcactgtaatataaaggagaggagagtattcaccaactcctgtccttcattggtaagaggtcacctcatggtttgttaactttcttacttccaagttcattcatgcatcagagtagttgggtagattcctggagacattccatgtggagacgcccagagcccaggagctaaaacagggaaactcatggtgcaactcatgtaaggtaatgcaaggatacccttagcatactctatttccttgcctcacttatgcctggtgtaaaagggtaagttgagaagatataagactgagcaccagagcagtctcattaagggtccctatagaaaacaaagcatagacgggatataataattggaaggtgttccgcttaccaaaatttgacatatgaagaccacagggatgaagcagtaatgagagcttagtaaattgagtgcttrccacctgaaaatgtcaagaagagtgtgtgcagacagcaagagatgagtagtttcagcttcctctagaggagtgatggccttccaatacaggagacagcagtaggctgcttgacagagagggagctggagattaagaaactctcctgtggccctcagtgtccgacagagatttctctattcgctgaaatgaaaatccaagattgcacgaagactgctatcttgatgtgttctcacacatcagctttctaaagcagacagcagagtggtgaaa

SEQ ID NO: 695824 - DNA, 1422 bp, Homo sapiens
ttccattctgtaaatatagaaagtagtttcacttccacccttttctatatttttgcagttttatttactatactcattttgcctattgaattaaatgtagtaaacagtataaaatattcattatttaatttatttacaaatactttctcagtgatttttgatgtcactgctatgacatatcaagtcagtttcccttcttaggtataaacactaatgcaaattttcagcttgaaaactctgaggaaaaatatgtccaggcaagcaaataaaccaacaagcttatggccaccagtcagcaattgaaaatgacagctctgaatgccatagtatttgtgccttaaacatggctatcagttctgtattatatgtgcctacactcatctttgggtacttatggaccaggttagccttttgcgtgacttgccttctgattctgttttgtgttcagcaccacattkctctgcaagcacaggtgcaatgttttgcaactcagtctatttggctgggtgagactccgatatgctacctggctctacctagcatcctcttcttgtgttgagaggctgccacattttcttatgtctctggacactgagtaaaaccaagattgcaagcagctaatacgtggcttttgcattcggcctctcttctctttttattgtcataattcccattccataaaaagttattttctctattttattctgtattgtcacatccttgttcccctcattaataaatatgcatcaatcaattctccaaaatatgctaaactgctgattgtaccagttgataaagagtgtcacagtggtaatccccaaaaacatgcgattcaagtgttaacaatgtttgacagagtgctggtattcatgtgcatgcgagtacatgtgaagatgtgtatctgggtattagcctgttcttacattgctataaagaaataccggatactgggtaatttataaaggaaagaggtttaattgagtcacggttccacaggctacacagggagcatgatgctgccatctgtttggcttctgggggggcgcctcaggaaatttagaatcatggtggaaggcaaagagggatcaggcatctcacatggcagaagcagaagcaaggtggtgggggggcactacacacttttaaatgactagatctcatgaaaattaattccctatcatgagaacagcacaaaaggctggcgctaaaccattcatgaggaatccacctcccatgaggaatccacctcccatgaggaatccacctcccatgaggtctgacctccaatattggagattacaatttgacatgagatttgggatgggacagatatccaaactataccagcctgtaataaaaaagtgttctctaacagcatacattcacacttcaaacaaatctatttaaaataaccgcatataa

SEQ ID NO: 695825 - DNA, 1422 bp, Homo sapiens
ttccattctgtaaatatagaaagtagtttcacttccacccttttctatatttttgcagttttatttactatactcattttgcctattgaattaaatgtagtaaacagtataaaatattcattatttaatttatttacaaatactttctcagtgatttttgatgtcactgctatgacatatcaagtcagtttcccttcttaggtataaacactaatgcaaattttcagcttgaaaactctgaggaaaaatatgtccaggcaagcaaataaaccaacaagcttatggccaccagtcagcaattgaaaatgacagctctgaatgccatagtatttgtgccttaaacatggctatcagttctgtattatatgtgcctacactcatctttgggtacttatggaccaggttagccttttgcgtgacttgccttctgattctgttttgtgttcagcaccacattgctctgcaagcacaggtgcaatgttttgcaactcagtctatttgrctgggtgagactccgatatgctacctggctctacctagcatcctcttcttgtgttgagaggctgccacattttcttatgtctctggacactgagtaaaaccaagattgcaagcagctaatacgtggcttttgcattcggcctctcttctctttttattgtcataattcccattccataaaaagttattttctctattttattctgtattgtcacatccttgttcccctcattaataaatatgcatcaatcaattctccaaaatatgctaaactgctgattgtaccagttgataaagagtgtcacagtggtaatccccaaaaacatgcgattcaagtgttaacaatgtttgacagagtgctggtattcatgtgcatgcgagtacatgtgaagatgtgtatctgggtattagcctgttcttacattgctataaagaaataccggatactgggtaatttataaaggaaagaggtttaattgagtcacggttccacaggctacacagggagcatgatgctgccatctgtttggcttctgggggggcgcctcaggaaatttagaatcatggtggaaggcaaagagggatcaggcatctcacatggcagaagcagaagcaaggtggtgggggggcactacacacttttaaatgactagatctcatgaaaattaattccctatcatgagaacagcacaaaaggctggcgctaaaccattcatgaggaatccacctcccatgaggaatccacctcccatgaggaatccacctcccatgaggtctgacctccaatattggagattacaatttgacatgagatttgggatgggacagatatccaaactataccagcctgtaataaaaaagtgttctctaacagcatacattcacacttcaaacaaatctatttaaaataaccgcatataa

SEQ ID NO: 695826 - DNA, 1422 bp, Homo sapiens
ttccattctgtaaatatagaaagtagtttcacttccacccttttctatatttttgcagttttatttactatactcattttgcctattgaattaaatgtagtaaacagtataaaatattcattatttaatttatttacaaatactttctcagtgatttttgatgtcactgctatgacatatcaagtcagtttcccttcttaggtataaacactaatgcaaattttcagcttgaaaactctgaggaaaaatatgtccaggcaagcaaataaaccaacaagcttatggccaccagtcagcaattgaaaatgacagctctgaatgccatagtatttgtgccttaaacatggctatcagttctgtattatatgtgcctacactcatctttgggtacttatggaccaggttagccttttgcgtgacttgccttctgattctgttttgtgttcagcaccacattgctctgcaagcacaggtgcaatgttttgcaactcagtctatttggctgggtgagactccgatatgctacctggctctacctagcatcctcttcttgtgttgagaggctgccacattttcttatgtctctggacactgagtaaaaccaagattgcaagcagctaatacgtggcttttgcattcggcctctcttctctttttattgtcataattcccattccataaaaagttattttctctattttattctgtattgtcacatccttgttcccctcattaataaatatgcatcaatcaattctccaaaatatgctaaactgctgattgtaccagttgataaagagtgtcacagtggtaatccccaaaaacatgcgattcaagtgttaacaatgtttgacakagtgctggtattcatgtgcatgcgagtacatgtgaagatgtgtatctgggtattagcctgttcttacattgctataaagaaataccggatactgggtaatttataaaggaaagaggtttaattgagtcacggttccacaggctacacagggagcatgatgctgccatctgtttggcttctgggggggcgcctcaggaaatttagaatcatggtggaaggcaaagagggatcaggcatctcacatggcagaagcagaagcaaggtggtgggggggcactacacacttttaaatgactagatctcatgaaaattaattccctatcatgagaacagcacaaaaggctggcgctaaaccattcatgaggaatccacctcccatgaggaatccacctcccatgaggaatccacctcccatgaggtctgacctccaatattggagattacaatttgacatgagatttgggatgggacagatatccaaactataccagcctgtaataaaaaagtgttctctaacagcatacattcacacttcaaacaaatctatttaaaataaccgcatataa

SEQ ID NO: 695827 - DNA, 1356 bp, Homo sapiens
aggcaacaaactcttctcaagttctctcatctttgacccagagattttgatgagagagagagagagagagagagagagagagagagagagacagagagaaatttcataagaacagagagctccaaaactcttttcccccaaaattgacttatatgtagaatatataaagaactcttacaatgtaataataaaatgacacatattctaattaaaaatggtcaaaggaccacaatagacatttttccaaataagatatttcaatagctaataagaacatgaaaagatgcttgacctcattagccatcaggtaaatgtaaaccaaaaccacatgatatatcacttcaccctcaatgtgatggcaaaaattaaaaagttaattaaaaaaagcattagtaaagatggggagaaatttgaagcctcataaactgcgattaagaatgtaaaatggtgtagccgctttgaaaagcagtctatcagtttcccaagagcttaaacaaggacttatcatgtgatctagtatttccactcctcaagaaaaatgaaaagaaaatgcctatgcaaaaaaatagaagcttgaatgttcatagcaacattattcataataaccacaaagtagacacaacccagatgtccattacatgatgaatgtataaataaaatgtaatatgtccattcaatgaaatattgtttggcaataaaaataaactactactgatacacgctaccaaatagatgaatcttataaacattgtactaaatgaaagaagtcaatcacaaaagaccacataatatattatkcaatttacataaaacatctagtacaagcaattttatagagacagaagatagattggtattggccgaggcctagagaagttgggagcaaatggggagtgactgctgatggatacggaattactttttggggcaatgaaaatgttctaaaattgattgcggtgatgcttgaacaacttcacattctaagcatactttaaaagggtatattttatggtatctgaattatatctcaacaaaactgttataaaattatacgcaaacacattgaacacacacacaaaggtgtgtatttggaatccttgcttgccatagtaaatgaacacctgaatacctagattgattaaattataaaattttaatataagagactaggcatctaccttgaaaagtaatatatctgaacgtattgacctgactagatatccaaaatatctttctctggatcttttaaaaattaaatatgtttcaaacaattgtgttgtaatatttctctttaaaaattatgtatacaattttccatggcatattagtatttaaactaaaaaatatctagaaaaa

SEQ ID NO: 695828 - DNA, 1356 bp, Homo sapiens
aggcaacaaactcttctcaagttctctcatctttgacccagagattttgatgagagagagagagagagagagagagagagagagagagagacagagagaaatttcataagaacagagagctccaaaactcttttcccccaaaattgacttatatgtagaatatataaagaactcttacaatgtaataataaaatgacacatattctaattaaaaatggtcaaaggaccacaatagacatttttccaaataagatatttcaatagctaataagaacatgaaaagatgcttgacctcattagccatcaggtaaatgtaaaccaaaaccacatgatatatcacttcaccctcaatgtgatggcaaaaattaaaaagttaattaaaaaaagcattagtaaagatggggagaaatttgaagcctcataaactgcgattaagaatgtaaaatggtgtagccgctttgaaaagcagtctatcagtttcccaagagcttaaacaaggacttatcatgtgatctagtatttccactcctcaagaaaaatgaaaagaaaatgcctatgcaaaaaaatagaagcttgaatgttcatagcaacattattcataataaccacaaagtagacacaacccagatgtccattacatgatgaatgtataaataaaatgtaatatgtccattcaatgaaatattgtttggcaataaaaataaactactactgatacacgctaccaaatagatgaatcttataaacattgtactaaatgaaagaagtcaatcacaaaagaccacataatatattattcaatttacataaaacatctagtacaagcaattttatagagacagaagatagattggtattggccgaggcctagagaagttgggagcaaatggggagtgactgctgatggatacggaattactttttggggcaatgaaaatgttctaaaattgattgcggtgatgcttgaacaacttcacattctaagcatactttaaaagggtatattttatggtatctgaattatatctcaacaaaactgttataaaattatacgcaaacacattgaacacacacacaaaggtgtgtatttggaatccttgcttgccatagtaaatgaacacctgaatacctagattgattaaattataaaattttaatataagagactaggcatctaccttgaaaagtaatatatctgaaygtattgacctgactagatatccaaaatatctttctctggatcttttaaaaattaaatatgtttcaaacaattgtgttgtaatatttctctttaaaaattatgtatacaattttccatggcatattagtatttaaactaaaaaatatctagaaaaa

SEQ ID NO: 695829 - DNA, 612 bp, Homo sapiens
taaaattaaagaagtaaggcattacaaatcgagtttttaaacattcctatttagtcccttaaaaacataaataaaacaccaatgytttttaaaaatctgcacaggcatacctcagagatattgtggattcagttccagatcaccacaacaaagcaaatatcacaataaagcaagtcaagtaaattttttggtttcccagtgcaaataaaagttatgtttatactataatataatatacacatgtgcgatagcattatgtgtttaaaaaatgtacatgccttaactttaaaatgctttattgctttaaaaaaaatgctaacaatcacttgagcattcagcaaatcataatcttttcactggggagcagtaatgcctggatgttgattgctaccaactgatcagggtggtggttgctgaaggctggagtagctgtggtgatttctggaaataagacaacaatgaagtttgctacatggattgactcatcccttcacaacagatttccctgtggcatgtgatgctgtttgatagcattttacccacagttgaacttcctccaaattggagtcaatcgtctcaaaccttgccactgctttatcaactaagtttatg

SEQ ID NO: 695830 - DNA, 1150 bp, Homo sapiens
ttttttttttkagacagtttcactctgtcaccaaggctagagagcaatggcgcgatctaggcttactgtaacctccgcctcccaggttcaagggattctcacgcctcagcctccccagtagctgggattacaggcgtgtgccaccatgcccacctaatttttatatttttagtagagacgatgtttcaccacatagcccaggctggtctcaaactcctgagctcaagcaatcctcctgcctcaccctcccaaagtgctgggattacaggtgtgagctaccgcactcagcctttttcccattttttgaaggtttggtcaatcctatcaatttctctctgactcatacgttctttcttttccagtcaagcatcttgaaacagagtaaaaatatatttcttttatttgtaccggagtctgcaaacttttcctgaaaagggccaggtagtaaatatttaaggctttgtgagccatagcagtctctgacaaaaagtcagaccttttgtttttatttacactcttttaaaaatgtaaaaataattcctcgcttgagggcagtacaaaaacaggcttcaaaatgtggacgctggctggacctctgacatacttcacgaaggctggcttaacacctaatactcatctgaagctacattagtgaggctgccaatgcccataggaaacccgatttagtctttggcttttttgcactttgtagcatttgcattgctagccactcccacattaaaacgcccctttcctttgtttctatcatggcaactctctcctaatttctccttagttttcccccactttcatctcatcctcctttgttggcttttgtacctatacaatctttctaaatgctggagtttcttaggatttcatccttttccttctttcctaatcccccatagtttccctttgtgatcacatcaactctcacgccataaaatgccaccatgattcccaaatctgtattattggccctagaattctttcataaaccccaaacctttattcttcaagtcttactggatctcaatagccaagtgttctaaacactcaatctcaactgctctaaagtgaaacttttttaaaaacccgaaacagcatccatttttctcaagaacagataaaggcagaaaccttagta

SEQ ID NO: 695831 - DNA, 1150 bp, Homo sapiens
tttttttttttagacagtttcactctgtcaccaaggctagagagcaatggcgcgatctaggcttactgtaacctccgcctcccaggttcaagggattctcacgcctcagcctccccagtagctgggattacaggcgtgtgccaccatgcccacctaatttttatatttttagtagagacgatgtttcaccacatagcccaggctggtctcaaactcctgagctcaagcaatcctcctgcctcaccctcccaaagtgctgggattacaggtgtgagctaccgcactcagcctttttcccattttttgaaggtttggtcaatcctatcaatttctctctgactcatacgttctttcttttccagtcaagcatcttgaaacagagtaaaaatatatttcttttatttgtaccggagtctgcaaacttttcctgaaaagggccagrtagtaaatatttaaggctttgtgagccatagcagtctctgacaaaaagtcagaccttttgtttttatttacactcttttaaaaatgtaaaaataattcctcgcttgagggcagtacaaaaacaggcttcaaaatgtggacgctggctggacctctgacatacttcacgaaggctggcttaacacctaatactcatctgaagctacattagtgaggctgccaatgcccataggaaacccgatttagtctttggcttttttgcactttgtagcatttgcattgctagccactcccacattaaaacgcccctttcctttgtttctatcatggcaactctctcctaatttctccttagttttcccccactttcatctcatcctcctttgttggcttttgtacctatacaatctttctaaatgctggagtttcttaggatttcatccttttccttctttcctaatcccccatagtttccctttgtgatcacatcaactctcacgccataaaatgccaccatgattcccaaatctgtattattggccctagaattctttcataaaccccaaacctttattcttcaagtcttactggatctcaatagccaagtgttctaaacactcaatctcaactgctctaaagtgaaacttttttaaaaacccgaaacagcatccatttttctcaagaacagataaaggcagaaaccttagta

SEQ ID NO: 695832 - DNA, 668 bp, Homo sapiens
tgagctgagattgcaccactgcactctagtctgggcgacagagcgagactctgtctcaaaaattaaaaacaaaacaaaacaaaacaaaactcataagttcacagactgttccttacccattgggaaatgttgattaaagtaactaacggccatacttccctttagaaagggccagtcatgagacaggttcatgaaagtccttaacttaggagtagatgcactcagtagaatggcccacaatgcaggatcagaatgtgatggtgtctgagaatcaycaccagacacagagggcactctgtcctgaggtcttgccaacacagctctcaaacgtgcagctgagtccctgtgttgctttttcggtgaatcagaagagattcagttgcagcctttggtgtgctagttctggactacagttagggaaactatgcacgactgcagaagaaatggggatggggagatgtgtggggagagttgttgaaggagctccgtctagcatcccgttagcttctgccactagattctccacctttccctaagggctgtaaaccaccagggccctcaagctgcttgtgctcccacgcttccttctcctacaacttaaaacaacatggacttgtagtagaaattaatacaaccaacacataggaggcactcactacaaacaaaga

SEQ ID NO: 695833 - DNA, 636 bp, Homo sapiens
attcaaagacacaaatgtaaatgaactaattaccaaacatcaaatccaaattgtatattttacaagaggtttagcaatcaactgaattcagttggtagtcaacaggagttagtacttatcctgaaagagtattcattcactgtcttattagacatcattgataaaatagactatgtaaactttagctataaatataaaagagagaaacaaaagctatttaatactttcagcatttaagagtgaagtcaggctttgctgcaaagtagaaacttggtctggaaaaagaaacattgttcttgagttgaattgctagacatcaaaaagtacttacatgtcatggctgaccttgctggtttagaataagaaacatctcttgaagatatttcccaagcatttctcctcctccagttacttacttgactcctccctcaatcactcctgctgcccacgaacttcattaataagagtaggaaccacgaactttctaccttrcaacttcttcagagacagtatcaaaacaacaacccatttacacctccaaccaacttgtgtatcaccacagaatagtctcaggaattaagagtgtccactgtcagctacttgaagagttaaaaatgactactgttggctgggcac

SEQ ID NO: 695834 - DNA, 611 bp, Homo sapiens
aatttcacccatgttactgtattttgggaatagcctctatgactattcagaaaatatttataatctcaaaataagagtgattgaaacacacataaaaaaatccagaggcagaagttatagggcttcctccctatcgaagagtccaacattcttctgttttctactccatcattattgattcctgtatctattatcaagtcaagtcatacatactccaagatggctactgaagcctggaccaaatctgctctttcaattcaacagatggggaaagacatcaaaagggtacattgtcaactgaatagrctttctttaaggaaccttcctgaaagttgaatacatccattctctttacctctctttaattagaatctagattatatggcaacaacaagatacatgggttatatcattttgtagcttggtttaccttataaattgtatatgactttatatgggaagaacatgaggataaatgttgggtaggcaactagcaagctctgttgaagtctctattgttattaggccacactaaattttcacattttttctctattttgggggtacagaatattatcagttaggaacaatcattcttaaatgtatagcta

SEQ ID NO: 695835 - DNA, 624 bp, Homo sapiens
gaatttatttctcgtagttctggaaactggaagtctcagatgagagtgccattatggtttaattctaaaggctctcttctgagttgcagatggcaacttcttgttgtgccctctcatggtgactggggcaaggcagctctatggcatgtctttcataagggcactaaaatcctgttcaaaaaggctctgctcttatgacctaatcactcaccaaagggcccacctcstaatagcatcaccttcagggttaagactttaacgtatgaattttttaggaacataaacattcagtctattgttccctgcatccagccctcctagtactctgtgaacctcttccttttttgctttcttcatcctgtctctggcctgctgttagtaaaagactgtctataccacttacgtttccttaagcacctattcagtatgtcacattataccaactccccccctataaaccacataatacagagaattctgaaacccaattaccaactcaaagatgtattatggaattctgccaatctttcttcttgttgactttctggtgggttatttatctggaattgatttttcatctagataaatcactcatgtgtgtcattgtaactcttggactaaatt

SEQ ID NO: 695836 - DNA, 624 bp, Homo sapiens
gaatttatttctcgtagttctggaaactggaagtctcagatgagagtgccattatggtttaattctaaaggctctcttctgagttgcagatggcaacttcttgttgtgccctctcatggtgactggggcaaggcagctctatggcatgtctttcataagggcactaaaatcctgttcaaaaaggctctgctcttatgacctaatcactcaccaaagggcccacctcctaatagcatcaccttcagggttaagactttaacgtatgaattttttaggaacataaacattcagtctattgttccctgcatccagccctcctagtactctgtgaacctcttccttttttgctttcttcatcctgtctctggcctgctgttagtaaaagactgtctataccacttacrtttccttaagcacctattcagtatgtcacattataccaactccccccctataaaccacataatacagagaattctgaaacccaattaccaactcaaagatgtattatggaattctgccaatctttcttcttgttgactttctggtgggttatttatctggaattgatttttcatctagataaatcactcatgtgtgtcattgtaactcttggactaaatt

SEQ ID NO: 695837 - DNA, 626 bp, Homo sapiens
ctgtgcctggtttataaaaaagtatttaaacatatatagaaaagccctttaaaaatcagtaattcctgaaattttgctcaaagtcaatttaattttcttacatgggatattttctaattcatatcttcactatgacttaaagttcattttcaagctaatatatatttttacagctgtttaccagagagaaacccaaattttctatacccctaaattagttagtttgtgcactcttatctccttaaagtgatcatataatgggggaataaaagtgaaaccatttggaagtatctttatagtgcccaaaggagaaattgaaataacaaatgattattagagtgttcatttcatggaggtatgaacatttgaaaagattaagtatgagtacttaagtgtgtgttaagtgtttctgcgaattaatgatagcgcagttgaaagctgaaactaaaaatttttcttttttttctgcaaaattaygtgattcacaactacaaaaaagcttttagtttaaacaacatattctgaaattattttatatatattaggtttgtaatttcaatacatcatttcagtttaataatttttcttgctaattctgtgagaaacattaactccttatataaaaa

SEQ ID NO: 695838 - DNA, 626 bp, Homo sapiens
ctgtgcctggtttataaaaaagtatttaaacatatatagaaaagccctttaaaaatcagtaattcctgaaattttgctcaaagtcaatttaattttcttacatgggatattttctaattcatatcttcactatgacttaaagttcattttcaagctaatatatatttttacagctgtttaccagagagaaacccaaattttctatacccctaaattagttagtttgtgcactcttatctccttaaagtgatcatataatgggggaataaaagtgaaaccatttggaagtatctttatagtgcccaaaggagaaattgaaataacaaatgattattagagtgttcatttcatggaggtatgaacatttgaaaagattaagtatgagtacttaagtgtgtgttaagtgtttctgcgaattaatgatagcgcagttgaaagctgaaactaaaaatttttcttttttttctgcaaaattatgtgattcacaactacaaaaaagcttttagtttaaacaacatattctgaaattattttatayatattaggtttgtaatttcaatacatcatttcagtttaataatttttcttgctaattctgtgagaaacattaactccttatataaaaa

SEQ ID NO: 695839 - DNA, 574 bp, Homo sapiens
attagccactcaaacagcatttcttcaatgtgttcagcacttgccatatctgcaggggtaggaaatgaatgatgtctgctttccttccaatttccaaaccttttatatgctcctctgattctatcatctatattggaatcctactggcaagggagtccaggaaatgtagttcctagatgtccagtgcttgacacacagcaagacattaaaagggcaatagctgttttaatacaaaaagaaaacattccacacaaccagtctacctctctggatgatcagctttgaaacacacctttctatctacattaaagtatagaaacaatcataataaaatcatgtatatgttccaagtataattgcataagtgaacaaaagatcattcttttccttaaaaggaaagacacgaaaacccatcaattattggagtcatatctgggtgctctagagaatgttctggtttgccaacatacacccgttaccccataggagtctcatttctttatgatattcaggatcaatcaccaccatggccatayggaaccacagatagccagatgaacaggaagatatcaga

SEQ ID NO: 695840 - DNA, 632 bp, Homo sapiens
ctcttttctaaagtaaattaatacatacatgtgaaaagtatctgctctgctactcaagagattttccttgatgaatatttatggcagttctgggtttcgctctcttgaacgtttttctctgcttagaaacttcttggccacatctgagattggactgagaaagaaaaattatgtccttaaaacctgcctaacatttacccaagtmattgtagtttgttgttcatttatttaggtaataatacacttgctgcaaaacacacagcaggttttaagttttcttgcttctaataagttttgtgtgaaaatgattaaacaaagattatatctttacatagttggtttgttttgttgtctgttaatctttgaaatcttgtttgttttctggtgtttactggccacagaacctgccatttctatcaatataatgacaactactttaaagcagggcctcaaaatgagagttagagatgagacaccactttggagggatagattagaaaaataaacttcgctggtgctgccgcgctcccccaggcattaacttagcgagtggatagtgcttttgtgagaagtagatgctcctatctctaggcacagccagcttcagtacatgttgaataaagctgaagcaa

SEQ ID NO: 695841 - DNA, 638 bp, Homo sapiens
aactttgaccctggaatctagaaccctgtaggtaagctacagcagaccactgaatgtgctacactgtgaaacatttyagtgaattatgtatgagtatttatgcaaatgcatgtctggggcaatatataatatagcccattttccatgctggttatgtgacgtgttgagtacaagttgtaggaaggacctttcaaagcttctttctaccctaattatcttattaactttgcctcagttcccaattcctaagcaccatgatacctatcttcctttaatctttcttctcactatgtattttccaggattgagactatgttataattctctagtttcaaccctttcttaagtgatgtaggtatttttcatggcattttgcctgtccaagtatttagctgatgcttaacccattgacttgacatatccttgctcacataaagatatagacagagtcttctactactacccgtctctttccccacggaacagttcctctgtacatccccttaggtaaaatgatcaaaatatgagaaggagagacaaagtgtggttagcatgagtaaaccacattaatacagagagaacatttgactgcgtcaattttgctctatatgctttttgtaagtatatttaccagcctt

SEQ ID NO: 695842 - DNA, 638 bp, Homo sapiens
ttttgaacttgccagcttccmtaatccatgtgccaattccttcaaataaaataaatctttctctcttcctccctctccctctccacacacaccacccccccacacacacacatcctatttgttctgtttatctgtaaaccctaatatgataaggtatgattccctttaagaagttctacaacagagaaaactaacttatggtgatagaaatgagaataggggttgtttctgaaagggtgggaattgatgagaaaggggctaagaaggagattttgagattagagaaattatatatatatatatatatatatatatatatatatatatgaatgtgagttacatatctgtatgcatttgtcaaaatcaatcaagctgaatacttaagagctctgcattttaccatatgtattaattaaccaaacctcatgtcttaaaaaaggagaaaagacataggtgttgccattgtagatttggagaaatattatgcaaaattttataacataaattcttcataatataatgttacttattaaaagactgtacaattatatataaccttctacttgtactacaaacaaaagtgtgtgcataaaaacattgaaaagagaaacacaaaaatagtaatgatctttattgat

SEQ ID NO: 695843 - DNA, 640 bp, Homo sapiens
tctataccttcaaatttctttgaatacaagaagctagaatatgatgacgaaaatcaacttccaaacagttttccttctgggaaaggagagaggaaaattggactggaggaggaacaaagaaaagttaaaatattatctataattttttttatagaattattctaaagcaattgtgatcaatcgttaaaattgatcatgatgacttcatgggtgtctgtaatgtatattacattctgtctttctttttaaaattagaaaggaaaggcacacagcccagtttgaggataatgttgaaggcctggaatagagggcttgggttgcttatgttgggagccatctctcctcttttctcctttgaactcacattgaatttcctctacttgtctttaattctgcattgattagcccagtacaccttttactttgttttcattttatctctaaaataattttacgtagtgagaaaggcaggcattactatggcattagtttccttaatgctaataaaatgaggtgactttgcaacatgcatgtactgataggccaacctctggattaagtctaggactggtcatctttccagtttactctgttgagcttgtcatagaagcaggtgtacamcacgtcagagtggtagcat

SEQ ID NO: 695844 - DNA, 665 bp, Homo sapiens
catctttttagttggacttagaacattttgttaatactttatttagttatataagcattttgtataatcatttctatcatctctctattccatggatttaactttatttctggctgaatcatgtcctatagttaaaagatatttgartgtttctttcattacagcataggagcctttaatcccataatcagcataataacgtgatgtttaggtgctactttcaaaattcatctttgcaaagaacatgcagctgaaattttccatggtattaggaaatttaaggtaaatacataatgttctcacaaagtatttcaatttactcaattttccaatttattcatttagagagttcaacttattaatcaataaatggtgcaaataaagccaataacatagcttcaatctcgatatgaatcagtttctccgaattacaaaatttcggattcagtgttataactgcaccataacttcataaaaaaaaaaaactggagaaaattgatgccttaatttaacttatatttctaatgggacattagctctccctgatgagagggcaacagaaacagtgcatcatgtaagcacagggccccagttggctttattttaactgagacatttttaagtggatttggagctaaacctaagaatagaaacacctttaaaaa

SEQ ID NO: 695845 - DNA, 571 bp, Homo sapiens
ctgcacccagcccctcttatagttttattgtgagaacaagtatggtcaatggaaaataatgtagatgatagattttacttttaaaaaattaccattatggtcacattaygttagctgtataagacaaaaacatcctcagtttataaaaaaagcattcaactttctattaacagagagtgtgctcaaggaattaaatcaggaattatcaacaggaaggggattacttcccccagggggtactgtgaaattttatgggacctattccattgtcacaatgatgagtggttgctatatatttgctgagcagggaccaggcctcttaaacagcttgctgtgtgccagacagtcctgcaaaataaagaattttcctgagtccctcatttttcataactctccaaagtcctgctgcatgttcatataagtgaaaacttcataattatctgagcttatactgtaacttacactgttttacctataaacacaaatattcttttggacagtcttatcatataactaaatatacaaatttgtattctaatgctcacaataaccatatatatatatatatata

SEQ ID NO: 695846 - DNA, 571 bp, Homo sapiens
ctgcacccagcccctcttatagttttattgtgagaacaagtatggtcaatggaaaataatgtagatgatagattttacttttaaaaaattaccattatggtcacattacgttagctgtataagacaaaaacatcctcagtttataaaaaaagcattcaactttctattaacagagagtgtgctcaaggaattaaatcaggaattatcaacaggaaggggattactkcccccagggggtactgtgaaattttatgggacctattccattgtcacaatgatgagtggttgctatatatttgctgagcagggaccaggcctcttaaacagcttgctgtgtgccagacagtcctgcaaaataaagaattttcctgagtccctcatttttcataactctccaaagtcctgctgcatgttcatataagtgaaaacttcataattatctgagcttatactgtaacttacactgttttacctataaacacaaatattcttttggacagtcttatcatataactaaatatacaaatttgtattctaatgctcacaataaccatatatatatatatatata

SEQ ID NO: 695847 - DNA, 596 bp, Homo sapiens
tttcaatttaatgactgcatctgtccgtgtaatccacatatatttatgcgtaatttattttacattccagatgatctcaacataagtggcatcatagcagccgtagtagttgtggccttagtgatttccgtttgtggccttggtgtatgctatgctcagaggaaaggctacttttcaagtaagtgaatttcacccttctttggcagataactttctatggctatggagtttatttatgagatactgtttctcctaggaagttgtttttttgtttgtttgtttgtttttcagacagagtcttgctctgttgcccaggctggagtgcagtggtggcaaaatctccactcaatacaacctccacctcccaggttcaagtgattctcatgtctcagcctcccaaatagctgggattrcaagtgtgcaccaacacacccagctcatctttgtatttttagtacagatggggtttcgctatgttggccaggctggtctcgaactcctggcctcaagtgatctgcctgccttggccttccaaagtgctgggattacaggtgtgagctattgtgcccggccctctcctagcaagttttaacaaa

SEQ ID NO: 695848 - DNA, 761 bp, Homo sapiens
acctccatgattgaaacatctcccaccaggccccacctctaacactgggattatacctcaacatgagatttagacaggggcaaatatccaaactctaccacctggttttcaggtcattctagagcactagcagctaccctggcttaaatcctgaaaagtatcaaatttatgtgtttttgaccgacataagaaaacaggtcaaagatttgcttagtccattgtaccatttctgccttaactacttgggagctactgggaattttctatttttaaaatcaggttgtatcaagattgtttggtgtttttcttttttcttttctttyttttttttttttttttgagacggagtcttgctctgtcgcccaggctggagggcagtgacgcgatctccgcttgcggcaagccccacctcccgggttcacaccattctcctgagcgcctcagcctcccgagtagctgggactacaggcatccgccaccatgcctggctaattttttgtatttttagtagagacggggtttcactctgttagccaggatgatctcgatctcctgacctcgtgatccacccacctcggcctcccagagtggtgtgattacaggcgtgagccacggcgcctggccctgtttggtgcttttcgaccaaaatctctaaacaactccaaaagccataaacagactaagctagaaaaaggcagacaaagatattagaaactaagcttgagtaactcaagtctttaatgctgtcttactagtctcag

SEQ ID NO: 695849 - DNA, 647 bp, Homo sapiens
ttcacttaacagaagaactcccacaaggcttaaaatacctgcaagaaataaaactctatcttgaaatgcagtggcatctaatactatcttatccaattttcagctggatttaaaatttaagtgcagatatttcaatatacagtgtatattcacacaaaaaaaatttaagcaagaaatgtttcttttaatcataacataatgttctctctaaatatcagctttattataccaatagatatggataggttacatttatgccttttataattaaaagtcaacttattggtttacctttaacattcctcattagtagtaaacattagtttgctaatgtttcaaatgcaatggaggatyggaatgatgatataaccataactaagagagcaactaaggttaattgagcagttactgtataccaggaattatgcaaagtgtttcctataaattaattaatttaatcctcacaaaatagttaaatattggataggtcttattaatccctattttacaaaaagaagcaatgaggattcaaggttatttgatttatacaaatttacacagttagtagcttgtaaggcaaagatttgaatctggacagcttgagtttgtaaattgaacacttactgggcatgatggtaagcgtttaa

SEQ ID NO: 695850 - DNA, 636 bp, Homo sapiens
tgaaattggcagctgtgagtaattaatctttaacatctcttccttacttaagtagaaaaagggcctccatcaaaatggtagtgagaattttatccatcagagacaacacactttcagttgcagatgagacatggaaaatattctcacacaaaatgtggtcaagaaaaggagtaatagtacttatttttctaattgaatacataataatattaatatacattatctgtaaatattcatattgatcatgggagaggtaatcagaatatataatattgacagctgaattgaaattaatatatttttctaaaaaaatgagattatgggtaatgaaccaatattggctaggtgaaaattgtctagtttttacaactagaaatgcttcctctcaaacacttatcaaaatcacaggtgtattttaggctgctatatttgccaaatgaaaacaggatactgacattcatacacacaaacatgcaagcatatgctgaaattttcattccagatgtctacaaaagagaacagataatacgaagttcgttacctatttcaagttacctctgagattccttacgctgaagacaaatattctattaaaaaagagtccttaaatargccataagaacccgaatcctttca

SEQ ID NO: 695851 - DNA, 710 bp, Homo sapiens
gttgggttcaaatccaggcctagtcgcttgccagcaaggtaaagttaagcaaaatatataagcctattttagtcttgttttccttaagtgttaagagaactaataatactttcattatttatttaattttataatttctggtgactaataaggaggtaatatayaatgcatccaacacatacaatcatttgttgaaaattctttgtgaggactcaaaaaagtaacacataaatagcatctaacacgtatagtttccactctataaatagtagctatgctagtggattaattttttttttttgagatggagtctcactctattgcccaggctggagtgcagtggtgcaatctcggctcactgcaacctccacctcccaggttcacaccattctactgcctcagcctcccgagtagcagggactacaggcacccaccaccacgcctggctaacttttttgtatttttagtagagacagggtttcactgtgttagccaggatggtcttgatctcctgacctcatgatccacccatctaggcctcccaaagtgctgggattacaggcgtgagccactgtgcctggccactagtgtattaattttaaaattgtatttatgaatgacacaagtctaaaaatatatttccagatttgagtacctaatagtctattatataaatagctggtttgcatttattatctttcatatttcca

SEQ ID NO: 695852 - DNA, 710 bp, Homo sapiens
gttgggttcaaatccaggcctagtcgcttgccagcaaggtaaagttaagcaaaatatataagcctattttagtcttgttttccttaagtgttaagagaactaataatactttcattatttatttaattttataatttctggtgactaataaggaggtaatatacaatgcatccaacacatacaatcatttgttgaaaattctttgtgaggactcaaaaaagtaacacataaatagcatctaacacgtatagtttccactctataaatagtagctatgctagtggattaattttttttttttgagatggagtctcactctattgcccaggctggagtgcagtggtgcaatctcggctcactgcaacctccacctcccaggttcacaccattctactgcctcagcctcccgagtagcagggactacaggcacccaccaccacgcctggctaacttttttgtatttttagtagagacagggtttcactgtgttagccaggatggtctygatctcctgacctcatgatccacccatctaggcctcccaaagtgctgggattacaggcgtgagccactgtgcctggccactagtgtattaattttaaaattgtatttatgaatgacacaagtctaaaaatatatttccagatttgagtacctaatagtctattatataaatagctggtttgcatttattatctttcatatttcca

SEQ ID NO: 695853 - DNA, 710 bp, Homo sapiens
gttgggttcaaatccaggcctagtcgcttgccagcaaggtaaagttaagcaaaatatataagcctattttagtcttgttttccttaagtgttaagagaactaataatactttcattatttatttaattttataatttctggtgactaataaggaggtaatatacaatgcatccaacacatacaatcatttgttgaaaattctttgtgaggactcaaaaaagtaacacataaatagcatctaacacgtatagtttccactctataaatagtagctatgctagtggattaattttttttttttgagatggagtctcactctattgcccaggctggagtgcagtggtgcaatctcggctcactgcaacctccacctcccaggttcacaccattctactgcctcagcctcccgagtagcagggactacaggcacccaccaccacgcctggctaacttttttgtatttttagtagagacagggtttcactgtgttagccaggatggtcttgatctcctgacctcatgatccacccatctaggcctcccaaagtgctgggattacaggcgtgagccactgtgcctggccactagtgtattaattttaaaattgtatttatgaatgacacaagtctaaaaatatatttccagayttgagtacctaatagtctattatataaatagctggtttgcatttattatctttcatatttcca

SEQ ID NO: 695854 - DNA, 623 bp, Homo sapiens
tgaaattgatactggctctctgaagcatgaagattattcttaaataatattcctgtgastttaaataaatttcatgataatgtggcttaataaaccatgatttccccttctagaaaacacaattcctcctggagggtgaataatttagcattgcttaacacacattctcactttaaaaaggaaaaactgagtacacattcactgtgcatcttatttcagtctttcaacaatgagagagaaaacatgatgatggatttaactggccagcactacaaatccacaggattcaaaatgtaccataactaagaaagtcacaagccaggaggcttagcaaatccagtgggttccatgactcttcaaatattttcagagagcttatcgcttaagctcataaccctgatatgtaaaatagaagaaaaattcttggcccttctttccagagcccattcaaaagtgtggagaagagtagtctagaagttacgtcagttgaaacatttcaaatttctttgtctcaatgtgaagcagagctaggaggattcgctaaccttcatttcagaattaatattcccagaatgcacgtgttctagatatgttgattacctgtgctaagaagaaatgtaaag

SEQ ID NO: 695855 - DNA, 623 bp, Homo sapiens
tgaaattgatactggctctctgaagcatgaagattattcttaaataatattcctgtgagtttaaataaatttcatgataatgtggcttaataaaccatgatttcccyttctagaaaacacaattcctcctggagggtgaataatttagcattgcttaacacacattctcactttaaaaaggaaaaactgagtacacattcactgtgcatcttatttcagtctttcaacaatgagagagaaaacatgatgatggatttaactggccagcactacaaatccacaggattcaaaatgtaccataactaagaaagtcacaagccaggaggcttagcaaatccagtgggttccatgactcttcaaatattttcagagagcttatcgcttaagctcataaccctgatatgtaaaatagaagaaaaattcttggcccttctttccagagcccattcaaaagtgtggagaagagtagtctagaagttacgtcagttgaaacatttcaaatttctttgtctcaatgtgaagcagagctaggaggattcgctaaccttcatttcagaattaatattcccagaatgcacgtgttctagatatgttgattacctgtgctaagaagaaatgtaaag

SEQ ID NO: 695856 - DNA, 623 bp, Homo sapiens
tgaaattgatactggctctctgaagcatgaagattattcttaaataatattcctgtgagtttaaataaatttcatgataatgtggcttaataaaccatgatttccccttctagaaaacacaattcctcctggagggtgaataatttagcattgcttaacacacattctcactttaaaaaggaaaaactgagtacacattcactgtgcatcttatttcagtctttcaacaatgagagagaaaacatgatgatggatttaactggccagcactacaaatccacaggattcaaaatgtaccataacyaagaaagtcacaagccaggaggcttagcaaatccagtgggttccatgactcttcaaatattttcagagagcttatcgcttaagctcataaccctgatatgtaaaatagaagaaaaattcttggcccttctttccagagcccattcaaaagtgtggagaagagtagtctagaagttacgtcagttgaaacatttcaaatttctttgtctcaatgtgaagcagagctaggaggattcgctaaccttcatttcagaattaatattcccagaatgcacgtgttctagatatgttgattacctgtgctaagaagaaatgtaaag

SEQ ID NO: 695857 - DNA, 643 bp, Homo sapiens
tcaaatttattggctagtttgtaacgtgagttttcatactgaagagctataacatttttattacaaaataaagcttttgaaaatgttaacatttatattttcaacaaactcatgaatcagatttgtcttatgtcatcttattaagcatctaatagctaatatcttaagcgtttagtgcttgataaacaaattttgttgagtttttctttaaaaatggacatattaaattgactttttaaaaagcttaattcatagcacattgttttgagtcataacatcatcatttgttaaattttagtttttatgaacattatttctaaaatctaaatctcaggtgtgtattttccttaatacacaaaacyactattaactgtaaacagaaagaatttgatattaagtctaggggcaatctacctctttagtcctatagatcacaccaaggatgaataagactcataacagacataacaaaaatctctggtaggcctaagacataggttgggaaaggggaaattatacagaaaaagacataaacaaaaaggataaaagtacttaggaaataaagtacatataataaaagtggtggtaagcagtggtgtgaagacagggtacttcaggggacatgtaagtttcatgtacaata

SEQ ID NO: 695858 - DNA, 606 bp, Homo sapiens
ggaaatatttgtggaaaaagaatacaatcttatgaccacatacccatgtgaagctgaaaattccattttacagaatcataaacattgctttttgaagtcacagacaactctaataattcataattataaggaaactaaacagaaagatgcaaactaggtcaggaatgtagggcactaatcatctgatcctattctgtcygttttaaaatcctgaagactaattcttccaatatgtggaattacaagtttggcttttttctcatcttaatgcaaaagcaaaataaaaataaattcaaatctttagaactaaaagtgatgtgtgggttttggaccatttcagcaggaatggtagtttcttgtgctctgtcctcagtattatggagtagttcagtgcagtattcacagacattctggggaaaaacaatcttataataaagcagatgaatgagttgtgcttcagccactcctctgcctgtccttcccttacccaccacactttaaggcattatattactgcaaaagaagtttctaaaaaagcactctgccagatgactgaaaaacaatatatatgtttttaaaaaggaacatttactgaagtaaaaaaag

SEQ ID NO: 695859 - DNA, 1855 bp, Homo sapiens
attaaaactccccaaattctcattttaatttaggcatactgaagaccaccttgatctctgtaaatgccccaaattgcaattctgttttcctaagtaaatgttttgtttaaaaatttgtctctatatttttatttgattttgaaaccattaatattactgattaaagtcagatacttggcttcaagctcataagacatactttttttaggaatatatttgtatgcatttgattcataacatgtctatatattggaaagtacatatataacaatataagcataaatatacataaataaacaaatataatatacataaatagtatgtataatagtatataaaatgaaaaaatmtttttcaaaatataaaatacataaaataggtatgtaaaatatataaatatataaaatgtatttttaaatttctgaagattaaattactacccccatataggtatggtataaaaattatttttgagacatatacagctctatctccattgagccatattattgtaaggtaatagagggaagatttaactcattttatttaaacatgctccaaagcaatttttatttccactataacaactgacagtgttgagtcaagtgagagctggggaagaaaacagcctaggatgagcatgccttcatgtcccagctactaaacagagttcaggcccagcagagcttcatttgtaaaaagttctgcctacagccaggacagacgcagtgagaggagtggtctccaactgatttctatatttagtatggtaggttaaataatggctccctcaaagatatccaaatcctaatctttggaatctgtaggcatgttactttacatggcaaaagattccttgcagatgtgactaaattaaggatattgagatggaaaattattgtaataacccaggttggcccaatgtaatcacaggggtccttataagagggaagcaggtggatcaaattcatcagtgggagatatgacaaggaaagcagaggtcagagtgggagagagatttgaagatgttacactgtgcatctcaaaaatggagaaaggtgccaaagccaagataatgcaggtgatctctaggagctaaaaacattaaagaaacaaattctctctacagtctccaaaacaaacaattcctctagctccttcactttagaactgtaaggctgactttttactcttgacctccaaaattatatgataacaaattcatgttgtttaaaccactaagtttgtactaatttgttacagcagcaattggaatataatacacttagattgtgatagaatattcttcataggtaagcactctcccatcccccacctccttatgcaagatgtactccctgccccttgacattggattttgtcacatgactttttgaccaaaaggatattactgaacgtagtagatgtaatgtgactatattaagctgttcttgcattgctatcaatagatatcagagactgggtaatttataaagaaaagaggtttaattggcttatggttctgcaggctttacaagaagtgcggtactggcatctgcttggcttctagggaggtctgaggtagcttacatcatggcagaaggcaaagggaatgcaggcacatcacatgataagagcatgagagtgagagagtgcattgtaggtgaggaggtaccacacgcttttaaacgaccagacctcatgagaatgcacatcatgaagacagcaccacgccatgagggatccacccccaagatccaaacacctcccaccaggccccaccttcagcactggggattacaattcaacatgaggttgtggggagtgtggcaaatgtccaaaccatatcattctg

SEQ ID NO: 695860 - DNA, 683 bp, Homo sapiens
tgtcagtcgcaacttcagcctcttttgtgtgtgtgtgtgtaaaaaagaaatcttttttatttatttattttcaaattataaattcrtagggtacatatgcaggcttgttacatgggtgtattgcataatgctgggtttaggcttctagagaacccatcacccaaatagtgaacatagtatccaataggtagtttttcaattcttgtccccctttccaccctccccacttttggatttctcagatctattttttccatctttatagccaccaacatgagtcttttgatgaaataatgtttggctgaggtccacaacttaaaacaacattccaatatagattctcatgatccctgaagaagtgtgtctgatgtggctaaacatcatcaaatgagtaagtcaacatagtaaaagaaaagaacagttctttatcagattaaatgagcgaaacagctaaatgtcaagtgacaaaacattgggactgactgtataaaatgctaataacatctaccaaacagtttacattgtgctaaacaacttatgcacattatttctttgattctttttaacacatggttgtgggctgaatggtgtctcccaagaagtcatatgccgggatcctgtcccatagtgcctcacaacgtgacattgtttggagttagggttgttgaagatgtcattagtca

SEQ ID NO: 695861 - DNA, 638 bp, Homo sapiens
tcccatgatttctgtttggtacgtttttaatatttcctgtctctttgttgaaattctcacattgtttatgcattattctccacacctcagtgagaaattttaagatgcttattttgcattatttgctagataaattatataactccatttaattcaggtaggtttctagagatttgtcttccttctttgactggaacatcattgcctagttctctatttctctttcctctctgtgttgctgtctaaatattacataaaatagtcacttcttccactcttcaaagactagccttgtctaggagaagttctcactaatcagcctggccagagattctgaagacctctcgaactgtaagttttctcaacccactttctttattatactcaccccccaaccaccacaggcatctagaatatgccagatgccatcaatactccaagacaagaaaaataaaaccagttcttcaggaagtccctgaaaaggttggattattgggtgctctaartcaactctttcaatccccaaagaggagctgggagctgggatttttatctgctcactctgatctgtgcagtcaggtgagcagctgtagtgactagttgtgtgctaaaaaccctatgcctgctttgctcatgtt

SEQ ID NO: 695862 - DNA, 915 bp, Homo sapiens
attatcccatgaggttttgctaaaaaagcatctgttttctagccctgcaccttgtatcctaaccaaaatataattgtccatgattaaagcacggttgtctgccttcctgaatcttgggcatcggaagtcagctttctgctgctaaatctccttttgggacagctctctagaagaactctgtaraaaagtttgtgttgcagagttttgcatggagttaactagcagacattaaaaacacaggataaactctgttgagtcaggcacttttgactttctgataatttttcaatctttcccctgaaaatcaggagatctggaaggttttctttcatatggaaaatactaaagtgcttaaaagaaacagaacacatttgcatatgtaacacaattccttatttgaaccagatttatttaataatcacaatctaattttagatagtttctgttttccagaaaatgcaagctagagatcattagagcaattagtacaagataaactttagaatattgcatttggccagaccagatgtaaaatcattagggaataaacataaccatgcttcatagaagcccactattcagacattagatgagttttagatccgatgacataatgacaggcctcatttaaaaagactaataacttagtgaaaaccatgtgtatttctacaacactatttgcattttactaatttaatctcacgcattcactgagggtactgacattttagccagtgtgagcatgagaagcaggtgactcatgtatgatctaaatgcaccacatcaagatgactagttgagttgtattcagaagggctgaaataatgtgttattatccaaaacaccatagttatataaaaacaggcagcatagcagatacctgaaaaaatgttttttttggatgaataagggaaa

SEQ ID NO: 695863 - DNA, 616 bp, Homo sapiens
aataactgcatgaaattttcagttttgcagtatgaataaattctggagatctaatgtacagcatggttactatagctattaatactgtattacctatttgaaatttgctaagagattagatcttaaatgttctcaccaaaaaaaaaatgtaactatataaggtgatatatatgttagtaagcttgattgtggcgatcatttcacaatgtatataaacaaaatatttcaccttaaatatatacaatttttatttgttaattatcccacaataaagctgggagaaattctaacacaaacaaaaaaaaaaataactgtacattgattgagagtttagatcattctggaaaatcaacacaggtttacaaacccagagcaaaagagaaattcaacactaacaaaaaagaaagttgatattccacaggcaggaattyttacttaaaatgtgaaatataactattactttttcaagaggatcaagcccacttgcactgaagctgtgatcccacgccacacaaagaggcatagaaaggaccagcaaaaaccatggaaggtggaaaatgatattggattattttctattaagtaacttacatcattgtctatcttgtagatagtc

SEQ ID NO: 695864 - DNA, 662 bp, Homo sapiens
ggcaacatttacaggttccaagcattgaaatatraacaaagctttttggagaccatcattaaacccactagagagttcgcatttcaattccaaaaatcattttttttatttttttcttttttgagacagtttcattctgttgcccaggctgcagtgcagtggggcgatctcagctcactgcaacctcctcctccccagttcaagcgattcttgtgcctcagcttcctgagtagctgggattacaggcacatacaaccatgcctggttgatttttttgtattattagtagagatggatttcaccatgttggccaggccagtcttgaactccaaacctcaagtgatccacctgcatcagcctcccaaagtgctgggattacaggcatgagccaccacgcctggcctcaaaaggtcatttcataataaagggtctaggcttggatataaataaattatcagctattatgtaatacattcttcaaatgagatcataaagctgctaatccaattattatttattattagaactatgttggaattatactataacactgctggaagtacaagcaatgttgtataatacatgttcctaaaagaacatataagaagtgttactgaaataacaaacattttcctctaaagaattgctaggcatgaatcctg

SEQ ID NO: 695865 - DNA, 662 bp, Homo sapiens
ggcaacatttacaggttccaagcattgaaatataaacaaagctttttggagaccatcattaaacccactagagagttcgcatttcaattcmaaaaatcattttttttatttttttcttttttgagacagtttcattctgttgcccaggctgcagtgcagtggggcgatctcagctcactgcaacctcctcctccccagttcaagcgattcttgtgcctcagcttcctgagtagctgggattacaggcacatacaaccatgcctggttgatttttttgtattattagtagagatggatttcaccatgttggccaggccagtcttgaactccaaacctcaagtgatccacctgcatcagcctcccaaagtgctgggattacaggcatgagccaccacgcctggcctcaaaaggtcatttcataataaagggtctaggcttggatataaataaattatcagctattatgtaatacattcttcaaatgagatcataaagctgctaatccaattattatttattattagaactatgttggaattatactataacactgctggaagtacaagcaatgttgtataatacatgttcctaaaagaacatataagaagtgttactgaaataacaaacattttcctctaaagaattgctaggcatgaatcctg

SEQ ID NO: 695866 - DNA, 662 bp, Homo sapiens
ggcaacatttacaggttccaagcattgaaatataaacaaagctttttggagaccatcattaaacccactagagagttcgcatttcaattccaaaaatcattttttttatttttttcttttttgagacagtttcattctgttgcccaggctgcagtgcagtggggcgatctcagctcactgcaacctcctcctccccagttcaagcgattcttgtgcctcagcttcctgagtagctgggattacaggcacatacmaccatgcctggttgatttttttgtattattagtagagatggatttcaccatgttggccaggccagtcttgaactccaaacctcaagtgatccacctgcatcagcctcccaaagtgctgggattacaggcatgagccaccacgcctggcctcaaaaggtcatttcataataaagggtctaggcttggatataaataaattatcagctattatgtaatacattcttcaaatgagatcataaagctgctaatccaattattatttattattagaactatgttggaattatactataacactgctggaagtacaagcaatgttgtataatacatgttcctaaaagaacatataagaagtgttactgaaataacaaacattttcctctaaagaattgctaggcatgaatcctg

SEQ ID NO: 695867 - DNA, 662 bp, Homo sapiens
ggcaacatttacaggttccaagcattgaaatataaacaaagctttttggagaccatcattaaacccactagagagttcgcatttcaattccaaaaatcattttttttatttttttcttttttgagacagtttcattctgttgcccaggctgcagtgcagtggggcgatctcagctcactgcaacctcctcctccccagttcaagcgattcttgtgcctcagcttcctgagtagctgggattacaggcacatacaaccatgcctggttgatttttttgtattattagtagagatggatttcaccatgttggccaggccagtcttgaactccaaacctcaagtgatccacctgcatcagcctcccaaagtgctgggattacaggcatgagccaccacgcctggcctcaaaaggtcatttcataataaagggtctaggcttggatataaataaattatcagctattatgtaatacattcttcaaatgagatcataaagctrctaatccaattattatttattattagaactatgttggaattatactataacactgctggaagtacaagcaatgttgtataatacatgttcctaaaagaacatataagaagtgttactgaaataacaaacattttcctctaaagaattgctaggcatgaatcctg

SEQ ID NO: 695868 - DNA, 592 bp, Homo sapiens
ttgagccagatttgacctaattaatatagctcacattcttaaccatcacacacacacacacacacacacacacacacacacacayacacctatttgatgcaatcatcaaacccataaaataaaaattacttatcagtaaatagaaatcatagcttatgcctcagttgcattctctgaagatataaaaagaaacagacatttttataaaggaattaacttccaaaagttttgcaaggttttgcaaaaattgagccaccatgaatgtgaggatattgtgttgtcttccatctagatctagtatagaaacgcaggtcaaaaggtaggaagatagagtaaaaatataccgattttactggttaaaaaaaattgataaaagagaatacaaaaaaatttaaagggggatttggggataaatattagaaaaagaacttttcaaatgagaagagatagcatacagtgaagtttgcagatgaactaaggtgctaggtaaatgaagaaccaagccagcaggaacaggagtccgatggaagaggcagaaatgtgctaaataaacagacttaggatttgtaaaacaaaactgcttaagctgacc

SEQ ID NO: 695869 - DNA, 646 bp, Homo sapiens
attgcagcacactgcactgtcgagaaatgtaaaggatctgagattttactccacttgcaacccaaattagtctgccacagtttcactgttggcagaaaaaaacaaggcttttgggtcagagacaaggaaytttattactcatagtattcatacaacaattagcatgagcaacagcatgtttcatcagtttccccttgcctcaagtcttatgggggtaacatggatgggcccagatggatctgacctccttggcctcccacagtgcagggattacatcacgtccagcctcaattttctttataatgccttttgacgaacaaaaccctttactgcaactggatttatcagtcttttagggtctgtgattcttttttattttatagatactctttcccattccattgtcataaaaatattctcctatattttttccaaatttaaaattcaacctttttatttacaacttaatcaattttagtggacttttgtatatggtgtgaggtaagaatctaatttcattgtttccctttgtgtataatcacttatacagtactattccatttgttctgcagttccatttcatcatatacacatttctatatatgtacatgtttctttatggactttccattctgtttcagtttat

SEQ ID NO: 695870 - DNA, 646 bp, Homo sapiens
attgcagcacactgcactgtcgagaaatgtaaaggatctgagattttactccacttgcaacccaaattagtctgccacagtttcactgttggcagaaaaaaacaaggcttttgggtcagagacaaggaactttattactcatagtattcatacaacaattagcatgagcaacagcatgtttcatcagtttccccttgcctcaagtcttatgggggtaacatggatgggcccagatggatctgacctccttggcctcccacagtgcagggattacatcacgyccagcctcaattttctttataatgccttttgacgaacaaaaccctttactgcaactggatttatcagtcttttagggtctgtgattcttttttattttatagatactctttcccattccattgtcataaaaatattctcctatattttttccaaatttaaaattcaacctttttatttacaacttaatcaattttagtggacttttgtatatggtgtgaggtaagaatctaatttcattgtttccctttgtgtataatcacttatacagtactattccatttgttctgcagttccatttcatcatatacacatttctatatatgtacatgtttctttatggactttccattctgtttcagtttat

SEQ ID NO: 695871 - DNA, 2342 bp, Homo sapiens
gccgctataatataaacggacatgtattatctttttctttgtcttggtcctagccctttaaagatgactttcacattgtttgaaatgtctatgcccttacttatctatttttgtctgcttgttccatcagttacagagagaggtgtgttgaagtctcccgctatgattgtggataattctattttttttagctgtttcaatttttgcatcatagaattcaaacttatgctagtaggtgaccaaatttagaataattatatcttcctggtgaactgaatttttatcattgtggaaatgttcctttttatctttagtaaagctttttacctgaacacctattttgtctgacattagtataggtatagtaggtgtctgagtcagtttgctctgctataacaaaggaccatagactgagtggcctctaagcaacagaaatttactctttatagttctggaggctggaagtctgagttcagggtgccagcatgattgggttggagtgagggctctcttccaggttacaggctaccatcttcccattgtatcctcacatgacagaaagagagctggagagctctcttggatccctttataaaggcatgcattctattcatgaggattccaccttgatgtgctaaattacctacgaaagatcccacctcctaataccatcacattgggggctaggatttcaacgtatgaattttgcatggacaaattcagtccataacactaggtttttttggatttatatttagcatattttagctttttccatcattttactttcagtctttaaaaaaattaagttgtgtgttatgaactgaatgtatccctccaaaattcatacccagaagccctaacaccttcaatgtgtctatatttggagatgggcctctaaggaagtaattaagcttaaatgagatcataaccacttacctcctaaaaggtaagagccaaaataaatgaccatttgatctcaatttctatttttttcagaatattctacccctaaatgcaaataaatttacacagagcccattaattttatatgaagtaggtgttattcttattttgataattacacaaagataaatgggagctagaagcaattttcaaaacaaaataagcaggagggaagacagttctgttttcccagcctctgttcctggtctctcatttctggctcaaggactaccacactctggagccctgagaatcagctttctggagttttggggtatgctgcgtgctcctgacaagctaattgcatggacaaggaaaatgggataaaagttgggaaaatggggattggctaagggaataaataatagataaaagtgataaaggagagataaaggaaggcagtatgatgatgagaaagagatcagaaagtagtattttgtggaaagaaacatgtgatgaccccacataaagtaggcagtatgctccattaaaaacaccatcatattaaattctgttaagagggcatttcaggaatatcaggttctagaatgatgagaggtacaaatgctttaactcgtttgctttattggttaaattttatttattatcttatttaatattttaaatggtatacgatgtgatattttggtatatgtatacattgtgaaattattgaatcgaacatatctgtcacttcacagttattttatgtgtgtggtgagaacacttatctactgtcttagcaagtttcaagtctacaatacatcatgactgactgtaatcaccatgctgttgaatagatatccagaacttactcatactatctgaatgaaactttgtaccctttgtttttgttttttggggggtttttttgttttgttttgttttttgagacagggtcttgctctgttgcccagtgttgcccaggctggagtacagtggcaccgtcacagctcactgaagccccgacctcctgtgctcaatcaatcygcttgcttcagcttcccgagtaaacggtactacaggcacgcatcaccatgttgggctaatttttaatattttttgtagagataaggtctcactgtgttgcccagactgatcttgaacttctgagttgaagcgatcctcctgcctcagcctctcaatgtgctggaattacaggcgtgagctaccatgcctggccctttgacttggtttgatctttaagggcatgagttatcagataagaatctacctcttcctagctctgtggccttaaccttttttttttttttgacaggatcttactcttacccaggctgaagtgcagtggcttgatcatagctcaccccagccttgaactcctgggctcaggcatcctcacacctcagcctcca

SEQ ID NO: 695872 - DNA, 2342 bp, Homo sapiens
gccgctataatataaacggacatgtattatctttttctttgtcttggtcctagccctttaaagatgactttcacattgtttgaaatgtctatgcccttacttatctatttttgtctgcttgttccatcagttacagagagaggtgtgttgaagtctcccgctatgattgtggataattctattttttttagctgtttcaatttttgcatcatagaattcaaacttatgctagtaggtgaccaaatttagaataattatatcttcctggtgaactgaatttttatcattgtggaaatgttcctttttatctttagtaaagctttttacctgaacacctattttgtctgacattagtataggtatagtaggtgtctgagtcagtttgctctgctataacaaaggaccatagactgagtggcctctaagcaacagaaatttactctttatagttctggaggctggaagtctgagttcagggtgccagcatgattgggttggagtgagggctctcttccaggttacaggctaccatcttcccattgtatcctcacatgacagaaagagagctggagagctctcttggatccctttataaaggcatgcattctattcatgaggattccaccttgatgtgctaaattacctacgaaagatcccacctcctaataccatcacattgggggctaggatttcaacgtatgaattttgcatggacaaattcagtccataacactaggtttttttggatttatatttagcatattttagctttttccatcattttactttcagtctttaaaaaaattaagttgtgtgttatgaactgaatgtatccctccaaaattcatacccagaagccctaacaccttcaatgtgtctatatttggagatgggcctctaaggaagtaattaagcttaaatgagatcataaccacttacctcctaaaaggtaagagccaaaataaatgaccatttgatctcaatttctatttttttcagaatattctacccctaaatgcaaataaatttacacagagcccattaattttatatgaagtaggtgttattcttattttgataattacacaaagataaatgggagctagaagcaattttcaaaacaaaataagcaggagggaagacagttctgttttcccagcctctgttcctggtctctcatttctggctcaaggactaccacactctggagccctgagaatcagctttctggagttttggggtatgctgcgtgctcctgacaagctaattgcatggacaaggaaaatgggataaaagttgggaaaatggggattggctaagggaataaataatagataaaagtgataaaggagagataaaggaaggcagtatgatgatgagaaagagatcagaaagtagtattttgtggaaagaaacatgtgatgaccccacataaagtaggcagtatgctccattaaaaacaccatcatattaaattctgttaagagggcatttcaggaatatcaggttctagaatgatgagaggtacaaatgctttaactcgtttgctttattggttaaattttatttattatcttatttaatattttaaatggtatacgatgtgatattttggtatatgtatacattgtgaaattattgaatcgaacatatctgtcacttcacagttattttatgtgtgtggtgagaacacttatctactgtcttagcaagtttcaagtctacaatacatcatgactgactgtaatcaccatgctgttgaatagatatccagaacttactcatactatctgaatgaaactttgtaccctttgtttttgttttttggggggtttttttgttttgttttgttttttgagacagggtcttgctctgttgcccagtgttgcccaggctggagtacagtggcaccgtcacagctcactgaagccccgacctcctgtgctcaatcaatccgcttgcttcagcttcccgagtaaacggtactacaggcacgcatcaccatgttgggctaatttttaatattttttgtagagayaaggtctcactgtgttgcccagactgatcttgaacttctgagttgaagcgatcctcctgcctcagcctctcaatgtgctggaattacaggcgtgagctaccatgcctggccctttgacttggtttgatctttaagggcatgagttatcagataagaatctacctcttcctagctctgtggccttaaccttttttttttttttgacaggatcttactcttacccaggctgaagtgcagtggcttgatcatagctcaccccagccttgaactcctgggctcaggcatcctcacacctcagcctcca

SEQ ID NO: 695873 - DNA, 2634 bp, Homo sapiens
cagatctccttcttttaaaaattttactttaaataattaaaagtaaaaactaagcatatattctatttttttagaccactgtaacattgattcaattggatgaattcttacttgtatagcatatgataaacagcaatttgcacaggcctagctctgaagaggagtaatggggccaatgtatttaacaaagtctggagatattctggtaagtttgttttttggtcagcaactaatcttgcaggaagtttgtgactcaatagctgttcctttgagatatacgttaatgtttcacacatgggtttcagcattgcattctgaaaggatgtttcagacacatctttgttttctcctaatgacaaaaaggaaagaaacatgcacgtctcaaaagaaagttagtatagcttaaatgattcacaaacaatcaaatgtcwtttaagaaaatgaaataaaaactagacataaacaataaagcagtcttaactagaaacatgaactgaatatatattccagttaatctcaactgttttaatgacttttatctgatccagcaaatgttcaatagcaaggttctattcacatcatccattcatgttatctgaagtattattattttaatttgcaacagtcattggataccttgccatttttcaatttctgtctgtaaagtaaagcatagatgatgcttctgagaagccaagctttctcttctggctttttcttttactatttagtattatttgatttaaacatcaaaatttttgcttttgaatttttcagtaagtcatttccaatgaatcaatctcactattattccctttttcacttgcctgtaacagtcaccaaaataggtaaaagcaaactgtggatgccttgggaaaaaaattctttccattcactgattagatttacaggaagattgccaatggtatccagagttgtggaatcaaagaaagcactgaggtcacaggccaaatcacagctgacacaggcaaacagttgcacaagtggaatagaatacaatgcctgattctcacttgttgtctgaaaaaacaataaaaatgaaataggtaaacagacttctaccagaacactacaaataaagccaatataaagaaaagccccactttcatttctttgaattttaaaacgaaaagcagttgaggtgtgtaatctcaggagaaacataaaattttacatcaaaataacttttttcttcaaaattaaataccatgaatagaatcattaataaacaatttattctcaagtaccctttttaatttctaacccatggaaggaaacactaagtcagacacattaaatacacatttataatcttctcagtagccctacaagttgtaagttattattttaaaataagaaaatcggccaggcacagtggctcatgcctgtaatcccaacactttgggaggctgaggcaagtggatcacatgagggcaggagtttgagaccagcctggccaaaatggtgaaaccgcatctctaccaaaaatataaaaattagtcgtgcatgctggtgggcatctgtaatcctgctatttgagaggctgaggcacaagaattgcttgaacccagaaggcggaggttgcagtgagccaagatcgcaccattgcactccagcctaagcaacagagcgagattctatctcaaatttaaaaaaaaagaaagaaagaaagaaagaaaactgagtctcaaatagtttaagtttaaaactctaagtcacatagctaatagcaggcaaagcagagattcagaccaatccaaccctgactgacttgctgccttggagcccacaagtaatatacctctggttgctttgggtcaaaaattacactaattccctctgaatctgctactatttaatgcattactctcacaatattcacacagtatgttttagaaataatctaattataaccaaaaaagaccaaaataattgtcattaacagataaaacctgaaagggctgtgctgcaaatattacaataagctaatggagaaggcattttaataacaggagatttggtcactgaatgatgctggtagtcattaaaaatctatcattttactattctgtcaaatagtagctggtaagaagaacatctataaagtgttttaaattatacaaaggaaccaattacaatcatcacttaaagaatgagattagtaaatagttctgatgcaaaagtatgtacaaaaacccacaagaggtgatgacatatcgggttaatttacctccaaccaagccaacatggagcacatgatgaagtcccactcactctctgccaaaggggatgagcagtatttcagaaatagggaaagaaaccggattatttctatatttacacccagtacctctggacttgcttctgatagattactgtgataaagataaaaacaaaagacaataaaagattatattgacattcaattagaaagtatgctactttaaatcttacatacttatttataactgacttaaatgtctaccataatttctctacaaaattgtgacacagatacgtaatctttgtctgaattgtatactgaaggaaaaacatagtataaagtatcacctaccaactgaaaagaaaaatatcttcatgctctttcttcca

SEQ ID NO: 695874 - DNA, 632 bp, Homo sapiens
taaacaatcaacatcccaggggcactgctggcacatgaatcacattgtggggatccttgcagaggtgccctctttgagcagaagaaagacaaagattatctccttctttagggaacagagtgtggcgaactgagtccaggttggatttcagtcacttctcatctgtgcctcttcttgtgcagtgcacaaaaggtacaacaatccatggagacctgtggctttccattaacaaagaggccgttcttggaatttcaagtcagttgacttaactgaggctcaagaaacagaaaaattaagtatatggtggaaacaagcctcagaaataaggctaaatctcagctttttaagacatagatcacacatttggccaagatatcaagactgacttgattctctctctctctctctctytttttttttttttttttaaacacagggtctcgctatgttgcccaggctggtctggaactcctgagctcaagagatcctccctcctccgcctctcaaagtgctgggattacaggcatgagccaccgtgcctggctgaaattgaattgattctatgaccttcttgttttcatctttttagccccaaaaggggggagactaggttccctttttaaaagtgtgga

SEQ ID NO: 695875 - DNA, 608 bp, Homo sapiens
ttggaaactcttggataagcagttaagttgtccaaagcagttggaaccgttgcggagggtttggcaggctttggatgcatttcgagtgggtatgtggcaattgcatacatacccattggtctgggtgcttgggctgcagctggggctggggctgacgttggtagtttcacagacactgaagacttggcctgctgatggggagttgcagggcacagaggagtttgacgggtcacaaccagtggtactgcaggtcttgggctcacagctgggagatttgcaggttggtgcttcaccgtaggattcttggcagtaatccaggagccagagatttccttggtagctactgggtaagcagtgtccaaaggtagggcttaaatcactggagctaagagtaacagaagaggtcactgggatataacagtgagttctgtatgatgtggtactgcagacmccaggatagcctgtagtagacatggagcctgcaggcatgctcagtggtcgctgtgcagtgtgtctgtggcctaaggacgttttataccttccctggtgattgtcaaaagcctctccagactctttcttctgtctgcttggggcaataacacagcaac

SEQ ID NO: 695876 - DNA, 867 bp, Homo sapiens
ttgtataaacatccaactttaggaattttttagcctctctgagctttacttttttagcatacaaatacctcaaagagtttctaaaagactgaagcacagtatcccagaatatagatggtggttccaggtaggtcaatttcaggtgtcttcctacaaggggaaactscaaatagaaggataggtaatagtgaataaaacaataagccacaagataagaaagagaaaaaaaggaaaaatgaatgcctcaagtcttacaggggagaaggaaaacttctttctcagagacagttgagaacaaaaaatgggtgaacataaatctgcaaagtgagagagggagatcaaggtatatctctcctgatgataccatagaagaattttgactggcacctctacttcttaaatgtgaccagtgacatcctatgattaaaacattggaccttctttaggggcatttgcctcgccttcactgctcaggtgcacaaacttatgcttagagtcaaaatactttttaatttatcacaggttataatacctcacaactcactattgcatggtttgtggaagttatttaaattttccaaagtgcaatttcctcacctattccacaggaataacaaaatcatataccttataatgtgtgaagtttatgtgtgacatgtcatgaaaggcagaaaataaatatgaaccatctttactagctatattgcagttgcagttggcttacgtttatgcctgtaaacttaaaagagcgtccagcacattgcagaagttaatgtctacctatggaaaagataaataaaacatgatattaatttagcataaaagtagagcttttctacattttcatcaataaaatcatattattat

SEQ ID NO: 695877 - DNA, 628 bp, Homo sapiens
ttcgtggcagagaccaagtaggaggtaattgaatcatgggggtgggcctttcccatgctgttcacgtggtagtgaataagtctcatgagatctgatggttttatgaaaggaagttcccctgcacaagctctcttgcctgccgccacgtaagacatccgtttgctcttccttcatcttccgccatgattttgaggtctccccagccatgtggaactgtgaatccattaaacctctttcctttgtaaatwacacagtcttgggtatgtctttactgacagcatgagaatggactaatacacattgctagattagtaagccttcgtccaaatgcaagagcttatgtcttctttcctactctttaagcttctaacttcctaaggaagaacgttttctttaacaaagtttctctaactctgctaagaatgcaccaaaactggaattcttttagtgccacaatttttctatttaccctcatttaacactgaaaagaaggatcacctgaaacctgaagtgtatttgtaagagtcaatattaatattacttgtattccaaacacatgaaatgtttagcactcttaatctgtaactcttttgaaaaattaagttctatcaaataagcaaagtccaaa

SEQ ID NO: 695878 - DNA, 641 bp, Homo sapiens
aaagaaaaatttgtgtgtgtacgtggtgtgtgtgtgtacagagaggcagaaggagagacatataatacaataatatgtttataaatttatagatatgtgtgtatatattaaaaaagtaaaataaactattgtattcatacattattaaatgttaattatgtatttatcaatcaactagtgagtattyttagtccatttggactgctataacaaaacgtcataaacagtagcttaaaaaaataaaaattcatttctcacagttctagagactaagaagtccaacttcaaaggtctggcagattcattgtctggtgaaagcccacttccttacagatggtggtttcttactatgccctttcatggtggaaggcataagggacttctctgttctcttttataaggacactaatcccattcataagggctgtactttcatgacctaatcctttgcaaaggccctacctcctaatactatcactttggggttaaggatttcaatatatgaattttgggggaacacatatatttagaccatagcaagttcctactatgtactcaatgttggtacagcaagacatagtcctataccacaagaaggtggcattatataataaaatataaatatgtttataaaaataaat

SEQ ID NO: 695879 - DNA, 641 bp, Homo sapiens
aaagaaaaatttgtgtgtgtacgtggtgtgtgtgtgtacagagaggcagaaggagagacatataatacaataatatgtttataaatttatagatatgtgtgtatatattaaaaaagtaaaataaactattgtattcatacattattaaatgttaattatgtatttatcaatcaactagtgagtatttttagtccatttggactgctataacmaaacgtcataaacagtagcttaaaaaaataaaaattcatttctcacagttctagagactaagaagtccaacttcaaaggtctggcagattcattgtctggtgaaagcccacttccttacagatggtggtttcttactatgccctttcatggtggaaggcataagggacttctctgttctcttttataaggacactaatcccattcataagggctgtactttcatgacctaatcctttgcaaaggccctacctcctaatactatcactttggggttaaggatttcaatatatgaattttgggggaacacatatatttagaccatagcaagttcctactatgtactcaatgttggtacagcaagacatagtcctataccacaagaaggtggcattatataataaaatataaatatgtttataaaaataaat

SEQ ID NO: 695880 - DNA, 629 bp, Homo sapiens
tactatgcagccatcaawaaaggatgaattcatgtccttcgtaaggacatggatgaagctggaaaccatcattctcagcaaactatcacaaggacagaaaaccaaacaccgcgtgttctcactcataggtgggaattgaacaatgagaacacatggacacaggaaggggaacatcacacactggggcctctcatggggttgggggagaggggagggatagcattcggagatatacctaatgtaaatgaagagttaatgggtgcagcacaccaacatggcacatgtatacatatgtaacaaacctgcacgttgtgcacatgtaccctacaacttaaagtataataattaaaaaaatgtaagccagttaagctgttgattcaaagaaaagcattgatttcagataccttttcttgggagtgtcaacctcaacattctgatttaaaaaaaaaaaaagaatagaagtttaagtctgactaatactctggcccacatgaacagacaagacatggccccacttgcctttcttgggcctccagcagaggtcatagccatttccattccttaccatgacagtctgggggcaggatccgatattgtgagacccaaccctgtgcctaatcagaccatgg

SEQ ID NO: 695881 - DNA, 629 bp, Homo sapiens
tactatgcagccatcaaaaaaggatgaattcrtgtccttcgtaaggacatggatgaagctggaaaccatcattctcagcaaactatcacaaggacagaaaaccaaacaccgcgtgttctcactcataggtgggaattgaacaatgagaacacatggacacaggaaggggaacatcacacactggggcctctcatggggttgggggagaggggagggatagcattcggagatatacctaatgtaaatgaagagttaatgggtgcagcacaccaacatggcacatgtatacatatgtaacaaacctgcacgttgtgcacatgtaccctacaacttaaagtataataattaaaaaaatgtaagccagttaagctgttgattcaaagaaaagcattgatttcagataccttttcttgggagtgtcaacctcaacattctgatttaaaaaaaaaaaaagaatagaagtttaagtctgactaatactctggcccacatgaacagacaagacatggccccacttgcctttcttgggcctccagcagaggtcatagccatttccattccttaccatgacagtctgggggcaggatccgatattgtgagacccaaccctgtgcctaatcagaccatgg

SEQ ID NO: 695882 - DNA, 588 bp, Homo sapiens
gatgcaaatgttctgcttagagatgaattagcttcttatctccagtgcttgaatggacaagtgctctgtaaatatttgtgaaatgaaaggaaacccagggcatttaaaacattatttttggccaggcgtggtggctcaggcctataatcccagcactttgggaggctgaggcggggaggtgggcggcggtgcagaatggctttaaaggaaaggatcagaaagcaggacctctctggccccttgagactctgagtgtcctgtggtgcccagttgagaggtctaacttaggatgcctgtacacttctggcttctccctgagtgctcaaaaacctaccttgcgagcaggcattttctgtttattktctttcattcctacaagcctgtcaatagtgcatctctttggctcacctatgagcaacaagaaaagaccacaggttgtcttgggaaacacggaatggggagacccaaactggttcttgctgtatcatgtaccagttgctccccttggacagagaaattaaattctttggctatgtggtgtgtattttttaaagagagagagggggaaatgggattttccacacccct

SEQ ID NO: 695883 - DNA, 595 bp, Homo sapiens
tgctgccctccttttcagtcgagaaatccttctctgcctcctgtgaggaagggaagcaggctctatagaaaatgtgctctcaataatgtttgcccatcaaatgaaaacacgacaatccctgtgttcaggagaatgagaacaactcacagtgaagttgagattctgttcaaacaaagtacttccttccccacttggccagagcaaactatcattttggaacccatcacactctctaagaaagacaagatgtctcactcccagcaaagatttgagtacaggcttatgggggggggccctacagagtcagttaacctttccggacctgagtcctctcccctgtcaaactaagcacagggttgggctcaaacatttcagaatttccaataacagaaaccaaggctcagtctgcagatgctttaaagcacttagctttaagacgttcagagaatgagctcacattcaaaaaactacagaactgaaaagaaccatggatgttcctgtattcaaaatccctacatcaggttgatggtctttcctatgtgtcaccttggcaggctgtagtatccaacggtttaatccaacactgmcctaggtg

SEQ ID NO: 695884 - DNA, 580 bp, Homo sapiens
cgcatttatcatgtcaccatcttggcaagccactgtagcaaatgtaaacccttactggatactgaacatccttcacaatctgtcaacgtatctttcacatgaaacttctaactacttccttcacaaatcatctactctgacctgtcaggtgyacttgttcttttccaaaacagctttagtcattttaatccttgatcatacccccaataccttccctttcggaattttaactatcaaagatccatcttcgagtcccactttttccataaagcagtcctctctcctctgaaagagtagccaccctttggaacactgattgaacattttgccaaacactgagtcctcttacacatttatgagatattgtcttcacatctagattgtaaatttgagatacaaagccatactttttcacaataagcctgtaagtgagaatctggaaaatcatgattttctcattaattccataaaataaaatagcatttgcaggagaataactcagaccatagaatattatactggatccactttcctaaagacaaaataaccgcttaaaattttttaaactgaggttttgaga

SEQ ID NO: 695885 - DNA, 592 bp, Homo sapiens
ttgatccttcaggttttctccagaaaaactagatcttccctctgagccctcctgaagtaggaaaaacagtaaccacgatggtcagaaaaaaataaccaaaattactgagcacactgtgccagacactaaactaagctcttggtgtgcattaactgattaaaaattcatcacaccactatgatatagatwttattatagtccccatgaggaagcaggaaaaaagattaagtaacttgcccaagatcccagagtgacggaggtgggatagcaacctaagtcaacttcagaactcagactcttaaccagtaggccagtctctgtttaagagatacttagttaccacttgaaaaggcgtatggctgtcttccatgttactgcttaaaaacagacatctttctcagtatgcagtgagcatgcagccacactcaatctttcctcaagccatgtgaacacagactagaccttcaaatatgctgttccctttatttagaatgctgtatccctcttcttttcctatctcctacttatactctgcctccccttaaacatctcttactgcaggtcacctgctgcaatgtgtatccctcaccac

SEQ ID NO: 695886 - DNA, 592 bp, Homo sapiens
ttgatccttcaggttttctccagaaaaactagatcttccctctgagccctcctgaagtaggaaaaacagtaaccacgatggtcagaaaaaaataaccaaaattactgagcacactgtgccagacactaaactaagctcttggtgtgcattaactgattaaaaattcatcacaccactatgatatagatattattatagtccccatgaggaagcaggaaaaaagattaagtaacttgcccaagatcccagagtgayggaggtgggatagcaacctaagtcaacttcagaactcagactcttaaccagtaggccagtctctgtttaagagatacttagttaccacttgaaaaggcgtatggctgtcttccatgttactgcttaaaaacagacatctttctcagtatgcagtgagcatgcagccacactcaatctttcctcaagccatgtgaacacagactagaccttcaaatatgctgttccctttatttagaatgctgtatccctcttcttttcctatctcctacttatactctgcctccccttaaacatctcttactgcaggtcacctgctgcaatgtgtatccctcaccac

SEQ ID NO: 695887 - DNA, 609 bp, Homo sapiens
gagatcataacagcactgacctttatgtaggccatcaatcttatttcacatccattgyctattttgatgacgtctttacactgtgtcattcgggtcacaggttaatgatctactttgtattcactggaggtgatcacagtggagtctcaggtgggccacaagttgagacacaaggacatcatctcctgtgtggtggagatgcccaagtttctcagcctctcactctcccacccacttgccttgtcctcaagcattggaacagagtcacttgccatgttgatctagatcaatgaaactttagagcatgagttttaaattttaacttatttctgaaattgttgatgcagaatcaatgcacacaactgtgcaaaccagggttgagtggcccagttctcccctacagctccctgcgtgcggtaacttatagacgtccctaacactgaatggatggagtctggaaaccaccatcagaggtggtctggctacaggtccacatgcatcgttagcccctctccatttctcacatggcttcaatcaagcagagatttcatctccgtctgcttctgccagactatcaatccaaaaagctaatgggacacttgtttgttg

SEQ ID NO: 695888 - DNA, 3263 bp, Homo sapiens
tctagtccgtatttataagatcttaactcatgttcagtaattaacactaatatacacaaatgaatatagaacaaaatgacttatacacactttcaggtatctcacacacaaatgctttaaatgccgttgaaaagttttgggaccttttcagtcactttgaatattcggttcatcgatcttcctttgcccccaggcaccatttgggggtctcaccatatccttctctctgtgactcctctggttggtgccatggctggcaaagtcctaagggatgccaagagaattcccctccatcagagcatctggagaagcacaccacctacagagctcctgggacaggtccaggaggttaaatgtctgtttagaaccattatccattctctattacacacacaggggacagtccacgaccattcattgcatcaagatcaaaacataatgtgttgcaggtagggaagatacacatcacttggcaattgcattgcatttgctattcaggttctcaaagccttgaaagacagcaaatgtctacaattccccagtgcgagatgatgggagatataaactaaatggcagagatcaaaatctcttctttggcattccgcaacacttgagacagcttagtgccaagagcaccagatttagagtctaaagacctggatgtgaacctgaattttagtttagatactggtatgtttccgaacctcaaatacaagacctgtaagatggggataataaagacttcctcctggtgttactgttcaagaatcagataaagcaaatatgtgagatattgggatcatctttgcttaccttgtaaaaggcagactctaaatcatttctaggaattatcaaggtctataccttcagtgctgtaactattctcacgttttgccagtagctttcctccagctggagtaaattgtaaaatccctcactggtatcatgatgctgtttaaggaggtggtttttcagatgagagcaccgaggccaatgtaaatgccacatgcatcaaattcatgtgtgctgattcaaagactaatagtcttttagctctgcaccttctttgtgacaaaataaatttgtcatcagtaatgaaacttaaaacttggctggcaaatccttaatgctctttgcctttaaaataaaatttgaaaaaccttcagttctatgtattgacatctttacctctgatatattaacaaaccattagcagtttaagggctgaaaggcccaagtagtgttatgcatgacgtctgggacatagctgaaattcaagggtctcacaccatgacctgcccattatttcaactgaaacctcactcccgcacctcgggcaccctaggcacaggggatattctcagaaaatggaayataaatggcattggaacatggagacaagaccttattaactagaattatcactcgactttggaaattactttaaaactgaatgccattctcatggatagtaaaatatgacacccaaggcggttctcaacactttgaaatcatttgagtttggattagacaaaactccataaaatatacacatttgcatgcacagagaaagatcaagattatgtgtacatgtacttagcttacgaattataagtggattttttgtgtatttttacattgtttatacccacatataggcatatatgaatatttacaacgaagccaaaatttttttaaacgtactccaaatcaagttaatactcattaagaaaggaagaacaaaatacagcaaattctccattatttgtgtcaataaggttaaggcacaggttcagattttgctttgaaatgcagaatgtgatgattttgcagcatgcttattcatattaaaattttcccctcaggacaggtggagaatagctaactccacagctatgagaagtagcctgggggtgaatcaaacaacaaaatatactaggtgcatggaattttacttggaagtcacaatattcccattttccaggtaagaaaactgagtcttaaaccacagtggtaataaagaaaaaattgttcatgacatgtgttaaagacaggaaggaagactttattcaatgggagactattgtaataggtataggggccactgcaatataatttttgaatgggagagacagattggaacgaattccaaatacagcaagaccaagtggaaatttacagccaaggaacagggtagggaccagtggatggaaaattaataagaggaaacatcagaggtaaggggaacgtacttacttaatacagcaaatcaaacacactatttcactaattcttttttacctgttgtttcaggtgaatgaagtcacaatttgtgtagaacaagtgagtgaccctttacaaaaattcttagcaggactcttgctgaagacaggccagggtgatcacccattatgggggatggtgaaggatgaggaatctgatcagacatagaaggtgatcgaatattgagggggaggggttctgggtcaactgacttagcaggattcttgccaacactggaccatgcatgagaatccaaacatcaagacctaatcagggagagactttagaaggagagaatcttggctgggtgcagtagctcatacctgtaatcccagcacttgtggaggccaaggtgggtggatcacggggtcaggagttagagaccagcctggccaagatggtgaagccccatctccactaaaaatacaaaaattagccaggtgcagtgtcgggtgcctgtaatcccagttactcgggaggctgaggcaggagaatcacttgaacctggggggcagaggttgcagtgagccgaggtcacaccactgcactctaacctgggcgacagagcaagactccatctcaaaaaaaaaaaaaaaaaaaaaaacaaggagagaatctttgtcatttgtcaaagcgtaccacaaaggctattcccattttccttttatctttagttaacaaacacttaagtcagtgtaactgtgcaccaggcactattgtaaagagctttatacatcttaactcaattatccctctggaccacccatggaggcagtaccattattagctttgttgtacaggtgaggaaacttaggccagagagcttagtaacttgccaaagattgcatagctggtaggtggaggagaagggatggagtgaatctaggttttgtggggcctgaaacttacacaatttgtggaactatgtaagaaaaataatacaaaataggaaatacaaaattagtcatgaatgagagaat

SEQ ID NO: 695889 - DNA, 3263 bp, Homo sapiens
tctagtccgtatttataagatcttaactcatgttcagtaattaacactaatatacacaaatgaatatagaacaaaatgacttatacacactttcaggtatctcacacacaaatgctttaaatgccgttgaaaagttttgggaccttttcagtcactttgaatattcggttcatcgatcttcctttgcccccaggcaccatttgggggtctcaccatatccttctctctgtgactcctctggttggtgccatggctggcaaagtcctaagggatgccaagagaattcccctccatcagagcatctggagaagcacaccacctacagagctcctgggacaggtccaggaggttaaatgtctgtttagaaccattatccattctctattacacacacaggggacagtccacgaccattcattgcatcaagatcaaaacataatgtgttgcaggtagggaagatacacatcacttggcaattgcattgcatttgctattcaggttctcaaagccttgaaagacagcaaatgtctacaattccccagtgcgagatgatgggagatataaactaaatggcagagatcaaaatctcttctttggcattccgcaacacttgagacagcttagtgccaagagcaccagatttagagtctaaagacctggatgtgaacctgaattttagtttagatactggtatgtttccgaacctcaaatacaagacctgtaagatggggataataaagacttcctcctggtgttactgttcaagaatcagataaagcaaatatgtgagatattgggatcatctttgcttaccttgtaaaaggcagactctaaatcatttctaggaattatcaaggtctataccttcagtgctgtaactattctcacgttttgccagtagctttcctccagctggagtaaattgtaaaatccctcactggtatcatgatgctgtttaaggaggtggtttttcagatgagagcaccgaggccaatgtaaatgccacatgcatcaaattcatgtgtgctgattcaaagactaatagtcttttagctctgcaccttctttgtgacaaaataaatttgtcatcagtaatgaaacttaaaacttggctggcaaatccttaatgctctttgcctttaaaataaaatttgaaaaaccttcagttctatgtattgacatctttacctctgatatattaacaaaccattagcagtttaagggctgaaaggcccaagtagtgttatgcatgacgtctgggacatagctgaaattcaagggtctcacaccatgacctgcccattatttcaactgaaacctcactcccgcacctcgggcaccctaggcacaggggatattctcagaaaatggaacataaatggcattggaacatggagacaagaccttattaactagaattatcactcgactttggaaattactttaaaactgaatgccattctcatggatagtaaaatatgacacccaagscggttctcaacactttgaaatcatttgagtttggattagacaaaactccataaaatatacacatttgcatgcacagagaaagatcaagattatgtgtacatgtacttagcttacgaattataagtggattttttgtgtatttttacattgtttatacccacatataggcatatatgaatatttacaacgaagccaaaatttttttaaacgtactccaaatcaagttaatactcattaagaaaggaagaacaaaatacagcaaattctccattatttgtgtcaataaggttaaggcacaggttcagattttgctttgaaatgcagaatgtgatgattttgcagcatgcttattcatattaaaattttcccctcaggacaggtggagaatagctaactccacagctatgagaagtagcctgggggtgaatcaaacaacaaaatatactaggtgcatggaattttacttggaagtcacaatattcccattttccaggtaagaaaactgagtcttaaaccacagtggtaataaagaaaaaattgttcatgacatgtgttaaagacaggaaggaagactttattcaatgggagactattgtaataggtataggggccactgcaatataatttttgaatgggagagacagattggaacgaattccaaatacagcaagaccaagtggaaatttacagccaaggaacagggtagggaccagtggatggaaaattaataagaggaaacatcagaggtaaggggaacgtacttacttaatacagcaaatcaaacacactatttcactaattcttttttacctgttgtttcaggtgaatgaagtcacaatttgtgtagaacaagtgagtgaccctttacaaaaattcttagcaggactcttgctgaagacaggccagggtgatcacccattatgggggatggtgaaggatgaggaatctgatcagacatagaaggtgatcgaatattgagggggaggggttctgggtcaactgacttagcaggattcttgccaacactggaccatgcatgagaatccaaacatcaagacctaatcagggagagactttagaaggagagaatcttggctgggtgcagtagctcatacctgtaatcccagcacttgtggaggccaaggtgggtggatcacggggtcaggagttagagaccagcctggccaagatggtgaagccccatctccactaaaaatacaaaaattagccaggtgcagtgtcgggtgcctgtaatcccagttactcgggaggctgaggcaggagaatcacttgaacctggggggcagaggttgcagtgagccgaggtcacaccactgcactctaacctgggcgacagagcaagactccatctcaaaaaaaaaaaaaaaaaaaaaaacaaggagagaatctttgtcatttgtcaaagcgtaccacaaaggctattcccattttccttttatctttagttaacaaacacttaagtcagtgtaactgtgcaccaggcactattgtaaagagctttatacatcttaactcaattatccctctggaccacccatggaggcagtaccattattagctttgttgtacaggtgaggaaacttaggccagagagcttagtaacttgccaaagattgcatagctggtaggtggaggagaagggatggagtgaatctaggttttgtggggcctgaaacttacacaatttgtggaactatgtaagaaaaataatacaaaataggaaatacaaaattagtcatgaatgagagaat

SEQ ID NO: 695890 - DNA, 3263 bp, Homo sapiens
tctagtccgtatttataagatcttaactcatgttcagtaattaacactaatatacacaaatgaatatagaacaaaatgacttatacacactttcaggtatctcacacacaaatgctttaaatgccgttgaaaagttttgggaccttttcagtcactttgaatattcggttcatcgatcttcctttgcccccaggcaccatttgggggtctcaccatatccttctctctgtgactcctctggttggtgccatggctggcaaagtcctaagggatgccaagagaattcccctccatcagagcatctggagaagcacaccacctacagagctcctgggacaggtccaggaggttaaatgtctgtttagaaccattatccattctctattacacacacaggggacagtccacgaccattcattgcatcaagatcaaaacataatgtgttgcaggtagggaagatacacatcacttggcaattgcattgcatttgctattcaggttctcaaagccttgaaagacagcaaatgtctacaattccccagtgcgagatgatgggagatataaactaaatggcagagatcaaaatctcttctttggcattccgcaacacttgagacagcttagtgccaagagcaccagatttagagtctaaagacctggatgtgaacctgaattttagtttagatactggtatgtttccgaacctcaaatacaagacctgtaagatggggataataaagacttcctcctggtgttactgttcaagaatcagataaagcaaatatgtgagatattgggatcatctttgcttaccttgtaaaaggcagactctaaatcatttctaggaattatcaaggtctataccttcagtgctgtaactattctcacgttttgccagtagctttcctccagctggagtaaattgtaaaatccctcactggtatcatgatgctgtttaaggaggtggtttttcagatgagagcaccgaggccaatgtaaatgccacatgcatcaaattcatgtgtgctgattcaaagactaatagtcttttagctctgcaccttctttgtgacaaaataaatttgtcatcagtaatgaaacttaaaacttggctggcaaatccttaatgctctttgcctttaaaataaaatttgaaaaaccttcagttctatgtattgacatctttacctctgatatattaacaaaccattagcagtttaagggctgaaaggcccaagtagtgttatgcatgacgtctgggacatagctgaaattcaagggtctcacaccatgacctgcccattatttcaactgaaacctcactcccgcacctcgggcaccctaggcacaggggatattctcagaaaatggaacataaatggcattggaacatggagacaagaccttattaactagaattatcactcgactttggaaattactttaaaactgaatgccattctcatggatagtaaaatatgacacccaaggcrgttctcaacactttgaaatcatttgagtttggattagacaaaactccataaaatatacacatttgcatgcacagagaaagatcaagattatgtgtacatgtacttagcttacgaattataagtggattttttgtgtatttttacattgtttatacccacatataggcatatatgaatatttacaacgaagccaaaatttttttaaacgtactccaaatcaagttaatactcattaagaaaggaagaacaaaatacagcaaattctccattatttgtgtcaataaggttaaggcacaggttcagattttgctttgaaatgcagaatgtgatgattttgcagcatgcttattcatattaaaattttcccctcaggacaggtggagaatagctaactccacagctatgagaagtagcctgggggtgaatcaaacaacaaaatatactaggtgcatggaattttacttggaagtcacaatattcccattttccaggtaagaaaactgagtcttaaaccacagtggtaataaagaaaaaattgttcatgacatgtgttaaagacaggaaggaagactttattcaatgggagactattgtaataggtataggggccactgcaatataatttttgaatgggagagacagattggaacgaattccaaatacagcaagaccaagtggaaatttacagccaaggaacagggtagggaccagtggatggaaaattaataagaggaaacatcagaggtaaggggaacgtacttacttaatacagcaaatcaaacacactatttcactaattcttttttacctgttgtttcaggtgaatgaagtcacaatttgtgtagaacaagtgagtgaccctttacaaaaattcttagcaggactcttgctgaagacaggccagggtgatcacccattatgggggatggtgaaggatgaggaatctgatcagacatagaaggtgatcgaatattgagggggaggggttctgggtcaactgacttagcaggattcttgccaacactggaccatgcatgagaatccaaacatcaagacctaatcagggagagactttagaaggagagaatcttggctgggtgcagtagctcatacctgtaatcccagcacttgtggaggccaaggtgggtggatcacggggtcaggagttagagaccagcctggccaagatggtgaagccccatctccactaaaaatacaaaaattagccaggtgcagtgtcgggtgcctgtaatcccagttactcgggaggctgaggcaggagaatcacttgaacctggggggcagaggttgcagtgagccgaggtcacaccactgcactctaacctgggcgacagagcaagactccatctcaaaaaaaaaaaaaaaaaaaaaaacaaggagagaatctttgtcatttgtcaaagcgtaccacaaaggctattcccattttccttttatctttagttaacaaacacttaagtcagtgtaactgtgcaccaggcactattgtaaagagctttatacatcttaactcaattatccctctggaccacccatggaggcagtaccattattagctttgttgtacaggtgaggaaacttaggccagagagcttagtaacttgccaaagattgcatagctggtaggtggaggagaagggatggagtgaatctaggttttgtggggcctgaaacttacacaatttgtggaactatgtaagaaaaataatacaaaataggaaatacaaaattagtcatgaatgagagaat

SEQ ID NO: 695891 - DNA, 1033 bp, Homo sapiens
taacttatttagaaagttccaggattgagtgaactaaataaagggagaatttttttcctttttttttttttttttttttttgagacagagtctcactctgtcacccaggctggagtgcagtggtgcgatcttggctcactgcaacctccacctcctgggttcaagcaattctcctgcctcagcctcccgagtagctgyagctgggactacaggcgcacggtgccacgcccggctaattttttgtattttagtaaagacagggtttcattgagttgcccaggctggtagcaaactcctgagctcaggcaatccgcccgactcagcctcccaaagtgctgggattacaggtgtgagccactgcaaggcagaaatatttattcatgatttgcctggcctgtgcagagagctcttctgaactcatgctttgctaggtccttcctacaggacaaaccagactgggcaatggaacactcatctttcctatcttccagcagttgtcaatctattatggccagcgttcagtgagactcctatgacatgaaacttacagcttttttcaccaggaattgactttggtcaatttcagcaaagtgtggggtttagtagaaggaaactcacagaatcaggaggggtcttcaaaagcacaagcccagtcctgggaccctaggaggagatgctggaactttctctcaggcattgtgggatgttgactcatctctggcttgccttctatcacagtgtgataaaagtttccatactcttgagagaatgcggaaaccattcttcaacctataggtaccatcaacctataggtacatgtacttataggtactacagggtcacatgtccacttaccagtgagatagagcccaggaaaaaaaatctctcccacctaagaactcacattgtccctagaagaatgtgctaggagactgagcccaagtcatctgtcatcagggtcaaacaggtgctggtttagggtatacccatgtgcaaaatggacaccgagactagcaatgatgttattactact

SEQ ID NO: 695892 - DNA, 1033 bp, Homo sapiens
taacttatttagaaagttccaggattgagtgaactaaataaagggagaatttttttcctttttttttttttttttttttttgagacagagtctcactctgtcacccaggctggagtgcagtggtgcgatcttggctcactgcaacctccacctcctgggttcaagcaattctcctgcctcagcctcccgagtagctgtagctgggactacaggcgcacggtgccacgcccggctrattttttgtattttagtaaagacagggtttcattgagttgcccaggctggtagcaaactcctgagctcaggcaatccgcccgactcagcctcccaaagtgctgggattacaggtgtgagccactgcaaggcagaaatatttattcatgatttgcctggcctgtgcagagagctcttctgaactcatgctttgctaggtccttcctacaggacaaaccagactgggcaatggaacactcatctttcctatcttccagcagttgtcaatctattatggccagcgttcagtgagactcctatgacatgaaacttacagcttttttcaccaggaattgactttggtcaatttcagcaaagtgtggggtttagtagaaggaaactcacagaatcaggaggggtcttcaaaagcacaagcccagtcctgggaccctaggaggagatgctggaactttctctcaggcattgtgggatgttgactcatctctggcttgccttctatcacagtgtgataaaagtttccatactcttgagagaatgcggaaaccattcttcaacctataggtaccatcaacctataggtacatgtacttataggtactacagggtcacatgtccacttaccagtgagatagagcccaggaaaaaaaatctctcccacctaagaactcacattgtccctagaagaatgtgctaggagactgagcccaagtcatctgtcatcagggtcaaacaggtgctggtttagggtatacccatgtgcaaaatggacaccgagactagcaatgatgttattactact

SEQ ID NO: 695893 - DNA, 1033 bp, Homo sapiens
taacttatttagaaagttccaggattgagtgaactaaataaagggagaatttttttcctttttttttttttttttttttttgagacagagtctcactctgtcacccaggctggagtgcagtggtgcgatcttggctcactgcaacctccacctcctgggttcaagcaattctcctgcctcagcctcccgagtagctgtagctgggactacaggcgcacggtgccacgcccggctaattttttgtattttagtaaagacagggtttcattgagttgcccaggctggtagcaaactcctgagctcaggcaatccgcccgactcagcctcccaaagtgctgggattayaggtgtgagccactgcaaggcagaaatatttattcatgatttgcctggcctgtgcagagagctcttctgaactcatgctttgctaggtccttcctacaggacaaaccagactgggcaatggaacactcatctttcctatcttccagcagttgtcaatctattatggccagcgttcagtgagactcctatgacatgaaacttacagcttttttcaccaggaattgactttggtcaatttcagcaaagtgtggggtttagtagaaggaaactcacagaatcaggaggggtcttcaaaagcacaagcccagtcctgggaccctaggaggagatgctggaactttctctcaggcattgtgggatgttgactcatctctggcttgccttctatcacagtgtgataaaagtttccatactcttgagagaatgcggaaaccattcttcaacctataggtaccatcaacctataggtacatgtacttataggtactacagggtcacatgtccacttaccagtgagatagagcccaggaaaaaaaatctctcccacctaagaactcacattgtccctagaagaatgtgctaggagactgagcccaagtcatctgtcatcagggtcaaacaggtgctggtttagggtatacccatgtgcaaaatggacaccgagactagcaatgatgttattactact

SEQ ID NO: 695894 - DNA, 612 bp, Homo sapiens
atattgtatcatacttatgcaagatgatatcattgggggaccctgggtaaaagagacagtggatctctctgtattatttcttaccacctaatgtgaatctacaactgtcttaaaataagcaagctaaaccttaaaaaataaattcctcatcaaaagagtaaaatatattcctcatctcaaacatacatcatttctttgtgttgggaacactcaatatcttaattctagctattagagactatataatgtattactgttaactgtagttggaatcctacaatgggatagaacactaaaacttaccccttctatctaaatggaaatgccaattaccctgatccgatctctataacattacatatattgaaacatcactatgtaccccataggtacaattattatatgtcaatttaaarctaatttgaaaaatgttgtaattaaaaaaattaaatactaaactataaataactaagcatatcacagcaaaagggaaagtgggtagcaaaatggtaaatctgggagttagagaaaagcagaaatgcaagcccacagctctctgcagttgctagcagtgatctgaaagtttgatctaagctttctatcctggtggcc

SEQ ID NO: 695895 - DNA, 586 bp, Homo sapiens
tctaaaagaatacaatggcaccattaaaaaagagtgttatttaagaaatattctctttgggctgggcacagtggctcacacctgtaatcccagtgctttggggaggccaaggcaggaggaccactcgagcccaggagttcaagaccagcctgtgcaacatagaccctgtcrctacaacaaatttaaaaaaacattagccgggtgcagtggcatgtacctgtagtcccaggtacttgggaggctgaggcaggagggaggctaagggaggagatcacttgagcctgggagatcaagccatgatcacgccactgcattccaatctgggtaacagaatgtaccttgtctccaaaaaaaaaaaaaaaagaaagattctctttgaacactgtgtgcctttgagaaaagctatgtgttaggccgagcatgctggctcacgcctgtagtcccagctacttgggaggctgaggcaggagaatcgcttgaaccggggaagcagaggttgcagtgagccaagatgacaccactgcactccagcctgggtgacagagcgagaatccgtctcagaaaaaagaaagaaagaaagaaaagc

SEQ ID NO: 695896 - DNA, 1451 bp, Homo sapiens
ggtgttgtccactggctacagccgagggaggctggcgctcaacgccggggataccccagagccagtgtcatcaagcagaggggagagtgagctgaggtattgatacccctgtgcctgtcagtcagtagctggagggcagctctcagggggccttgattgcctggcttacccccaacatggtcagggtgggccctgccaaagaaaggcctcagtgggggagaacaggtcaggccagtggatgtggctgggccagagcaaggctgatgtcttcacagcctgtcstcagcttcctccctgctgggccttcatccaggctgtgttaagatgttttctgttctaaccttccacaagtttctcccttccgagccctgtctgtcatctttcccttgtccacagaggccacgcctctctctgggggtccctgttggctgacaggagcgtccttacacccacaccactgctgtgtgagggctgagggaagcccatcccccacactctccagctctgtctccactcctggctttgtaccaatagctgctgctctcctcttggggacatgtgccccactgctgcttggccccacagagtcccaaccaagggacctcaggtctggacgatgcttttgtcttgtggtgtttgggtcctgatggggacttggggactgtcttagtgtcccaggcacaattcagccctcaactaggtcattccttaatatgtccgtatcctcactcaagttgtggggagaggcccttcccatattatagctgcagaggccgacttggggaggacaggggagaagctgagaaggtgggaggccccattttgaaatgggacttgttagtcctgtcacacagtgctttggtggctgacagcccggctcagggcctggcttgagggaagggcagtgaggccagacttcctattcagcctcctgccctcccaggttccaccagggtccccactgtggccactgcagacctgagactcaagtctttcaactccatcagctagagctggccccgtggctgcccgagggatgcggggacacaggcagcctgccagcttcccttccatctgccacaaccgagtgtagctggaggtagccagcagtgacagcaacccccgcccgggcccctcaggactcctcacagtgagatgcccagacgcatctgtcgtgggcagtgggtgaggtcaccgagagcaggaacaaagcagacagctgccaacagccaggacccgagtgaggtcactgtcccctcttctggggcctcgctttccccacaccggtagccaaaagccaggaacctctggggtcagtgccaagggctctgcagaggcctgattggaggtaagaggtggtggtccgggagggccagacagcccgatggtttgcacacgttcttcagaatattatcttcactgggagcaagagtccacaggggctgaagaaa

SEQ ID NO: 695897 - DNA, 1451 bp, Homo sapiens
ggtgttgtccactggctacagccgagggaggctggcgctcaacgccggggataccccagagccagtgtcatcaagcagaggggagagtgagctgaggtattgatacccctgtgcctgtcagtcagtagctggagggcagctctcagggggccttgattgcctggcttacccccaacatggtcagggtgggccctgccaaagaaaggcctcagtgggggagaacaggtcaggccagtggatgtggctgggccagagcaaggctgatgtcttcacagcctgtcgtcagcttcctccctgctgggccttcatccaggctgtgttaagatgttytctgttctaaccttccacaagtttctcccttccgagccctgtctgtcatctttcccttgtccacagaggccacgcctctctctgggggtccctgttggctgacaggagcgtccttacacccacaccactgctgtgtgagggctgagggaagcccatcccccacactctccagctctgtctccactcctggctttgtaccaatagctgctgctctcctcttggggacatgtgccccactgctgcttggccccacagagtcccaaccaagggacctcaggtctggacgatgcttttgtcttgtggtgtttgggtcctgatggggacttggggactgtcttagtgtcccaggcacaattcagccctcaactaggtcattccttaatatgtccgtatcctcactcaagttgtggggagaggcccttcccatattatagctgcagaggccgacttggggaggacaggggagaagctgagaaggtgggaggccccattttgaaatgggacttgttagtcctgtcacacagtgctttggtggctgacagcccggctcagggcctggcttgagggaagggcagtgaggccagacttcctattcagcctcctgccctcccaggttccaccagggtccccactgtggccactgcagacctgagactcaagtctttcaactccatcagctagagctggccccgtggctgcccgagggatgcggggacacaggcagcctgccagcttcccttccatctgccacaaccgagtgtagctggaggtagccagcagtgacagcaacccccgcccgggcccctcaggactcctcacagtgagatgcccagacgcatctgtcgtgggcagtgggtgaggtcaccgagagcaggaacaaagcagacagctgccaacagccaggacccgagtgaggtcactgtcccctcttctggggcctcgctttccccacaccggtagccaaaagccaggaacctctggggtcagtgccaagggctctgcagaggcctgattggaggtaagaggtggtggtccgggagggccagacagcccgatggtttgcacacgttcttcagaatattatcttcactgggagcaagagtccacaggggctgaagaaa

SEQ ID NO: 695898 - DNA, 609 bp, Homo sapiens
gacgtcttaaggggtgtgaaatgtttccctttaacagagttgaggctgagtgtggtggctcacacctgtaaccccagcactttgggaggctgaggtgtgtggatggcttaagcccaggtgttcgagagcagcctggacaacatggcgaaaccccgtctctaccaaaaatacaaagattaactgggcgtggtggcacatgcctgtagtcccagctactcaggtgacaggcgggagggtcacctgagcttgggaggtcgaggctgcagtgagccatgattgtgcctctgcactacagtctgggtgacagagtgagaccctgtcataaataaataaataaatagtgagttgaacccattcacatttaatatagttactgatttctgatattttatgttttttattacattgttctctttattatttcttttactttcttatttcctaggattttttttttatacacygaattttctttttttaaaactctcttctggttgtttgaaaagttatacgtactatttctttttttttctttttttttttttttagagatgggatcttgctatgttgcccaggttggcctttgaactcctggcctcaagggatcct

SEQ ID NO: 695899 - DNA, 654 bp, Homo sapiens
aatctaaaatttcagttccaattgagcaataaaattctttctacatttctctttctctttaaaatagtttcttaaatgtcttaatcttaagatctcagtataaattttatcagtttatttatatttgttaccactttttcatgttttgaatttaattatctttcttgaattactttttcccccccgaaggaaatattttcagaaaggatggttgggtgataaactttctgagcccttcatggtcaagcttttcttatttgcaacatggagatcaaaatacctatcccacagaattgctgaagatgaacgaattcatacttttaagcttttagcagagttcaccatataagcaatcaataaatgttagctcttgttactattacaatgagcacatattattttgtaattataaggaaaactatgcacggacgcacgcaaggaaggagggatagtggtaaagaaggtgataatacggaaagtgatgtgacagaatggaagagcaggtgacataaccactattttcagcttggtaaatgtggaaaagtcctgagcatttctgccaaccagcttaacctgggctatgctgtcatccatggtccagacagccacgtrggtgttagaagccacatggcccatctgtctcctctgaggtca

SEQ ID NO: 695900 - DNA, 419 bp, Homo sapiens
ccatttccacagatgtaccattgtggtttggcatatcactcgtgggggcggccatgcatgcgggggccgggggtaaatgagagctcttggtaatttctgctctattttgctgtgaagttaatgctgctctaaaaaataaaatttatcaagtttttaaaaaaggggtggaggaagctatttccgaccagtgaaatgatatacccaggaygacattgctcatctgggggcaaaacctggtcttctgaatccagggttcctaccaaacactggaagaaaggctgttgcctgcaggttcagggaagtgtatggtacatttttaaaataatgccacagtgcatgcaggggaggaacgccaatcttaaggctttgatttctggaaatttacttttgtggtgtcactcataactgattggaaagga

SEQ ID NO: 695901 - DNA, 610 bp, Homo sapiens
cagctaaaatataatacaatgctggaaaagtacaaaattcataatttgaattaaacctgagttcaataaaagcaagagatgagccttctggggctggtgaagagggaataacacgcctattccttcccaccaagtatagttgaggcctctggacaatgtacaaaatgaaaccacctgaagactctagaaagttcacaatagcaggacgattggagaagggagtcaaaayttgaggaatgaatcgtctgaggataaatttttctgccttcctcttttattttctggctttaacctgagagtggccccagtgtagaactggggccccaatgcagaacaagtgctggcaagaaaatctcagagagaaaccctgcctttctaaccggaggaccaggaaaaggtgctgctgtgagtcagagacgggagtgggaatccccgttaattgagtgtgaggacttccccaccagccctgagtgcagcctttgtcctcagctgctctgcagtgcagcggtgacacaggtgccaaaaactgagagagagcctgtctttttggaccgagtattgggaaaggggaattccagggaccagagtttgtggctgcattttcctcttt

SEQ ID NO: 695902 - DNA, 627 bp, Homo sapiens
gagggagcgacccaaatcacattttctagaaggtcatacctctgagtagtaaccttggttcagtgagaccactcacccatggagctcctgtgtaatttgaggtcagggtgtgtgatgctggtctcagttggttgctgaatgggatgaacaccagctgccctatttcttcattaaggggaaagaagtctgtcttgtgcatacactggggactggccttggcccatcacattactgtcctgttgcttctttcattccacaaatgttatttgttcaggtggtcaccaggtagacaatagaaggggaggggtggctcgcaaggakggtggattagtttcctgcagccgcagtaacaaattaccacaaacttggaggcttagaacaataaaaaatcattccttcccatttctggaggccagaagtctgaaatcagggtgtcctcagggctgtgcatactctgaagcctctagaggaaggtcctttcttgcttcttctggcttctcagggagtagtgttagcacgtaggctggtcatttggaacaaaatgcaagctgactgcccagccgagccagcagggtcaaagagctcagtctaaaaattaaactattgaaagcactacaagaaaacaag

SEQ ID NO: 695903 - DNA, 627 bp, Homo sapiens
gagggagcgacccaaatcacattttctagaaggtcatacctctgagtagtaaccttggttcagtgagaccactcacccatggagctcctgtgtaatttgaggtcagggtgtgtgatgctggtctcagttggttgctgaatgggatgaacaccagctgccctatttcttcattaaggggaaagaagtctgtcttgtgcatacactggggactggccttggcccatcacattactgtcctgttgcttctttcattccacaaatgttatttgttcaggtggtcaccaggtagacaatagaaggggaggggtggctcgcaaggatggtggattagtttcctgcagccgcagtaacaaattaccacaaacttggaggcttagaacaataaaaaatcattccttcccatttctggaggccagaagtctgaaatcagggtgtcctcagggctgtgcatactctgaagcctctagaggaaggtcctttcttgcttcttctggcttctcagggagtmgtgttagcacgtaggctggtcatttggaacaaaatgcaagctgactgcccagccgagccagcagggtcaaagagctcagtctaaaaattaaactattgaaagcactacaagaaaacaag

SEQ ID NO: 695904 - DNA, 678 bp, Homo sapiens
ttttttaaaaaaaacaaacattggaacaaatataataaaacttctttacattgattatctaaacattgacatttaatcccctagcctttttgtctaacagttttgtgttgtgccagccaccgggcaaatggtgccttcctgccagaggggcgtgggaagtaagaaagtgctgagaaggttctggagggagaaaggcccctcctgggacagaggtggtgttccccacactgcagcctcagatacctgtgggccctgagttttcctgaaggcactttctgctgctgtggaggtgacgattggacccatggatggccggctgtgtgtttatcttagtgcttctcaccaggacagcctcccatcaccttcactcagacccttgacctcctccaccttgatggttcttttagcgaggacaagctcacacgttcaaatagagaaggggcatggccagctttggagaaagagtactgttagcatttttggtatctttcaatactgcctgactgtggaataagaagccacattttacatatagggattttgccttacataactttagataaagcaccatygatcaagctacatgtgtggcccttacaacattttagtctgcaaaaagtcaggttctctattccaggtgtcagcggtgtgtcggggaacttatgtggaggctacaga

SEQ ID NO: 695905 - DNA, 672 bp, Homo sapiens
ctgatctaagcaggaggtttgtaatctgggtgaagtaaaaggagcaagagatgtgagcattgagggtgtactgtttctagctcctggaggcagatagctgaggcagcaggaggaggtcacctcaacttcccttttattaggttacttgccttgcaaaaggggtcatttctgcagcttggtgagctcctgggtcctctgaacaccatggacttaactttttgctgtagaaggtagaagggagcttgctctattactgtacattctcttgactttggctagcagaagcaggaagtagagaaagtgtcagatgcttagggctggccttgagtgttagtatagatatataagtaggtatttggaaaagctgctttctaattctggatatgtactaatggcatcacaatgttccaaaagaaaaawttggttaatatgaaatcacaatgaaagcatagggagtattacttgctttgtagacatttatttgttctttccatgtattttgagcatctcaatgcaggatgttgtttgaagcatgaaatataaacagcttggccttgtaggcagagtatgaccagttgtggaaaagattagcaacattttgtgaagtgctaagcacacagcacacactcatattgagtgcagaaatttgatcatgtaactcatgtttatatc

SEQ ID NO: 695906 - DNA, 428 bp, Homo sapiens
ctgtattttgcttacaatcaggtgaacctcactctatacaacagttgaatcccccaaacattgtgtgtgaattttaagtccaagtctaccttaaataggcagggctggagggggtcactatttatagtaaatatccaatgtgctttttttggcaagcagagaagtcttctattttaacttttctgttttgtaaatgtcacctttatacacacaggcatgcatgcatgtatacacattgtggcattcaagtctgtgaggaccaagtatctagctgtgctttaattctaaaaggcgaaggctttgttaagtagctcaaactgcaggggaaattatgatctgagttyaagctaatatatcacgaaaaagcctagacacagcatctgtcaacttgggtgatcttgcttctatctgggcagccacctggtaaa

SEQ ID NO: 695907 - DNA, 611 bp, Homo sapiens
tgagggttgaggccctgactcggacctcccttctccagccaggcctgaccatccctgcaactctcagcctcctactcatgtcggctgtgagagcctgtgcttaaataagatatcaggccttactggagacactcaaggataggttgaacaactatttttccagagcagaaaggaaactcatgcatcagaaaggccagaagtatatgactgtataaataacagaatctactcagaacagtttaaggaatttcttgggacctacaataaacttagagaaacctgctttttggactgtgttaaagacttcacaacaaaagtaaagcctgaagagaccacctgttcagaccattgcttacagaaatatattttttttaacttttaagttcaagggtacaagtacaggattgttacacagggaaacttgtgccacaggggttggctatacagattatttcatcacccacgtattaagcctagtacccattagttgtttttcttgattctctccttcctgtcaccctccaaaaggccctagtgtgtgttgttcccctctgtgtgtccatgtggtcttatcatttagctcccacaaatatatatatayatatatatat

SEQ ID NO: 695908 - DNA, 611 bp, Homo sapiens
tgagggttgaggccctgactcggacctcccttctccagccaggcctgaccatccctgcaactctcagcctcctactcatgtcggctgtgagagcctgtgcttaaataagatatcaggccttactggagacactcaaggataggttgaacaactatttttccagagcagaaaggaaactcatgcatcagaaaggccagaagtatatgactgtataaataacagaatctactcagaacagtttaaggaatttcttgggacctacaataaacttagagaaacctgctttttggactgtgttaaagacttcacaacaaaagtaaagcctgaagagaccacctgttcagaccattgcttacagaaatatattttttttaacttttaagttcaagggtacaagtacaggattgttacacagggaaacttgtgccacaggggttggctatacagattatttcatcacccacgtattaagcctagtacccattagttgtttttcttgattctctccttcctgtcaccctccaaaaggccctagtgtgtgttgttcccctctgtgtgtccatgtggtcttatcatttagctcccacaaatatatatatatayatatatat

SEQ ID NO: 695909 - DNA, 789 bp, Homo sapiens
aacctaaatttaatccagaaaaacatcaaacccaaactaatggaaattctataaaataactgcccagtaatcttcaaaagccttaaagtcatgaaagacagtgaaaaacggagggatcctggattaaagactaagatgacatgacaaatccaaaatgtgaaaggatattagtgaaacagacaaaatctgaataaagtctatagacaatagtatcgtattaataatttcctgattttgatcactgcaatgtgctagctgtataagaagggaaatataggtattcagaaaatccttgtactattttttttaactttttttaagtctgaaattatcttgaaatcaagttttttaaagtgctataaaaaatggagagtacatattgaagagaaatatcaaaatgcagatattcagagattttcttgaaaattataaaaagagaaaaacatcaaaggatgttacaaatcagtaaaaacacataaagaaagcttggtggtgaaaacaatggacacaagagatatagagtaccctttcaaaaagtttcgcaaaagggaaataattcagtaacaaaaatgcttcatgaagtcaaatgtaaggtctaagagacatattcaaacctgactggagaaaggtaggargaaattaaaattgttggaggggatgagctaagtgtaggtaccaggcccttggaaggccaacagcagtgggatgctagcactggaggacaggctggctttaaatagttgtctatttcagtagaaaatccataataagacaacttgaggtaaagca

SEQ ID NO: 695910 - DNA, 617 bp, Homo sapiens
acacagcctgggtaaaacttagtatttctaacaaaaatccaagaactgataaaagaacgaaccatcctacttctaactcaatacacaagctccctggatagcattacacactgaacatatatttgtacacctgtgaaaacaggtactacagttactattaacagttgctattactacccagcctaatgacagtcattcaatcatcaattatatcctgagattaataatctacacaactctgaataagtgagccctccttaaatgatcatcacaaaaatcacattcgagtaatttagtacctacattgaggtactaaaattactccaatgtgtaattttactcgaatgtgtaaaattacattgaggtaattttaattttttaatttttctgcccacctatacattacatggttataaagcaaagtgtatatgaattttttatttcttaacaaaacagtgtcaagtcttcccatttaagtctacgttgttatgatatcaagggtaaaataattgggtataccagaacattttcagtgtgaaatctgaaattactyttcaaccttctgatcattttagatcctagtataattgtgtaaattatgccaatgttacatcaaa

SEQ ID NO: 695911 - DNA, 1953 bp, Homo sapiens
aatttgtatccaatcctgagaaaatgtccaatactacaaaggtaaatgagcttttactcctaaatatttgttcttatgcattttgttccttttcagttttgtatttgtagatattattttaaaaatatccactcttatttgcttccaaaaacgttgatggctactgggactggttgcctggtacaggggcttcggtatactgtactgttggcatgagcagtattatcccaaatagagtaattttttttttctgacagtctcgctctgtcgcccaagctggagtgcaatggcgctatctcggctcaccgcaacctccgcctcctgggttcacgccattctcctgcctcagcctcccaaggagctgggacggcaggcgcccaccagcacgcccggctaatttctttttgtatttttagtagagacgggggtttcaccgtgttagccaggatggtctcaatctcctaacctcgtgatccgcccgcctcggcctcccaaagtgctgggattacaggcgtgagccactgcgcccagcccttaataattataaaaaaaagtgtaatggccaaattatggttttgccacacgatgaactattaagcaagtattaaaacattttacagttaaggaaaaacccaaacatatgaagaaaattcaccctaaaataattgcttttagcttctgggattaaatggtttttttgtttgttttttgaggcagagtcttgctctttcgcccaggctggagtgcagtggcagatcttgggtcgctgcaacctctgcctcctgggttcaagtgattctccagtttcagcctcccaagtagctgatactacaggcgcccaccacagactaatttttgtattttagtagagacggggttttgccttgtcggctcggctggtctcaaactcctgacctcaagctcaagtgatctgcccaccttggcctcccaaaatgctgggatttcaggcatgaggcaccatgcagggcccctaaatggtttcttactttatactctttgaggttttaaaaaatgtaatcctagctttcacgatcttgaaataaaaacaattgttaccaattgatgagctgcttcccatcatctttttaaacctaatgtttagaaattctcaattctaattctcaaaattacttggtgtttcaaccaagtatttctattgcaaactcatggaacaaatggagattgtgataagcagatacatctttaggtctatctgtgtgggttagcagagattagtttttagtttgacaattcttgttttaatgcgaaaaagtctaaatgtctgacaaattatatattcttgaaataaaatactacacagtgcttacaaacgctgtgtaagtgtattcactgaaatgggagaaaggtcacagtatgataaagactacaaaataggatgtacaagcatagaataggatctgagaaaaatgcatctttaaatagctacttaaatagctgtttaagtgaattatgggtgattttagcttgcctgcagttcctgagttttttttccaatgtgtattaatttctcccctatgatgacacacatatttctcatccctgcatctgtccatctccccaacctcatccctaaccccacaagacttttatacacatttcccaaactgctacaacagaacagaacttccccctggggcctccatgattaccatgaatccaagtactaagtaccaagatctgtgccttaaatcctgattaacccacatttgacgcacgtcaagctcaatctctgagaagtcaagagaatgcagggttcttgttcactagtttttctaatcaacmaattgctgtctgataagaagttctcttccttatacttttagatgtctgatattggtacagccagtcaaccattctcatcactcaaaagtactgtcgactctgtttaaacggcaagatattaactttctg

SEQ ID NO: 695912 - DNA, 1489 bp, Homo sapiens
tcgaggcttttgtagtcctggtatttctttccatccataatctgtctcattcagcatgaaatgaagaggaactccagtggaaaagaacatatgattcagttagaaaaccttacatactttttacctgctgaccctgaatttgggggcaagatttttaacgttttcccagctataaaatgaagagagaaatatgaccacctacctcttaggggtatttgttttataatttattctttcaagagaatttatttgcgtacatgctgggccagacactgggctggttgattgaagggactttatggtctagaggaatagttagatgtgagcattctgtaagtagataaaataactgtctatgtgaatatggagatggtccaccaatctcaggccttatattaagtctccgaaaagagttgatacctcacttggtattggaagatttagtaggagctcagtaagtggaaaaagatagtcaagacactatgggaagatggatttatacactaaggcaatgaaatttatgagagtatgtttcattcagtgaagtcatactttggatggaatcagaggtttcagtagaacccaggatatggaagtgggtaaagataagagctgaggcaagaaaagttagtagggatgatattgtaaagggccttctgtgtctggacttttttcttggcaatgagaatgatgggaaaaggtcagtgtggagtgatttacatttcacaaagcctctgactcagacagcaacacagaagattgttagagataagatgcagaatctgggactatatctttcatatttacatcctcagagccaaatacagctcataactcgtagtaggtgttcacctctgaaattcgaggcaataattaactggggtaccaaagtcaatgaaacactccggagatattcagcaccattcttcaaattgaatgtaaatgggacaggtttgtttattgtaacttgctattttaaaaaaaattatattttgagatctatttatactaatacrtataaatctatttcagcctctgctgtgttttatcttatctcatttttattttaatatctaatctccgtttttagatcctaccctgatttgtgctcaggtactgtcatattatataaaactcttgttttgtggaagaaagggatggccacaggattatgaaacctggcctagagatacctaagaggccgtccagtccagattcttctcttctgagagaagcaacatgaagcccaaggagcttaagtgacttgtacaaagaaccccgctaattagcagtacagttcgtgctagagcctttggtgctgtcagcattgcttaggttgataggtgtttatactgtgcgcagggacagagtacttccagtatcctttgaaaagacgacatctgatttatggaaacattacttatcacggtgtcatgttgtagtaaacaagattgtggaaaggtgtcagcaaggaaaattaatctcactc

SEQ ID NO: 695913 - DNA, 625 bp, Homo sapiens
ctgaaccagaacaggttctcagaactccagcctgccacgtggtcaggcagccttgatgggcagaaagcagacgtgaggcaccgaggcagcttaactggttacagtgcagcattttgccctgcttgagtaagttgcccacctgtgattgactgaaaatgggctgctgtgattgatggagagcccactatttgttgaccagagcatgcctgtacagtactcctgagttaggcttctagttagtttttgtactaagactgtagtttttatttgaggactggagtatggaggcatcctcaggccaaatgtaatttagtctaaamtgctgctccctcagactgaaaagcctccatggagagtgggcgtggccaaagtgattttccagtacacgcggcagaatcctatgtgcacatgtcagggagaggccacccagtccagacctaagccttcagccatctgtgtgaaggagaaagtggtaacatgacggaaatgattgtactgcaatctggacatgacaatggcattcgtttcgtccataccactcgtttagacgccctgctccctcctggacacagaagctctgcaaaggcctctaggccactaggagggcgtggtgtgtgccctcgta

SEQ ID NO: 695914 - DNA, 625 bp, Homo sapiens
ctgaaccagaacaggttctcagaactccagcctgccacgtggtcaggcagccttgatgggcagaaagcagacgtgaggcaccgaggcagcttaactggttacagtgcagcattttgccctgcttgagtaagttgcccacctgtgattgactgaaaatgggctgctgtgattgatggagagcccactatttgttgaccagagcatgcctgtacagtactcctgagttaggcttctagttagtttttgtactaagactgtagtttttatttgaggactggagtatggaggcatcctcaggccaaatgtaatttagtctaaaatgctgctccctcagactgaaaagcctccatggagagtgggcgtggccaaagtgattttccagtacasgcggcagaatcctatgtgcacatgtcagggagaggccacccagtccagacctaagccttcagccatctgtgtgaaggagaaagtggtaacatgacggaaatgattgtactgcaatctggacatgacaatggcattcgtttcgtccataccactcgtttagacgccctgctccctcctggacacagaagctctgcaaaggcctctaggccactaggagggcgtggtgtgtgccctcgta

SEQ ID NO: 695915 - DNA, 667 bp, Homo sapiens
cattattattattttagtatcatcgtttttaatagtatgaaattggccagattttttaaaattttaagtaaagactaactgcccatgggctggttcttggtaaaattttgaagcaagggagtttagccttgactccacgtccttgcattttcaacactctatttacctgcctccttcccatcccaaatttctttccctgtgctgccgactcctctctcccagtgccacagggtattattctttgctggtgatcaactaatgttcactaacatagttaagcctgagagtgttttaaatgccagctctgcagagctgtttgaatttataccacagaygctcaaagatcttaaagcttgcaaggccaaatgagtgaatctttcatggtgacagctaaccactgtaactaggattcattaaatacatacatacaagttgggcactgagctaaatgccttaagtgcattatttcccaggcattaacacttttaattctcacaactctttgaactctttgaaatagtgactattattatcatattaattttcaaatcagaaaattgaggtttggaatttaggcttgaacccagctctgactgactccacagctcacactagatactgtgaactaactacctcatctttagcctagttgcacacattttcagca

SEQ ID NO: 695916 - DNA, 667 bp, Homo sapiens
cattattattattttagtatcatcgtttttaatagtatgaaattggccagattttttaaaattttaagtaaagactaactgcccatgggctggttcttggtaaaattttgaagcaagggagtttagccttgactccacgtccttgcattttcaacactctatttacctgcctccttcccatcccaaatttctttccctgtgctgccgactcctctctcccagtgccacagggtattattctttgctggtgatcaactaatgttcactaacatagttaagcctgagagtgttttaaatgccagctctgcagagctgtttgaatttataccacagatgctcaaagatcttaaagcttgcaaggccaaatgagtgaatctttcatggtgacagctaaccactgtaactaggattcattaaatacayacatacaagttgggcactgagctaaatgccttaagtgcattatttcccaggcattaacacttttaattctcacaactctttgaactctttgaaatagtgactattattatcatattaattttcaaatcagaaaattgaggtttggaatttaggcttgaacccagctctgactgactccacagctcacactagatactgtgaactaactacctcatctttagcctagttgcacacattttcagca

SEQ ID NO: 695917 - DNA, 2959 bp, Homo sapiens
atttcaagccccatcatcttaaaccattgttaaatcaactctacagatgccacatggctcatgatcctttgctcacctctgacaatcaactggctttggtgctccacagcggcggcctcattccgggctatgcaggtgtaattcccattgtgcatgagcgagagattggaaatcctcaaggagctcgtgaagtcaatattgtcaatggtcaccccaaggctcccagggattggccggccatccttctgccaggtgatcgtgatgggtaagtcccctgagaccacaacacaggggatgaagacccgctgcccaatggagaatcttggaaactcaaagggttgtatgaaaggcggaactgcaagaaaaaagaaagataataacgaactgtgcttattctacatttgcttttcctttaaccctgtatacggcactgaaagggtagtacagacgatcatagatacagcatagaaatacaggaactgtagcaaatttgaaattctgcttctattatttgaatgttctcatcattttaaataaaaaccatggttcaatttgtacttcagcaagttaattttgttcaacaaactttaatttaaaaattatttttgaatgaaaacatttcagactatatctgtagtgtaaatagtgtgaaagagggatttaggtttggttttccttcaaagccttttaaaatgatgtatacaagaggaggtttctttcctactttgcgactatgacactacaattactgttccccttctaattgtttcctgccttgtaaataggcatattctaaacccactgaagaagcagaaattccaattttggctggatgtggtggctcacacctgtaatcccagcactttgggaggccaaggcaggaggaacacttgaggccaggagttcaagactagcctgggcaacataacgggacccccatatctacaacatttttttaaaaaattagccaggtgcgatggtgtgcacctctggtcccagctactgaggaggccaaggcgggaggatcccttgagcccaggagttcgaggctgcagtaagctacgagggcaccagtgcactccagcctgggtgactccagcctgtgtctaaaaaactaaaaaaaaaaaaaaaagtaaaataaatattccaattttattgttaaagttctctgttatgtccaactaataacaaccattaattataaattcttatttcatattagaataactacatctttactttgcatctcttagttttgcacactttacgtgtgtaacttttaattgtgaactggtccgtggcaggttatttgacttgctgatgtattgctaaggaggtcgggttatagccttcagcctggcctgccatggacactgcaagcaaactcagcctggaaagctctttcctgattcagctttgctgagtgatgcctgttttgtccaccttgccttaggaactctcttcctcagtgccctcctagatgatgtcatagggtattaacattctgaaatagttaaaatggagtcagatgaaccacatttgaactctaactgttacttgttagttatgagcaaagtaatatgctctttcatcagccttacggattagttatttattgctttactttgcagatgggaaaagtgatactcaaagatgttaccttgcccttttggtcttagaactagttaactattctcggagggcttaaatcatgtcaatataactaatatcagagcctgtaatgtaagccttttttgtgtttttgcatacattcttggaaagaaaaaggtttatttgtatgcaggggcttggaaatgactaagagtacaaactaagatgattaatcatgtgataatctaatataaaccaattattatattacgagtttttcctaatgaagttattaaagatttctacagtttattcaacaattgtaagtccatttcaactatcagcttaaggaagaggtaagggatccggctgagaaatttgaatagaaaaccattcattcatttatttgttcattcaatcaagtcatgtttattgagcacctgggatgtgtgtggcagcagtgaacgtgctgggcacacagcaatgagcataacccatcagcctctgccagtggagcttccatatatagccataggccgcagacagcaaggaagtgcagccatggcgcttctcttatttcgtattatcactatgackgctgtctgctttcaaaagcagttgggagctagaactcaaaattgcaagtacagccagaggtcgaagaagtaggtagctcaagttaggttttaccagggaaattaatttttttaaatggtcaaaggtaccgacaagcatactcaatgtcaatcctcctgtggattctccatgtaaagttagatctttgggattgaaaagggctgatctgatgctaagagataaaggtctcaggatgagattctatccagtgctggtggagagaatcgggtcagactgaggtatgaacgttctcagttggaatgtgctggagaaaatgtcatgttgtaccaaaggtgcttgtatttctttaaatctcttgcccccaagtggcataaatgctcactatatatgtaaatattattaatactaaattgctatgctttattaaagaaaataattacatttcctcccctttgatttcctggacacaaaaacctggttgtcagcatactcagacaaaccttggcttggtgcttactgtctgaattacagacaatttttctaagataagaactttggagccaggctactttggtttaagttcagctatgctacttactacagttacttaacccctctcagggtctcagtttccttatttataaaatagagtgctgccttgagctctgaatgagttaacacagtaattctcaaacttagttgtgtatctgaatcagtttcttagcatttgttctatttcacaagcctttaa

SEQ ID NO: 695918 - DNA, 620 bp, Homo sapiens
tgcagatctgtttgtttttgaaggcatagaaataagagtagcatatccttgctgttttgggtgacggaatcatgcctgcaaaaatctcaaaaagactgtgaaacatgcagatgtggtcacaaggagtgcaataaaaatggaactgttgttcagaaagaaacgccagcatcccacagacatatgtgtggtcccatctgtgattctaaattcattgcttatgaacaactaaggagttgctggagatcagaagccatctctgcttttatcccttcagaagtaaggcggcatgcagctggatamatctacccctcctagaacttgagacaaatgacattcactcctgtctagacccaagacctctcatgccaatatcacttttcattcctgaaactctgatttaaagagacaggctctgaggccatcaacagttcctacctgatggttgattgttgatccacgtagccccagggttacagcactggaagagaccatgtactttagacccaagcttgagagcctgagtcccctccatggcaattctaacaagtgtgtttccatctccctgcttgagtactcacagtgatgggcaactcactgcttatcaaggcagtccattttta

SEQ ID NO: 695919 - DNA, 614 bp, Homo sapiens
gaaaaaagattttcaagtatccagtgaacaacctaaaagattattataaccattatgtgttcacaataaaaagcaaaatgaaatcaggagagaaatttgatttgggtaatatgactgcccatcttatatgttcaaactgatacagtagtcatccatatgctggattcatagtccayagggtttcagatgtcaagaacgccagcacataaatagtaaaagcacaactgggtaggaagaggcaggtagcacagacgccagacaagatgatgcaatgtccatgctctaaaactttcagtgtcatgcaaaaacaatgaattctatgactaatttagaagatgatagttaaaacaggagtaagcatttcattcctttatctgacagaaaatccaaggcagacataatggattaatacgcacagatggagctgtttgaaattctaggtttccctataagtggtgttttgcagattataaatacgcttttataacacatcattaaaatgtgcagtcttcccagtaaaagtcattcactgtatctccctgtttgtcaggtttagaggtccctatacaaattgcattgtaattatttgacacatcaaattttcatatatcttg

SEQ ID NO: 695920 - DNA, 614 bp, Homo sapiens
gaaaaaagattttcaagtatccagtgaacaacctaaaagattattataaccattatgtgttcacaataaaaagcaaaatgaaatcaggagagaaatttgatttgggtaatatgactgcccatcttatatgttcaaactgatacagtagtcatccatatgctggattcatagtccatagggtttcagatgtcaagaacgccagcacataaatagtaaaagcacaactgggtaggaagaggcaggtagcacagacgccagacaagatgatgcaatgtccatgctctaaaactttcagtgtcatgcaaaaacaatgaattctatgactaatttagaagatgatagttaaaacaggagtaagcatttcattcctttatctgacagaaaatccaaggcagacataatggattaatacgcacagatggagctgtttgaaattctaggtttccctataagtggtgttttgyagattataaatacgcttttataacacatcattaaaatgtgcagtcttcccagtaaaagtcattcactgtatctccctgtttgtcaggtttagaggtccctatacaaattgcattgtaattatttgacacatcaaattttcatatatcttg

SEQ ID NO: 695921 - DNA, 602 bp, Homo sapiens
cttgccacagtctctaccataatgagacaattgtaaattactcatacaggaataaaaatgatccagttaaacgatgtagattagctgtctaaactgtccaaactcgctttctttcctcctttgaggactttcctccttagactcctatatagtgagtctctgtgtgtgtgcaccagtgtgtgtgtgcacaagcatgtatatttctgtgtttgtgtgagtgcttctctgagcagtaattccacccaaggagtctgcactgtgctaaaaccagtgggtgctttaaaaaaaaaaaaagasagagagagatgggtgtttcagggatctctgaaatttttttcatggtattaagaaatacaaatattcctcaaaactgaaaaaaaaatttagaataaatctattatctgatagggtaggagagggaatttgctgagtcaagtgtgattaaagctgaaccatcagatttacatcctatacaaattgtcaacttccagaaaggtcacatgaagatttttccaacagagcaactacattggagttcagctggaattgcactaaatctaaattttccacaatgttctagagaaaaaaatgtaaactcctgt

SEQ ID NO: 695922 - DNA, 602 bp, Homo sapiens
cttgccacagtctctaccataatgagacaattgtaaattactcatacaggaataaaaatgatccagttaaacgatgtagattagctgtctaaactgtccaaactcgctttctttcctcctttgaggactttcctccttagactcctatatagtgagtctctgtgtgtgtgcaccagtgtgtgtgtgcacaagcatgtatatttctgtgtttgtgtgagtgcttctctgagcagtaattccacccaaggagtctgcactgtgctaaaaccagtgggtgctttaaaaaaaaaaaaagagagagagagatgggtgtttcagggatctctgaaatttttttcrtggtattaagaaatacaaatattcctcaaaactgaaaaaaaaatttagaataaatctattatctgatagggtaggagagggaatttgctgagtcaagtgtgattaaagctgaaccatcagatttacatcctatacaaattgtcaacttccagaaaggtcacatgaagatttttccaacagagcaactacattggagttcagctggaattgcactaaatctaaattttccacaatgttctagagaaaaaaatgtaaactcctgt

SEQ ID NO: 695923 - DNA, 586 bp, Homo sapiens
cacagaggcagagacagacactgaataattacacaaaatgacatattttcataacaaagacgggtgccatcaagggaaagcagaaaaaactgtaaatcaacaggcctatcgtttcatttgggaggttgggatggtttctttgtctctgtggacaggacatttaagccatgaccaaaagggggaacagacattttctaagtgtagagagaggaaaagtgtgtgtgtgtgtgtgtgtgattgtgcacgtgtgtatgcgtatatatgcatggtgtgatagagtgtgcatgtgtgcacatgtgtgtgtttgcatgcacatgctcctatatgtggatgtctgtgcactggagaccaggacaggaaaggaactgtattccaaacacaggtaacwgtgtgtgcaaagactcagaaatgctgaagcagtaaaggacttaatgatatttgaaaaaatcaacaatggcctttggggccacatattacataatacactgagacatgcggtcaaagtcaaggctaagatgccaacaggggtggctccccaggaccttgcaggctctgatgcgagtgtggattttattctttgtgccaa

SEQ ID NO: 695924 - DNA, 646 bp, Homo sapiens
gcacttctcagacactgcacttttcacaaactgaaggtttgtgaaaactataaactaaactgtactgtctagggattcatacgagaggataaaattgtaaagaaatacaaaaaaattattacaataaaaatcaggggaggccagaagtggtggctcatacctataatcccagcatttgggatgccaacacagagagactacttgaggccaggagtttgagaccagcctgggcaacatagcaggaccccatctctacaaaataaaattaaaattaaaaaatcaactgggagtggtggtatgtgcctgtaaaaccacctacttcaggaggctgaggcaggaggatcacttgagccaaacagttcgaggctgccgtgacctatgatcatgctactgcactccagcctgggcaaaagagtgtgaccttgtctataaaataaataaataaataaataagaaggaaatccagaggagtggctacttcagggagatttggtatgattggaatggagaaactccaggaaggctagaaaagcaccayttttgacctgggtgtttgttttaagtgcgctcacattataagtaagtaatctaggcatgtgttttgtgctgtttttgtagagctcctatattttacaataaaagtttt

SEQ ID NO: 695925 - DNA, 660 bp, Homo sapiens
tgaattctttgcacagcctctcaggcaagctgtcagtcagttgctgaagaataaagatagggatctcggagactaaaaggcaaacaggtcctgatcaggcactggaaaaattgatgaatgaagtcagtcttcgtggttcccaagttccctcctctctgtcctttctcctctgcagaacaactgctacactttttctttggcccagtattgacttatatcctggctgtgggactttgtagttaattagagtttcataatgggatgtgccgccttgtgtgataacaagcttcctgtcatgggaagcaaccaagccmaagctgcatgaccatgaaccaggaacactgcagaagtgtgtggaacgggaaagcagaactgaggccctccactcacaaatagtaggaggctcttacagcatcagttgcagatattgctatcaattcagcaaatctttattgatcttttacaataagccaggcactgtgctgtcatcaccaggaaactgcaagctcaataagtaccaagaccatgcattctttattcagcattctagactcaacctgttgtctggaacaaagcaagtattcaacatttgtgaagtgagtgaatgaatgaatcattggtacaatgctgaataattgttaacaaggtgatacaatcaat

SEQ ID NO: 695926 - DNA, 660 bp, Homo sapiens
tgaattctttgcacagcctctcaggcaagctgtcagtcagttgctgaagaataaagatagggatctcggagactaaaaggcaaacaggtcctgatcaggcactggaaaaattgatgaatgaagtcagtcttcgtggttcccaagttccctcctctctgtcctttctcctctgcagaacaactgctacactttttctttggcccagtattgacttatatcctggctgtgggactttgtagttaattagagtttcataatgggatgtgccgccttgtgtgataacaagcttcctgtcatgggaagcaaccaagccaaagctgcatgaccatgaaccaggaacactgcagaagtgtgtggaacgggaaagcagaactgaggccctccactcacaaatagtaggaggctcttacagcatcagttgcagatattgmtatcaattcagcaaatctttattgatcttttacaataagccaggcactgtgctgtcatcaccaggaaactgcaagctcaataagtaccaagaccatgcattctttattcagcattctagactcaacctgttgtctggaacaaagcaagtattcaacatttgtgaagtgagtgaatgaatgaatcattggtacaatgctgaataattgttaacaaggtgatacaatcaat

SEQ ID NO: 695927 - DNA, 595 bp, Homo sapiens
ggatatggaaaataacttgctaatagtcccagcaagaatttgtcagggccagaatggggcgggccagtgacttgggtgctatgggcattgagaagccagagccaytgggccttggaacctcttcctggatacaggagagacgggcaggtgtaagtgatcccagatgcggtcccaagaggactggagagtggaggcgccagtaaaaacccagagaaaaggtgggcctaagctcactgccaaagatgtgagaagaaaagcctcagaagacatgaagaggttgggatgatgcaaccacagattagccccacttgagtgaaaatggcttgaagcaggacaaaaactagcatgacccctgcccagaagcctctcagatgaacacagctcgaaagagctatatctggaaggcaaaggacatgtccaaaaccagtgtggtacttcaagaacactccacaactgcagcacgctccttcaaaagttacctctaaaagacaagcacagaaggaaccaaggctgtggaaagcaccgaggatgactactattattttttccttatagtcatggtgggtgaggaagaaaatccaggaatggcaggcta

SEQ ID NO: 695928 - DNA, 595 bp, Homo sapiens
ggatatggaaaataacttgctaatagtcccagcaagaatttgtcagggccagaatggggcgggccagtgacttgggtgctatgggcattgagaagccagagccattgggccttggaacctcttcctggatacaggagagacgggcaggtgtaagtgatcccagatgcggtcccaagaggactggagagtggaggcgccagtaaaaacccagagaaaaggtgggcctaagctcactgccaaagatgtgagaagaaaagcctcagaagacatgaagaggttgggatratgcaaccacagattagccccacttgagtgaaaatggcttgaagcaggacaaaaactagcatgacccctgcccagaagcctctcagatgaacacagctcgaaagagctatatctggaaggcaaaggacatgtccaaaaccagtgtggtacttcaagaacactccacaactgcagcacgctccttcaaaagttacctctaaaagacaagcacagaaggaaccaaggctgtggaaagcaccgaggatgactactattattttttccttatagtcatggtgggtgaggaagaaaatccaggaatggcaggcta

SEQ ID NO: 695929 - DNA, 601 bp, Homo sapiens
caacaccagcagcccaagtcaggacagtgggtgacctcccaggagtccaggtgcctcaagctgagtgcaacctggcatgacaggcaggcaggcggcagaggccctcaggtcactccaggcggagacttcaacaccacacacaagccactggctgaggcttaaagaacttgtccaagtcaatctgtaaaatggggatgatacagaaatagggttgttgcagggattaagtgagaaagcaaggccgtagctcagtgcccaacccatggtgagcactcartaataacataatgatggcagataaggtttatcttccaacacgtaagagccggctatgtggaaaaggaattcagtttattctgcatacatccaaaggacaataccagaatcatgatcagaatttccagaagagcaggcttggattctatctggggaaatcaaggttccaacaattagaaagttcacatatggcctggagctaccttagaatgtaccgaattcctcaaacctaaaaatgtatgtttcaagactggaggatcatttctccaacatattccagaacagaattaggcttgagcatcaagaccagacatagtgatctttc

SEQ ID NO: 695930 - DNA, 619 bp, Homo sapiens
gaaattctctgcyggaactccaagacgcaggggctgggaaccgtctgcaggacccagacccagagttggaccaggattaaaggtggtggggggtgtggggtgccgaatgtgaagaacagaacggaagtgcaggaagacagcccgacctccaggagacaccatcactctcggtgtttccctccctgtgtttctttcttccaagaaagggtatttccaagaggacagattggttgaccaaaaggccattttatttctactttataaaaatagatgaaaggagacttgaaattattttgcctcttacatcactgggtttgggttctggaagtccctggagggtgcgcctgtagcccagacttcacaggtagacatggaggtcatgcaggtcacatggctggttgacacctgtaaagctatgatggccaagcagaactttgccgggtatctctggtcctattccctcccccgggtcatctgcctccctcctggaattgattgattaagtgctgtccctccatttcgtctaatagaccacgggaaggataggccaaacaagaagggcctacttcaacttacaagtcaagtcacggtttcagaacaccttatctccaacctctgt

SEQ ID NO: 695931 - DNA, 614 bp, Homo sapiens
tggattcagtcagaggctccctcccttttcaccctggatgatatgtgtgtctgtaagagaccccacgatggctccctctcatcatatcagggcaggaggagaaaactgactctaagagctgcctttacaacaaaacccatgtttgacctaaagctacctttaagatgcttaagacatcatttgttgttaactgttttggtttagtgttttagcctaaacggtgctgcagaatgatttcaggatttggcgctcctgaacagacacggccgtggacacacaggcccataacccggccagactcacaaggtgaattcctcttcccacatgaggtccggagtgtttttcgtcagggtgctggagaacctctgaacaggatcgttcagctgcacgacgcacactgcattaatgtggcctgtaattaaatagaagggcatcgtgttggcgtttatttttattatttatttatttttttttttttttgagacrgagtctcgctctgtcgcccaggctggagtgcagtggcgcaatctcggctcactgcaacctccgcctcccaggttcaagcgattctcctgcctcagcttcccgagtatctgggattacaggcgcacgcc

SEQ ID NO: 695932 - DNA, 643 bp, Homo sapiens
tgaaaagagacggttagcagtgcaattgaagacatgttaggttaatatataatgtatgagtctgtgtaayggatagtttttattcatcataaaattctcaaaagactcacagatgtgtggcccttgcagctgttcttcccttgctaacagcgttaggctctgactcagaggagttttgtgccaaagaattctggcagcgtctacagttcttgtgaaattcccagtgaggaaatcgttcactgtgagcaggggcgatgatgacaagacgatccaggggatggggaaggagcccaggaagaaagaatacagagccccgggcatgtgaaatgtatcagcctcaaaattcttatctttctttacatctttctatttacaaagtcttgtttttgtttttgtttgagatggagtttcactctgtcgcccaggctggagtgcagtggcactatcttggctcaccacaacctccgcctcccagcttcaagcacttctcctgcctcagcctcccgagtagctgggattacaggcacgcgccaccacacctggctaattttgtatttttagcagagatggggtttctccatgttggtcaggctggtctcaaactcccgacttcaggtgattgccagcctcggcctcccaaagt

SEQ ID NO: 695933 - DNA, 1122 bp, Homo sapiens
taagctctacacagtaggtttgcttttcacacaggtagggattagcaaccctgaagctgctttctgtgtattctcggatgcagcaaatagacaattacactgtggctggtggggktctggtctccactctctgaaaaggtgttacagtggcgggaaggcagccaagcagacacacaggtgtgcatgggtcagtggtgttacagactgactgtgtccctcccgtgttcatatgtcaaagcccttaagccctaatgtgagtgcatttggagatgggacctgtaaggaggtagttatggttaaatggggtcataagggtggggttctaatttgacaggactggtgtccttctcagaggagacacagagattgttctctctctgcaagtggacagagaagaggccatgtgaagaaatgagaaggcagctgtacgcaagccagggagggaggcctcaccagaaaccaaccctgacagcaccttgaccttgaacttctagcttccggaactatgaaaaaattagtttctgttatggaagcctcccacggtatggcatttcattacagcagccccagtacactgagggatggtagctggaggtcaatagatgaataacaaaattagacggatgatagacagggatatcattgtccgtcttaaattaccagactcagaaaatatgattaagcatagagtttactggagcccagagcttaaggacagccacctgggagcacaggttcaagctgccctaaatcgaagctcccattagcagcagcctctgactcccgcccgagggcccccagcactactgtggaattccggccggaacacacagcctggacctggtcatgagaaacggccccacaagcccaacttgagatgcattttacagaataagtggcttaaacgtctcaaaaacgtcaaggtcaggaaaggtcaaattaaaggagacaaagaggtaagagaataatgtaacagtgagccagcaccattcctgcctctgcaaaggggaaggtgaggggattgttcccattatcaggggaaaggggttctcaggagacctggagaaacgcccaggcgtagcctggcctggggcaactggagccgaccactgcagtgggctc

SEQ ID NO: 695934 - DNA, 1122 bp, Homo sapiens
taagctctacacagtaggtttgcttttcacacaggtagggattagcaaccctgaagctgctttctgtgtattctcggatgcagcaaatagacaattacactgtggctggtgggggtctggtctccactctctgaaaaggtgttacagtggcgggaaggcagccaagcagacacacaggtgtgcatgggtcagtggtgttacagactgactgtgtccctcccgtgttcatatgtcaaagcccttaagccctaatgtgagtgcatttggagatgggacctgtaaggaggtagttatggttaaatggggtcataagggtggggttctaatttgacaggactggtgtccttctcagaggagacacagagattgttctctctctgcaagtggacagagaagaggccatgtgaagaaatgagaaggcagctgtacgcaagccagggagggaggcctcaccagaaaccaaccctgacagcaccttgaccttgaacttctagcttccggaactatgaaaaaattagtttctgttatggaagcctcccacggtatggcatttcattacagcagccccagtacactgagggatggtagctggaggtcaatagatgaataacaaaattagacggatgatagacagggatatcattgtccgtcttaaattaccagactcagaaaatatgattaagcatagagtttactggagcccagagcttaaggacagccacctgggagcacaggttcaagctgccctaaatcgaagctcccattagcagcagcctctgactcccrcccgagggcccccagcactactgtggaattccggccggaacacacagcctggacctggtcatgagaaacggccccacaagcccaacttgagatgcattttacagaataagtggcttaaacgtctcaaaaacgtcaaggtcaggaaaggtcaaattaaaggagacaaagaggtaagagaataatgtaacagtgagccagcaccattcctgcctctgcaaaggggaaggtgaggggattgttcccattatcaggggaaaggggttctcaggagacctggagaaacgcccaggcgtagcctggcctggggcaactggagccgaccactgcagtgggctc

SEQ ID NO: 695935 - DNA, 487 bp, Homo sapiens
tgcctgcatatttcagtttattccaataaaattgaaaataaaacgtgttttctctgactttattgttataattaatagaattagaagckgtcaatgtttttcaactatttatttattggatctgacctgatagaattgaaaaacaaagaaactgttttaatgttaaaccccaaattctgaaagctttctattagactaggctaaataggagaaaaatcggggatttgttttcatatagccatttttgcactttgtgacatacgctatttacttccaaaatctggtcatatcttttctaatatattcagtttattcactctatgggccttcatgagtgtttattttagcacgaaaatttattggtcttcgtcttaacttcttggtcttttttcttaatggttatattgtattccacgattggcaatctttttctgaaaaaggctagtgtcttagtcaagtaggagtgttgtaacaaaatatcacaaac

SEQ ID NO: 695936 - DNA, 1859 bp, Homo sapiens
tagcattcccctagttaagacaaccaaaaacatcttcagacattgccaaatattccctggggagaaaagcaccctggtttgagagccactgatcaattttgttcattcatctttactcctcctaaatacctacatccaaattttaaatagatctttctcatgtagtctggcaagtattatatcaaagataaayaccagttttagaataaagcattaatatactcttacatttcaacttaagaggcaaatattaacagtaggatttgtaaactatttattagactaaaaatcaatgaatttttaaaaattacaaaatgatttatgtatgttagatattttactgagtgaaaaaattcatgcttttttaaatgacttattgtttggagtagtgatacagtagatttaattttccccctcattaattaaaatcatgttttagccaagaaagtgaacaaaattcttattggcaattcagttgtttcccgttttggagactgacactctccagttctaagttaaataattgtcatggtaaagtaatttccttgaaaagaacggacattgattcagcccctgttactcacaaatgctatttgagtcaaattggaaaactattaagtttttgggaaaaaaatcaataggtatcaggaaaccattagatcttgtggcccttgctatatcttgcatgagtaatcactgtaaacagctgacaggtatttcattgttgacactgagtgatgcttgggggaccacatcttgtcagagcaggtggacagctttagacgttggaatgagtttgattatccttgtttttctcctacactcattcttttagacagccctgtcactaactgggcctgtgatgctttcaaaaatcaaatactttccttgctgtcagttttctttttcttgcgttgtggcatactaatcagggtatgtggtttggtactgaaccaatttctgtcaaaagcaagttttaatttattatttaggaaaaatttttcctaagacccaggttttatacagtcctaaataaatagtgtgaggaataattagtaatgtcatagagtatataattttacttctagttctacacagattacaagtaaaatttttttgggcaagtgattttggaattatctatgttttgttttccttttcctttagagtgataattcactatttatgattgaatgattatcatattaaagaggtgagaaaataaaaataagtctgatgtgcacaaagccatactgctcaaattgtttgataatatctgttaattaaattattatgacatcggtagaagaatgatgttttgtttatatgtggttagaattggtcttttttaaaggaaataacaagagagatggaaatggaatgggtataaatagtaaaaggttctatcactataattcccttttgctctaaatagttaaagcttctatcactataatttccataagaagatatatgtgtttacctgttaattttatcagggcaaattaaaacatggatagaatcatgtttctcagtgtgaagaaatatttttatttgatgaatattatatattttcaggtgcagtggcttctatgttttgggttgatgctgaattagggagtgatatttaccttgatggtaagttaaaaaacagttttcttttatctttcttgtttttttttttttttttctgagacagagactcactttgttgcccagactggagtgcatggagtgcagtggcaagatctcggctcactgcaacctttacctcctgggttcaagtgattctcctgcctcagcctcccgagtagctgggaatacaggcgtgcaccatcgtacctggctaatttttggat

SEQ ID NO: 695937 - DNA, 1859 bp, Homo sapiens
tagcattcccctagttaagacaaccaaaaacatcttcagacattgccaaatattccctggggagaaaagcaccctggtttgagagccactgatcaattttgttcattcatctttactcctcctaaatacctacatccaaattttaaatagatctttctcatgtagtctggcaagtattatatcaaagataaataccagttttagaataaagcattaatatactcttacatttcaacttaagaggcaaatattaacagtaggatttgtaaactatttattagactaaaaatcaatgaatttttaaaaattacaaaatgatttatgtatgttagatattttactgagtgaaaaaattcatgcttttttaaatgacttattgtttggagtagtgatacagtagatttaattttccccctcattaattaaaatcatgttttagccaagaaagtgaacaaaattcttattggcaattcagttgtttcccgttttggagactgacactctccagttctaagttaaataattgtcatggtaaagtaatttccttgaaaagaacggacattgattcagcccctgttactcacaaatgctatttgagtcaaattggaaaactattaagtttttgggaaaaaaatcaataggtatcaggaaaccattagatcttgtggcccttgctatatcttgcatgagtaatcactgtaaacagctgacaggtatttcattgttgacactgagtgatgcttgggggaccacatcttgtcagagcaggtggacagctttagacgttggaatgagtttgattatccttgtttttctcctacactcattcttttagacagccctgtcactaactgggcctgtgatgctttcaaaaatcaaatactttccttgctgtcagttttctttttcttgcgttgtggcatactaatcagggtatgtggtttggtactgaaccaatttctgtcaaaagcaagttttaatttattatttaggaaaaatttttcctaagacccaggttttatacagtcctaaataaatagtgtgaggaataattagtaatgtcatagagtatataattttacttctagttctacacagattacaagtaaawtttttttgggcaagtgattttggaattatctatgttttgttttccttttcctttagagtgataattcactatttatgattgaatgattatcatattaaagaggtgagaaaataaaaataagtctgatgtgcacaaagccatactgctcaaattgtttgataatatctgttaattaaattattatgacatcggtagaagaatgatgttttgtttatatgtggttagaattggtcttttttaaaggaaataacaagagagatggaaatggaatgggtataaatagtaaaaggttctatcactataattcccttttgctctaaatagttaaagcttctatcactataatttccataagaagatatatgtgtttacctgttaattttatcagggcaaattaaaacatggatagaatcatgtttctcagtgtgaagaaatatttttatttgatgaatattatatattttcaggtgcagtggcttctatgttttgggttgatgctgaattagggagtgatatttaccttgatggtaagttaaaaaacagttttcttttatctttcttgtttttttttttttttttctgagacagagactcactttgttgcccagactggagtgcatggagtgcagtggcaagatctcggctcactgcaacctttacctcctgggttcaagtgattctcctgcctcagcctcccgagtagctgggaatacaggcgtgcaccatcgtacctggctaatttttggat

SEQ ID NO: 695938 - DNA, 974 bp, Homo sapiens
  misc_feature 343, 344, 345, 346, 347, 348, 349, 350, 351, 352, 353, 354,355, 356, 357, 358, 359, 360, 361, 362, 363, 364, 365, 366,367, 368, 369, 370, 371, 372, 373, 374, 375, 376, 377, 378,379, 380, 381, 382, 383, 384, 385, 386, 387, 388, 389: n = A,T,C or G
  misc_feature 390, 391, 392, 393, 394, 395, 396, 397, 398, 399, 400, 401,402, 403, 404, 405, 406, 407, 408, 409, 410, 411, 412, 413,414, 415, 416, 417, 418, 419, 420, 421, 422, 423, 424, 425,426, 427, 428, 429, 430, 431, 432, 433, 434, 435, 436: n = A,T,C or G
  misc_feature 437, 438, 439, 440, 441, 442: n = A,T,C or G
atagtgtacttacacaaacctagatggtataacctactacacacctaagctatgctgtatagcctgttgctcctaggctacaaacctgtacagcatatatgttactgtactgaacagtgtatggaaataataacacaatggtaagtatttgtgtgacagtaatttttcagctccatygtaatcttatgcagtctgactaaaacgctgttatgcagtgcatgactatacttatttttaaatcttaataaacatactctattttaaaactatttttatagcataaggtaataataatatgcatttttaatgacaatcattttattttttcattaaagaatcactnnnnnnnnnnnnnnnnnnnnnnnnnnnnnnnnnnnnnnnnnnnnnnnnnnnnnnnnnnnnnnnnnnnnnnnnnnnnnnnnnnnnnnnnnnnnnnnnnnnntccgactcaaaatgctttattgttaaagattttaactgaataaatttttttgagatggggtctcactctgttgcccaggctggagtagagtggcacaatcatggcttactgtagctttgaactcccaagctaaagcaatcctcccacttcagcctctcgagtagctgggattacaggtacatgccaccatacctggctaaatttttgtattttttttgcagaaatggggtttcaccatgttgcccaggctggtctacaactcctgggttttaagcaatccacccaccttggcctgtcaaagcgctaggattacaagcataagccaccacacccagcctaaagatttttataatgatttttgcttttatcaggttaaatatgtgacttaatatttttaaggggtacaataaactccagtatgagacacaaaaggctttaaaaattaagataacgcatcatggggctcaagaaggatgatctatattttggaaccagatgttttcctacaccaataaactcttttcacgttaga

SEQ ID NO: 695939 - DNA, 974 bp, Homo sapiens
  misc_feature 343, 344, 345, 346, 347, 348, 349, 350, 351, 352, 353, 354,355, 356, 357, 358, 359, 360, 361, 362, 363, 364, 365, 366,367, 368, 369, 370, 371, 372, 373, 374, 375, 376, 377, 378,379, 380, 381, 382, 383, 384, 385, 386, 387, 388, 389: n = A,T,C or G
  misc_feature 390, 391, 392, 393, 394, 395, 396, 397, 398, 399, 400, 401,402, 403, 404, 405, 406, 407, 408, 409, 410, 411, 412, 413,414, 415, 416, 417, 418, 419, 420, 421, 422, 423, 424, 425,426, 427, 428, 429, 430, 431, 432, 433, 434, 435, 436: n = A,T,C or G
  misc_feature 437, 438, 439, 440, 441, 442: n = A,T,C or G
atagtgtacttacacaaacctagatggtataacctactacacacctaagctatgctgtatagcctgttgctcctaggctacaaacctgtacagcatatatgttactgtactgaacagtgtatggaaataataacacaatggtaagtatttgtgtgacagtaatttttcagctccattgtaatcttatgcagtctgactaaaacgctgttatgcagtgcatgactatacttatttttaaatcttaataaacatactctattttaaaactatttttatagcataaggtaataataatatgcatttttaatgacaatcattttattttttcattaaagaatcactnnnnnnnnnnnnnnnnnnnnnnnnnnnnnnnnnnnnnnnnnnnnnnnnnnnnnnnnnnnnnnnnnnnnnnnnnnnnnnnnnnnnnnnnnnnnnnnnnnnntccgactcaaaatgctttattgttaaagattttaactgaataaatttttttgagatggggtctcactctgttgcccaggctggagtagagtggcacaatcatggcttactgyagctttgaactcccaagctaaagcaatcctcccacttcagcctctcgagtagctgggattacaggtacatgccaccatacctggctaaatttttgtattttttttgcagaaatggggtttcaccatgttgcccaggctggtctacaactcctgggttttaagcaatccacccaccttggcctgtcaaagcgctaggattacaagcataagccaccacacccagcctaaagatttttataatgatttttgcttttatcaggttaaatatgtgacttaatatttttaaggggtacaataaactccagtatgagacacaaaaggctttaaaaattaagataacgcatcatggggctcaagaaggatgatctatattttggaaccagatgttttcctacaccaataaactcttttcacgttaga

SEQ ID NO: 695940 - DNA, 974 bp, Homo sapiens
  misc_feature 343, 344, 345, 346, 347, 348, 349, 350, 351, 352, 353, 354,355, 356, 357, 358, 359, 360, 361, 362, 363, 364, 365, 366,367, 368, 369, 370, 371, 372, 373, 374, 375, 376, 377, 378,379, 380, 381, 382, 383, 384, 385, 386, 387, 388, 389: n = A,T,C or G
  misc_feature 390, 391, 392, 393, 394, 395, 396, 397, 398, 399, 400, 401,402, 403, 404, 405, 406, 407, 408, 409, 410, 411, 412, 413,414, 415, 416, 417, 418, 419, 420, 421, 422, 423, 424, 425,426, 427, 428, 429, 430, 431, 432, 433, 434, 435, 436: n = A,T,C or G
  misc_feature 437, 438, 439, 440, 441, 442: n = A,T,C or G
atagtgtacttacacaaacctagatggtataacctactacacacctaagctatgctgtatagcctgttgctcctaggctacaaacctgtacagcatatatgttactgtactgaacagtgtatggaaataataacacaatggtaagtatttgtgtgacagtaatttttcagctccattgtaatcttatgcagtctgactaaaacgctgttatgcagtgcatgactatacttatttttaaatcttaataaacatactctattttaaaactatttttatagcataaggtaataataatatgcatttttaatgacaatcattttattttttcattaaagaatcactnnnnnnnnnnnnnnnnnnnnnnnnnnnnnnnnnnnnnnnnnnnnnnnnnnnnnnnnnnnnnnnnnnnnnnnnnnnnnnnnnnnnnnnnnnnnnnnnnnnntccgactcaaaatgctttattgttaaagattttaactgaataaatttttttgagatggggtctcactctgttgcccaggctggagtagagtggcacaatcatggcttactgtagytttgaactcccaagctaaagcaatcctcccacttcagcctctcgagtagctgggattacaggtacatgccaccatacctggctaaatttttgtattttttttgcagaaatggggtttcaccatgttgcccaggctggtctacaactcctgggttttaagcaatccacccaccttggcctgtcaaagcgctaggattacaagcataagccaccacacccagcctaaagatttttataatgatttttgcttttatcaggttaaatatgtgacttaatatttttaaggggtacaataaactccagtatgagacacaaaaggctttaaaaattaagataacgcatcatggggctcaagaaggatgatctatattttggaaccagatgttttcctacaccaataaactcttttcacgttaga

SEQ ID NO: 695941 - DNA, 671 bp, Homo sapiens
tatatcaagctaccattattactacttgatatttttctatatatttccttattgtttgtcttcttcaattacaatacaaattccttaagaacaagatgtctctctgtactgtgagctgttgtgtctcctataccttgaatggtgcctggcttttacatgtaggatgaatcaatacattatttaaaaatatttcacaatgaaatcaattaatctcttcgactatttgtgtacacttaactcagttttaacttactgagaaatcgcaaatttagaaacacatatatttgttaattagatatctccttccttccttccttccttctttctttctttctggagtcttactctgtcgccaggctggagtgcagtggcaagatctcggttcactgcaacgtccggctcygaagttcaggtgattcctcagcctcagtgtcccaagtagctggaattacaggtgtgtgccaccacgcccggctacttttttgtattttagtagagacagggtttcctcatgtcgtccaggatggtctcaatctcctggcctcatgatccacccacctcggcctcccaaagtactgggattacaggcgtaagccactgcgcccagcctaaaaattttcttaatagtatatttagaaggcttgagatacattatattactatagataaaa

SEQ ID NO: 695942 - DNA, 661 bp, Homo sapiens
ttttttgtaaaacttctagatttttctagactacattatctttcactacattttggtctttagaagccaaatacacatggattaaattaacaataacaaaggtgcacatgataaataccaaataaacgttaaggaaataagtagtccaatgttcactggaaaggaagtcataagaagtagaaaacattaggggaaacatactctatatcttggccaaagtctcctgcatgagcacaaccagamgtcctgaagcattgcttcttattcctggagttaaaagcatttgctagtctaacctttctcaggtcaaaaatcaatctctatcaagcaaattaattttactccttggcactttattttcctataccaaatacaaaaacaaattagtccaaccaaaattcagtgtaatataattcattctattttgatttatctcagatggaaataacctcagttttaaatagtgagcctaactgaagaagctattataaaatgtatcctcattgtaacaccaactactctacctctgtcatatctaaggggattcagcttggtaacctaccttgtttaatggacaatttaatcattaatatgtaatactagtgtgaactgaaatatgtcccttcaaattgatgtgttgaagctataatgcccaatgtga

SEQ ID NO: 695943 - DNA, 601 bp, Homo sapiens
gagtggcagaactgagcacactgggaggattaaagggctgggaaggcaagattttcccataatctggatttcgtatcaagatcaaagaggctgtctaccagtgatgaacaccccttcaacagagagatgcaaggtgcttcctgatttacataggagacgattgaggtggatattgggttgctaatgggatcaagattctcagattgcctccccgagagaagtttcctgcttctgtatatgtcagggactaaggaattgccatgaaaatgttattcccttaacagccagcaaagggagcttcttattctaaaggcagtcagatgtgttcttcccttctaaagaaagacttgaatgttggagtcagagatgcagggagatggtggtaaaagaaagaggagctcactgctctggcaccaaacgggttcagcaatacttgtcatgtatccgggacctccctggaggaggagaaatgacttctrcagcctccactggaactgggccgaggctgtgtgaggaagtgagcatgaaacctgtgatctgtcactcgcacagccagttcattttttatcaagacaaggcattgtagaagctttctgaagag

SEQ ID NO: 695944 - DNA, 1321 bp, Homo sapiens
catccatccatgttagtttctccctcctgactctcatactggacagcccctgtgggttgaaatctaccaacagcacatagctggggaccctgacctcggctcatagccagctctgctccaaactcttggccttagtctctcaccttgcaatatattctcattttatacaaaatagacacttattatgaaaaaaataaaaacaaagaataaataacaagaaacaaaccctcattttgtgtgtgtgtgtagagccatgtgctatgaatattttggcactatttcctcctggttcattctacatatttttatatgggtaaatttatccagagagaggacaattttgccccctctcatattagggggtaaggggagtagagctgaaagtcatttttctttctcagcaaatttttgcaacattttataatgtctgtgtaatarttctttggggtaggagtgtatctattcattcaatgattcttgaatggaagattcttaacatccatacataaacaaatcatatatacacacacacacacacacacacacacatatatatatatacacatatatgtatatatacggctgttatgattgaatgacactgtgataaacacacctttattcatataacttggagagtatctattggcttgctgacatgacaaacttaactaatgttgaattcttaccttctctcctgcatttgtgaatgtcataagctccaccctgagttttagcccttggattctctggcgttcatcaatggagaattacagcctcttgcttggcctgctacctgtctccccacctcttgggtaccatgtcctttctcataagaactggatccatcattccagggtcattgctggtctaagctcctggtcatgtctacttgcctgatcctgttagagttaatactactattcataattgttcaaaacagcaacaacaaaaacaaaacacaacggactattctatcatactgcttttttagaaggcattttggctctcatctttccattaatttgattttgagtggaaaaaatattaggtattccaggagaaataaagtgaaataatttggttttaggtgggttagctgtagtgcaaatattcaaaattgtaattccagttcgaacagcatgagctttgaactacagcagagcctagttccagtctcaactcttctacattctaaatgtgtgaaggatgagaaagtgattaaacctctctgagcttcagttttctatctggaaatggaagatggcaacacatactggaagagtctctgtgagggcttctgatccttaggtttgcgtcg

SEQ ID NO: 695945 - DNA, 1321 bp, Homo sapiens
catccatccatgttagtttctccctcctgactctcatactggacagcccctgtgggttgaaatctaccaacagcacatagctggggaccctgacctcggctcatagccagctctgctccaaactcttggccttagtctctcaccttgcaatatattctcattttatacaaaatagacacttattatgaaaaaaataaaaacaaagaataaataacaagaaacaaaccctcattttgtgtgtgtgtgtagagccatgtgctatgaatattttggcactatttcctcctggttcattctacatatttttatatgggtaaatttatccagagagaggacaattttgccccctctcatattagggggtaaggggagtagagctgaaagtcatttttctttctcagcaaatttttgcaacattttataatgtctgtgtaataattctttggggtaggagtgtatctattcattcaatgattcttgaatggaagattcttaacatccatacataaacaaatcatatayacacacacacacacacacacacacacatatatatatatacacatatatgtatatatacggctgttatgattgaatgacactgtgataaacacacctttattcatataacttggagagtatctattggcttgctgacatgacaaacttaactaatgttgaattcttaccttctctcctgcatttgtgaatgtcataagctccaccctgagttttagcccttggattctctggcgttcatcaatggagaattacagcctcttgcttggcctgctacctgtctccccacctcttgggtaccatgtcctttctcataagaactggatccatcattccagggtcattgctggtctaagctcctggtcatgtctacttgcctgatcctgttagagttaatactactattcataattgttcaaaacagcaacaacaaaaacaaaacacaacggactattctatcatactgcttttttagaaggcattttggctctcatctttccattaatttgattttgagtggaaaaaatattaggtattccaggagaaataaagtgaaataatttggttttaggtgggttagctgtagtgcaaatattcaaaattgtaattccagttcgaacagcatgagctttgaactacagcagagcctagttccagtctcaactcttctacattctaaatgtgtgaaggatgagaaagtgattaaacctctctgagcttcagttttctatctggaaatggaagatggcaacacatactggaagagtctctgtgagggcttctgatccttaggtttgcgtcg

SEQ ID NO: 695946 - DNA, 1321 bp, Homo sapiens
catccatccatgttagtttctccctcctgactctcatactggacagcccctgtgggttgaaatctaccaacagcacatagctggggaccctgacctcggctcatagccagctctgctccaaactcttggccttagtctctcaccttgcaatatattctcattttatacaaaatagacacttattatgaaaaaaataaaaacaaagaataaataacaagaaacaaaccctcattttgtgtgtgtgtgtagagccatgtgctatgaatattttggcactatttcctcctggttcattctacatatttttatatgggtaaatttatccagagagaggacaattttgccccctctcatattagggggtaaggggagtagagctgaaagtcatttttctttctcagcaaatttttgcaacattttataatgtctgtgtaataattctttggggtaggagtgtatctattcattcaatgattcttgaatggaagattcttaacatccatacataaacaaatcatatatacacacacacacacacacacacacacayatatatatatacacatatatgtatatatacggctgttatgattgaatgacactgtgataaacacacctttattcatataacttggagagtatctattggcttgctgacatgacaaacttaactaatgttgaattcttaccttctctcctgcatttgtgaatgtcataagctccaccctgagttttagcccttggattctctggcgttcatcaatggagaattacagcctcttgcttggcctgctacctgtctccccacctcttgggtaccatgtcctttctcataagaactggatccatcattccagggtcattgctggtctaagctcctggtcatgtctacttgcctgatcctgttagagttaatactactattcataattgttcaaaacagcaacaacaaaaacaaaacacaacggactattctatcatactgcttttttagaaggcattttggctctcatctttccattaatttgattttgagtggaaaaaatattaggtattccaggagaaataaagtgaaataatttggttttaggtgggttagctgtagtgcaaatattcaaaattgtaattccagttcgaacagcatgagctttgaactacagcagagcctagttccagtctcaactcttctacattctaaatgtgtgaaggatgagaaagtgattaaacctctctgagcttcagttttctatctggaaatggaagatggcaacacatactggaagagtctctgtgagggcttctgatccttaggtttgcgtcg

SEQ ID NO: 695947 - DNA, 1321 bp, Homo sapiens
catccatccatgttagtttctccctcctgactctcatactggacagcccctgtgggttgaaatctaccaacagcacatagctggggaccctgacctcggctcatagccagctctgctccaaactcttggccttagtctctcaccttgcaatatattctcattttatacaaaatagacacttattatgaaaaaaataaaaacaaagaataaataacaagaaacaaaccctcattttgtgtgtgtgtgtagagccatgtgctatgaatattttggcactatttcctcctggttcattctacatatttttatatgggtaaatttatccagagagaggacaattttgccccctctcatattagggggtaaggggagtagagctgaaagtcatttttctttctcagcaaatttttgcaacattttataatgtctgtgtaataattctttggggtaggagtgtatctattcattcaatgattcttgaatggaagattcttaacatccatacataaacaaatcatatatacacacacacacacacacacacacacatatatatatayacacatatatgtatatatacggctgttatgattgaatgacactgtgataaacacacctttattcatataacttggagagtatctattggcttgctgacatgacaaacttaactaatgttgaattcttaccttctctcctgcatttgtgaatgtcataagctccaccctgagttttagcccttggattctctggcgttcatcaatggagaattacagcctcttgcttggcctgctacctgtctccccacctcttgggtaccatgtcctttctcataagaactggatccatcattccagggtcattgctggtctaagctcctggtcatgtctacttgcctgatcctgttagagttaatactactattcataattgttcaaaacagcaacaacaaaaacaaaacacaacggactattctatcatactgcttttttagaaggcattttggctctcatctttccattaatttgattttgagtggaaaaaatattaggtattccaggagaaataaagtgaaataatttggttttaggtgggttagctgtagtgcaaatattcaaaattgtaattccagttcgaacagcatgagctttgaactacagcagagcctagttccagtctcaactcttctacattctaaatgtgtgaaggatgagaaagtgattaaacctctctgagcttcagttttctatctggaaatggaagatggcaacacatactggaagagtctctgtgagggcttctgatccttaggtttgcgtcg

SEQ ID NO: 695948 - DNA, 1321 bp, Homo sapiens
catccatccatgttagtttctccctcctgactctcatactggacagcccctgtgggttgaaatctaccaacagcacatagctggggaccctgacctcggctcatagccagctctgctccaaactcttggccttagtctctcaccttgcaatatattctcattttatacaaaatagacacttattatgaaaaaaataaaaacaaagaataaataacaagaaacaaaccctcattttgtgtgtgtgtgtagagccatgtgctatgaatattttggcactatttcctcctggttcattctacatatttttatatgggtaaatttatccagagagaggacaattttgccccctctcatattagggggtaaggggagtagagctgaaagtcatttttctttctcagcaaatttttgcaacattttataatgtctgtgtaataattctttggggtaggagtgtatctattcattcaatgattcttgaatggaagattcttaacatccatacataaacaaatcatatatacacacacacacacacacacacacacatatatatatatacacatatatgtatatatayggctgttatgattgaatgacactgtgataaacacacctttattcatataacttggagagtatctattggcttgctgacatgacaaacttaactaatgttgaattcttaccttctctcctgcatttgtgaatgtcataagctccaccctgagttttagcccttggattctctggcgttcatcaatggagaattacagcctcttgcttggcctgctacctgtctccccacctcttgggtaccatgtcctttctcataagaactggatccatcattccagggtcattgctggtctaagctcctggtcatgtctacttgcctgatcctgttagagttaatactactattcataattgttcaaaacagcaacaacaaaaacaaaacacaacggactattctatcatactgcttttttagaaggcattttggctctcatctttccattaatttgattttgagtggaaaaaatattaggtattccaggagaaataaagtgaaataatttggttttaggtgggttagctgtagtgcaaatattcaaaattgtaattccagttcgaacagcatgagctttgaactacagcagagcctagttccagtctcaactcttctacattctaaatgtgtgaaggatgagaaagtgattaaacctctctgagcttcagttttctatctggaaatggaagatggcaacacatactggaagagtctctgtgagggcttctgatccttaggtttgcgtcg

SEQ ID NO: 695949 - DNA, 1458 bp, Homo sapiens
tggtagatgctgcaggtsgggggcctggtacacatactcttggagctcactctgtccaggtccccttaggtcctgtctgtggctgcagcccccaaagccctgcttctaccagctttgctaccacgagccgtacctgtaactttagagagtccacattgggtgctagagcagccttcccccgcatgccctttatgtcttccttcctcccccagggcagccagtagatgttttgtgggtggtacaaaagcccagctcccttgccttgaggcaggacaagctctgagatgtcatttgccctccagagctccccacgaactcaggccgagcctgatgcttcaccagaaagctcacctgtgcttggcctcttcctccttcctgatctgtacccctcactctcaaacaggtttcccctgggagaacttcttcaataaagtgttctcatcatcctaaagccttgcctcagagtctgcttctgggcgaacccaacctcaggcggaatgaggttcacctttctcttaggcctgtgaggaaggggtatggcctgggagtgctgcatccttgggaagagcccttggctttcaggcccctgaggttatgacactgtccacaggcctgccacatgcacaaggctgctgtcagcatttctcttgcttcattcttcggaaggacaggaatgccagatgactgaagaccacaagatattcaagaagtcaagaccacaagaggaccaaaacaaacaaatagggggaaaaaggacattggaataaatgagttaatggaaggctcagaaagtaaccaaaataagtgtaattcccagggattatataagttactgtatccacaaatgacaaagaaatgcaatcagaaggtgaaaaggttttagaatttaacaaatatgagtgccaaaataggaacaatttagtatgaggattggaaggcaaagtcaaagtcatctcccagaatgtaaacccaaattatcaagagatgggacaaataagcgattaagagatgtgggccaggcatggtggctcatgcctgtaatcccagcactttgggaggccaaggcagatggatcatgaggtcaagaatttgagaccagcctggccaacacagtgaaaccctgtctctactaaaaatacaaaatattagctaggcacggtggcaggtgcctgtaatcccagctactcaggagactgaggcaggagatttgcttgaacccaggaggtggaggttgcagtgagccgagattgcgccactgtactccagcccagaggacagtgcgagactccgtctcgaaaaatatgtgaagatggcccaagaccccgctattaaaagctattaaaagccaagggttgatgagtggacacaaaagtgcagctagataagagaaataagtcctactgccccataacactctagggtggctctcacaaacaacgtctattatatattttcaaa

SEQ ID NO: 695950 - DNA, 1458 bp, Homo sapiens
tggtagatgctgcaggtcgggggcctggtacacatactcttggagctcactctgtccaggtccccttaggtcctgtctgtggctgcagcccccaaagccctgcttctaccagctttgctaccacgagccgtacctgtaactttagagagtccacattgggtgctagagcagccttcccccgcatgccctttatgtcttccttcctcccccagggcagccagtagatgttttgtgggtggtacaaaagcccagctcccttgccttgaggcaggacaagctctgagatgtcatttgccctccagagctccccacgaactcaggccgagcctgatgcttcaccagaaagctcacctgtgcttggcctcttcctccttcctgatctgtacccctcactctcaaacaggtttcccctgggagaacttcttcaataaagtgttctcatcatcctaaagccttgcctcagagtctgcttctgggcgaacccaacctcaggcggaatgaggttcacctttctcttaggcctgtgaggaaggggtatggcctgggagtgctgcatccttgggaagagcccttggctttcaggcccctgaggttatgacactgtccacaggcctgccacatgcacaaggctgctgtcagcatttctcttgcttcattcttcggaaggacaggaatgccagatgactgaagaccacaagatattcaagaagtcaagaccacaagaggaccaaaacaaacaaatagggggaaaaaggacattggaataaatgagttaatggaaggctcagaaagtaaccaaaataagtgtaattcccagggattatataagttactgtatccacaaatgacaaagaaatgcaatcagaaggtgaaaaggttttagaatttaacaaatatgagtgccaaaataggaacaatttagtatgaggattggaaggcaaagtcaaagtcatctcccagaatgtaaacccaaattatcaagagatgggacaaataagcrattaagagatgtgggccaggcatggtggctcatgcctgtaatcccagcactttgggaggccaaggcagatggatcatgaggtcaagaatttgagaccagcctggccaacacagtgaaaccctgtctctactaaaaatacaaaatattagctaggcacggtggcaggtgcctgtaatcccagctactcaggagactgaggcaggagatttgcttgaacccaggaggtggaggttgcagtgagccgagattgcgccactgtactccagcccagaggacagtgcgagactccgtctcgaaaaatatgtgaagatggcccaagaccccgctattaaaagctattaaaagccaagggttgatgagtggacacaaaagtgcagctagataagagaaataagtcctactgccccataacactctagggtggctctcacaaacaacgtctattatatattttcaaa

SEQ ID NO: 695951 - DNA, 1458 bp, Homo sapiens
tggtagatgctgcaggtcgggggcctggtacacatactcttggagctcactctgtccaggtccccttaggtcctgtctgtggctgcagcccccaaagccctgcttctaccagctttgctaccacgagccgtacctgtaactttagagagtccacattgggtgctagagcagccttcccccgcatgccctttatgtcttccttcctcccccagggcagccagtagatgttttgtgggtggtacaaaagcccagctcccttgccttgaggcaggacaagctctgagatgtcatttgccctccagagctccccacgaactcaggccgagcctgatgcttcaccagaaagctcacctgtgcttggcctcttcctccttcctgatctgtacccctcactctcaaacaggtttcccctgggagaacttcttcaataaagtgttctcatcatcctaaagccttgcctcagagtctgcttctgggcgaacccaacctcaggcggaatgaggttcacctttctcttaggcctgtgaggaaggggtatggcctgggagtgctgcatccttgggaagagcccttggctttcaggcccctgaggttatgacactgtccacaggcctgccacatgcacaaggctgctgtcagcatttctcttgcttcattcttcggaaggacaggaatgccagatgactgaagaccacaagatattcaagaagtcaagaccacaagaggaccaaaacaaacaaatagggggaaaaaggacattggaataaatgagttaatggaaggctcagaaagtaaccaaaataagtgtaattcccagggattatataagttactgtatccacaaatgacaaagaaatgcaatcagaaggtgaaaaggttttagaatttaacaaatatgagtgccaaaataggaacaatttagtatgaggattggaaggcaaagtcaaagtcatctcccagaatgtaaacccaaattatcaagagatgggacaaataagcgattaagagatgtgggccaggcatggtggctcatgcctgtaatcccagcactttgggaggccaaggcagatggatcatgaggtcaagaatttgagaccagcctggccaacacagtgaaaccctgtctctactaaaaatacaaaatattagctrggcacggtggcaggtgcctgtaatcccagctactcaggagactgaggcaggagatttgcttgaacccaggaggtggaggttgcagtgagccgagattgcgccactgtactccagcccagaggacagtgcgagactccgtctcgaaaaatatgtgaagatggcccaagaccccgctattaaaagctattaaaagccaagggttgatgagtggacacaaaagtgcagctagataagagaaataagtcctactgccccataacactctagggtggctctcacaaacaacgtctattatatattttcaaa

SEQ ID NO: 695952 - DNA, 1458 bp, Homo sapiens
tggtagatgctgcaggtcgggggcctggtacacatactcttggagctcactctgtccaggtccccttaggtcctgtctgtggctgcagcccccaaagccctgcttctaccagctttgctaccacgagccgtacctgtaactttagagagtccacattgggtgctagagcagccttcccccgcatgccctttatgtcttccttcctcccccagggcagccagtagatgttttgtgggtggtacaaaagcccagctcccttgccttgaggcaggacaagctctgagatgtcatttgccctccagagctccccacgaactcaggccgagcctgatgcttcaccagaaagctcacctgtgcttggcctcttcctccttcctgatctgtacccctcactctcaaacaggtttcccctgggagaacttcttcaataaagtgttctcatcatcctaaagccttgcctcagagtctgcttctgggcgaacccaacctcaggcggaatgaggttcacctttctcttaggcctgtgaggaaggggtatggcctgggagtgctgcatccttgggaagagcccttggctttcaggcccctgaggttatgacactgtccacaggcctgccacatgcacaaggctgctgtcagcatttctcttgcttcattcttcggaaggacaggaatgccagatgactgaagaccacaagatattcaagaagtcaagaccacaagaggaccaaaacaaacaaatagggggaaaaaggacattggaataaatgagttaatggaaggctcagaaagtaaccaaaataagtgtaattcccagggattatataagttactgtatccacaaatgacaaagaaatgcaatcagaaggtgaaaaggttttagaatttaacaaatatgagtgccaaaataggaacaatttagtatgaggattggaaggcaaagtcaaagtcatctcccagaatgtaaacccaaattatcaagagatgggacaaataagcgattaagagatgtgggccaggcatggtggctcatgcctgtaatcccagcactttgggaggccaaggcagatggatcatgaggtcaagaatttgagaccagcctggccaacacagtgaaaccctgtctctactaaaaatacaaaatattagctaggcacggtggcaggtgcctgtaatcccagctactcaggagactgaggcaggagatttgcttgaacccaggaggtggaggttgcagtgagccgagattgcrccactgtactccagcccagaggacagtgcgagactccgtctcgaaaaatatgtgaagatggcccaagaccccgctattaaaagctattaaaagccaagggttgatgagtggacacaaaagtgcagctagataagagaaataagtcctactgccccataacactctagggtggctctcacaaacaacgtctattatatattttcaaa

SEQ ID NO: 695953 - DNA, 1458 bp, Homo sapiens
tggtagatgctgcaggtcgggggcctggtacacatactcttggagctcactctgtccaggtccccttaggtcctgtctgtggctgcagcccccaaagccctgcttctaccagctttgctaccacgagccgtacctgtaactttagagagtccacattgggtgctagagcagccttcccccgcatgccctttatgtcttccttcctcccccagggcagccagtagatgttttgtgggtggtacaaaagcccagctcccttgccttgaggcaggacaagctctgagatgtcatttgccctccagagctccccacgaactcaggccgagcctgatgcttcaccagaaagctcacctgtgcttggcctcttcctccttcctgatctgtacccctcactctcaaacaggtttcccctgggagaacttcttcaataaagtgttctcatcatcctaaagccttgcctcagagtctgcttctgggcgaacccaacctcaggcggaatgaggttcacctttctcttaggcctgtgaggaaggggtatggcctgggagtgctgcatccttgggaagagcccttggctttcaggcccctgaggttatgacactgtccacaggcctgccacatgcacaaggctgctgtcagcatttctcttgcttcattcttcggaaggacaggaatgccagatgactgaagaccacaagatattcaagaagtcaagaccacaagaggaccaaaacaaacaaatagggggaaaaaggacattggaataaatgagttaatggaaggctcagaaagtaaccaaaataagtgtaattcccagggattatataagttactgtatccacaaatgacaaagaaatgcaatcagaaggtgaaaaggttttagaatttaacaaatatgagtgccaaaataggaacaatttagtatgaggattggaaggcaaagtcaaagtcatctcccagaatgtaaacccaaattatcaagagatgggacaaataagcgattaagagatgtgggccaggcatggtggctcatgcctgtaatcccagcactttgggaggccaaggcagatggatcatgaggtcaagaatttgagaccagcctggccaacacagtgaaaccctgtctctactaaaaatacaaaatattagctaggcacggtggcaggtgcctgtaatcccagctactcaggagactgaggcaggagatttgcttgaacccaggaggtggaggttgcagtgagccgagattgcgccactgyactccagcccagaggacagtgcgagactccgtctcgaaaaatatgtgaagatggcccaagaccccgctattaaaagctattaaaagccaagggttgatgagtggacacaaaagtgcagctagataagagaaataagtcctactgccccataacactctagggtggctctcacaaacaacgtctattatatattttcaaa

SEQ ID NO: 695954 - DNA, 594 bp, Homo sapiens
gggattgtttctgtgaatttgtttttttcttgaaaatgaaccagagttctttgtttctttttatgccttacaatttttttgttgaaacacggacatttgaatattacaatagtttaactctggaaaacagattattccccttccccaggatgtgctctttttgattgttgaaggctacacacatctgtttctttagtgactcttttaggctgtttttccaaagactgtgtattcttcattgtgtgtccctgaaacttctrttcctttaccttgtgttcagttgttgttctgatacagatttccttgaacatcaagagctaacaatattaaacaagtcaaaatataaaataaaacaaaaaactccaaaccccacctcttccatctctgtggatgactctatgttaatgtactccttcttcaacacttcagcacttagtcaggctctttacaaccctgcctcaatctttctttcctgcttgcactgagtctagagataaaaagtgaaagtttagggtcttcccagatgttttctgagaatgcattcttccttgggcatccatgtgtctttctagattttccagtatacacaggtgc

SEQ ID NO: 695955 - DNA, 555 bp, Homo sapiens
ttttctgtgctccacatgctgatactgataggcaaactataatattttatgatgtccctggtaacttacccatacgattttttaagtgcttgaaaagaattccactaacaaactaaatactgaactgtgaagtaattttctgatttatattttcaacttattgctataaaaaataagcaatcacaaatgaagccaggagaataaaagaatttaaacaacaaaatgcagattatgatagttgcttgggtgtaaaagactatagaaaactcaarcgatgatggatagtttataataaactaaaaattgagaaccctagggcaggattctagttcttcctttaaccagctgagtaacctgaggcacatcccagtgaggtctttctggctgtttccttgtatagaaaatgaatgggatagacttcatcagtgacttccaaactgggttccagggagattaggcattaggaagcagttcatggggataaagggagaattgatggattttgcatatatttgcaatatgattctgctatgttaaacatttaaaatcattgca

SEQ ID NO: 695956 - DNA, 903 bp, Homo sapiens
tggcggggaggtcctcctaaaacagctctctccagagaaactggtctcacaaatccttcctcaccaaatccacttctgacttattttatggcttcggtgtgaggaagggacttgagagtcctgcagccagtttggttcatgatttttgcaagtcttcccaggttgtctatttcactcggaacttggtctcgattgtatctgggcgcctcagtcaaaacttccaatttaacataatatacaattagatcaaaggcatctggaccaaagaagaaatagattatttaaggtgaggttgaatccaggtctgagttatgtttctaggatgaagaagatgaacaaaagaaagmagaggaggtatagaagggaaataaagaacaagatatttggagtttgaagctcagaagttgggggagatttctggaaaatctacatgcgtaggttgagaggcactgacagggaagggaatttactatctatggagtccagagctgaccaggatgttctacttgccctcaagctgctcccagaatagcgaaggaaccatccaggaggatcatggatgaaaaaagcctggaaaatagaaatgtttccaggcttttagaatggacatggagccttccattgaagtatgtcaaaaccacattgtataaagtgctctcactttttattttcaaacacgtataacaggaaaatttccatgttgtgtgaaatgttgtcagctcaaatgcctagttttttaaataaaagtgaatgatataaatcatcctgggttgggcatagtggcgcatgcctgtaatcccagcacttcaacagctcatgtctgtaatctcagcacttagaaggctaaggtgggtggatctcttgagcccaggagttcgagactggcctgggcaacatagcgaa

SEQ ID NO: 695957 - DNA, 615 bp, Homo sapiens
atgtatgccataactgatgacaggcaagatatggtttcatgtctttcactaatattatacttggcttccttctatatatatacatacatattatttaggaaattttatatatatagatctatatatatagaaggaagccaagtataatataggatgaaaattttatatatatactttagaaaattatatattatatatataaatttttatcccatttgtcatgtcttccttgggctgtgagaatgtcatacattttgcttacattttattgtgcatgttgacatcagctttgttttgtgtcttttatttgtttaccaggtaacctgcatatacaagaaattttctattttcatttttctgggccctatcctattttttactttgtcactcataagaattttatactcaaatttgttaagacaaaattgttcctctcttgtaatcttccaatgagttacactgttcccaaactatcttcataaggggtagtaagacccagtgaaaagaaattgagtaaaacagatattgttcaaattctaaaytgacatttacgtttgctagcgatggaaaaataatgattataatgattaagcatatagatgctcagtccatggt

SEQ ID NO: 695958 - DNA, 1434 bp, Homo sapiens
cctataatgttagcactttgggaggccaaggtgggaagatcacttgaacccaggagtctgagaccagcctgggcaacacagggagaccccatatctataaaaatttaaaaatttaaaaatgatggtgtgtgctgtaattcccactactcaagaagctgaggcaggaggattgcttgagcctgggagatggagactgcagtgagctgtgttcatgtcactgcactccagcctgggcaacactccagcctgggcaaycgagcaagaccctgtgtcaaaaaaagaaaaggaaaaagaaaaatcagtgtccagaatatatagagtacctccaactcagtagggagaaaataagatgactcaaaggaaagacgagaaaacaaaaagggtattgtggctgtcaaagctctttcctttaggaatgataaagcttaactcttacccttttaaagttaaaaaacaaacaaaaaaaggtggtggggagtggatttgttggttccataattgaatgagaacccaagggagcagtatgcttcagaaacagcaggatccttgttcttggacactgctcacagctattgcttgctctctcttcctctcttggttctaattctttcctttttatgagtaggctttattgtcacccagagtctctccacatggcagtaatgtattttccagcagcttcagacttgccatcattgccgtctatcagaactgtttgggttgtgagtgttacaaaattcattgtaaattagcttaaacaaacaaaataagagaacttactagcctgtataatcaaagaggtgtaatctaggatagggttggcttgtaggggagcttaagctaagagctccagcaatgtcaaccacttgggcttatttcactccctccattaggagcctgcctgctgctgtgtttgttggcttcattctcagaacagtccctcatgctaccttccagcggccctaggttcttctcatccttgatgctcttagtccagggaaaaagagtttttctctctcttaacaatcccatatttcaatggctctcattgggacgcagggctatgccaaacagtctctgtggtcacgggaacatgactaatcagatgcgggttacatgcctaactatgggctcaaagagaattcacctccactcaaagtagaggaactgagaatgagaggaaggtagctccctcccctttcctgcacaatgggtgtagtgttatcaggggtgaaatacatgttagagagtaaaattaacatacacctaccacaattttcttacatgtagctcataaccttagaaagagacatacctgcttcttcccagagtccatatcaatgctccagaaggctgtagctatgttggggtcatgtgtcttcctctgggtcaagccatcattgtgtcctactgaagggctgtctttggctgggc

SEQ ID NO: 695959 - DNA, 1434 bp, Homo sapiens
cctataatgttagcactttgggaggccaaggtgggaagatcacttgaacccaggagtctgagaccagcctgggcaacacagggagaccccatatctataaaaatttaaaaatttaaaaatgatggtgtgtgctgtaattcccactactcaagaagctgaggcaggaggattgcttgagcctgggagatggagactgcagtgagctgtgttcatgtcactgcactccagcctgggcaacactccagcctgggcaatcgagcaagaccctgtgtcaaaaaaagaaaaggaaaaagaaaaatcagtgtccagaatatatagagtacctccaactcagtagggagaaaataagatgactcaaaggaaagacgagraaacaaaaagggtattgtggctgtcaaagctctttcctttaggaatgataaagcttaactcttacccttttaaagttaaaaaacaaacaaaaaaaggtggtggggagtggatttgttggttccataattgaatgagaacccaagggagcagtatgcttcagaaacagcaggatccttgttcttggacactgctcacagctattgcttgctctctcttcctctcttggttctaattctttcctttttatgagtaggctttattgtcacccagagtctctccacatggcagtaatgtattttccagcagcttcagacttgccatcattgccgtctatcagaactgtttgggttgtgagtgttacaaaattcattgtaaattagcttaaacaaacaaaataagagaacttactagcctgtataatcaaagaggtgtaatctaggatagggttggcttgtaggggagcttaagctaagagctccagcaatgtcaaccacttgggcttatttcactccctccattaggagcctgcctgctgctgtgtttgttggcttcattctcagaacagtccctcatgctaccttccagcggccctaggttcttctcatccttgatgctcttagtccagggaaaaagagtttttctctctcttaacaatcccatatttcaatggctctcattgggacgcagggctatgccaaacagtctctgtggtcacgggaacatgactaatcagatgcgggttacatgcctaactatgggctcaaagagaattcacctccactcaaagtagaggaactgagaatgagaggaaggtagctccctcccctttcctgcacaatgggtgtagtgttatcaggggtgaaatacatgttagagagtaaaattaacatacacctaccacaattttcttacatgtagctcataaccttagaaagagacatacctgcttcttcccagagtccatatcaatgctccagaaggctgtagctatgttggggtcatgtgtcttcctctgggtcaagccatcattgtgtcctactgaagggctgtctttggctgggc

SEQ ID NO: 695960 - DNA, 612 bp, Homo sapiens
tttttgagatggagtcttgctgtgtcgcccaggctggagtgcagtggcataatctcagctcactgcaacctccacttcccaggttcaagtgattctcctgcctcagcctcccaactatctgggactacaggcacgtgmcaccatgtccagctaattttgtatttttagtagagacagggtttcaccatgttggccaggctggtctcaaactcctgacttcaattgatctgcctgccttaccctcccaaagtgctgggattacaggcattagccaccatacccaccctattttgaggttttgttattaggtatgtaagattttatattattgttggcagacaattgtccatggtttgcttgcatatctacaagttttctgagcaaagccaaggcattaacagtctgagccatttcacattgtgattattttacctttttttggtaaaatagttttgctgggtataaaattatatgtttataattttcctctttcagtacttaaaagatgttgctctcctgcttttcccttgtattacttctgacactgctgccattcttaactttgtccctgtgtatatatgttctttcttcccttctgactacttacatttt

SEQ ID NO: 695961 - DNA, 1807 bp, Homo sapiens
ctgcccttaggcaggcatcctattggccacatggaaacttccagagaaaagctctgggcaggcaaatgccagaggtacccaagcacctgggaggcgctgagtgctgcaggcctgagcggggcctgcctatgaggagtctgttgctttggggctgccctgtaagacattctctttggttcttcttcaaagaaaatatggcagtacctgtttcagcttggcctggcctttccctgctcttctcagtttaccaaaaaataccacaaagcaaattgagcaaatagcgtatctggacctttttttctttttaaagcagttttaaaaggagatggatttcatttggaaagcattccaaagaaagcatttcttaaagaaacacacattttggaaagcacagctctcctctagaaattcttgctttcttaaacacaggattttcttttgaggtgatagctgggatgccagagggctccatcggctccatcagcagtggcttggttattttatggcgttagcctcaattcacatgacacaggctccccctactcagaggcatggcccactttgctgcagagatacagacctgcctgctaagcagtcctgggtcatggctgtgctatgttggttgtcttggatacgttactagagtcctttgatgtcttttgctcctactgaaaccctacccatattagaggccacgaggaccaaagaatgacatgttcaccaaggaactctcatcccatccackcttttcacattcacctttgcttgggaatttatcattcccatctcaatgatcctcccactccggatacacacacagatgcacttcaaggcgtccctctgttccatcttggtttttacagcctgggtcaaggtcttccttttgtctgggctctaagtcttgctggaggtgaaattcatcctcttgctagcctggagaacagctgtgtccatggtcgagggctaactgtgaagagtgttgtgtcttagaaagaactcttaacacgtgatcactcaagtcccagcatcctcctctatttttcacgatttttaaacgcagcttctgaacaccgccatcgagcctgccttcaactcttctttgatgttatgttccagccactattgggttctgttctttgaaaattcgagcaagcagtcttccaaaaccccaatcctcttgttgtcatggactttggacttttttgtcttgttcttggttgaagaatctaccataacttgtagaaaactcatgacttaatgagggagtgtcattatacagtgctcagcctggtacttggccatattaaagcctaagttccatagctaatatctatccacaagacaatagaaatactgtcagttctcccgggaatttctcatgcccaccttctcatctttttgagggggtctcattttggccagaagagggcagtgttgcacatatggtctcccctgtaacagcagcttccccgggagcccagagtttctcattaaatgacaggtattattggaacattccacttggctcctttttcttaactgtaggcctaaaaaggccagggcagcaaggatgcaaaaaccattgtgaaccaggccttcaggagcttgtgacttgtgaatgtcaaggcccttgagtcacattctcctagtgccaccaggtacttggcgtgtggtgtgaatagctacggcgtgccatggagactggggagggggacacattacatacacagggagacccggtggaaagcatcgtgaaaggggaccacagagggcttccaagatggccaggcggagatggggagaacag

SEQ ID NO: 695962 - DNA, 647 bp, Homo sapiens
tgtgcctctgcagagtactgggcctttctggtatctttgttcagtgttgccaatatccaggaggcttccagagagtagaagtttgactcctaacagggtcaggatttccagttatggggtcaacctgggcttatagtcatgctatgtcaatggaacaataatggaaaggtggggcatgtgagatctaaggagaacgctgctgaatgggtattggcatcactagctgggagctccctaactctacacagtcattagtacagggaaccagccctccgaagcagaacttccaggccatgttggtgtgagcagggctctgaaasgtcctgtgaccttgaggaagctacttaatctctccaaacgcaggctagggggtaatggggataataacagtacctatccccacaggactgttacaaagagttaatgcggggagcctctgacacaatgcctggcacagagtgaagcccaccattaattagcatcaatagctatgtcaccatttcttttcttttttctttttttgagttggggtcttgctatgttgcccaagctggccttgaactcttgggctcaagtgatcttcctgccttagcctcctgagtagctgggcctacaggtatgtgctaccatgcacaacttatgctgcc

SEQ ID NO: 695963 - DNA, 647 bp, Homo sapiens
tgtgcctctgcagagtactgggcctttctggtatctttgttcagtgttgccaatatccaggaggcttccagagagtagaagtttgactcctaacagggtcaggatttccagttatggggtcaacctgggcttatagtcatgctatgtcaatggaacaataatggaaaggtggggcatgtgagatctaaggagaacgctgctgaatgggtattggcatcactagctgggagctccctaactctacacagtcattagtacagggaaccagccctccgaagcagaacttccaggccatgttggtgtgagcagggctctgaaaggtcctgtgaccttgaggaagctacttaatctctccaaacgcaggctagggggtaatggggataataacagtacctatccccacaggactgttacaaagagttaatgcggggagcctctgacacaatgcctggcacagagtgaagcccaccattaattagcatcaatagcyatgtcaccatttcttttcttttttctttttttgagttggggtcttgctatgttgcccaagctggccttgaactcttgggctcaagtgatcttcctgccttagcctcctgagtagctgggcctacaggtatgtgctaccatgcacaacttatgctgcc

SEQ ID NO: 695964 - DNA, 612 bp, Homo sapiens
taaaatcgtagttaaatttagttaaactgcttagctatgcatgaaaagtcaagagttgactatatgcagttcaatttaactttctgtaaagaatccattagggactaaagccaggcttcagcaaaaattaaaaagacatttcctgaaaccaataaacatcactcactacagttgctactcagtacaattccctttaccaatagcaattttaacgttcacagagaacttcccatgtgccaaatgctaggctcagtgctagggctgggtgtgcatgctttctcttcattcttataagcccctgtgatttacctgctgtcattgtcctccttttagagttgagaagtgaagtaactagctcaggttgacactttcaaccaaagggagagcagaattgtgmatgaaattatttctctctgattcgctgcacacatttcattgaaaaatacaaaaagttcaggaggaaatgttcagctctgactggccagtggcaggatttggtcatttggccatgttaagtctcgacaatttctctctggaaacccttttagaactatattccatgagggagcttctgctttgtgagaaacctgacaaaagcagcctctttgctta

SEQ ID NO: 695965 - DNA, 464 bp, Homo sapiens
ccatgtcactcaaacaaacttatgttattggtccttakgttattaagtccaaacttggccgggcgcggtggctcacgcctgtaatcccagcactttgggaggccgaggcgggcggatcacgaggtcaggagatcgagaccatcctggttaaaacggtgaaaccccgtctctactaaaaatacaaaaaattagccgggcgtagtggcgggcgcctgtagtcccagctacttgggaggctgaggcaggagaatggcgtgaacccgggaggcggagcttgcagtgagccgagatcccgccactgcactccagcctgggcgacagagcgagactccgtctcaaaaaaaaaaaaaaaaaaaaaaaaaaaagtccaaacttatgttattgtgcatcagcccacataataaaaacttcttccagtggtcaaatgaattccttgatcttaccctgaaattaaagtctgaaca

SEQ ID NO: 695966 - DNA, 623 bp, Homo sapiens
ctgtgaggaaacagacaaagggtggtaatttccccagcatcacaactagtcattggaggagctgggatttgaaccaaagaagtctggtaccagaatatgtgcctttaactactacattgccctcagtgcaacaatctgagtaagcaggaaaatgatgggcccttagttgagtttctttcctcatgtgaaattaggatgccaaacttagatgatctctcaaaatactaatggaatgcctgttatgtgccaggcatcatgctaggcttgggataaagctgtgactaagacaccctcatcctcatacagcttacattctagaagcagagacaaacwggtgaataatagactggtatattctacaaggcaaaaccaaaaactgggcgcagtaatgagaagaataggggaaccagctgtgcatcaggtggttggacctgggttctttgaggtgactgtaaacagagctgttggataaaaagtactccaacctgctgagagccagggaatcagctttcaagcagagagaatgacagacacaaaggcttgagtcaagaaagagcttggtaccttgtagaatcatcagaggagcatgaaataaagctcgatagagtggcagggccaggtca

SEQ ID NO: 695967 - DNA, 623 bp, Homo sapiens
ctgtgaggaaacagacaaagggtggtaatttccccagcatcacaactagtcattggaggagctgggatttgaaccaaagaagtctggtaccagaatatgtgcctttaactactacattgccctcagtgcaacaatctgagtaagcaggaaaatgatgggcccttagttgagtttctttcctcatgtgaaattaggatgccaaacttagatgatctctcaaaatactaatggaatgcctgttatgtgccaggcatcatgctaggcttgggataaagctgtgactaagacaccctcatcctcatacagcttacattctagaagcagagacaaacaggtgaataatagactggtatattctacaaggcaaaaccaaaaactgggygcagtaatgagaagaataggggaaccagctgtgcatcaggtggttggacctgggttctttgaggtgactgtaaacagagctgttggataaaaagtactccaacctgctgagagccagggaatcagctttcaagcagagagaatgacagacacaaaggcttgagtcaagaaagagcttggtaccttgtagaatcatcagaggagcatgaaataaagctcgatagagtggcagggccaggtca

SEQ ID NO: 695968 - DNA, 623 bp, Homo sapiens
ctgtgaggaaacagacaaagggtggtaatttccccagcatcacaactagtcattggaggagctgggatttgaaccaaagaagtctggtaccagaatatgtgcctttaactactacattgccctcagtgcaacaatctgagtaagcaggaaaatgatgggcccttagttgagtttctttcctcatgtgaaattaggatgccaaacttagatgatctctcaaaatactaatggaatgcctgttatgtgccaggcatcatgctaggcttgggataaagctgtgactaagacaccctcatcctcatacagcttacattctagaagcagagacaaacaggtgaataatagactggtatattctacaaggcaaaaccaaaaactgggcgcagtaatgagaagaataggggaaccmgctgtgcatcaggtggttggacctgggttctttgaggtgactgtaaacagagctgttggataaaaagtactccaacctgctgagagccagggaatcagctttcaagcagagagaatgacagacacaaaggcttgagtcaagaaagagcttggtaccttgtagaatcatcagaggagcatgaaataaagctcgatagagtggcagggccaggtca

SEQ ID NO: 695969 - DNA, 623 bp, Homo sapiens
ctgtgaggaaacagacaaagggtggtaatttccccagcatcacaactagtcattggaggagctgggatttgaaccaaagaagtctggtaccagaatatgtgcctttaactactacattgccctcagtgcaacaatctgagtaagcaggaaaatgatgggcccttagttgagtttctttcctcatgtgaaattaggatgccaaacttagatgatctctcaaaatactaatggaatgcctgttatgtgccaggcatcatgctaggcttgggataaagctgtgactaagacaccctcatcctcatacagcttacattctagaagcagagacaaacaggtgaataatagactggtatattctacaaggcaaaaccaaaaactgggcgcagtaatgagaagaataggggaaccagctgtgcatcaggtggttggacctgggttctttgaggtgactgtaaacagagctgttggataaaaagtactccaacctgctgagagccagggaatcagctttcaagcagagagaatracagacacaaaggcttgagtcaagaaagagcttggtaccttgtagaatcatcagaggagcatgaaataaagctcgatagagtggcagggccaggtca

SEQ ID NO: 695970 - DNA, 1855 bp, Homo sapiens
tgggcatggtggcttacacctgtagtcccagctactcggaaggctgaggcaggaggatcacttgaacctggggaggttgaggtttcagtgagccgtgatcacgccactgcactgcagcccgggcaacagaccgagaccctgtctctaaacaacaacaacaacgaaaacctactaaattttgcctattagtaaagcatcccatgcagtggctggtggggattttctgtgggcacagcaggaaggggaggctcagatcatgggtcaactgactaggttgagagtatagagtaactaaaaggtagcactgttccatggaattattcttggtagagtatcaatgtttgacttacatttagtgacaaaggatttttaaaagttctaatttttttgttacttgcattatcctctttccaktgttgaatctgacgtgtttgtttttgtttttttttttataagtaaactttggcattcagaattaccatctgaataatagcaaaaactaattcttttttacactgaagttgcctttcagcctttatctgagtggtcaccagtgaggcctttgctcatttgtcatttttccttggtcttttgttaagtttgtgattcattccttgatattggttgttttggtggtaagattggtgcatgtgttgggagaggacaacagtgaaatgatttctcattcttgaattatagctgtaacttcagaagttctagggctttgcctttgctgttttctgtttctgttcccataactaatgaaagttttttaagatgatagaaagaagcataataatttcctagataaaatttgaaatctggagattagaaacctaaagttaatttctggtctatttaatgagagcatttgcttgtgacacaggccagcaacactagaaagaagacaaatgtgaatttcagagtgccttagattttcccacagaataatctagagggtcattgactttctttattagagtttatctctgctttgtatttaaatgacaggacaaccatgtgatattgtttaatctacttccattcccttcccaaattaattttttaaagctcttaggatctttctcactccactaaaaacacacatgtaatcatatttttggtaggtcataccctatcaaagtctcctctttgttaaagaatgcttgttttcaggcctgagagagtggactcaagaatgcacaatagaagatgaggcatcatttgtaagttataatatactctaacttagcatacttatgtaaattatatactttcagatatttggaaaattgatctttttgggttgtcctacacttcttaaaaacaggcaacaaaataaaaatgccactgaatttagacttgaattgccagctctggtagcaaaggctttttaacatttattctgtaaacctggtcactgagcttgttgcatcctgctgaaagcaactttgagggcctaggaaaataatcattgaagatgcattgttgctttttgtgtgcgtgtgtgcacacttgctttttaatgatcagtaaaaaaaatttagaaaagcctcaggatgttccttgatttaaaacttaattaagatagaagctaataatatcttttccatttaaatgaatgttaaaatgccagtattttaaagacaaagaaatttatgcaccaaaaacatcatctttgtggtataaacttcaaccacacctctaatctgttgcccattattttcaatatgaaacactaggatcttctgggtatgtgtttatatgaattacaactctcagctttggctgtatgattatatataactgaagtattatttatttggtgaaataggtccagagtgcttgacctctt

SEQ ID NO: 695971 - DNA, 1590 bp, Homo sapiens
tctcactctgtaaggcatctgctctgagtgttgatgactttgaaacaaagttcttggacttgaaattaattttttttttctaagagttctctctgcctttctggccagacacccagttttctaggcttcattttcccagtcctttcctcatgtgataatagataaactagtctgttctttttttggatgactaaaaatgtgtaaatacagctctggcttcttatcctcctttttagtctcaactttccacctgcctccaagaagtttctgcytacattgatccctaaaacttcaaacaaagaactgagtttatcatggctttcatctaagctgatttttgctttgaaagtctctgatgctgcctccacacaccctgggcttgccaaatgatgtctcgtccttcattctttagtcacttactaaacgcattcctgctctgcagagcatcttgaatttactcctcttagaaattcaagcctttattgtccttgtttttatgtccatgttaatctctgaggacctctgtgcctctcttctcttaccattccagttcatctagacaagtgccagggtaatgttttcttaacatcatattcatcatgttacttccttgcttaggtgatcagggtaattccttttgtttaaatggatctaatctgaactctccagctagacgtaaggcattctgataattactctccccttcctttttaacttggacccatgtttgttttcatcttggaactggggaacgtggcccacttattcctgtgaaactaatgcatttgcatttcctgcagtcatctggcttttctgtggttttccctctgtttgctatctctcaccttttcttccttggtccacacccttcagctttttccaagcttgaccagtgaatgacttgctttttctttgttacacatctaaacctttcccatattgatttctctcttgctatgtgtttttttgactgttatgtgcagtttatgttatgttttatatatatttccaatttgttttctttcctaagaacatcatcttgaggtgatatacatctgcttttatatacattatgcctagccacattccctgggaagaaggagctgtcctatgcttctttcatatctgcacagaccttgaataatctaaagcaggggtgtccaatcttttggcttccctgggccacactggaagaagaattgtcttgggccacacataaaatacacttatactaacaatagctttaaaaaaaaatcgcaaaaaaaatctcataatgttttaagaaagtttacacatttgtgttgggctgcattcaaagccatcctgggcagcgagttggacaagtgtggtctaaagcatttctgaagtgcccagtaccccccactttccttgtcccaaagatgacaagtttcttcgtcttggctcatagagaacagggaagtcactccagctttggattatttcttactggtctttttttcagttccagtcagggaatgttgtaatcttcaatttgtggtatatttgtttttttaaaaaaaaaatcatctcaacctatttctccttttaggagtccacagttccactttg

SEQ ID NO: 695972 - DNA, 1590 bp, Homo sapiens
tctcactctgtaaggcatctgctctgagtgttgatgactttgaaacaaagttcttggacttgaaattaattttttttttctaagagttctctctgcctttctggccagacacccagttttctaggcttcattttcccagtcctttcctcatgtgataatagataaactagtctgttctttttttggatgactaaaaatgtgtaaatacagctctggcttcttatcctcctttttagtctcaactttccacctgcctccaagaagtttctgcctacattgatccctaaaacttcaaacaaagaactgagtttatcatggctttcatctaagctgatttttgctttgaaagtctctgatgctgcctccacacaccctgggcttgccaaatgatgtctygtccttcattctttagtcacttactaaacgcattcctgctctgcagagcatcttgaatttactcctcttagaaattcaagcctttattgtccttgtttttatgtccatgttaatctctgaggacctctgtgcctctcttctcttaccattccagttcatctagacaagtgccagggtaatgttttcttaacatcatattcatcatgttacttccttgcttaggtgatcagggtaattccttttgtttaaatggatctaatctgaactctccagctagacgtaaggcattctgataattactctccccttcctttttaacttggacccatgtttgttttcatcttggaactggggaacgtggcccacttattcctgtgaaactaatgcatttgcatttcctgcagtcatctggcttttctgtggttttccctctgtttgctatctctcaccttttcttccttggtccacacccttcagctttttccaagcttgaccagtgaatgacttgctttttctttgttacacatctaaacctttcccatattgatttctctcttgctatgtgtttttttgactgttatgtgcagtttatgttatgttttatatatatttccaatttgttttctttcctaagaacatcatcttgaggtgatatacatctgcttttatatacattatgcctagccacattccctgggaagaaggagctgtcctatgcttctttcatatctgcacagaccttgaataatctaaagcaggggtgtccaatcttttggcttccctgggccacactggaagaagaattgtcttgggccacacataaaatacacttatactaacaatagctttaaaaaaaaatcgcaaaaaaaatctcataatgttttaagaaagtttacacatttgtgttgggctgcattcaaagccatcctgggcagcgagttggacaagtgtggtctaaagcatttctgaagtgcccagtaccccccactttccttgtcccaaagatgacaagtttcttcgtcttggctcatagagaacagggaagtcactccagctttggattatttcttactggtctttttttcagttccagtcagggaatgttgtaatcttcaatttgtggtatatttgtttttttaaaaaaaaaatcatctcaacctatttctccttttaggagtccacagttccactttg

SEQ ID NO: 695973 - DNA, 349 bp, Homo sapiens
cgctatgcttgaagtgaccagagccagaaaatgcctctgtaactcagcagacctctcaaagccatgtccacctcctctgagtaaccagtgtctgctaaattaattcattaaccttatttaggactaatggtccagagtcattagaaactgctctttcttaatcaactgctagagagattgaacagagccagggagtctagcagtccacattatcttattacactstcactttctcagaagtcacagattaaagagctctggtgtggtaccaagtccacctaaatgtcttctgaagtgactctgtcgagtgactagaaccagtgctgttttatttcactcctgtaacaga

SEQ ID NO: 695974 - DNA, 2600 bp, Homo sapiens
  misc_feature 736, 737, 738, 739, 740, 741, 742, 743, 744, 745, 746, 747,748, 749, 750, 751, 752, 753, 754, 755, 756, 757, 758, 759,760, 761, 762, 763, 764, 765, 766, 767, 768, 769, 770, 771,772, 773, 774, 775, 776, 777, 778, 779, 780, 781, 782: n = A,T,C or G
  misc_feature 783, 784, 785, 786, 787, 788, 789, 790, 791, 792, 793, 794,795, 796, 797, 798, 799, 800, 801, 802, 803, 804, 805, 806,807, 808, 809, 810, 811, 812, 813, 814, 815, 816, 817, 818,819, 820, 821, 822, 823, 824, 825, 826, 827, 828, 829: n = A,T,C or G
  misc_feature 830, 831, 832, 833, 834, 835: n = A,T,C or G
agtctggccacggggcaggtctgagcagggaggaggagactgtgtggactcagcttacgtggcagctcctattaaggacatgcaacccagtcctgaggccaggaagactgtgtgggagccagagtgaagcgggagtgagagggagctggctggaggtaggcactgccagcaggagagctggctgcgagaggaaagggaggcagcggggctgggaggatgctgtgttagggagtgtgcactgcaccttgagggcagtggaggaggagataggggaaggacaggttccggtttgcacattagaaagagtgcctgactgcagtgtgagggcaaaagagtggtaattcagagaaaaagaggaaccgtgccaggaaggagccggcagagtggcctgagctcaggggactctgtgggttctagggacattcaggaggcaggatggcaggagttgattatggacttggtgattagaaggtttgttgatgtgggaggggtcccaagggagagaaagaagtcaaggagggtttgaagggatctggattgagcttcctaaatgagaatacatctttgaaatacattcatcgcggtccttcccaaagccaggggctaggtgcctcctggacaagaggcacctctgaggattctctccgaggactgtctgcctctgtggggtcagatgttgtgaaatgcctccagttcagtgtttttgtggtgtcttcctgacaaagcactaagaagnnnnnnnnnnnnnnnnnnnnnnnnnnnnnnnnnnnnnnnnnnnnnnnnnnnnnnnnnnnnnnnnnnnnnnnnnnnnnnnnnnnnnnnnnnnnnnnnnnnncttgcggagatcttacaagggttgtagcggtgccacagatctcaagtcccaagcagctcccagcctcagggtagtctttattttctctccagctgggtaggtgacacctagtggtagcaattaataaaactccccaaggagaggatgtttgaggtcactgaccagtggtggaggtgaatttcaaactccagttctatgaatctgtgctcatacacccacatacgtactcattggtattatattatgttcttttggacttgatgttttctcatgacattaaaagttgaaaacggtttactgactgcaaaccatttcagcaacagattcacgctgtaaagatcgcactgggttccttcctgagacagcattgtctactttcggcctgtgggttatttgtttatttgtttgggcctcttcgtggtgtgagtgggtgggatcccggcgctcccatgttgctttaacctggctgaggcccgatgctgtggtctttgccatgcctgcactggggcctctgttggcagttgttcttggctgggcaacttccccactgtgcctggaagctgttctgcagttggtggctgctcagcccaaggaatggcacctgtggtagagcctcatgtcctctcctccccgcatgtccccgcctctcccccactctgtcctcctgcagaacctctgatccttgcctcctctccaccccctccctccttctgtagaacctctgatccctgcctcctccccacccctcttcctcctcctgcggaacctgtgatccctgcctcctccccacccctctccctcctcctgcggaacctctgatccctgcctcctccccacccttctccctcctcctggggaacctctgatccctgcctccttccgcacccctctccatgtaatgttgcttttgctgtaagacttagagtggtgggctgtaaactttgtctatgggacctcagaggtccctgggaacttctgccatcagccctgttgagtcagtaggcagaagcgcgtggcggggaggcagggctctcaggctttctgattgtgaagtcagggaggcctgaaggactgaaacccctggttgagtcatcaccctggcccttgggcccccttgtgccagacttgagcagtcacattgcctgcagcttgtggattttagaagagtgtaaagtgtctttgtaaccaaggcctccagctcgatatatggaagtgcccaaatggctctgtgcctctgtacttcttgatggaaggccaccttttttcccccatgaaagtagtggccttttgagacagaccttttctttgtcccacactctcctttgggaccctagtgctccaggagtgtatgttcatagcctcgcaccccccrcaaccccaccactctgtgctttccaagaataaggactgggggtttgcccatttctcttaaaccccagttgtcacagtgctttgcacataacaggcatgggatcagtcactttgggtggaatttagttatatccttagcgtgtcactagctgcctggagtcagccagatgtagaccccagggcctttaaaagagtccaagctcagaagtcatatttcattgtaggcagagccgctgcccagtgagactggggccttgcactgtgccgttgtttctttctctgccgctcactgcacaagtggacgattggtttttttgtttagctgcataatttcgaaccacccttcccatcctcatacttttgagtatgaggattctttgatttactctctcca

SEQ ID NO: 695975 - DNA, 642 bp, Homo sapiens
gacatctggcaaagccctacgttcctctggacggccttatgctgcrgtgtttcctgagcagacagagcagctgggccagggccaccagaggccatcgggtccttcagcttagccccctgatgcccccggaggccacgagagtatcgagaatgtgcactatggagatggggtttcccacaggtgctggaggtctccaggctctcagcctggacagtcccactgcccatttctccacataactgagcgtcagactgcaggagacactgagccccaggaatggacttcacataggagtccacagcctgttcctgcacacgggactccagggtgggtccaggacctatgcttcttaccacctgcccaggggctggggccaccttgtgtggctgacacaggaaaacaggccttaaagcaaggactcagccacccacagcccaggaaaggagctcaggctcctgcacacagggactttgacagggatgctgggaagaggcgcccctctgccttcaccaggcctggaggaagtggccagtgagctgtgagcagctttttctcagaaaggctctaggagacgtctgtctaacaggctggactttgcagggaatgaggacccacccggctgccagcagacagtgggccgca

SEQ ID NO: 695976 - DNA, 642 bp, Homo sapiens
gacatctggcaaagccctacgttcctctggacggccttatgctgcagtgtttcctgagcagacagagcagctgggccagggccaccagaggccatcgggtccttcagcttagccccctgatgcccccggaggccacgagagtatcgagaatgtgcactatggagatggggtttcccacaggtgctggaggtctccagrctctcagcctggacagtcccactgcccatttctccacataactgagcgtcagactgcaggagacactgagccccaggaatggacttcacataggagtccacagcctgttcctgcacacgggactccagggtgggtccaggacctatgcttcttaccacctgcccaggggctggggccaccttgtgtggctgacacaggaaaacaggccttaaagcaaggactcagccacccacagcccaggaaaggagctcaggctcctgcacacagggactttgacagggatgctgggaagaggcgcccctctgccttcaccaggcctggaggaagtggccagtgagctgtgagcagctttttctcagaaaggctctaggagacgtctgtctaacaggctggactttgcagggaatgaggacccacccggctgccagcagacagtgggccgca

SEQ ID NO: 695977 - DNA, 704 bp, Homo sapiens
  misc_feature 199: n = A,T,C or G
ggaggattgcttgagcctgggaggtcgaggctccagtgaaccatgatcatgccattggaatttcaccttgggaaaaagagcaagaaccctgtctcaaaaacacaaaaaatacttctactcaagaattcggaatggtatttttccattcttgtcacaagtgaatttcaaagatttgctggttataacatgttcctttttntgcctcaaatattaaatgactcagcagtcattgttctctgagggtggggaatgaagtgatttgagctggtgatgaaaaataggagagaaccagatgacctgataattcagtttccatgtgctgctggcaaagacatttgaccttctgagaaaagtcagcctccaaagactaaatattgttaatttttaaatatagttctagagaattmttttcctaatccttttactgtagtcctcttaatgcctatagccctgggacaacttgtccagcaccagaagtggacttgcacagaggaacatattagtaatttccatctggctctgtacatgacttgtagattaaacagccaattggggcctcctttagaatacaaaaacttggggaaattcaactgttatatattctagtcattttttacacttataattccctcaacttcaatagcttccaactgttattcatcttatctctggctttctggcttttctctggcaaatctttcatt

SEQ ID NO: 695978 - DNA, 704 bp, Homo sapiens
  misc_feature 199: n = A,T,C or G
ggaggattgcttgagcctgggaggtcgaggctccagtgaaccatgatcatgccattggaatttcaccttgggaaaaagagcaagaaccctgtctcaaaaacacaaaaaatacttctactcaagaattcggaatggtatttttccattcttgtcacaagtgaatttcaaagatttgctggttataacatgttcctttttntgcctcaaatattaaatgactcagcagtcattgttctctgagggtggggaatgaagtgatttgagctggtgatgaaaaataggagagaaccagatgacctgataattcagtttccatgtgctgctggcaaagacatttgaccttctgagaaaagtcagcctccaaagactaaatattgttaatttttaaatatagttctagagaattcttttcctaatccttttastgtagtcctcttaatgcctatagccctgggacaacttgtccagcaccagaagtggacttgcacagaggaacatattagtaatttccatctggctctgtacatgacttgtagattaaacagccaattggggcctcctttagaatacaaaaacttggggaaattcaactgttatatattctagtcattttttacacttataattccctcaacttcaatagcttccaactgttattcatcttatctctggctttctggcttttctctggcaaatctttcatt

SEQ ID NO: 695979 - DNA, 704 bp, Homo sapiens
  misc_feature 199: n = A,T,C or G
ggaggattgcttgagcctgggaggtcgaggctccagtgaaccatgatcatgccattggaatttcaccttgggaaaaagagcaagaaccctgtctcaaaaacacaaaaaatacttctactcaagaattcggaatggtatttttccattcttgtcacaagtgaatttcaaagatttgctggttataacatgttcctttttntgcctcaaatattaaatgactcagcagtcattgttctctgagggtggggaatgaagtgatttgagctggtgatgaaaaataggagagaaccagatgacctgataattcagtttccatgtgctgctggcaaagacatttgaccttctgagaaaagtcagcctccaaagactaaatattgttaatttttaaatatagttctagagaattcttttcctaatccttttactgtagtcctcttaatgcctatagccctgggacaasttgtccagcaccagaagtggacttgcacagaggaacatattagtaatttccatctggctctgtacatgacttgtagattaaacagccaattggggcctcctttagaatacaaaaacttggggaaattcaactgttatatattctagtcattttttacacttataattccctcaacttcaatagcttccaactgttattcatcttatctctggctttctggcttttctctggcaaatctttcatt

SEQ ID NO: 695980 - DNA, 549 bp, Homo sapiens
acccaggcccttacccaggggcacacacacccccccaggccctcatccagggatatacacatacccaggacctcacccagagacacacacacatacacccagagacacacgcacacccaggccctcacccaggacacacacacacccaggccctcacccagggacacacacacacacatacccagagacacacacacccaggccctcacccaggtacacacacacacctagacacayatacacccaggccctcacccagacacatacacacgcacacctccaacagacaggcacacacactcactcaggccctcacccagggacacacacacacctagacacacatacacccaggccctcacccagacccatacacacgcacacccccaacagacaggcacacacacactcaggcacacccacacacacttgggccctcagccagagacacacacacacccagagacacacacctagacccttatgcaagcacacacacacttacacacctctactcttacacgcttgtagaagctccaggatcctgaa

SEQ ID NO: 695981 - DNA, 2219 bp, Homo sapiens
ttcttcctgcgtcctatccctctctctttcctttctccctccctctctccctctctccctcccagtaagaattrtgttaggtaatcttgtattatcccttatcactcacaaaacctctgctctctagaaaatcttattgaattggagaagttccagttcctcaagtgggtgggagattgaccactgtagaaacctaatgttatggcagttgaaaaaatgatccaaaagccctctcatctctgatacatttccctaatcttgatacattttttaacaagtgttgtttttattcttttaattttaagcttaattctgctcaaagtttctatgattcagaaaagagctgccaagatactgttccaaagaaaatacgtttttgtagcttgtgtgggaatacttccaaaaggtaaagtagattcctctggaaaagacagtatcaaaattctccagatgcctggagctctaagcccattattgcattccacgtgctgctagtagcataacaaagtcaatcagtaccctttggtcaataatcctcccaactattaacaggaaaaaactgtgagcttgtaaatgaaatatcttgagctagataaggtgctcattatcatgagaggagcaatttgcatgttagcatgggggaaatatgatagggttttaaaaaccctcttcactctcacagtcaactagattgtaaaggacgtaatcattgcctcttttctgtaaattgcatttaataattttgcattttccccacaactttccactaaaaggcagagataacgaataaaggattttaaaaagtaagcaaaggtttctttcaagtttaattttcatcagttttctattatatacaatgcagaggtagatgtttcttgcttgctgggagtggtggggaagctcctatttaaacataatgaaatctcagaggtggtagataaactataattcccagaaaaataagagactactgtaaaggctcaaggccagcaaaaaaaggttgtgttaaagccactgagtatagaacagatctttcataacatgccatccctcatcaaggtaaaaagttgcttatcaatttaaagagatggagtggagagacagggagagagagaaagcagcaatggctgctgctcctataataaggtgactaattgtatgctattatctgtttgatggtttaagcagaataaagtgacactgatctggaaatgtgagaatgaagcagaacaagagagtgtttgtaagaggaataatttcaggcacccatgaggcttcacgtaaaactcatttgcacatagacagggctctcttgtggatgatggataaatgtaattcctagttaccagtgtgtctttttttcttttctctttatttttttttcaccgacaaggcattgaagacagaagaatggaatacggacaaaaatggcttcaaaaattagaataatttctaaactaatttaaatttctaaatgattagacagtgactgtgtggactgttccctcaggtcactaacacagatattcttaatagtcattcctgcaatattcaatagacgtcaacaatattgtccaatcaagctaaaaaaaaatgtgaaaatgggctgtgagttttactcaatacttgaaagctttcaattaagttttacataagagaaaacatacatgaactttaatcttttaagcaaattcttactgaaaaggagaaagggggacaattttaaaacaagaaagatcaaagccaattcaagatgtacgagcgccatctggtgtccataataaaaatgctatcagtttttagcagtcaaactccccttttgtgggctttgtagtgcaaaagggttatggtacaaagagtaattcttgaaatgggatttactctatgtctaatacccagatgttactatttactatttgtttttagagtaaactaacctaaggaagtgaagttggttgaagcagtgggtttgctgttaacacatatgttcaaacatttcagcaaaaataattcatgtttcaactagagaattcacataattgctgcagttctccactctaatttacttaagcaaaccttccttgatacaggaaaagtgtttctatactttcagaagcaatgcctgtgtaaaaatattggagaagcagatgggtagcatatttttaaggaagaaacttagaggcttataatgttaatgcactaagataaaattagcaata

SEQ ID NO: 695982 - DNA, 618 bp, Homo sapiens
atgtagatggctcacccagggtatcatggcccaatccagacttaatcctgggcattgtaatttcaaattgtatgctgtttctacattgattatatcccctcatgatttataattgctttccaaaaggaggatatagatggagatagactataagctttagggcaagttcttggtttctcagtttctatcttcttaataaagagcaagagaagaaaatatttkactttcttaggaaataataaaagactctagaaatatctgacgatttgtatcttctattttgctttaactttgaatatatataaagctaagagtgcagtttaaagcaaactataaagctctgtaaactgtatacatgtgcagtcacgtgtaacatgtctagcctgtcttgaggccgttctctaaagcagtggttttcaaaattccagtaatataatatgaccagttttattacattaacatgatatattattgttatcatacttcttgggttgccataacataatgccacagacttggtagtttaaacacagaaatttattttctcacagttctggaggctggaagtccatgatctaggtgccagccttattttctgctaaagcctctattcctggc

SEQ ID NO: 695983 - DNA, 618 bp, Homo sapiens
atgtagatggctcacccagggtatcatggcccaatccagacttaatcctgggcattgtaatttcaaattgtatgctgtttctacattgattatatcccctcatgatttataattgctttccaaaaggaggatatagatggagatagactataagctttagggcaagttcttggtttctcagtttctatcttcttaataaagagcaagagaagaaaatattttacyttcttaggaaataataaaagactctagaaatatctgacgatttgtatcttctattttgctttaactttgaatatatataaagctaagagtgcagtttaaagcaaactataaagctctgtaaactgtatacatgtgcagtcacgtgtaacatgtctagcctgtcttgaggccgttctctaaagcagtggttttcaaaattccagtaatataatatgaccagttttattacattaacatgatatattattgttatcatacttcttgggttgccataacataatgccacagacttggtagtttaaacacagaaatttattttctcacagttctggaggctggaagtccatgatctaggtgccagccttattttctgctaaagcctctattcctggc

SEQ ID NO: 695984 - DNA, 618 bp, Homo sapiens
atgtagatggctcacccagggtatcatggcccaatccagacttaatcctgggcattgtaatttcaaattgtatgctgtttctacattgattatatcccctcatgatttataattgctttccaaaaggaggatatagatggagatagactataagctttagggcaagttcttggtttctcagtttctatcttcttaataaagagcaagagaagaaaatattttacttycttaggaaataataaaagactctagaaatatctgacgatttgtatcttctattttgctttaactttgaatatatataaagctaagagtgcagtttaaagcaaactataaagctctgtaaactgtatacatgtgcagtcacgtgtaacatgtctagcctgtcttgaggccgttctctaaagcagtggttttcaaaattccagtaatataatatgaccagttttattacattaacatgatatattattgttatcatacttcttgggttgccataacataatgccacagacttggtagtttaaacacagaaatttattttctcacagttctggaggctggaagtccatgatctaggtgccagccttattttctgctaaagcctctattcctggc

SEQ ID NO: 695985 - DNA, 618 bp, Homo sapiens
atgtagatggctcacccagggtatcatggcccaatccagacttaatcctgggcattgtaatttcaaattgtatgctgtttctacattgattatatcccctcatgatttataattgctttccaaaaggaggatatagatggagatagactataagctttagggcaagttcttggtttctcagtttctatcttcttaataaagagcaagagaagaaaatattttactttcttaggaaataataaaagactctagaaatatctgacgatttgtatcttctattttgctttaactttgaatatatataaagctaagagtgcagtttaaagcaaactataaagctctgtaaactgtatacatgtgcagtcacgtgtaacatgtctagcctrtcttgaggccgttctctaaagcagtggttttcaaaattccagtaatataatatgaccagttttattacattaacatgatatattattgttatcatacttcttgggttgccataacataatgccacagacttggtagtttaaacacagaaatttattttctcacagttctggaggctggaagtccatgatctaggtgccagccttattttctgctaaagcctctattcctggc

SEQ ID NO: 695986 - DNA, 518 bp, Homo sapiens
cacacatcactatggtgatacattactcaggtacattgtaccaaagaatcataatgtgtggaagtctcccaaaattatagtgggagacttatgtaattatcgtgggaactataattgtgggagacttccacatatcatatttctttgttgatcccacaattatagtttccactgtaattaattacatgagtctcccactatatacataaaatcaacaaaggagcatttgatttaaactggatgttagattaaatggaattaatagacatttacagaacattttatccaagaactgcagaatatgcattattttcattagtacaygcaacattctccaggatagactattatattaggcgacacaagtctcaacaattttttaaaatcataatatcaaatatcttctcagacaacaaaggaataagactaaaaatgaacaccaagaggaactctggaaactatacaaatgcatgaaaattaaataacaaaatgctgaatgaccactgggtcaatgaaga

SEQ ID NO: 695987 - DNA, 583 bp, Homo sapiens
ttgttaatggcgaatcattggaggttattagacataaaagttacattactaggatttcctcttacaaagacctatctgaaagcagtgtggcatgacaaagaggggacagtctgtatgttctcataattgcctaggaaagaattatgagcacttgcattaagataatggtaatgtctggaatagaaagtccagaagtgtttagggatatgatttggtgaagttaattcaaggaatttcagtttttttwaaaaaaaattgtacattttgagtgagacagagtaggtcatacatacagtctatgtacaaataggtgtgaatgatgacatgtgcagtgtttaagtttgcattcactcaattggctgctacaccagtaaataagcagtggaaaggataccgatgagtagatgcaactttctcctcttcttcatagatgcctacttaaagtatagtaatctcaatccaaatagcttaagaattaaacatttcgaagaccccagaatcccaagcttagtgacttttatgtaaatgactagaaagagagcacaagcaagtacttagtgttaaaattctttagcatttaagg

SEQ ID NO: 695988 - DNA, 831 bp, Homo sapiens
  misc_feature 2, 3, 4, 5, 6, 7, 8, 9, 10, 11, 12, 13, 14, 15, 16, 17, 18,19, 20, 21, 22, 23, 24, 25, 26, 27, 28, 29, 30, 31, 32,33, 34, 35, 36, 37, 38, 39, 40, 41, 42, 43, 44, 45, 46,47, 48, 49, 50, 51, 52, 53, 54, 55, 56, 57, 58, 59, 60,61: n = A,T,C or G
  misc_feature 62, 63, 64, 65, 66, 67, 68, 69, 70, 71, 72, 73, 74, 75, 76,77, 78, 79, 80, 81, 82, 83, 84, 85, 86, 87, 88, 89, 90,91, 92, 93, 94, 95, 96, 97, 98, 99, 100, 101: n = A,T,C or G
annnnnnnnnnnnnnnnnnnnnnnnnnnnnnnnnnnnnnnnnnnnnnnnnnnnnnnnnnnnnnnnnnnnnnnnnnnnnnnnnnnnnnnnnnnnnnnnnnnnccagttttagaaggctttcaccctcccaaaaaattcctttgtgactgtgtacaattaatctctttagcttaggccccaggtaaccaagggtctgctttctgtctttgtttatacaatacactgaattttttytcattatttacttgcttgactttttactctgaacaaatattagtttatgagtgagaagacaatttctaacacattgtttggtatatgacacaggaaagacactgaccagcctggaagtcaagagaaataatggattctttagtgtcagactaaacataaactttgaatattctagatactagcagaacctaaattatccagttgccttagatcttcagttaattcataaaaataattccaattaaattctttctctgaatttataaagtcaaaagcataacctttgatccttataagcacaaagcaattttgattttatcatgtcaacatgccttagaaaaatggtaaggtccaggggttttgtttctttgtttttttcttgttgtcattttgttttgttttcctttggtttgttagttttgaaggccttcactttttggtttgctgtttaaaattattttcttccggagccaattttattaacccagtgaaatataatttcaaggacattgtgtcttacccacaccctccaaggtatgttttatataataaggcaatgttgttaaaatcaggataattttatttttaaaaaatgtat

SEQ ID NO: 695989 - DNA, 831 bp, Homo sapiens
  misc_feature 2, 3, 4, 5, 6, 7, 8, 9, 10, 11, 12, 13, 14, 15, 16, 17, 18,19, 20, 21, 22, 23, 24, 25, 26, 27, 28, 29, 30, 31, 32,33, 34, 35, 36, 37, 38, 39, 40, 41, 42, 43, 44, 45, 46,47, 48, 49, 50, 51, 52, 53, 54, 55, 56, 57, 58, 59, 60,61: n = A,T,C or G
  misc_feature 62, 63, 64, 65, 66, 67, 68, 69, 70, 71, 72, 73, 74, 75, 76,77, 78, 79, 80, 81, 82, 83, 84, 85, 86, 87, 88, 89, 90,91, 92, 93, 94, 95, 96, 97, 98, 99, 100, 101: n = A,T,C or G
annnnnnnnnnnnnnnnnnnnnnnnnnnnnnnnnnnnnnnnnnnnnnnnnnnnnnnnnnnnnnnnnnnnnnnnnnnnnnnnnnnnnnnnnnnnnnnnnnnnccagttttagaaggctttcaccctcccaaaaaattcctttgtgactgtgtacaattaatctctttagcttaggccccaggtaaccaagggtctgctttctgtctttgtttatacaatacactgaattttttctcattatttacttgcttgactttttactctgaacaaatattagtttatgagtgagaagacaatttctaacacattgtttggtatatgacacaggaaagacactgaccagcctggaagtcaagagaaataatggattctttagtgtcagactaaacataaactttgaatattctagataytagcagaacctaaattatccagttgccttagatcttcagttaattcataaaaataattccaattaaattctttctctgaatttataaagtcaaaagcataacctttgatccttataagcacaaagcaattttgattttatcatgtcaacatgccttagaaaaatggtaaggtccaggggttttgtttctttgtttttttcttgttgtcattttgttttgttttcctttggtttgttagttttgaaggccttcactttttggtttgctgtttaaaattattttcttccggagccaattttattaacccagtgaaatataatttcaaggacattgtgtcttacccacaccctccaaggtatgttttatataataaggcaatgttgttaaaatcaggataattttatttttaaaaaatgtat

SEQ ID NO: 695990 - DNA, 1039 bp, Homo sapiens
tggctaacgtggtgaaacctcgtctctactaaaaatacaaaaattagctgggsgtggtggtgcatacctgtaatcccagctactcaggaagctgaggcaggagaatcgcttgaacccggaggcagaggttgcagtgagccaagatcgtgccactgcactccagcctcggcaacagagcaagactccatctcaaaaagaaaaaagaaataaaaataaaaagtcatgcccagctattttgggagaactgaaattacaactctatctgagaaaataaaatgacaggactccacagaatccatagataaaaacttaactgaagaggaatatggacagactaaaggaaaaattttatcaagctgtaatctttatacttgtgcctaaggccagaacttgaaactgctgaagacagtgtttctctacaaatgcacacaggcaccccattttgatgcacagataggtgtttatttcttttaagaatagcagctttattgagataaatttcacatatgatacaattcaccaatttaaagtgtacaagtcaatggttttcagtataatcagagttgtactaccatcaccataatcaattttagaacattttcatcaccgcccaaaaaccactgtagtctctccccagtcctccactcctgggaaccattaatgtactttctgtctctatagatttgcctattttggttattttatataaatggaatcatacaacatgtggtcttttgtgaatagcttttttcacttaccataatgttttcaagattgattcattttgtagcaggtatcagtcctttttcctgtttattgccaaataattttccattgtacggatagatcatattttgtttatccatttgtcacattttggttgtctatcagttgatagatatttgtggtgcatttaatttttggccaatgtgtaaaacttattttgctctcattgaggctacatactgttacaacaatgctatttggtcaacttgactgagctggcctcataggttacaggttgttcattgttagagat

SEQ ID NO: 695991 - DNA, 1039 bp, Homo sapiens
tggctaacgtggtgaaacctcgtctctactaaaaatacaaaaattagctgggggtggtggtgcatacctgtaatcccagctactcaggaagctgaggcaggagaatygcttgaacccggaggcagaggttgcagtgagccaagatcgtgccactgcactccagcctcggcaacagagcaagactccatctcaaaaagaaaaaagaaataaaaataaaaagtcatgcccagctattttgggagaactgaaattacaactctatctgagaaaataaaatgacaggactccacagaatccatagataaaaacttaactgaagaggaatatggacagactaaaggaaaaattttatcaagctgtaatctttatacttgtgcctaaggccagaacttgaaactgctgaagacagtgtttctctacaaatgcacacaggcaccccattttgatgcacagataggtgtttatttcttttaagaatagcagctttattgagataaatttcacatatgatacaattcaccaatttaaagtgtacaagtcaatggttttcagtataatcagagttgtactaccatcaccataatcaattttagaacattttcatcaccgcccaaaaaccactgtagtctctccccagtcctccactcctgggaaccattaatgtactttctgtctctatagatttgcctattttggttattttatataaatggaatcatacaacatgtggtcttttgtgaatagcttttttcacttaccataatgttttcaagattgattcattttgtagcaggtatcagtcctttttcctgtttattgccaaataattttccattgtacggatagatcatattttgtttatccatttgtcacattttggttgtctatcagttgatagatatttgtggtgcatttaatttttggccaatgtgtaaaacttattttgctctcattgaggctacatactgttacaacaatgctatttggtcaacttgactgagctggcctcataggttacaggttgttcattgttagagat

SEQ ID NO: 695992 - DNA, 3457 bp, Homo sapiens
aatcttcaatcccaaagaaattgtataacaagaaaatatttttaaatgttaatatttcccgagttcctcaaaattacagaactcctgtgttcagcattcactttatgctacgacaaaaatgacttcaagtaaaagtttagttatgagatcattataaatagatagcaataattcaactaagggaaaaaaagaaaacaaattttccttgactatgttttaaaatttcttagtttgtttttggttttcatcttagtgatttttctctttacgattagccagcaatcaatatatactttaaatatgaatacctagtagcttcattgataaggccatcaggtttctcttctgttaaatgctaaacaaaaaaaagtttgaataaagttactataatacaataaaaaatctaatgtcaacacaaaggattttactttagagacattttcttgcatttaataaaaacttcaacatgttctgttactgaatacacaaatccaaaactaacttttctagctgaaagcatttttcttccccatttgcaatttttttctacaagtgaacctgtggggttttatagggggaggaagagggcttaggatttcatactcctgaccttttcttttacttaaaaggaaaacccctttgattcacataatgtcataaaaacatagaagattacagttcagattttaggtattttccttcttacaaaactgttctggttctaaatattcattattacttattttaaaaaaaggataaccactgaaatatagtttcttagaatctaatatacttcccttcacaccaaacccccatattagaatctaaaatacttccctacaccccagcccacaatcatgcaccacgtgaactcagtactaggcctttcaaacaccctagaaacaaataagtggtgggaaggctgattcagccctgattctagcctaaaagcagtttatcatttagaaacccatacttgctaatctggcctctcagtgcaactgtttattttactgacctctccagagtcaggctaactccaaaaaatattttgacactgacttagagcccaagtggtagtttccatctctctggaggcaagttttgttgtctgtttttttttttccccctcataatcctgtttacatccctaacgtcatcaacatcacaagcttcttctctgggaaattacacttttaccctcattacctcaaacctcaatagaggttccctgtcacaataaaaagctggctactgaggtttagaggcaactagattatagtaatactctatatttgaagccaactttacaaatgaattaaatccttgaatctaactttataaattatatacatttttctcatttagctttcataataattatgggagatggctattttcatttataaaggaagaaactaaatctaacaccctcatcatcacaggatactatattttatatgcaatcacagggacttttttttttaattgaacacacacccatcaagtaaaatgaamataattttaaagcctttgtgaaatcttttatgccacataaaatcagcctgtgtacaatgctacacaaatgtcaataaccatatatcagagccaaaccagtttcataattcatggggagatgatcattaggggtatctgaatagtttggaacctcagagcaagcaggtaataattttatttaacaagcttgattaggtctatagaagaaacattttttccttctaaaagttcagcaaattctattttgaggaaaacaaaactgaaataaaatcatggcaatgatacttctacttcaggcaaaatcttgttcaattcaactgcagacccactctgcaattatggaagtcacagaacttgacaagtattgtatcaaaaatcattccatgccaaaagatcaagtttaatatttttttcataattcatcttggcctgaggctacaacaagtcctattgttatatactctgcctctagagaatgaggctgctaacagaccttggaatggtgcctggcacaaaggctcaagaaatatttgttgaatgaattgtaattaacacctcctgttgtggggatacataaaagatgttacatgaaaaatgccatctaacatgcagcaacaaatctcttcccattaagcagtaaatctacttaacaatgatatatttttggcaaggcatctgcctctgaatgatcctatagtactgaaaattctttttaaactgaaatatttttcaagatattatattattgaccttatgaaagcttttttaacatatgaaattggggttatttggctatgagtttgtgaggcataaaaatgatatgacagaagaattacagatttgtttttgcatttccatgcctaaatgtaactaatacaatgttagtttcacaaggtaatgtgcaatgttttaaatgcatttacctctccaaaatattagaattcttcactcaaagctaacagtggtagactaacgttttactacttccaggcagtcagaaagtatcaaatataaaaataaatgaaaatcaccccaaatgagagcctgccaatatttacagctgtattaaaattatatgtaatcatatacaattatagcagaagagataaatgtcctcttctatgcccataggaaagctatacaaatatttaaaaaaataagtgcatcttaacatttattttctttagatatcagccctgcatttccctcatgtgacttcctaccttcccaaatcaaactctgcaaaaagtataaaatcaatgtcttctattcaaaagaacattctccaataatacattatataccatttggtcattaagtcagatgactttcatttataaaataaaacaaaatggaaagtttggcattctattccacctgtataagtaaatgaagaaaaaatttttgcaaaatattttttaaatattttatattacatagatgtccaaagtattccttatctctgcttaacaactatggcttttgcttatatatcaaaaaagacaaaaataattttgatactaattaatccaacatattcaaaaggctaaggatcaaaaccccaatttaacttaccacaagaaacaaaggaaattaaaagggagtggtgtgagatgttggtcaaagaatacaaagtttgttatacaagatgcataagtcatggagagctaattacagcatgatgactgtagttaattctattgtatacttgaatctgctaaaacatagatcttaattgttcttaccaccccctctcaaaaaaatagcaatgtgaggtgatggataggttaactagctcgattgtttgataatgtaattcacacactgtataccttaaatatatatagtttttacttgtcaattatacctcaataaagctggggggttagagagagaaacaaaggaactctctgaaataacaccactgtagacctaactt

SEQ ID NO: 695993 - DNA, 598 bp, Homo sapiens
ctaartcaatcaataaaacttccaattctattaacagcttaaaagcaccaagaaatactctgatcattcattcaactgccaaagaaaatgacaaacgagtacttttcctcttttaaaccaaaaaaagtttttggtttaatactaacaaaagctttaatactcattttagatattcctctaatacatctatttacaatatatcacagaactatattctggttattaataatctcacttcttaccagggtctgctaatccagtggtctctaacagtatgtcatcaaatttccccttcttttgcatcaaattctcaatagctctaaggccattgtccctggagaataccaaaacataatttacagttaattacctaaatattttgaagtgattattataaacactttaaaatgtattcaacaacccgagacaaaagtatccttaggaatgtgaaaatttaactcacttctaaccttctaacaaaatgtctgtcccatatttaccagtgagaaaacaatagatgcatatatataataggtaaaaagaaatcatatacataataatactttattaaaattaaaagcagaggaaactttatctg

SEQ ID NO: 695994 - DNA, 598 bp, Homo sapiens
ctaaatcaatcaataaaacttcmaattctattaacagcttaaaagcaccaagaaatactctgatcattcattcaactgccaaagaaaatgacaaacgagtacttttcctcttttaaaccaaaaaaagtttttggtttaatactaacaaaagctttaatactcattttagatattcctctaatacatctatttacaatatatcacagaactatattctggttattaataatctcacttcttaccagggtctgctaatccagtggtctctaacagtatgtcatcaaatttccccttcttttgcatcaaattctcaatagctctaaggccattgtccctggagaataccaaaacataatttacagttaattacctaaatattttgaagtgattattataaacactttaaaatgtattcaacaacccgagacaaaagtatccttaggaatgtgaaaatttaactcacttctaaccttctaacaaaatgtctgtcccatatttaccagtgagaaaacaatagatgcatatatataataggtaaaaagaaatcatatacataataatactttattaaaattaaaagcagaggaaactttatctg

SEQ ID NO: 695995 - DNA, 598 bp, Homo sapiens
ctaaatcaatcaataaaacttccaattctattaacagcttaaaagcaccaagaaatactctgatcattcattcaactgccaaagaaaatgacaamcgagtacttttcctcttttaaaccaaaaaaagtttttggtttaatactaacaaaagctttaatactcattttagatattcctctaatacatctatttacaatatatcacagaactatattctggttattaataatctcacttcttaccagggtctgctaatccagtggtctctaacagtatgtcatcaaatttccccttcttttgcatcaaattctcaatagctctaaggccattgtccctggagaataccaaaacataatttacagttaattacctaaatattttgaagtgattattataaacactttaaaatgtattcaacaacccgagacaaaagtatccttaggaatgtgaaaatttaactcacttctaaccttctaacaaaatgtctgtcccatatttaccagtgagaaaacaatagatgcatatatataataggtaaaaagaaatcatatacataataatactttattaaaattaaaagcagaggaaactttatctg

SEQ ID NO: 695996 - DNA, 598 bp, Homo sapiens
ctaaatcaatcaataaaacttccaattctattaacagcttaaaagcaccaagaaatactctgatcattcattcaactgccaaagaaaatgacaaacragtacttttcctcttttaaaccaaaaaaagtttttggtttaatactaacaaaagctttaatactcattttagatattcctctaatacatctatttacaatatatcacagaactatattctggttattaataatctcacttcttaccagggtctgctaatccagtggtctctaacagtatgtcatcaaatttccccttcttttgcatcaaattctcaatagctctaaggccattgtccctggagaataccaaaacataatttacagttaattacctaaatattttgaagtgattattataaacactttaaaatgtattcaacaacccgagacaaaagtatccttaggaatgtgaaaatttaactcacttctaaccttctaacaaaatgtctgtcccatatttaccagtgagaaaacaatagatgcatatatataataggtaaaaagaaatcatatacataataatactttattaaaattaaaagcagaggaaactttatctg

SEQ ID NO: 695997 - DNA, 1672 bp, Homo sapiens
ggagaacctaagagggacatctagccagaggagtcacagtaaaaaagtacctattccaaggggctaaaacacttggcacctttgaagtaaccttagtttattgtgcggggccaatttggcaggctggaaaggttggcaagatccagatcctacaggtccttgtaattcatgttaaggaatttgaattttaacccatagggacgccactgaaaggtgtgacgcagtcggattgacatttataaagatcattaaggctaacatgcaacgaataaattaaagggcagcaagactccagattagtcaggaggcttttagagtattccaaatggttgggatcacagaagcaggatttggggggatggtaacagacgaagtttcagacatgttaagttttaagttgtaggacatcaaaatagaaattacacaggtgtgtagctaaagatggacaaagggggaaggaggagggagccttaaaaagaagccagagaagcaggtggaaaaatcagaagaaaaatgtaatagaagccaaaggaacagtgtttcaaaaagggaaaatggtcagggataggagtgaaactatccctagattcagcaacaaggttgctggtattaattctcactcctgagcttcagatcattttctccaatgatctactgacctaccagtgagcaacacgggaaaggcccgaggggcacgtttgaaatacattgttttggacaagaaatttgttcatcttctcagtagagcagcctctgaataactgtggggaaacgccaaaaataaattcctttataaaattacttccgagcaaaaaacgggaataaacttacagtctacaaagtttttaaaaaaacaaaagcagttatttcttatttttacataaaaggtcacgaagtggcccaagtctgtacctgtctctagcaacaactaggaatattatttcccggaaacagtattattttatttacatttcttaactttttccaaacttctaatacagtcatatatttgttctagcccttctatttaactgtaaggtttaaaaatatatttctcaaacttttccagtaagaaacttctagtgtaagtgcataaaccgcccttcacgaaactaccaagttcacaaacttgtggtttcgagtatccctgtacactctaaacgttcttagtttgagaaatagtcttggaggacagagattttattcttacttcctacgcagtggtttacaaacagacctcaaaaraaaagtgtttaagataggagcacttcctgccaactggctggaggactttggctcctggggaaggggaatctgctgacgaaagccccacgtgtcgggcattttacagacgggacatcctttaatggcaataggtaggttgttccggccctattagacaggtgacaggtattattacattttgacgtgaggtagatgagcgtcaggaagcgtaagcataacttggttagaggtcacagagacaattaggggggcgtgtcttagcttcaaagccttggtacaaaggctaactttccatctcacttgactgatgggaggctaacgcacacgggaccgagcattattaactaccaggatgagaggtaacccatacgagaagcaagtgagccaagccctacctcagagacatttgctcttgatcatgaagccc

SEQ ID NO: 695998 - DNA, 1672 bp, Homo sapiens
ggagaacctaagagggacatctagccagaggagtcacagtaaaaaagtacctattccaaggggctaaaacacttggcacctttgaagtaaccttagtttattgtgcggggccaatttggcaggctggaaaggttggcaagatccagatcctacaggtccttgtaattcatgttaaggaatttgaattttaacccatagggacgccactgaaaggtgtgacgcagtcggattgacatttataaagatcattaaggctaacatgcaacgaataaattaaagggcagcaagactccagattagtcaggaggcttttagagtattccaaatggttgggatcacagaagcaggatttggggggatggtaacagacgaagtttcagacatgttaagttttaagttgtaggacatcaaaatagaaattacacaggtgtgtagctaaagatggacaaagggggaaggaggagggagccttaaaaagaagccagagaagcaggtggaaaaatcagaagaaaaatgtaatagaagccaaaggaacagtgtttcaaaaagggaaaatggtcagggataggagtgaaactatccctagattcagcaacaaggttgctggtattaattctcactcctgagcttcagatcattttctccaatgatctactgacctaccagtgagcaacacgggaaaggcccgaggggcacgtttgaaatacattgttttggacaagaaatttgttcatcttctcagtagagcagcctctgaataactgtggggaaacgccaaaaataaattcctttataaaattacttccgagcaaaaaacgggaataaacttacagtctacaaagtttttaaaaaaacaaaagcagttatttcttatttttacataaaaggtcacgaagtggcccaagtctgtacctgtctctagcaacaactaggaatattatttcccggaaacagtattattttatttacatttcttaactttttccaaacttctaatacagtcatatatttgttctagcccttctatttaactgtaaggtttaaaaatatatttctcaaacttttccagtaagaaacttctagtgtaagtgcataaaccgcccttcacgaaactaccaagttcacaaacttgtggtttcgagtatccctgtacactctaaacgttcttagtttgagaaatagtcttggaggacagagattttattcttacttcctacgcagtggtttacaaacagacctcaaaagaaaagtgtttaagataggagcacttcctgccaactggctggaggactttggctcctggggaaggggaatctgctgacgaaagccccacgtgtcggrcattttacagacgggacatcctttaatggcaataggtaggttgttccggccctattagacaggtgacaggtattattacattttgacgtgaggtagatgagcgtcaggaagcgtaagcataacttggttagaggtcacagagacaattaggggggcgtgtcttagcttcaaagccttggtacaaaggctaactttccatctcacttgactgatgggaggctaacgcacacgggaccgagcattattaactaccaggatgagaggtaacccatacgagaagcaagtgagccaagccctacctcagagacatttgctcttgatcatgaagccc

SEQ ID NO: 695999 - DNA, 1860 bp, Homo sapiens
catcaatgtaaccacaataccattatcacacctaaataatccattaatagcatcggtttatccaggcaatatttaaatatcttcaattgtctaaaaactttttgtttagttggttggtttgaattagaatgctaataagggttacgtattgtgtttggttgatatgggctattatatctcttttagatttcctcaatcctctttttttgtttcccttgcattttttatgggagaaactgaactgtttgttctgaagaagttgacattctgractttgtagctgcaggtaatagttttttggcaagatattcccagggataaggtcgtttattcagacttttgaatattggcaaataataatattgtttgtagagggagaaggattagtcaagatatttttaagaatcaactattgaaaaaacaaatttttatcagagtaagcatggatctggtaaagattatgtgaaattttcctaaatgcaaatacaatctaaaattgtaatgtcttaaaattaaaaaatagattattttccatatatttatagaaatataaatgatcaatcaactatttcactgacaattttaaatctagttttatcttgaggagaataaagttttttatatctttagtattttagttgaagatccaaagacattttatgttaaaactttaggttttatattgttttgtgttttaaaacataaaatctaaaatgtggtaatatccatgaggtgcagatagagtaatagcacaaattctgtgttcatgaaaattcattttaggataacttaattaaaaggactcaggatttgaatgatattagattagacagaaaaaagttcacctgagtgtaagacataagtaataaaaaccaaaggtagctaacttttttaggcttcttctttctttaaagagtatgcatatgaaataaaatttccatgtcaatgtccatttttccatggtacatagggcttctataatttcgtctatttcatcctgcagttattttcacgggtttctgtgtccaccactatctggaatctctgagatggtgaaaacgaaatcttattcttctttatatttcaaacaattcctagcacattatcaaaaatacctgataaaatttattgtgtctgtaatactggtaagcatgtaaaagggtggtaaatatataggctttaagtttagatagatctaaatattattaaaattaccaaattattgtttttaaaaagtattagtttcctaggacaaatagagatttttcgataaggctggatttgtaatactttaagcaacaggtcacagtgcttaagtatttaatgccgatttggcaagcagctgatgttttacataatgctgtcgggtattttatatttgcgtgtattttctgatgcactggatccagcacttcatgtcacgtcatatatctgtttataatatatacaaatgtattttcatatatatttgatgtttgatggctttgaaactttaatcttgaaatagattttaaatttttattaaaactatttaaataattaccataaggaaagagctcttattagttgaaagaaaatgtagattcatgtttccttggagactagtctagtttccaaggatagacggcagtgaggagttgggtatctagatggaatttctgttggtttggattccagctctgctgcttaccagctttgtgacctcaggcaaacaacttaacctctccaagcctcaatttccccatctatataatggtgatatttataagtttcaccttatagggccatggtggggatcacatgaaatagtgtatgtgaagtgcttagcacagtgcctggcacatactcaatgctctatgc

SEQ ID NO: 696000 - DNA, 1860 bp, Homo sapiens
catcaatgtaaccacaataccattatcacacctaaataatccattaatagcatcggtttatccaggcaatatttaaatatcttcaattgtctaaaaactttttgtttagttggttggtttgaattagaatgctaataagggttacgtattgtgtttggttgatatgggctattatatctcttttagatttcctcaatcctctttttttgtttcccttgcattttttatgggagaaactgaactgtttgttctgaagaagttgacattctgaactttgtagctgcaggtaatagttttttggcaagatattcccagggataaggtcgtttattcagacttttgaatattggcaaataataatattgtttgtagagggagaaggattagtcaagatatttttaagaatcaactattgaaaaaacaaatttttatcagagtaagcatggatctggtaaagattatgtgaaattttcctaaatgcaaatacaatctaaaattgtaatgtcttaaaattaaaaaatagattattttccatatrtttatagaaatataaatgatcaatcaactatttcactgacaattttaaatctagttttatcttgaggagaataaagttttttatatctttagtattttagttgaagatccaaagacattttatgttaaaactttaggttttatattgttttgtgttttaaaacataaaatctaaaatgtggtaatatccatgaggtgcagatagagtaatagcacaaattctgtgttcatgaaaattcattttaggataacttaattaaaaggactcaggatttgaatgatattagattagacagaaaaaagttcacctgagtgtaagacataagtaataaaaaccaaaggtagctaacttttttaggcttcttctttctttaaagagtatgcatatgaaataaaatttccatgtcaatgtccatttttccatggtacatagggcttctataatttcgtctatttcatcctgcagttattttcacgggtttctgtgtccaccactatctggaatctctgagatggtgaaaacgaaatcttattcttctttatatttcaaacaattcctagcacattatcaaaaatacctgataaaatttattgtgtctgtaatactggtaagcatgtaaaagggtggtaaatatataggctttaagtttagatagatctaaatattattaaaattaccaaattattgtttttaaaaagtattagtttcctaggacaaatagagatttttcgataaggctggatttgtaatactttaagcaacaggtcacagtgcttaagtatttaatgccgatttggcaagcagctgatgttttacataatgctgtcgggtattttatatttgcgtgtattttctgatgcactggatccagcacttcatgtcacgtcatatatctgtttataatatatacaaatgtattttcatatatatttgatgtttgatggctttgaaactttaatcttgaaatagattttaaatttttattaaaactatttaaataattaccataaggaaagagctcttattagttgaaagaaaatgtagattcatgtttccttggagactagtctagtttccaaggatagacggcagtgaggagttgggtatctagatggaatttctgttggtttggattccagctctgctgcttaccagctttgtgacctcaggcaaacaacttaacctctccaagcctcaatttccccatctatataatggtgatatttataagtttcaccttatagggccatggtggggatcacatgaaatagtgtatgtgaagtgcttagcacagtgcctggcacatactcaatgctctatgc

SEQ ID NO: 696001 - DNA, 1860 bp, Homo sapiens
catcaatgtaaccacaataccattatcacacctaaataatccattaatagcatcggtttatccaggcaatatttaaatatcttcaattgtctaaaaactttttgtttagttggttggtttgaattagaatgctaataagggttacgtattgtgtttggttgatatgggctattatatctcttttagatttcctcaatcctctttttttgtttcccttgcattttttatgggagaaactgaactgtttgttctgaagaagttgacattctgaactttgtagctgcaggtaatagttttttggcaagatattcccagggataaggtcgtttattcagacttttgaatattggcaaataataatattgtttgtagagggagaaggattagtcaagatatttttaagaatcaactattgaaaaaacaaatttttatcagagtaagcatggatctggtaaagattatgtgaaattttcctaaatgcaaatacaatctaaaattgtaatgtcttaaaattaaaaaatagattattttccatatatttatagaaatataaatgatcaatcaactatttcactgacaattttaaatctagttttatcttgaggagaataaagttttttatatctttagtattttagttgaagatccaaagacattttatgttaaaactttaggttttatattgttttgtgttttaaaacataaaatctaaaatgtggtaatatccatgaggtgcagatagagtaatagcacaaattctgtgttcatgaaaattcattttaggataacttaattaaaaggactcaggatttgaatgatattagattagacagaaaaaagttcacctgagtgtaagacataagtaataaaaaccaaaggtagctaacttttttaggcttcttctttctttaaagagtatgcatatgaaataaaatttccatgtcaatgtccatttttccatggtacatagggcttctataatttcgtctatttcatcctgcagttattttcacgggtttctgtgtccaccactatctggaatctctgagatggtgaaaacgaaatcttattcttctttatatttcaaacaattcctagcacattatcaaaaatacctgataaaatttattgtgtctgtaatactggtaagcatgtaaaagggtggtaaatatataggctttaagtttagatagatctaaatattattaaaattaccaaattattgtttttaaaaagtattagtttcctaggacaaatagagatttttcgataaggctggatttgtaatactttaagcaacaggtcacagtgcttaagtatttaatgccgatttggcaagcagctgatgttttayataatgctgtcgggtattttatatttgcgtgtattttctgatgcactggatccagcacttcatgtcacgtcatatatctgtttataatatatacaaatgtattttcatatatatttgatgtttgatggctttgaaactttaatcttgaaatagattttaaatttttattaaaactatttaaataattaccataaggaaagagctcttattagttgaaagaaaatgtagattcatgtttccttggagactagtctagtttccaaggatagacggcagtgaggagttgggtatctagatggaatttctgttggtttggattccagctctgctgcttaccagctttgtgacctcaggcaaacaacttaacctctccaagcctcaatttccccatctatataatggtgatatttataagtttcaccttatagggccatggtggggatcacatgaaatagtgtatgtgaagtgcttagcacagtgcctggcacatactcaatgctctatgc

SEQ ID NO: 696002 - DNA, 651 bp, Homo sapiens
ggccttcctcccctttgctccatctcccagacaaatggccatagtcctcccaagggttcttccagcaaagggagccacctggatggaatgccagtcctcctcgggtctccagggaagagtgggtagatttgctttccccacctcctggtaggtgtgcttggggggaatgctgctgcagagagcagggtgcgaggatgttctrgggctctgcaaacaccagcggacaccagagaagccaaaaatccaacctcgaaaggcctggggccggggtaggcaccattatccaccagtgccgcgtccccacagactcctttctctccctctccctttatcccacactccttctctttccctgcctctcctccatgcctaaacaacactttcttgtgtttagtgcatagctttttattttaaccatgttctttcaaaatgaatctgtgtgtgtgtatttttaacttaggtaaatggcatctgtggcacctggctctgaacattacttcctccaccgaatttgcatcatgcacgtgtgacttttaccatcacccatcctggtgcatctgcattcagcccgacgctttccacagccgtgccacactccccgggctgcacctactgggtgacccaggtggcctgtaagcctaccttcactcc

SEQ ID NO: 696003 - DNA, 651 bp, Homo sapiens
ggccttcctcccctttgctccatctcccagacaaatggccatagtcctcccaagggttcttccagcaaagggagccacctggatggaatgccagtcctcctcgggtctccagggaagagtgggtagatttgctttccccacctcctggtaggtgtgcttggggggaatgctgctgcagagagcagggtgcgaggatgttctggggctctgcaaacaccagcggacaccagagaagccaaaaatccaacctcgaaaggcctggggccggggtaggcaccattatccaccagtgccgcgtccccacagactcctttctctccctctccctttatcccacactccttctctttccctgcctctcctccatgcctaaacaacactttcttgygtttagtgcatagctttttattttaaccatgttctttcaaaatgaatctgtgtgtgtgtatttttaacttaggtaaatggcatctgtggcacctggctctgaacattacttcctccaccgaatttgcatcatgcacgtgtgacttttaccatcacccatcctggtgcatctgcattcagcccgacgctttccacagccgtgccacactccccgggctgcacctactgggtgacccaggtggcctgtaagcctaccttcactcc

SEQ ID NO: 696004 - DNA, 603 bp, Homo sapiens
catcttgccccagttctagaagcagccatttctccaagaagccctggttctctaattggaaaatggtgctagaaaccaagatctgggtgctgggggtgctgtcgttactgggggtgtggttgctccttggccttctcagctgacagagaaaaggtgtgtgtgtgtgtgtgtgtgtgtgtgtgtgtgtgtgtgtgtcagcggcaaggatgcctggacatggtgtgaacctgaccccagtggtcttatgagctctaggaccatgggccagtacttagcctgccagtcgtgyagttaatttcactgtgtcaggccgagttctacggatttcgacaaattgatagtcatgtatccaccaacacagatccataatagaacagaaaattccccccagattcccttgtgctgaccttttgtagtcaatctctcttcatcgcaactcctggcaaccctgtctctgctttccatctctataattctgcctttcctgggatttcctatgtatggagtcatacagtatacagcctttgaggcctgtcttccctcctttggggctgagctctagcagcatagagtgcctgccctcatggtgttgcattaataatg

SEQ ID NO: 696005 - DNA, 603 bp, Homo sapiens
catcttgccccagttctagaagcagccatttctccaagaagccctggttctctaattggaaaatggtgctagaaaccaagatctgggtgctgggggtgctgtcgttactgggggtgtggttgctccttggccttctcagctgacagagaaaaggtgtgtgtgtgtgtgtgtgtgtgtgtgtgtgtgtgtgtgtgtcagcggcaaggatgcctggacatggtgtgaacctgaccccagtggtcttatgagctctaggaccatgggccagtacttagcctgccagtcgtgtagttaatttcactgtgtcaggcygagttctacggatttcgacaaattgatagtcatgtatccaccaacacagatccataatagaacagaaaattccccccagattcccttgtgctgaccttttgtagtcaatctctcttcatcgcaactcctggcaaccctgtctctgctttccatctctataattctgcctttcctgggatttcctatgtatggagtcatacagtatacagcctttgaggcctgtcttccctcctttggggctgagctctagcagcatagagtgcctgccctcatggtgttgcattaataatg

SEQ ID NO: 696006 - DNA, 649 bp, Homo sapiens
ttcctcttttttttttttgaaatggctaataacatacacttgttttttagcttcctgacacttttttgtataccatataaattaattctttaaaaaatgtgctttgtcatgtctctattcaaacatgatcaaaaaagaaaaagagcaaaaaagaatatattatataagggaataaataatccccagttaacaactcagccggactacctttctacaatgagctcaacatctctaaagatagggtcagacacaggcttgtgatgtatcaaaattataaataattatagckatgaattcacttaatcaatcaatttcaccagagctacgctggggtggacggggcataaaactccacacagctatcaattgctccgattacagctggttgtcagccagaattcccctgatccatgttagttaaatgcacattaatctgaatttggcagtgtaatcaaggacctaactgaactgtgaaattgaattctgcagtagaacataatttgaccattttatgccaagtcttggggggaagaaagcttggttaggggagggtgagagaaagaagagaaggaaaaaacagtactgcaggagcatctatttggcactgtggccttctgttctgagggcaggggggccgtggctggagcgt

SEQ ID NO: 696007 - DNA, 649 bp, Homo sapiens
ttcctcttttttttttttgaaatggctaataacatacacttgttttttagcttcctgacacttttttgtataccatataaattaattctttaaaaaatgtgctttgtcatgtctctattcaaacatgatcaaaaaagaaaaagagcaaaaaagaatatattatataagggaataaataatccccagttaacaactcagccggactacctttctacaatgagctcaacatctctaaagatagggtcagacacaggcttgtgatgtatcaaaattataaataattatagctatgaattcacttaatcaatcaatttcaccagagctacgctggggtggacggggcataaaactccacacagctatcaattgctccgattacagctggytgtcagccagaattcccctgatccatgttagttaaatgcacattaatctgaatttggcagtgtaatcaaggacctaactgaactgtgaaattgaattctgcagtagaacataatttgaccattttatgccaagtcttggggggaagaaagcttggttaggggagggtgagagaaagaagagaaggaaaaaacagtactgcaggagcatctatttggcactgtggccttctgttctgagggcaggggggccgtggctggagcgt

SEQ ID NO: 696008 - DNA, 2641 bp, Homo sapiens
tgcatcctcaaaaaaggatctgtttgcttccatcagttgcctgcaggtacttatcaacgtaggaccactctttactaaatttccatcctgaaattttgttaagactactcatacagtgtgaattatggcctccaaatacaagcccattctggcttatgattaggaattctcatatgaggcttttatttttccttgtcatcttttacagaattcagggcaaagtctaaggcagtcaagtcccctttgtggggttgggctttctagtttgccctttgtgagcattaacctttagggtgtcatttttcttcagggttccccaatcagatttctcacctgtctcgattctaggtttggcctgtgacttccatactacagtccattaaaaccaagtctgtagaacaccatacactgacagatgtacccaagccaaaaaaaaaataggtgttctctcatcatttcttagcttcggtattttctttgctgtcagctcagctatgctttttaaatgttttattttaaaatacatttcattcatcattttaagtgttatgcacctggagggacacatgcatagagtctagagtgctttttggctaacactatttatttatttatggagttatccttctttcccaaccagattgtaagtactcaaactgctctattctgctacactagtaattccttgcacacattaaagagttaataaatgtttcttgtttgaaataaatctattctctgttatctgaataaaattctgaaaagacttacagagaaacaacataagttctccctcttggcttttcatttttaattcttttctcatacatagaaatgtttccgtttgattaacacacagtctttatacacactatgttaattaaaaatactcctctggtttcatgaaccaagtaacctaatttttacctgaaaactcaaattaacagggcaccagtccaatatcagctattggaaataagatgattatataaagtacaagacttgacttgtcaatgaaatttatttatctctaggcatcttgtagaagtcattatccagtggtatcaaacgtatacccaagtgatcctgacatcagagttgaatgaccacatgcctgaggcaagagaatatagccacggttttttaatcttagaaaaaaagtcatccaaatatttatttatactccaaattaaatccatgcttgtttttaacaacgttttaaataatttaccaattaaattgcacaccactatcatcacaccaatttcatagtcaaactatgtaagatgtacgacatttgtttgatggctttgtctacttccaaaacataggtgtgtacctgatttttggaagccacattataatgttcaaaatgaagagaaatgtgaaaacttacaaaaacagactgctctgccaagagatcccaactctctttcatcagctcagtccttccacttcctaaccccacataaggctctaattcagaagtagcaagcttaattgactaggaggacttgcttggaatgccagtgagtacaaagggcaaggtagggaccctggcaaggcagagagaactggtcctgtccaaaggggcaggcctgcccttcacctccagccaattgtttccatgtggaagtataggggagggctgcagatctcccaaaccaagcctccagatttttatgtaagttaacctaattttataagtttgtctcaatcaratgaagagaaactgcatgattcataaaagtgtgaaataaaacatggaagatgattttcctaatcttagaatggaaaaaaaatctttttaggtatggcaggaaacaaggaaaaaaacacaaaacatggctatataaaaaaattttaaattctgcataacaaaaaacagcaagctcacatgcaaaagccagtaaagatgcacatatgcaggcaaaatgctaaggttcttaatacaaaagtgctgttggaagcaaatttcttatatacatgttatatattctattagaaaattattggcaacaatatggagatacagtttacagaaaaggaaacacaagtggttctcgtacacatgagaagacaaataacatcacccttgataagagaaatgctaattatattacaacaagataccatatttcactgactaatttggcaaagatcaaaaagcttcaaatcacacttttggcaaagtgatggaaaacaggcctcacatacattgttgggggattataagttgaaaaaagcctatgggcagacatttggtagaatttatcaaatttacaactatgcaccttttcatctagcaagtcatttttgtatatagatatacaaaataagccaatgacacacctacaaagatatttactgcagtattctctgtgcacactctaaaatgtaaagcctctgaatttacttaatttaagctaaaattaagggtaagtaaagggaaaacatggcctgggggaagatagccagagtttgaacccagagccaaattgcaatgaagagaataacagggcaagctgcacctctgccaccagaatgtagaggcaggatgaggtttatttaggtgaacaagaagaaaatcaacatgttcacagcctctgagctcatatgcttcagtaagacacacttatca

SEQ ID NO: 696009 - DNA, 2641 bp, Homo sapiens
tgcatcctcaaaaaaggatctgtttgcttccatcagttgcctgcaggtacttatcaacgtaggaccactctttactaaatttccatcctgaaattttgttaagactactcatacagtgtgaattatggcctccaaatacaagcccattctggcttatgattaggaattctcatatgaggcttttatttttccttgtcatcttttacagaattcagggcaaagtctaaggcagtcaagtcccctttgtggggttgggctttctagtttgccctttgtgagcattaacctttagggtgtcatttttcttcagggttccccaatcagatttctcacctgtctcgattctaggtttggcctgtgacttccatactacagtccattaaaaccaagtctgtagaacaccatacactgacagatgtacccaagccaaaaaaaaaataggtgttctctcatcatttcttagcttcggtattttctttgctgtcagctcagctatgctttttaaatgttttattttaaaatacatttcattcatcattttaagtgttatgcacctggagggacacatgcatagagtctagagtgctttttggctaacactatttatttatttatggagttatccttctttcccaaccagattgtaagtactcaaactgctctattctgctacactagtaattccttgcacacattaaagagttaataaatgtttcttgtttgaaataaatctattctctgttatctgaataaaattctgaaaagacttacagagaaacaacataagttctccctcttggcttttcatttttaattcttttctcatacatagaaatgtttccgtttgattaacacacagtctttatacacactatgttaattaaaaatactcctctggtttcatgaaccaagtaacctaatttttacctgaaaactcaaattaacagggcaccagtccaatatcagctattggaaataagatgattatataaagtacaagacttgacttgtcaatgaaatttatttatctctaggcatcttgtagaagtcattatccagtggtatcaaacgtatacccaagtgatcctgacatcagagttgaatgaccacatgcctgaggcaagagaatatagccacggttttttaatcttagaaaaaaagtcatccaaatatttatttatactccaaattaaatccatgcttgtttttaacaacgttttaaataatttaccaattaaattgcacaccactatcatcacaccaatttcatagtcaaactatgtaagatgtacgacatttgtttgatggctttgtctacttccaaaacataggtgtgtacctgatttttggaagccacattataatgttcaaaatgaagagaaatgtgaaaacttacaaaaacagactgctctgccaagagatcccaactctctttcatcagctcagtccttccacttcctaaccccacataaggctctaattcagaagtagcaagcttaattgactaggaggacttgcttggaatgccagtgagtacaaagggcaaggtagggaccctggcaaggcagagagaactggtcctgtccaaaggggcaggcctgcccttcacctccagccaattgtttccatgtggaagtataggggagggctgcagatctcccaaaccaagcctccagatttttatgtaagttaacctaattttataagtttgtctcaatcaaatgaagagaaactgcatgattcataaaagtgtgaaataaaacatggaagatgattttcctaatcttagaatggaaaaaaaatctttttaggtatggcaggaaacaaggaaaaaaacacaaaacatggctatataaaaaaattttaaattctgcataacaaaaaacagcaagctcacatgcaaaagccagtaaagatgcacatatgcaggcaaaatgctaaggttcttaatacaaaagtgctgttggaagcaaatttcttatatacatgttatatattctattagaaaattattggcaacaatatggagatacagtttacagaaaaggaaacacaagtggttctcgtacacatgagaagacaaataacatcacccttgataagagaaatgctaattatattacaacaagataccatatttcactgactaatttggcaaagatcaaaaagcttcaaatcacacttttggcaaagtgatggaaaacaggcctcacatacaytgttgggggattataagttgaaaaaagcctatgggcagacatttggtagaatttatcaaatttacaactatgcaccttttcatctagcaagtcatttttgtatatagatatacaaaataagccaatgacacacctacaaagatatttactgcagtattctctgtgcacactctaaaatgtaaagcctctgaatttacttaatttaagctaaaattaagggtaagtaaagggaaaacatggcctgggggaagatagccagagtttgaacccagagccaaattgcaatgaagagaataacagggcaagctgcacctctgccaccagaatgtagaggcaggatgaggtttatttaggtgaacaagaagaaaatcaacatgttcacagcctctgagctcatatgcttcagtaagacacacttatca

SEQ ID NO: 696010 - DNA, 2316 bp, Homo sapiens
gttccaggcctgaatgacttctcacctcgccttcattcactgtcagcttttactgactaggtgcttttatgactttcccttgcagatacccctgtttctaattagagccaggggcctgacccctggagagctgataacaattttgcccttcgatgtaccttattggctaactggaaaaggcaggttaatggtgtctgcatggaaggtatattattagaagtgagtctgtgaagcaaactccccgtgactctaatcttcagaatgctgactcctgaggtcagtaattgggcaccacagaattcactggagcagcaggcctaagcctgtcttcagacctctttgaaatgcagttcctgaggtcagagaaataattgcttcatttgaagggggtggaaagagatgagaggagaagaaacaaccttcattatttctccaatttatcaatgcaccatgttctcaatatcctggtctaattaaaataacacaggctgcttgagaaactcaatcatttccacagtgattcttgtcagtttgctcctcctgccagctcagagatgcctaatggcagataagcctgaagcccgagaccccctcgcttagccattaattcagcgaccagggtgccatgatgctcattaaagttctttacccctgttatatgaaaactcttaattaacagggaggatattttaatgtcaatgctttgcaactttccaaagagaaatgccaatgtaatcaacctaaacccttgaccacccctaccaaggcgaatctgcccttcttctcaaaccccagggactgattctggactccgtacgccatcagaagagactctgcatgcctggtattggctctcagggaagggctcgaaaaatgactcagagttcagccactgtattgcaaccctggtaatctgagaaaagttccaggcaagatcctgagatccaccttttgtgttcaaatgccattaaaaaaaaagggcacgaagaaaagggaatgttgctctgttgctcctctttcaactgactctgcacatctcctgtaggccagacttaattcagcctcacagaaaaagaaaaagacaaaaattagtgcaaaagggatgtgaaaggaataaacaaaaattcacacgttgggcaaaaaaagaagcaggggaaaagttaaagaaaaaaaaaagactcaatcctgcaattgcaccaacagtatcaagttctccggtccctgcaggagaccctgcatgcatcctgcaggagccctggcctggccctggatggctcagtgtacagcacagaggatccactgcagaggcaagggggcgacctctggcctggtcacctcagggacctgcaccatggatctttaatccaagcagctttggaggctggcctctgattatagcttccatacccatgcaagctcccctctgctgtggctccccacatttccagtatgttcccagattgccactctcagagccagagctgagtgctttgtaagacatcaggtcctttgagttcctgctccttctgtatctgacccagaatctatccgaccagccactgagatggctcttgtgactggccttgcttgctgatgaaccattagccctggtagggcagaagatctcacttttggcagcagccagcatgcttaagtggtgggaaaataagttaagagatgacatgaaaggaagggttgtggatataaaccagcttcatctgacataagaaaatattttaaaatagaagccgcttttcttcctgtaccctaatatgcaagtgttataagtgttattaaagtaattttaaagattgtttaaaattttcctctcttgtttagcttaattgcaaggcagatgcaaatgtcccctcttgctcatcaggtcacagcagaaaagtattagaaaggaatatatcaaagctcagaggctggaattttaaaaatgagattcagatgtgtctataaatatgacagggagatgcaaggagacccttgaagccagtgtgggcaaagcatgcctggaatttggtctgtgacctcacctggccatttgcttcattaaatctcctgctttcrggcacacatgggtctgggggtcagctggtatgttttcatcccatttacaatatgcaatattgtttgctcgccttaggggctgctgagccttctgcctcctgctcaagtgtcatgactcaaccaaactgaagaggcaggaaacagagctggatggatcactggtttgatctcatgacaaaaatcccttgttgtgacttctttcagaggcaggagattgttggaggctgggaggagggggca

SEQ ID NO: 696011 - DNA, 2316 bp, Homo sapiens
gttccaggcctgaatgacttctcacctcgccttcattcactgtcagcttttactgactaggtgcttttatgactttcccttgcagatacccctgtttctaattagagccaggggcctgacccctggagagctgataacaattttgcccttcgatgtaccttattggctaactggaaaaggcaggttaatggtgtctgcatggaaggtatattattagaagtgagtctgtgaagcaaactccccgtgactctaatcttcagaatgctgactcctgaggtcagtaattgggcaccacagaattcactggagcagcaggcctaagcctgtcttcagacctctttgaaatgcagttcctgaggtcagagaaataattgcttcatttgaagggggtggaaagagatgagaggagaagaaacaaccttcattatttctccaatttatcaatgcaccatgttctcaatatcctggtctaattaaaataacacaggctgcttgagaaactcaatcatttccacagtgattcttgtcagtttgctcctcctgccagctcagagatgcctaatggcagataagcctgaagcccgagaccccctcgcttagccattaattcagcgaccagggtgccatgatgctcattaaagttctttacccctgttatatgaaaactcttaattaacagggaggatattttaatgtcaatgctttgcaactttccaaagagaaatgccaatgtaatcaacctaaacccttgaccacccctaccaaggcgaatctgcccttcttctcaaaccccagggactgattctggactccgtacgccatcagaagagactctgcatgcctggtattggctctcagggaagggctcgaaaaatgactcagagttcagccactgtattgcaaccctggtaatctgagaaaagttccaggcaagatcctgagatccaccttttgtgttcaaatgccattaaaaaaaaagggcacgaagaaaagggaatgttgctctgttgctcctctttcaactgactctgcacatctcctgtaggccagacttaattcagcctcacagaaaaagaaaaagacaaaaattagtgcaaaagggatgtgaaaggaataaacaaaaattcacacgttgggcaaaaaaagaagcaggggaaaagttaaagaaaaaaaaaagactcaatcctgcaattgcaccaacagtatcaagttctccggtccctgcaggagaccctgcatgcatcctgcaggagccctggcctggccctggatggctcagtgtacagcacagaggatccactgcagaggcaagggggcgacctctggcctggtcacctcagggacctgcaccatggatctttaatccaagcagctttggaggctggcctctgattatagcttccatacccatgcaagctcccctctgctgtggctccccacatttccagtatgttcccagattgccactctcagagccagagctgagtgctttgtaagacatcaggtcctttgagttcctgctccttctgtatctgacccagaatctatccgaccagccactgagatggctcttgtgactggccttgcttgctgatgaaccattagccctggtagggcagaagatctcacttttggcagcagccagcatgcttaagtggtgggaaaataagttaagagatgacatgaaaggaagggttgtggatataaaccagcttcatctgacataagaaaatattttaaaatagaagccgcttttcttcctgtaccctaatatgcaagtgttataagtgttattaaagtaattttaaagattgtttaaaattttcctctcttgtttagcttaattgcaaggcagatgcaaatgtcccctcttgctcatcaggtcacagcagaaaagtattagaaaggaatatatcaaagctcagaggctggaattttaaaaatgagattcagatgtgtctataaatatgacagggagatgcaaggagacccttgaagccagtgtgggcaaagcatgcctggaatttggtctgtgacctcacctggccatttgcttcattaaatctcctgctttcgggcacacatgggtctgggggtcagctggtatgttttcatcccatttacaatatgcaatattgtttgctcgccttaggggctgctgagccttctgcctcctgctcaagtgtcatgactcaaccaaactgaagaggcaggaaacagagctggakggatcactggtttgatctcatgacaaaaatcccttgttgtgacttctttcagaggcaggagattgttggaggctgggaggagggggca

SEQ ID NO: 696012 - DNA, 1283 bp, Homo sapiens
tgaaatcttaaaacatactgtcaaattgttcagaaaaaaacaggtttttttgtactgtactcacaactttcctctaagtttaaaatggttgagagatagaaagagacagagaaacatcacattcacataaacagatgctgaaagatttttttaaataaaattcagcatctactgttgattttttaaattgtgaaaatgtcagaataaatggacatttctttaacaaatatgtatttactttgataactaaaccaaaaagccagtatcatgcttaataataaaacactaagctattcttattaaactcaggaacaaatcaagatgcccattataaccactattattcagcattgttctggaattgctaactaatgcaacaagacaagaaaaaaggatgggctgggcgcaggggctcacgcctgtaatcccagaactttgggaggccgaggcgggtgaatcacgaggtcaggagatcgagagcatcctggctaacacagtgaaatcctgtctctactaaaaatacaaaaaaaaattagcagggcgtggtggcgggtgcccgtagccccagctactcgggaggctgaggcaggagaacggcacgaacctgggaggcagagctttcagcgagctgagatcgtaccactgcactccagcctgggcaacagagtaagactccacctcaaaaaaaaaaaaaaaaaaaaagatgggattcaaataytagatttaaaaactatttacatgaatatgaatgtttagcaagctcaccgttaggtaatacatattagattggtgcaaaagtaattccgtttgtgtttttctcattgtggcagaaaccaaattacttttgtgcttttgccattatggcagaaagagcaagtacttttgtactaatttattacacaaaaatatataactttcctaaaatcaagaataatctagtagtggaatctcaaaatcaaagcaattaaattcatggagatggagaatagaaggatggttaatcagagactgggaagggtagtgcgggagctggggcaaggtgggcatcgttaatgggtaccagaaaaagtagttagaaagaatgaataaaacctagtatttgatagcacaacagggggactgtagtcaataataatttaactgtacattttaaaataacttaaagagtataattgggttgtttgtaacacaaaggataaatgcttgaggggatggatactcaagcctccgtgatgtgattttgacacattgcatgcctgtaccaaaatatctcatgtacctca

SEQ ID NO: 696013 - DNA, 1283 bp, Homo sapiens
tgaaatcttaaaacatactgtcaaattgttcagaaaaaaacaggtttttttgtactgtactcacaactttcctctaagtttaaaatggttgagagatagaaagagacagagaaacatcacattcacataaacagatgctgaaagatttttttaaataaaattcagcatctactgttgattttttaaattgtgaaaatgtcagaataaatggacatttctttaacaaatatgtatttactttgataactaaaccaaaaagccagtatcatgcttaataataaaacactaagctattcttattaaactcaggaacaaatcaagatgcccattataaccactattattcagcattgttctggaattgctaactaatgcaacaagacaagaaaaaaggatgggctgggcgcaggggctcacgcctgtaatcccagaactttgggaggccgaggcgggtgaatcacgaggtcaggagatcgagagcatcctggctaacacagtgaaatcctgtctctactaaaaatacaaaaaaaaattagcagggcgtggtggcgggtgcccgtagccccagctactcgggaggctgaggcaggagaacggcacgaacctgggaggcagagctttcagcgagctgagatcgtaccactgcactccagcctgggcaacagagtaagactccacctcaaaaaaaaaaaaaaaaaaaaagatgggattcaaatattagatttaaaaactatttacatgaatatgaatgtttagcaagctcaccgttaggtaatacatattagattggtgcaaaagtaattccgtttgtgtttttctcattgtggcagaaaccaaattacttttgtgcttttgccattatggcagaaagagcaagtacttttgtactaatttattacacaaaaatatataactttcctaaaatcaagaataatctagtastggaatctcaaaatcaaagcaattaaattcatggagatggagaatagaaggatggttaatcagagactgggaagggtagtgcgggagctggggcaaggtgggcatcgttaatgggtaccagaaaaagtagttagaaagaatgaataaaacctagtatttgatagcacaacagggggactgtagtcaataataatttaactgtacattttaaaataacttaaagagtataattgggttgtttgtaacacaaaggataaatgcttgaggggatggatactcaagcctccgtgatgtgattttgacacattgcatgcctgtaccaaaatatctcatgtacctca

SEQ ID NO: 696014 - DNA, 666 bp, Homo sapiens
atcaataataacttgttaaaatcaagtgtgtgttttacacaaagagcacatctcaattcaaactaatcacattctcagtgctcagtagacacatgtggctgctgatgactatgttggacagtacagccttatactgaaataatcagtttctgggtttgccttcccttctagaaagtatgctgcttaagggctagtcaatgtcacatgtgtgatatcatcagtgtatcttcagtgccttacatatatggagcattcatgaaatgcttgctgaacttaactgacctgaaggtactttgagagaaggtagaattttatttagcacctgctcaaaygaagagcagcttatgcatacttaggataattatgatgacagaaatgacagatattttttcttgaatgatgttctatgctttttaaatatattatctcatttagccctcacaatgaccctacataccatataccattattatatccatttatgaaagacaaaacattccccaaattatacagctactaagtgaaagagccagaactttttgaaatagagaaaaacaaagtaaataatattaattacatgtacactcacccaccacaataaaccaaaagttgaaaacaagctactccacataaattaaaagccctctccaatatggaagacttctc

SEQ ID NO: 696015 - DNA, 1012 bp, Homo sapiens
tcagcaggctcccagaatggggtgtcccccaggtcccatcagaacctaacaaacagacaaagtggccagcaacagctgcacaggggctgcacggacggggcgtccgctctgctgctgaccagatgggcaggcccaataaacaacccctcagtttctccatctgtgactcgggagccatcagcagaaagctcttgcagggctgtggggagctcagtgcacccatgagggcatcacaggcacrgtgccctgcacctcaggggtgccctgggcgggcaaggtcttcttccagcctgactgccccaagaaagggatagggtgctttgcacagaccccaaatccacagtccaagctgcggtgtagttttgctgagattctggaaattcctttctattttgcaaaaagaggagccaaggaccagcaccagaggggtggcccggggcccaggcacccacccaactgagctgcggcagagggcagcgggctctctgcaaactgtaacaagttggctctgtggccctgtctgtcagaggaggaggctgttcccaggagacgtgggctccacgggagacgcgccggctgcgctcagcggggagaggttgtcgctccagtccctagtggaggtctgtttgtgcaggaagccgtcatcagcagagaggcttttatagaaagcctcaccattccccctgcacctaatttgagatgaaggaactcatttgctacggaaggctctagaaagtggctgctggcatggtggcaggtgtgtggggatgggagaggtggcaagaggtccagggacccaggcaggatggccacttatgggtgtccaggcacccacagctgacccatggggcccaagcaagaaggacgccaaggccacagcgggtggaagggacctggtgggagacccagctgaggacagcagaggctgaggacagcagaggctcagccccacttcccctgtggtccctcacaaagcccctccctctttccagactcctcccctcagaacctt

SEQ ID NO: 696016 - DNA, 1012 bp, Homo sapiens
tcagcaggctcccagaatggggtgtcccccaggtcccatcagaacctaacaaacagacaaagtggccagcaacagctgcacaggggctgcacggacggggcgtccgctctgctgctgaccagatgggcaggcccaataaacaacccctcagtttctccatctgtgactcgggagccatcagcagaaagctcttgcagggctgtggggagctcagtgcacccatgagggcatcacaggcacggtgccctgcacctcaggggtgccctgggcgggcaaggtcttcttccagcctgactgccccaagaaagggatagggtgctttgcacagaccccaaatccacagtccaagctgcggtgtagttttgctgagattctggaaattcctttctattttgcaaaaagaggagccaaggaccagcaccagaggggtggcccggggcccaggcacccacccaactgagctgcggcagagggcagcgggctctctgcaaactgtaacaagttggctctgtggccctgtctgtcagaggaggaggctgttcccaggagacgtgggctccacgggagacgcgccggctgcgctcagcggggagaggttgtcgctccagtccctagtggaggtctgtttgtgcaggaagccgtcatcagcagagaggcttttatagaaagcctcaccattccccctgcacctaatttgagatgaaggaactcatttgctacggaaggctctagaaagtggctgctggcatggtggcaggtgtgtggggatgggagaggtggcaagaggtccagggacccaggcaggatggccacttatgggtgtccaggcacccacagctgacccatggggcccaagcaagaaggacgccaaggccacagygggtggaagggacctggtgggagacccagctgaggacagcagaggctgaggacagcagaggctcagccccacttcccctgtggtccctcacaaagcccctccctctttccagactcctcccctcagaacctt

SEQ ID NO: 696017 - DNA, 1487 bp, Homo sapiens
ggagatgatcccatagattacacagagagatttgttattctttttcacaactgtatagcactgtattgagtatatttgtctagcttcatcaaacaattttttatacttgggcatttgggtctttccattcttttgccattatgaatagaactgcaatgaacaatagtttccacatacaccttttttgcctttgtgttttygcagtgtaactttgggatagatttctagaagtgtgtttactaggtcaaagggtgaaggagtgtgcacaagatgctacaagatccctcctgtaatgtttctaatgtttggcatttcctccagcaatgtatgagaatgccagtttccccataaccttgccataaagcattttgctaaacattaatattcttgttcatctggtgggtaaaaaatattatccccaaagagttttaatttgcattttcctaattctgagtaaagttgaacatcttgtaataagtttacaaaccactgacaattcttatctggtctgtctacttgttactccctccccgcccgctacttttctataggattattggttttttcttatctatttttagtacttctttacatattaggaacattaaccttttgtgatataattttcaaaatgtccctgtttgtcatatgtcttctaactttgcagtggtgttttattgccatggaaagtttccgaaaataaaatgtatccatattttctggcttaacttctagaagcagactgaaaaattttggctctaaatgattttaccatctctctcagtaggaggtcctataagcatcagttgtcatacatcagtcctttttgcagacacttttggcatagatacttgcatgcacctactgtgcatcaggagttgtacctggttccttccctcaagctgattatggcatacagaaggagggaaaaatgagaagacacacatgtatggtccagtgtgataagtcttacaatggagacaaaatattaaggggcagacatttacggtggggtgacagttgggacaggatgagggaaggctttgcagaaaaactgatattcaattgtggtttcgaagagtaaatggtgtgagcccaacaaagggcattccaggcagagggcacagcccatgtgtgcaaaggcatgaggagtgtgccatgtgggaaactaccctgatgtaatggcagcctcacaaaacacaccaggcaagctctcttaaagacagggaacagaaagtctcccagaacaaagtaaaacacttgaatgagctggtttattgattccatttaaaacacatagtgagaagcaaggagacatgtggagtaggctaatacacttagagaaagatctcagtggatggaagatcccactgtctgcaccctgtgctagcaatgttcatttgttctctctctctgctgcatcagcctccccaccatgtcctgtgtatgtatgtacagagtggatatgtaagcaagggagagaggca

SEQ ID NO: 696018 - DNA, 3183 bp, Homo sapiens
  misc_feature 429, 430, 431, 432, 433, 434, 435, 436, 437, 438, 439, 440,441, 442, 443, 444, 445, 446, 447, 448, 449, 450, 451, 452,453, 454, 455, 456, 457, 458, 459, 460, 461, 462, 463, 464,465, 466, 467, 468, 469, 470, 471, 472, 473, 474, 475: n = A,T,C or G
  misc_feature 476, 477, 478, 479, 480, 481, 482, 483, 484, 485, 486, 487,488, 489, 490, 491, 492, 493, 494, 495, 496, 497, 498, 499,500, 501, 502, 503, 504, 505, 506, 507, 508, 509, 510, 511,512, 513, 514, 515, 516, 517, 518, 519, 520, 521, 522: n = A,T,C or G
  misc_feature 523, 524, 525, 526, 527, 528: n = A,T,C or G
cactattttttgtacccgttgtgctataaaatactaggtattattcattctctcaaactactttgtgtaaccattaaccattaccacctcctcctgaccccacactaccaggaaggacaggatttttcataaggcgattttggagtttcagaagtcagagttcacagtaggtattggagaagctacacagccataaacagtcttctaaggaaaatggcaaaatgcatactctgaattaagctttaaaaaaatcagatagggccaggcacagtggctcgtgcctgtaatcctagcgctttgggaggccgaggcaggcagatcacttgaagtaaggagttcaaaactaccctggccaacatggtgaaaccccatctgtactaaaaatattttttaaaaaattagccaggtgtggtggcaggtgcctgtatnnnnnnnnnnnnnnnnnnnnnnnnnnnnnnnnnnnnnnnnnnnnnnnnnnnnnnnnnnnnnnnnnnnnnnnnnnnnnnnnnnnnnnnnnnnnnnnnnnnntgctactaagtcaaccagtcagagcttctattcctgcaggcaagagacatcctgggtaaaatgcccatagctagtcactcataggcattcaatatctgattatttaattaatactgcttttagaaatttaaaaataataactgccaatgccaacagctttccggctctgcagccaaccagcggaggcatttgggactttctttttcaactgttctcattggggctgagactatcatcaagaagtaccaaataaacatattttcaaaaatcgatgttatttttagattctttggatccttgtttttggcattagcagcaggaagaaaccttgtgttatgaaacgtttcttttctaatcgtgctgtcacacacacagttggacaaaatgtctggtttcctttgagagagaaaaatcagcataaacaaagatggtaaaacagcttctttcttttttgtcattattcctgttcactgaagagaaaggatggtctacctcagaggttacacactggtggcctgtggttagcatttagactggagatgtattttgtttgaccagcacactgttaaagcaagcaaacaaacaaacaaatgcaatttaaaaaaggcaaacaaaccctgatgttgaatgcctttacaggaggtctgatagtcatcaggcttttgcaatttctgtttcttgtatgactcttgtaggtattttattatgcagccctgggtctgcggagaacaatgtatgcacagccaattgtttttctctcataaagaagaatactgattgagtggtggtagagggtggttaagggagtcagcagaaacctgcaggtaatctacctaaaatcgtgactcctcccccaccgagtttccacctgcaactatattctttctgtagaagactttggctagacaggggttggagtccactttacaggacaggctactcccagggaggaggagctgtcacaggatgggtctgttgtaaggacattaattagaccatggtgctaggggatgatggacggggaggagcgaagctctgagcccactccaaggaagtttctctttgggtcctttgatcctttggttggtgcaatgaggtgagtctgcacagggcctctaaagggctcgttgctgcaggcttcaccaagcaggctttgttggcaacaggaaatattccccaaggtcagaggcggtgacttcatccacatttagaaatcagaaggtgagaattgactcaaatgcttgcggctttcctactcagttcaatattttggaatatgtacaaaatttctttctagaaagttcctcaaacttttagcacacagaatggctctaattcgctactaatccatcctttttaccacagatgtttacactcattttcttaggaccagagattccatcacatgtttttaatcccctgcccctgaccccataacactctccccaaacgcagagcaaggcaaaccatagggcctaataagtggttaatgggttgagttcattttcagttccttttatttcacacttataggttgggctataaaaaggtcaaacttcccttggtgatagcatattactactagtggttgaagctcagaaataataatagtctggattaactgtacattttcaaaccatagaaaccagctcaagtttgtggtcagggcttctatttatgcttcctttaaagagtgtgacaagggttagatgagttctggtcttaatccttttaattcaatgtgcacctgtccactgcaaggacacatgaagcatacagaccttctggattcaaatatggcagaaaggaaatggcccgggctcccttctggaacatcacacactgcagcatctcagccttccagagtgcctttattccattctcaaccctgggmccatagttgagaatcagaatgtactactttttgtttccttgtttgtttttaagacttcaaaacacacaagattttcataacaatgtctgtataccaggatattattttagggtataatttctgtaataatgtttgccaatagttgattgtctagactggataaatggagtgatatgcgatcatcccttgtattcacatatatttctactacattaccatctatgttgaaggtcctttaacagagacataagaaagaaaagtattgactgggcacggtggctcatacctgtaatcccagcaatttgggaggccgaggcaggtggattacctgaggtcaggagtttgagaccagcctgaccaacatggtgaaactccatctctactaaaaatacaaaaaaaaaaaatagcgaagcgtggtggtgggtgcctgtaatcccagctactagggaggctaacgcaggagaatcgcttgaatccaggaggtggaggttgcggtgagctgagattgcaccactgtactctagcctgggcgacagagtgagactctatctcaaaaaaaaaaaaggattatttgaacattatcacttcatgtaggcaaacttacaaaatttctaccaaatagtcctacatatttgaattaaacactctgaatgaaggtgattctgtttttaatgtttactccttcccctgggccagtaggtgatgagtatctctctgttcatgagtgactggggacagagctatcacgttattctgagttt

SEQ ID NO: 696019 - DNA, 3183 bp, Homo sapiens
  misc_feature 429, 430, 431, 432, 433, 434, 435, 436, 437, 438, 439, 440,441, 442, 443, 444, 445, 446, 447, 448, 449, 450, 451, 452,453, 454, 455, 456, 457, 458, 459, 460, 461, 462, 463, 464,465, 466, 467, 468, 469, 470, 471, 472, 473, 474, 475: n = A,T,C or G
  misc_feature 476, 477, 478, 479, 480, 481, 482, 483, 484, 485, 486, 487,488, 489, 490, 491, 492, 493, 494, 495, 496, 497, 498, 499,500, 501, 502, 503, 504, 505, 506, 507, 508, 509, 510, 511,512, 513, 514, 515, 516, 517, 518, 519, 520, 521, 522: n = A,T,C or G
  misc_feature 523, 524, 525, 526, 527, 528: n = A,T,C or G
cactattttttgtacccgttgtgctataaaatactaggtattattcattctctcaaactactttgtgtaaccattaaccattaccacctcctcctgaccccacactaccaggaaggacaggatttttcataaggcgattttggagtttcagaagtcagagttcacagtaggtattggagaagctacacagccataaacagtcttctaaggaaaatggcaaaatgcatactctgaattaagctttaaaaaaatcagatagggccaggcacagtggctcgtgcctgtaatcctagcgctttgggaggccgaggcaggcagatcacttgaagtaaggagttcaaaactaccctggccaacatggtgaaaccccatctgtactaaaaatattttttaaaaaattagccaggtgtggtggcaggtgcctgtatnnnnnnnnnnnnnnnnnnnnnnnnnnnnnnnnnnnnnnnnnnnnnnnnnnnnnnnnnnnnnnnnnnnnnnnnnnnnnnnnnnnnnnnnnnnnnnnnnnnntgctactaagtcaaccagtcagagcttctattcctgcaggcaagagacatcctgggtaaaatgcccatagctagtcactcataggcattcaatatctgattatttaattaatactgcttttagaaatttaaaaataataactgccaatgccaacagctttccggctctgcagccaaccagcggaggcatttgggactttctttttcaactgttctcattggggctgagactatcatcaagaagtaccaaataaacatattttcaaaaatcgatgttatttttagattctttggatccttgtttttggcattagcagcaggaagaaaccttgtgttatgaaacgtttcttttctaatcgtgctgtcacacacacagttggacaaaatgtctggtttcctttgagagagaaaaatcagcataaacaaagatggtaaaacagcttctttcttttttgtcattattcctgttcactgaagagaaaggatggtctacctcagaggttacacactggtggcctgtggttagcatttagactggagatgtattttgtttgaccagcacactgttaaagcaagcaaacaaacaaacaaatgcaatttaaaaaaggcaaacaaaccctgatgttgaatgcctttacaggaggtctgatagtcatcaggcttttgcaatttctgtttcttgtatgactcttgtaggtattttattatgcagccctgggtctgcggagaacaatgtatgcacagccaattgtttttctctcataaagaagaatactgattgagtggtggtagagggtggttaagggagtcagcagaaacctgcaggtaatctacctaaaatcgtgactcctcccccaccgagtttccacctgcaactatattctttctgtagaagactttggctagacaggggttggagtccactttacaggacaggctactcccagggaggaggagctgtcacaggatgggtctgttgtaaggacattaattagaccatggtgctaggggatgatggacggggaggagcgaagctctgagcccactccaaggaagtttctctttgggtcctttgatcctttggttggtgcaatgaggtgagtctgcacagggcctctaaagggctcgttgctgcaggcttcaccaagcaggctttgttggcaacaggaaatattccccaaggtcagaggcggtgacttcatccacatttagaaatcagaaggtgagaattgactcaaatgcttgcggctttcctactcagttcaatattttggaatatgtacaaaatttctttctagaaagttcctcaaacttttagcacacagaatggctctaattcgctactaatccatcctttttaccacagatgtttacactcattttcttaggaccagagattccatcacatgtttttaatcccctgcccctgaccccataacactctccccaaacgcagagcaaggcaaaccatagggcctaataagtggttaatgggttgagttcattttcagttccttttatttcacacttataggttgggctataaaaaggtcaaacttcccttggtgatagcatattactactagtggttgaagctcagaaataataatagtctggattaactgtacattttcaaaccatagaaaccagctcaagtttgtggtcagggcttctatttatgcttcctttaaagagtgtgacaagggttagatgagttctggtcttaatccttttaattcaatgtgcacctgtccactgcaaggacacatgaagcatacagaccttctggattcaaatatggcagaaaggaaatggcccgggctcccttctggaacatcacacactgcagcatctcagccttccagagtgcctttattccattctcaaccctgggcccatagttgagaatcagaatgtactactttttgtttccttgtttgtttttaagacttcaaaacacacaagattttcataacaatgtctgtataccaggatattattttagggtataatttctgtaataatgtttgccaatwgttgattgtctagactggataaatggagtgatatgcgatcatcccttgtattcacatatatttctactacattaccatctatgttgaaggtcctttaacagagacataagaaagaaaagtattgactgggcacggtggctcatacctgtaatcccagcaatttgggaggccgaggcaggtggattacctgaggtcaggagtttgagaccagcctgaccaacatggtgaaactccatctctactaaaaatacaaaaaaaaaaaatagcgaagcgtggtggtgggtgcctgtaatcccagctactagggaggctaacgcaggagaatcgcttgaatccaggaggtggaggttgcggtgagctgagattgcaccactgtactctagcctgggcgacagagtgagactctatctcaaaaaaaaaaaaggattatttgaacattatcacttcatgtaggcaaacttacaaaatttctaccaaatagtcctacatatttgaattaaacactctgaatgaaggtgattctgtttttaatgtttactccttcccctgggccagtaggtgatgagtatctctctgttcatgagtgactggggacagagctatcacgttattctgagttt

SEQ ID NO: 696020 - DNA, 3183 bp, Homo sapiens
  misc_feature 429, 430, 431, 432, 433, 434, 435, 436, 437, 438, 439, 440,441, 442, 443, 444, 445, 446, 447, 448, 449, 450, 451, 452,453, 454, 455, 456, 457, 458, 459, 460, 461, 462, 463, 464,465, 466, 467, 468, 469, 470, 471, 472, 473, 474, 475: n = A,T,C or G
  misc_feature 476, 477, 478, 479, 480, 481, 482, 483, 484, 485, 486, 487,488, 489, 490, 491, 492, 493, 494, 495, 496, 497, 498, 499,500, 501, 502, 503, 504, 505, 506, 507, 508, 509, 510, 511,512, 513, 514, 515, 516, 517, 518, 519, 520, 521, 522: n = A,T,C or G
  misc_feature 523, 524, 525, 526, 527, 528: n = A,T,C or G
cactattttttgtacccgttgtgctataaaatactaggtattattcattctctcaaactactttgtgtaaccattaaccattaccacctcctcctgaccccacactaccaggaaggacaggatttttcataaggcgattttggagtttcagaagtcagagttcacagtaggtattggagaagctacacagccataaacagtcttctaaggaaaatggcaaaatgcatactctgaattaagctttaaaaaaatcagatagggccaggcacagtggctcgtgcctgtaatcctagcgctttgggaggccgaggcaggcagatcacttgaagtaaggagttcaaaactaccctggccaacatggtgaaaccccatctgtactaaaaatattttttaaaaaattagccaggtgtggtggcaggtgcctgtatnnnnnnnnnnnnnnnnnnnnnnnnnnnnnnnnnnnnnnnnnnnnnnnnnnnnnnnnnnnnnnnnnnnnnnnnnnnnnnnnnnnnnnnnnnnnnnnnnnnntgctactaagtcaaccagtcagagcttctattcctgcaggcaagagacatcctgggtaaaatgcccatagctagtcactcataggcattcaatatctgattatttaattaatactgcttttagaaatttaaaaataataactgccaatgccaacagctttccggctctgcagccaaccagcggaggcatttgggactttctttttcaactgttctcattggggctgagactatcatcaagaagtaccaaataaacatattttcaaaaatcgatgttatttttagattctttggatccttgtttttggcattagcagcaggaagaaaccttgtgttatgaaacgtttcttttctaatcgtgctgtcacacacacagttggacaaaatgtctggtttcctttgagagagaaaaatcagcataaacaaagatggtaaaacagcttctttcttttttgtcattattcctgttcactgaagagaaaggatggtctacctcagaggttacacactggtggcctgtggttagcatttagactggagatgtattttgtttgaccagcacactgttaaagcaagcaaacaaacaaacaaatgcaatttaaaaaaggcaaacaaaccctgatgttgaatgcctttacaggaggtctgatagtcatcaggcttttgcaatttctgtttcttgtatgactcttgtaggtattttattatgcagccctgggtctgcggagaacaatgtatgcacagccaattgtttttctctcataaagaagaatactgattgagtggtggtagagggtggttaagggagtcagcagaaacctgcaggtaatctacctaaaatcgtgactcctcccccaccgagtttccacctgcaactatattctttctgtagaagactttggctagacaggggttggagtccactttacaggacaggctactcccagggaggaggagctgtcacaggatgggtctgttgtaaggacattaattagaccatggtgctaggggatgatggacggggaggagcgaagctctgagcccactccaaggaagtttctctttgggtcctttgatcctttggttggtgcaatgaggtgagtctgcacagggcctctaaagggctcgttgctgcaggcttcaccaagcaggctttgttggcaacaggaaatattccccaaggtcagaggcggtgacttcatccacatttagaaatcagaaggtgagaattgactcaaatgcttgcggctttcctactcagttcaatattttggaatatgtacaaaatttctttctagaaagttcctcaaacttttagcacacagaatggctctaattcgctactaatccatcctttttaccacagatgtttacactcattttcttaggaccagagattccatcacatgtttttaatcccctgcccctgaccccataacactctccccaaacgcagagcaaggcaaaccatagggcctaataagtggttaatgggttgagttcattttcagttccttttatttcacacttataggttgggctataaaaaggtcaaacttcccttggtgatagcatattactactagtggttgaagctcagaaataataatagtctggattaactgtacattttcaaaccatagaaaccagctcaagtttgtggtcagggcttctatttatgcttcctttaaagagtgtgacaagggttagatgagttctggtcttaatccttttaattcaatgtgcacctgtccactgcaaggacacatgaagcatacagaccttctggattcaaatatggcagaaaggaaatggcccgggctcccttctggaacatcacacactgcagcatctcagccttccagagtgcctttattccattctcaaccctgggcccatagttgagaatcagaatgtactactttttgtttccttgtttgtttttaagacttcaaaacacacaagattttcataacaatgtctgtataccaggatattattttagggtataatttctgtaataatgtttgccaatagttgattgtctagactggataaatggagtgatatgcgatcatcccttgtattcacatatatttctactacattaccatctatgttgaaggtcctttaacagagacataagaaagaaaagtattgactgggcacggtggctcatacctgtaatcccagcaatttgggaggccgaggcaggtggattacctgaggtcaggagtttgagaccagcctgaccaacatggtgaaactccatctctactaaaaatacaaaaaaaaaaaatagcraagcgtggtggtgggtgcctgtaatcccagctactagggaggctaacgcaggagaatcgcttgaatccaggaggtggaggttgcggtgagctgagattgcaccactgtactctagcctgggcgacagagtgagactctatctcaaaaaaaaaaaaggattatttgaacattatcacttcatgtaggcaaacttacaaaatttctaccaaatagtcctacatatttgaattaaacactctgaatgaaggtgattctgtttttaatgtttactccttcccctgggccagtaggtgatgagtatctctctgttcatgagtgactggggacagagctatcacgttattctgagttt

SEQ ID NO: 696021 - DNA, 3183 bp, Homo sapiens
  misc_feature 429, 430, 431, 432, 433, 434, 435, 436, 437, 438, 439, 440,441, 442, 443, 444, 445, 446, 447, 448, 449, 450, 451, 452,453, 454, 455, 456, 457, 458, 459, 460, 461, 462, 463, 464,465, 466, 467, 468, 469, 470, 471, 472, 473, 474, 475: n = A,T,C or G
  misc_feature 476, 477, 478, 479, 480, 481, 482, 483, 484, 485, 486, 487,488, 489, 490, 491, 492, 493, 494, 495, 496, 497, 498, 499,500, 501, 502, 503, 504, 505, 506, 507, 508, 509, 510, 511,512, 513, 514, 515, 516, 517, 518, 519, 520, 521, 522: n = A,T,C or G
  misc_feature 523, 524, 525, 526, 527, 528: n = A,T,C or G
cactattttttgtacccgttgtgctataaaatactaggtattattcattctctcaaactactttgtgtaaccattaaccattaccacctcctcctgaccccacactaccaggaaggacaggatttttcataaggcgattttggagtttcagaagtcagagttcacagtaggtattggagaagctacacagccataaacagtcttctaaggaaaatggcaaaatgcatactctgaattaagctttaaaaaaatcagatagggccaggcacagtggctcgtgcctgtaatcctagcgctttgggaggccgaggcaggcagatcacttgaagtaaggagttcaaaactaccctggccaacatggtgaaaccccatctgtactaaaaatattttttaaaaaattagccaggtgtggtggcaggtgcctgtatnnnnnnnnnnnnnnnnnnnnnnnnnnnnnnnnnnnnnnnnnnnnnnnnnnnnnnnnnnnnnnnnnnnnnnnnnnnnnnnnnnnnnnnnnnnnnnnnnnnntgctactaagtcaaccagtcagagcttctattcctgcaggcaagagacatcctgggtaaaatgcccatagctagtcactcataggcattcaatatctgattatttaattaatactgcttttagaaatttaaaaataataactgccaatgccaacagctttccggctctgcagccaaccagcggaggcatttgggactttctttttcaactgttctcattggggctgagactatcatcaagaagtaccaaataaacatattttcaaaaatcgatgttatttttagattctttggatccttgtttttggcattagcagcaggaagaaaccttgtgttatgaaacgtttcttttctaatcgtgctgtcacacacacagttggacaaaatgtctggtttcctttgagagagaaaaatcagcataaacaaagatggtaaaacagcttctttcttttttgtcattattcctgttcactgaagagaaaggatggtctacctcagaggttacacactggtggcctgtggttagcatttagactggagatgtattttgtttgaccagcacactgttaaagcaagcaaacaaacaaacaaatgcaatttaaaaaaggcaaacaaaccctgatgttgaatgcctttacaggaggtctgatagtcatcaggcttttgcaatttctgtttcttgtatgactcttgtaggtattttattatgcagccctgggtctgcggagaacaatgtatgcacagccaattgtttttctctcataaagaagaatactgattgagtggtggtagagggtggttaagggagtcagcagaaacctgcaggtaatctacctaaaatcgtgactcctcccccaccgagtttccacctgcaactatattctttctgtagaagactttggctagacaggggttggagtccactttacaggacaggctactcccagggaggaggagctgtcacaggatgggtctgttgtaaggacattaattagaccatggtgctaggggatgatggacggggaggagcgaagctctgagcccactccaaggaagtttctctttgggtcctttgatcctttggttggtgcaatgaggtgagtctgcacagggcctctaaagggctcgttgctgcaggcttcaccaagcaggctttgttggcaacaggaaatattccccaaggtcagaggcggtgacttcatccacatttagaaatcagaaggtgagaattgactcaaatgcttgcggctttcctactcagttcaatattttggaatatgtacaaaatttctttctagaaagttcctcaaacttttagcacacagaatggctctaattcgctactaatccatcctttttaccacagatgtttacactcattttcttaggaccagagattccatcacatgtttttaatcccctgcccctgaccccataacactctccccaaacgcagagcaaggcaaaccatagggcctaataagtggttaatgggttgagttcattttcagttccttttatttcacacttataggttgggctataaaaaggtcaaacttcccttggtgatagcatattactactagtggttgaagctcagaaataataatagtctggattaactgtacattttcaaaccatagaaaccagctcaagtttgtggtcagggcttctatttatgcttcctttaaagagtgtgacaagggttagatgagttctggtcttaatccttttaattcaatgtgcacctgtccactgcaaggacacatgaagcatacagaccttctggattcaaatatggcagaaaggaaatggcccgggctcccttctggaacatcacacactgcagcatctcagccttccagagtgcctttattccattctcaaccctgggcccatagttgagaatcagaatgtactactttttgtttccttgtttgtttttaagacttcaaaacacacaagattttcataacaatgtctgtataccaggatattattttagggtataatttctgtaataatgtttgccaatagttgattgtctagactggataaatggagtgatatgcgatcatcccttgtattcacatatatttctactacattaccatctatgttgaaggtcctttaacagagacataagaaagaaaagtattgactgggcacggtggctcatacctgtaatcccagcaatttgggaggccgaggcaggtggattacctgaggtcaggagtttgagaccagcctgaccaacatggtgaaactccatctctactaaaaatacaaaaaaaaaaaatagcgaagcgtggtggtgggtgcctgtaatcccagctactagggaggctaacgcaggagaatcgcttgaatccaggaggtggaggttgcggtgagctgagatygcaccactgtactctagcctgggcgacagagtgagactctatctcaaaaaaaaaaaaggattatttgaacattatcacttcatgtaggcaaacttacaaaatttctaccaaatagtcctacatatttgaattaaacactctgaatgaaggtgattctgtttttaatgtttactccttcccctgggccagtaggtgatgagtatctctctgttcatgagtgactggggacagagctatcacgttattctgagttt

SEQ ID NO: 696022 - DNA, 1098 bp, Homo sapiens
attgtggaagacagtgwggctattcttcaaggatctagaactggaaataccatttgacccagcaatcccattactgggtacatacccaaaggagtatgaatcattctattataaagacacatgcacacgtatgtttattgcagcactattcacaataacaaagacttgaaaccgacccaaatgcccattcatgatagactggataaagaaaatgtggcacatatataccatggaatactatgcagccataaaaaaggatgagttcatgtcctttgcagggacatggatgaagctggaaaccatcattctcaggaaactaacataggtagacaggaaaaccaaacactgcatgttctcactcataaatgggagctgagacaatcagaacacatggccacatccttcccacagggaagggaacatcacacactggggcctgtcaggcggtggggggctaggggagggatagcattaggagaaatacctaatgtagatgacaggttgatgtgtccagaaaaccaccatgacatgtatatacctatgtaacaaacctgcacgttctgcacatgtatcccagaacttaaagtattaaaaaaaaagttttctgactatacaccctaagctttagataaatctaaatttccttaaaagtttgaagggcctatgaatacagaatagtttcttactaacgcagcagtgaatatacatttattatttggaaaatggcagagaatcacaactcttatctacctcaactgtttttaaacattcatagaaatttaatctgttaataattgagtttgggaaggctgtagcacttactaaaatggactattttagtgtcacaggtgagacaaagaacaggctgagaagctcaagaatctctgcattcctgttactgattacagatgaacaagagattcagtgctgctaaaattggcttcagaatcattttcacgacaacccatacatcatcccagaatttcctgaaagaacatctttaggttatgattgaagtcaagtatgattctttcaaaggtttccctttaagaaattttattagtaaaagtaaggttaagtaacatatgtaaatataca

SEQ ID NO: 696023 - DNA, 1098 bp, Homo sapiens
attgtggaagacagtgaggctattcttcaaggatctagaactggaaataccatttgacccagcaatcccattactgggtacatacccaaaggagtatgaatcattctattataaagacacatgcacacgtatgtttattgcagcactattcacaataacaaagacttgaaaccgacccaaatgcccattcatgatagactggataaagaaaatgtggcacatatataccatggaatactatgcagccataaaaaaggatgagttcatgtcctttgcagggacatggatgaagctggaaaccatcattctcaggaaactaacataggtagacaggaaaaccaaacactgcatgttctcactcataaatgggagctgagacaatcagaacacatggccacatccttcccacagggaagggaacatcacacactggggcctgtcaggcggtggggggctaggggagggatagcattaggagaaatacctaatgtagatgacaggttgatgtgtscagaaaaccaccatgacatgtatatacctatgtaacaaacctgcacgttctgcacatgtatcccagaacttaaagtattaaaaaaaaagttttctgactatacaccctaagctttagataaatctaaatttccttaaaagtttgaagggcctatgaatacagaatagtttcttactaacgcagcagtgaatatacatttattatttggaaaatggcagagaatcacaactcttatctacctcaactgtttttaaacattcatagaaatttaatctgttaataattgagtttgggaaggctgtagcacttactaaaatggactattttagtgtcacaggtgagacaaagaacaggctgagaagctcaagaatctctgcattcctgttactgattacagatgaacaagagattcagtgctgctaaaattggcttcagaatcattttcacgacaacccatacatcatcccagaatttcctgaaagaacatctttaggttatgattgaagtcaagtatgattctttcaaaggtttccctttaagaaattttattagtaaaagtaaggttaagtaacatatgtaaatataca

SEQ ID NO: 696024 - DNA, 629 bp, Homo sapiens
tgctctatgcacctcttaatctttatactttgtaatatgcttcatgataaaccagtaaatgcacatgttttcctgagttctgtgagccactgaggtaaaccaatcaaacccaaagagggagttgtaggaaccccaacttgaagccgttcagtcaaaatttccccagacctagacttgtcactggtgtctgaagggtgaacagtcttggagactgagccctccactatgggatctgaccctgtctccaggtggagagtgttataattgaattggaggacaatcaggttgtcctcacacatctggtgtcagagcgtgcagtggtagagacacagtttgagttttctccactcatacactcttacccagaagtcttttcccagttcctccatactttgtcccctctctgtgcccactgtctcatttgtcactgtcacctaagacttgctggaccagttctttatctggccttggaacaagtcaggccgtgttcmtgcatcgtgaccattcatgctgcttctcttgctgaaacgtgccatgtgggtattagggaaaccctttctgtggattagagaaatctcacctatttctcaaactccagcctaaagacccatatcctccagaaatccttc

SEQ ID NO: 696025 - DNA, 633 bp, Homo sapiens
tttggggggctattcttcagactaccacaataacttcctatattttatacaagatgcttgttgatttatacttagtgagtttccaccagctttcctaggccagttaaaagggttctcgagaacactaaggatttaaatacctttctcttctaatgtacataagtagtttgcacaatggcaatgtcaaygctcaacatagtatttttgagaacacgagtttgacgtgcattttctaatgtaactatttcagaacaacctagtgaggtatatattatatcctcattttacttttatttggttgttcaacctcagctgactacaactattaaatctgttggaatagcagtgtatgactgcagtcctcctggtacatcttcaaaaacaccgacctctgctggaataatcccagctggaacaatcaacatgtttgaaaattcagtgaagaatgaatttcattgtttcctaccaaatcaaatgcaagaaatcaagcatatgaaaatcatagtcttctctcatcttctgaatgtagattaaaatatgtttatagaaataattatgtgtagaatgaacaaagagttttacattaattaaatataatcaggtgggctctctgctactgtaggtagacaggaa

SEQ ID NO: 696026 - DNA, 633 bp, Homo sapiens
tttggggggctattcttcagactaccacaataacttcctatattttatacaagatgcttgttgatttatacttagtgagtttccaccagctttcctaggccagttaaaagggttctcgagaacactaaggatttaaatacctttctcttctaatgtacataagtagtttgcacaatggcaatgtcaatgctcaacatagtatttttgagaacacgartttgacgtgcattttctaatgtaactatttcagaacaacctagtgaggtatatattatatcctcattttacttttatttggttgttcaacctcagctgactacaactattaaatctgttggaatagcagtgtatgactgcagtcctcctggtacatcttcaaaaacaccgacctctgctggaataatcccagctggaacaatcaacatgtttgaaaattcagtgaagaatgaatttcattgtttcctaccaaatcaaatgcaagaaatcaagcatatgaaaatcatagtcttctctcatcttctgaatgtagattaaaatatgtttatagaaataattatgtgtagaatgaacaaagagttttacattaattaaatataatcaggtgggctctctgctactgtaggtagacaggaa

SEQ ID NO: 696027 - DNA, 633 bp, Homo sapiens
tttggggggctattcttcagactaccacaataacttcctatattttatacaagatgcttgttgatttatacttagtgagtttccaccagctttcctaggccagttaaaagggttctcgagaacactaaggatttaaatacctttctcttctaatgtacataagtagtttgcacaatggcaatgtcaatgctcaacatagtatttttgagaacacgagtttgacgtgcattttctaatgtaactatttcagaacaamctagtgaggtatatattatatcctcattttacttttatttggttgttcaacctcagctgactacaactattaaatctgttggaatagcagtgtatgactgcagtcctcctggtacatcttcaaaaacaccgacctctgctggaataatcccagctggaacaatcaacatgtttgaaaattcagtgaagaatgaatttcattgtttcctaccaaatcaaatgcaagaaatcaagcatatgaaaatcatagtcttctctcatcttctgaatgtagattaaaatatgtttatagaaataattatgtgtagaatgaacaaagagttttacattaattaaatataatcaggtgggctctctgctactgtaggtagacaggaa

SEQ ID NO: 696028 - DNA, 638 bp, Homo sapiens
ataatttttctctaaacagtaagttaattctcttgttgatggaaattttaatggtttctgatttttctctaaaactggttatgaatcacgtcatgtttcaaaacatttgacttgtcttcagcaaaatgatagccgtttatagcaaactggaagttgtacagcaaatgctttggtttctaaaaccaggctttttgagttstagattctcagaactcagttttacatttcaaaagctctgtctgatagtccagggttttcataaagtatcacagagtcattccagagcagtagtaaggcaagtacatgctgtattatgaaaaatgaaaattcctttctgtcactactgtccagggatgagaggagagtgggaaaaaggtgggagagagaaagaaaatagtgagaaaatgaaagagagggaaagaaccagagtgtttgattttgcaaatgttaatctctcttaaccacaggcaatggaggctccaaattcccttactctgcaatccaaggcaatatgttaagcctcctggaaatgtagatcacatcctgggagaagggcaaggaaaggagaagaagaaagtaaccataaaacaatcctattattgaagcgagtacattgtttgccttaagagttgattgaa

SEQ ID NO: 696029 - DNA, 638 bp, Homo sapiens
ataatttttctctaaacagtaagttaattctcttgttgatggaaattttaatggtttctgatttttctctaaaactggttatgaatcacgtcatgtttcaaaacatttgacttgtcttcagcaaaatgatagccgtttatagcaaactggaagttgtacagcaaatgctttggtttctaaaaccaggctttttgagttgtagattctcagaactcagttttacatttcaaaagctctgtctgatagtccagggttttcataaagtatcacagagtcattccagagcagtagtaaggcaagtacatgctgtattatgaaaaatgaaaattcctttctgtcactactgtcsagggatgagaggagagtgggaaaaaggtgggagagagaaagaaaatagtgagaaaatgaaagagagggaaagaaccagagtgtttgattttgcaaatgttaatctctcttaaccacaggcaatggaggctccaaattcccttactctgcaatccaaggcaatatgttaagcctcctggaaatgtagatcacatcctgggagaagggcaaggaaaggagaagaagaaagtaaccataaaacaatcctattattgaagcgagtacattgtttgccttaagagttgattgaa

SEQ ID NO: 696030 - DNA, 851 bp, Homo sapiens
agaaaaaaaatcaattacaaaattctgggatctcactctatgaggttgcttattcaagttttgactccactctccaattgacttgattctgattcctttgcaaagtcttctggcaattgctttttctatcccacccagcatttttaagagtaaggaacttactccatcttacccagtgctggatattcatgagactcattcttaaattcaaatactccaaattattttactctgaattatcaagtggacttcaacaatcacactaaatgtttttaaggatagcacttttgatgtcaaagtattataaaggttcaagcatttaaaawtcttattttttggctgtgtacggtagcttgtgactataaccccagcactttgggaggctggggcaggcagatcacttgagctcaggagtttgagaccagcctgggaaatatggcaaaaccctgtctctacaaaaaaatacaaaaattagctgggtgtggtggtgcacggctgtggtcccagctacttgggaggccaaggtgggaagattgcttgagtccagaaggttgaggccacagtgagctgagatagtgcctgtattctagcattggtgacaaagtgagacccagtctcaaaataaaataaaataaaaatcttatttttactgacatcgtattatacatgataacttgcaccagatatattcacacacatacaaaaaaagaaaaaaaacacaaaacagaagagagtgggcctacctatcaactttatagagtttagaactttctctcttccatcgggtgttttgcgtaacataaaagtattatgtggaagaacttgagcccccacagcaacctgaatattaa

SEQ ID NO: 696031 - DNA, 851 bp, Homo sapiens
agaaaaaaaatcaattacaaaattctgggatctcactctatgaggttgcttattcaagttttgactccactctccaattgacttgattctgattcctttgcaaagtcttctggcaattgctttttctatcccacccagcatttttaagagtaaggaacttactccatcttacccagtgctggatattcatgagactcattcttaaattcaaatactccaaattattttactctgaattatcaagtggacttcaacaatcacactaaatgtttttaaggatagcacttttgatgtcaaagtattataaaggttcaagcatttaaaattcttattttttggctgtgtacggtagcttgtgactataaccccagcactttgggaggctggggcaggcagatcacttgagctcaggagtttgagaccagcctgggaaatatggcaaaaccctgtctctacaaaaaaatacaaaaattagctgggtgtggtggtgcacggctgtggtcccagctacttgggaggccaaggtgggaagattgcttgagtccagaaggttgaggccacagtgagctgagatagtgcctgtattctagcattggtgacaaagtgagacccagtctcaaaataaaataaaatamaaatcttatttttactgacatcgtattatacatgataacttgcaccagatatattcacacacatacaaaaaaagaaaaaaaacacaaaacagaagagagtgggcctacctatcaactttatagagtttagaactttctctcttccatcgggtgttttgcgtaacataaaagtattatgtggaagaacttgagcccccacagcaacctgaatattaa

SEQ ID NO: 696032 - DNA, 664 bp, Homo sapiens
tggatgctttttggtttttataatgcttgagtgagatgggtatttttagagtagagatgtcactgcaatgatagcacttgtcataaaactgtcaataaaataaaaatggaacttcctcattcataaaatagtattgggtacrtataagacagctctggctatttgactaacctcttatacatctcttcaccaagagatgctaatgaaataaaaaacgaagcttatgttgattgaactaccaaataatttatagcagagaatgaccacaacataaatgccagaatctctcagagtacgtggggctgaatatgcaatgatttgaaaggttttaatgaaaataatattaatgagggagatagataatgactaaaatgtaatttagtgtaagaattactatccatagggaaaagcaactccaagtaccagattaaccttgtgacttttattgcaaaccagggccacttttcctgaaggaaaccatcaaggtagccctaggctacaaggagacaagttatctgattcccagagaagccagagactaggtcattggtaataaaatttctaatgtttattgcctggagatagattttcaaagatggcatgaagccaaaaataaattacttttaaacaaatccctgaacctttgctctccatgccttccctt

SEQ ID NO: 696033 - DNA, 664 bp, Homo sapiens
tggatgctttttggtttttataatgcttgagtgagatgggtatttttagagtagagatgtcactgcaatgatagcacttgtcataaaactgtcaataaaataaaaatggaacttcctcattcataaaatagtattgggtacgtataagacagctctggctatttgactaacctcttatacatctcttcaccaagagatgctaatgaaataaaaaacgaagcttatgttgattgaactaccaaataatttatagcagagaatgaccacaacataaatgccagaatctctcagagtacgtggggctgaatatgcaatgatttgaaaggttttaatgaaaataayattaatgagggagatagataatgactaaaatgtaatttagtgtaagaattactatccatagggaaaagcaactccaagtaccagattaaccttgtgacttttattgcaaaccagggccacttttcctgaaggaaaccatcaaggtagccctaggctacaaggagacaagttatctgattcccagagaagccagagactaggtcattggtaataaaatttctaatgtttattgcctggagatagattttcaaagatggcatgaagccaaaaataaattacttttaaacaaatccctgaacctttgctctccatgccttccctt

SEQ ID NO: 696034 - DNA, 629 bp, Homo sapiens
tctgctctggtagatatgtgtctgtcctctttaaggcaaactctcatttaagtattcttagttccgtctcagccaccttaccttcttctaaacatatcacttccatttagtcttccattttcccctactttgtctcccttcctgtgcactaacgtgttccagtgttgtttatcaggttaatattcttcgtatggtttatgtgtcttcctttgttatacccaaacttgaaatgagagaatcacgcactcactgcctgtacttttgtaaatcttaaacccatttgataaccttttaaaatatgacattatgtctattagtctagaaaaaccacgtttygcatgttagtaattgtcctctaaatatgacatgaaaataattttcctgttctgttctcatttactctgtcagttttgaccacgcaatcatgagtaaaatccccctattacattgtatggactgctttacatttctacctttttgaacatagtttctctatcaccatgtttgcacttcttacttttttcacactctaaatgatgttacaagtttttccccaaaacatatttttctgatatgttccctcttttgctaatttcatgcattccacacagctttatcttttgctgtga

SEQ ID NO: 696035 - DNA, 1005 bp, Homo sapiens
ttaacattgcatattaatttaatcctgattgttctcccattttatttttatagatcatgggaaccaatgagaggaagtatttcccataagcaagcaaactctagagccccaggcttggggagggaggaaacatctggaggaagatccatgagtagcttttcaatgagggagcggagggggaatggcagaggtgaatatggaagagacagttgccctcagtttggtccaggaaaaaatgctgtgtgatatgatgattcagagcatgggcctgaggccaggctcatattggtgtgaatcctagctctgcctctcatttggtgggaagtttacctctccatatcttatatttcttagctctaaaatggaaataataatatctgtctcatagggttactgtgaatattaaatgtgttagaaagcaaaataatgcagagtaaaaatgccattaaaatctatccatgtgttcaaactcacaaaaatattttagaagtaagcaggtctaatattctgatggaaaacagactagtgccaaaaaacagaatgaaaagggcaaagccagtataaaataataattgctagtaaggtcaatgcaaaactaaatggtgtctgcagtacagaaagtaaatctgttgcctcagacgcatcataaggtttacacacatttggaggaaaactgtatagtttgtgagttattgcaaagggaggattgcccaggaaccatacraggctgctgtggagcagactcagccagtgctctcatatccatggtctccccttgggcacacagaaagacctcatttcctagtttgccttctccaggtggagtcatgtgactagggcttgtcagcaaagtgacaggtgtcacacctgggacaaggtagttgagaacagatgtgccatctcgactttctctttccccatctgccagctgaatggagagccctggtggatctagaggaggtacagccaccagatggcagaagcctgggtccttgaatcctttac

SEQ ID NO: 696036 - DNA, 568 bp, Homo sapiens
atatatttggccaggtagatttcaatgttgcgtggaaataccctatgaaatatatactaatttaccctatgaaatatatactaatttgtttgactttttgaatagagttttccataacttaatttctctgtttgtaataaacacacattttttacctttcaaagtgccagccattttgtgaaaagtgcattcaacattggtgtgatctcacatgtgaatgatcctttttcatgcctaagccccaacatacaaccataaattcagtacaactgtaatgtaaccagattttaccagaatccaccccccaacagattaagcttccacaaaaaaatctgagtattacaaattcaggtattttccccagtatttcattattgctttctaatggagtattaatttaataattttttattragatgaatcaaattttaattacattcaaagaattaccattcaaaatcaaggtgtgtgtggtgtatatatatgtgtgtaatttatggtagcagtatcaccaatttttaataggacactggaagtgaaattttacactttgtacctttttttcttc

SEQ ID NO: 696037 - DNA, 568 bp, Homo sapiens
atatatttggccaggtagatttcaatgttgcgtggaaataccctatgaaatatatactaatttaccctatgaaatatatactaatttgtttgactttttgaatagagttttccataacttaatttctctgtttgtaataaacacacattttttacctttcaaagtgccagccattttgtgaaaagtgcattcaacattggtgtgatctcacatgtgaatgatcctttttcatgcctaagccccaacatacaaccataaattcagtacaactgtaatgtaaccagattttaccagaatccaccccccaacagattaagcttccacaaaaaaatctgagtattacaaattcaggtattttccccagtatttcattattgctttctaatggagtattaatttaataattttttattaagatgaatcaaattttaattacattcaaagaattaccattcaaaatcaaggtgtgtgtggtgtatatatatgtgtgtaatttatggtagcagtatcaccaatttttaataggacrctggaagtgaaattttacactttgtacctttttttcttc

SEQ ID NO: 696038 - DNA, 587 bp, Homo sapiens
atcacctcccacaaggccttttttgcaaaagtgggattactatttgacatgagatttgggcaggcacacagacccaaatcacattaatctgcccctggcctcttccaaatctcatgtccctctcccatttcaaaatacaattatgccttcccaacaatcccccaagtcttaactcattccagcattaacgcaagtgtccaaagttcaaagtctcctctgagacgaagcaagtccctccacctatgagcctgtaaaataaaaaactagttacttccaagatacaatgagggtacaggcattgggtaaatgctcactttccaaaagggaaaaattggccaaaaccaaggggctacaggccccatgcaagtccaaaactgtgagaaacacagtcacycatccaaacccaaagaatggacttagaggcacgaagaacagttaaagtgagactgtttaataaccgtcttgcaagattgtgtgtctggtgggcaggcacacccgggacagtcacaagtggtaatttatctcctagcatgcaagtccctcccctagttcctcattggttgagtgctgtggggttacagtcttcc

SEQ ID NO: 696039 - DNA, 786 bp, Homo sapiens
gtggttttagttcttatattatggctatgatctattttggttaatttatgtgtatggcgagaggaagaggcccagcttcattcctttcaatgtagatattcagtcatcttagcaccatttgttgaaagaactattgctttcccctactgaattgtcctggcacctttgtcaaacatcaactatccaaaaatatgatggtttatttctgggctctctatccatttatctatatttgtatccttatgcctgattactgtcagtttgtgttcagttttaaaatttagaacattgagttctctagatttttttttttgtctttcaagattgttttgctatgctgagtcacttgcatttcagtatgtattttaagatcagcttgtcaatttctgtaaaaaagtccagtgaaattttgataaggattgccttaaatcttgatctatagatcagtcttaacactactaagtctttgaactgaaarcatgttttgtcttttcatttgtttttaattttttatttgttaatgtgtcaacctgtacttacttatgtacatatgggttttgttttcctatcttattttggtctttttatcctcccattaaaatacgagatctatgaaatcagaaaatgtacccatcttgttcattgctttttcatcagctttcatcatagatcctgtttcataaagcatgttcaataagtatttgtgaattcaattatttggtaagacaagagatacctaaagtttgctcagataaaaagttatgacattctcttgtagttgctttc

SEQ ID NO: 696040 - DNA, 2367 bp, Homo sapiens
gagttttagatacagaactttgaaacatttgattcagagagaccaaaagtagagaaatgaaattggagccaagtgaatttctattaattcaattctacctctagtaagccctgtgccctacacaagtcaagtctgtttgtccctctgggccatgtattcttaacctatgtggtaggcagaattctgatatgacacctaatgccccctggccatgtagaattccttctactttgagtgtgggtagaacttgtgtatataataagatatcactcttgtgattacattatattatatgacaaaagggggattattatcttgggtggggcagctaaaccatgttagctttgaaaaacacgttttcactggctataaaaaaggaagtctgagagatgtgctccagctagcctaaaaggaagcaaacacccagattgtgaactgcctatggaggatatgtagcaaggatccatgagtggcttctagatgctgacaggtgtccctgctgacagctagcaggaatgaccacaagaaaggaaattctgccaacagccaatgaacttagaagagaacaccaagcccaaatgacaaccacagccctagatgacccgttaatttcagtctgatgagatcctgagtgaagtatccagtcactctgcttctggacatctacagaagcagtgagacaataaatatgtatattttaagctattacatgtgtgggaatgtgttgcatagcaatagaaaattaatatactctataaatatagttttatcaaaatgtctccgtagtcttccctttcaattccactatcactttcttaggtggcaataacttctggtgctaaactatctggggattcccataatacatcccaatccctgataatccatctcatgtctattcataaacaccttccaagctagagagggaaaaaaacaccctcccacccgacttgcaaagctattccatccagcaacttattttctatataaagtcttatcctgttgatgcagtacattccatctggataaacataattattgagggtggggatgtgaaaatgagtttcctttgcccccacagcttgctcccagtaaaatggtcttctgatccagcgacatcattttttgaagtgtgaatatacactaattattttcaagtcagtgagcttagtggatgtgaaaaatagactttggagtcaaataagtttgagcccaaacctgtcatcacacattttgggaagaaacacagtaagccttaccaggaacctcacatgcaccattctcagtgtccgagtctcagtgtccttattttgcaaatgaggatccaacagtttacccagaacttatgttttgagcatcttctctgaaccaaatatctagtctaatggcaatgaataggttactctcttttggagcatataatctcattaggaagtaatatttacactaataaggttgtggtaatgattaaatgagataagcatttagcatggagcctgacagcctcattcagtgggagccatgcttggaggggttatggcacccaaaaggagctatatgattattaataacagtatttattgagtacttacatcaggtcaggcatttttcaaaattcttttctgtgtattaactcatataatcaccacaaaacatcccaagaggtagatgtgattatcatccccaatgagaaaagaactgataagtatcagactgagatataaatacagatcactgggctcacaggtcaatgcactttactatgatttcttactaattctcattagatgcctttaaagtaaaagggatgacacagggtagatagtttttgtttgtttgttttttgaatgtgaaagtttcccaataccccaaatgcatatgccacttccataccrtgaataccccacacacaacaaattctaaccaagtcactgctattgatcaagggttacataaaacgacattagtagtagcgcttttggttttcattgtttttatttgcatttttcatgcttataatgttccagaaagcttgcaaaatgcttcacaaatagtatttagtttaataaattaaactgaactccaacttgggtaacagagcaagactgtatcaaaacaaaaacaaaacaaaacaaaaaagcacagggctaggcacaggggctcacgcctgtaatcctagcactttgggaggccgaggcaggcgaatcatctgaggtcgggagttcgagatcagcctgaccaacatggagaaaccccatctctactaataatacgaaattagctgggcatggtggcgcatgcctgtaatcccagctactagggaggctgagacaggagaatggcttgaacccgggaggtggaggttgc

SEQ ID NO: 696041 - DNA, 3527 bp, Homo sapiens
tccccaatgtggctgaggggcagagagcacaggcagtgaagggggttaggttggccggtgtggatgacagatattcactatttgagatgaggcagggctattatttaagtagggcctcatacaagatgataggcatttgagttttattcttctacattcttataggcagatataacagtttctaaaaggaacatggacttcacagccttggaaagaagggataggagagatgagctttacaatagatgcaaactcttggttcgtctgggaaactgcagtgagagtaaaaactcctcttccaacattgctggtttgaacccaacagagctgcatggtctcccagtaatcacatggaaatgtagacacatagataaacatcattctccttcttttaacaaggtctgtgctacctttagcaaaaggcctggcttagcttggcgacgattaattgtagctgttcagaggacgaggcatgttgtgagtgaattgatgtgcttcaagggccctgtgtgtctgacttttcatgttgtctaaatttgtaacctgtaagactgcatttccataagttttgaaatgcaatgtgttctgtggtgctcggaattcgatcaggatgaaaagagctttagaaagtaagatgttattattgtatttgccttcacatgagaaaatagtcaaaggaagacaaacagaggaggggaaaaagagatcctatatagattagcactcccacacagcctgcaacccagggcaggggaggggcgggggtgggagagaaaagagaagaaaaaccagaaaacctggcataagaataaaccttatcaaagactgaacatgacaatcaggcctctatgtgggaaaagttttacctttatgaaccccagagaagaaaattatactcactagaggaagaaaaagagttattaacaaatcagttatctgatgcttaaataatacagctgctaaaatgagccttctaagtaaacctacagtgaagctaattagttcagcattttgccaataacctcatctcccatcctttcagctttaaaaaaatgatgggctcaaactattaacacataacaccaagtatgtgataaaatgagtattttaaaggaatacatttgacgggttagtcttcaaatctaactgctctttaaatggtaggtaaactaaaaattttcattaaggatgaaaaatttgattaaggatgctgagcaaagccttgttcaggaaacgaccacccagagttctaggcctgcctctaccatttactacctgtgtgaccctgggctagtcatttaacttccctaagcactggttttgccatctctactatgaggatattaatttctatccagcttatctcatgagatcttgtgatgatcaggataatcaaaggtgcaaatattttaaagatgtttaagttcaacacacattcaatgactattttacaagacaggaaatataaaaacaaacgaagttagatgctagacttatgttgtcaaatatggtagccgcaagtctcacgtggttattgagagcttgaaagatagccagcgtgataaggaacttgatgtttactttttttttattttaaatacagttgcccctcagtatctgaaggggattccaccccgaggatagcaaagtcctcggatgctcaagtcacttatacggaaaggtgtagtatttacatagaacctacacacatcctccagtacactttaaatcacctctagattacttatacttgatacaatacaaaggctatggaaatagtcattgtactgtattatgtttgtatttttattgctgcatttttatattttattattttttcaaatattttgatctgaatatttttaaagttaaaagctgataattcagttaatggaacaattttaagtatgtttggaaatcctgcgtatatgaatctacattttcaattgtataagctttataaaatctaaattctgatcaagttatttgatggaaattcaagaagaagaagaattaattgaattgggatatgctttaagtataaaatacatgctggattttacaaatttaatgtaacaaaaggaaacttttattcataatttttatttttattacatattaaaataagaatatttgggatacaaaaggttaaataaaatattgtataataattaatttcacccctttttactcctttttaaaatgttgtcactataaaatttagatgccttatgtggcttatttcatatttctattggacagctcctggctagtctatggaatgagacccttagtgagccaggttaaaattgtaaatgttttcacaactccagataatgcatcatccccactgcctgaaaggaaatagactggagaggattaagcataaacttggcrgaaactcgtgtagcgacaacgtactgctggagttcaaacctatgacttgaaagcccctattttcttgtaacatcagaccgatgcatggagcacacaactggttgctgcaactggagaagaatatgctgatagagttgtggtctgagaaccacaggactgagtgccaaaccagccttaccaccaaatctctgttaatactggcctggggacagaacctgtctctccctgagtctcagttcaaggctctgtctaatgaagtttatgccctggaaaaatgttttaaaagcaagatatatgtatcactggtagaagcatagttggttttaggaggtgcacagagaggctgtttagctatatatagctatttataaataataaggatgttatgattatagcaaaatagctatatgtttattttatatggagacaatttataacatacatatcatgatcatgttttcaaagatattgctttccttcaaaaatacactgatttaaccttagaaagcagaaagattgaaagcaaatgattcaatatgaatgtaacaatagctaccacaaaggttgtgatcagggcatggtggctcatgcctgtaatcccagcattttaggaggccaaggcaggaggatcacttgagctcaagagttcaagaccagcctgggcaacatggcaagaccccacctctacataaatttaaaattagctgggtatggtggcgtgcacctgtagtcccagctactcaggaggctgaggttggaggatcacttgagcccagaaggaggtagaggctgcaatgagctgtgttcaaaccactgcactctagcctgaatgacacagcgagacctgtctcaaaaaacaaagataaaagattgtgagatagtatgcaagcacctgaaatttgggaaactgctttaggagatgtgcaagatttctttaagctcagatattttatagttacttgattctgagatacaacttctcccttggaaagcagtctctgtgagacaaggtaaaaagcaatagaaactttgctttgtcagccaaaggagcaaaaagtgttcctggatgcaccagctgatgcaggatgttacttttggctgggacctgaagaatgaggagaacctagaca

SEQ ID NO: 696042 - DNA, 3527 bp, Homo sapiens
tccccaatgtggctgaggggcagagagcacaggcagtgaagggggttaggttggccggtgtggatgacagatattcactatttgagatgaggcagggctattatttaagtagggcctcatacaagatgataggcatttgagttttattcttctacattcttataggcagatataacagtttctaaaaggaacatggacttcacagccttggaaagaagggataggagagatgagctttacaatagatgcaaactcttggttcgtctgggaaactgcagtgagagtaaaaactcctcttccaacattgctggtttgaacccaacagagctgcatggtctcccagtaatcacatggaaatgtagacacatagataaacatcattctccttcttttaacaaggtctgtgctacctttagcaaaaggcctggcttagcttggcgacgattaattgtagctgttcagaggacgaggcatgttgtgagtgaattgatgtgcttcaagggccctgtgtgtctgacttttcatgttgtctaaatttgtaacctgtaagactgcatttccataagttttgaaatgcaatgtgttctgtggtgctcggaattcgatcaggatgaaaagagctttagaaagtaagatgttattattgtatttgccttcacatgagaaaatagtcaaaggaagacaaacagaggaggggaaaaagagatcctatatagattagcactcccacacagcctgcaacccagggcaggggaggggcgggggtgggagagaaaagagaagaaaaaccagaaaacctggcataagaataaaccttatcaaagactgaacatgacaatcaggcctctatgtgggaaaagttttacctttatgaaccccagagaagaaaattatactcactagaggaagaaaaagagttattaacaaatcagttatctgatgcttaaataatacagctgctaaaatgagccttctaagtaaacctacagtgaagctaattagttcagcattttgccaataacctcatctcccatcctttcagctttaaaaaaatgatgggctcaaactattaacacataacaccaagtatgtgataaaatgagtattttaaaggaatacatttgacgggttagtcttcaaatctaactgctctttaaatggtaggtaaactaaaaattttcattaaggatgaaaaatttgattaaggatgctgagcaaagccttgttcaggaaacgaccacccagagttctaggcctgcctctaccatttactacctgtgtgaccctgggctagtcatttaacttccctaagcactggttttgccatctctactatgaggatattaatttctatccagcttatctcatgagatcttgtgatgatcaggataatcaaaggtgcaaatattttaaagatgtttaagttcaacacacattcaatgactattttacaagacaggaaatataaaaacaaacgaagttagatgctagacttatgttgtcaaatatggtagccgcaagtctcacgtggttattgagagcttgaaagatagccagcgtgataaggaacttgatgtttactttttttttattttaaatacagttgcccctcagtatctgaaggggattccaccccgaggatagcaaagtcctcggatgctcaagtcacttatacggaaaggtgtagtatttacatagaacctacacacatcctccagtacactttaaatcacctctagattacttatacttgatacaatacaaaggctatggaaatagtcattgtactgtattatgtttgtatttttattgctgcatttttatattttattattttttcaaatattttgatctgaatatttttaaagttaaaagctgataattcagttaatggaacaattttaagtatgtttggaaatcctgcgtatatgaatctacattttcaattgtataagctttataaaatctaaattctgatcaagttatttgatggaaattcaagaagaagaagaattaattgaattgggatatgctttaagtataaaatacatgctggattttacaaatttaatgtaacaaaaggaaacttttattcataatttttatttttattacatattaaaataagaatatttgggatacaaaaggttaaataaaatattgtataataattaatttcacccctttttactcctttttaaaatgttgtcactataaaatttagatgccttatgtggcttatttcatatttctattggacagctcctggctagtctatggaatgagacccttagtgagccaggttaaaattgtaaatgttttcacaactccagataatgcatcatccccactgcctgaaaggaaatagactggagaggattaagcataaacttggcggaaactcgtgtagcgacaacgtactgctggagttcaaacctatgacttgaaagcccctattttcttgtaacatcagaccgatgcatggagcacacaactggytgctgcaactggagaagaatatgctgatagagttgtggtctgagaaccacaggactgagtgccaaaccagccttaccaccaaatctctgttaatactggcctggggacagaacctgtctctccctgagtctcagttcaaggctctgtctaatgaagtttatgccctggaaaaatgttttaaaagcaagatatatgtatcactggtagaagcatagttggttttaggaggtgcacagagaggctgtttagctatatatagctatttataaataataaggatgttatgattatagcaaaatagctatatgtttattttatatggagacaatttataacatacatatcatgatcatgttttcaaagatattgctttccttcaaaaatacactgatttaaccttagaaagcagaaagattgaaagcaaatgattcaatatgaatgtaacaatagctaccacaaaggttgtgatcagggcatggtggctcatgcctgtaatcccagcattttaggaggccaaggcaggaggatcacttgagctcaagagttcaagaccagcctgggcaacatggcaagaccccacctctacataaatttaaaattagctgggtatggtggcgtgcacctgtagtcccagctactcaggaggctgaggttggaggatcacttgagcccagaaggaggtagaggctgcaatgagctgtgttcaaaccactgcactctagcctgaatgacacagcgagacctgtctcaaaaaacaaagataaaagattgtgagatagtatgcaagcacctgaaatttgggaaactgctttaggagatgtgcaagatttctttaagctcagatattttatagttacttgattctgagatacaacttctcccttggaaagcagtctctgtgagacaaggtaaaaagcaatagaaactttgctttgtcagccaaaggagcaaaaagtgttcctggatgcaccagctgatgcaggatgttacttttggctgggacctgaagaatgaggagaacctagaca

SEQ ID NO: 696043 - DNA, 3527 bp, Homo sapiens
tccccaatgtggctgaggggcagagagcacaggcagtgaagggggttaggttggccggtgtggatgacagatattcactatttgagatgaggcagggctattatttaagtagggcctcatacaagatgataggcatttgagttttattcttctacattcttataggcagatataacagtttctaaaaggaacatggacttcacagccttggaaagaagggataggagagatgagctttacaatagatgcaaactcttggttcgtctgggaaactgcagtgagagtaaaaactcctcttccaacattgctggtttgaacccaacagagctgcatggtctcccagtaatcacatggaaatgtagacacatagataaacatcattctccttcttttaacaaggtctgtgctacctttagcaaaaggcctggcttagcttggcgacgattaattgtagctgttcagaggacgaggcatgttgtgagtgaattgatgtgcttcaagggccctgtgtgtctgacttttcatgttgtctaaatttgtaacctgtaagactgcatttccataagttttgaaatgcaatgtgttctgtggtgctcggaattcgatcaggatgaaaagagctttagaaagtaagatgttattattgtatttgccttcacatgagaaaatagtcaaaggaagacaaacagaggaggggaaaaagagatcctatatagattagcactcccacacagcctgcaacccagggcaggggaggggcgggggtgggagagaaaagagaagaaaaaccagaaaacctggcataagaataaaccttatcaaagactgaacatgacaatcaggcctctatgtgggaaaagttttacctttatgaaccccagagaagaaaattatactcactagaggaagaaaaagagttattaacaaatcagttatctgatgcttaaataatacagctgctaaaatgagccttctaagtaaacctacagtgaagctaattagttcagcattttgccaataacctcatctcccatcctttcagctttaaaaaaatgatgggctcaaactattaacacataacaccaagtatgtgataaaatgagtattttaaaggaatacatttgacgggttagtcttcaaatctaactgctctttaaatggtaggtaaactaaaaattttcattaaggatgaaaaatttgattaaggatgctgagcaaagccttgttcaggaaacgaccacccagagttctaggcctgcctctaccatttactacctgtgtgaccctgggctagtcatttaacttccctaagcactggttttgccatctctactatgaggatattaatttctatccagcttatctcatgagatcttgtgatgatcaggataatcaaaggtgcaaatattttaaagatgtttaagttcaacacacattcaatgactattttacaagacaggaaatataaaaacaaacgaagttagatgctagacttatgttgtcaaatatggtagccgcaagtctcacgtggttattgagagcttgaaagatagccagcgtgataaggaacttgatgtttactttttttttattttaaatacagttgcccctcagtatctgaaggggattccaccccgaggatagcaaagtcctcggatgctcaagtcacttatacggaaaggtgtagtatttacatagaacctacacacatcctccagtacactttaaatcacctctagattacttatacttgatacaatacaaaggctatggaaatagtcattgtactgtattatgtttgtatttttattgctgcatttttatattttattattttttcaaatattttgatctgaatatttttaaagttaaaagctgataattcagttaatggaacaattttaagtatgtttggaaatcctgcgtatatgaatctacattttcaattgtataagctttataaaatctaaattctgatcaagttatttgatggaaattcaagaagaagaagaattaattgaattgggatatgctttaagtataaaatacatgctggattttacaaatttaatgtaacaaaaggaaacttttattcataatttttatttttattacatattaaaataagaatatttgggatacaaaaggttaaataaaatattgtataataattaatttcacccctttttactcctttttaaaatgttgtcactataaaatttagatgccttatgtggcttatttcatatttctattggacagctcctggctagtctatggaatgagacccttagtgagccaggttaaaattgtaaatgttttcacaactccagataatgcatcatccccactgcctgaaaggaaatagactggagaggattaagcataaacttggcggaaactcgtgtagcgacaacgtactgctggagttcaaacctatgacttgaaagcccctattttcttgtaacatcagaccgatgcatggagcacacaactggttgctgcaactggagaagaatatgctgatagagttgtggtctgagaaccacaggactgagtgccaaaccagccttaccaccaaatctctgttaatactggcctggggacagaacctgtctctccctgagtctcagttcaagsctctgtctaatgaagtttatgccctggaaaaatgttttaaaagcaagatatatgtatcactggtagaagcatagttggttttaggaggtgcacagagaggctgtttagctatatatagctatttataaataataaggatgttatgattatagcaaaatagctatatgtttattttatatggagacaatttataacatacatatcatgatcatgttttcaaagatattgctttccttcaaaaatacactgatttaaccttagaaagcagaaagattgaaagcaaatgattcaatatgaatgtaacaatagctaccacaaaggttgtgatcagggcatggtggctcatgcctgtaatcccagcattttaggaggccaaggcaggaggatcacttgagctcaagagttcaagaccagcctgggcaacatggcaagaccccacctctacataaatttaaaattagctgggtatggtggcgtgcacctgtagtcccagctactcaggaggctgaggttggaggatcacttgagcccagaaggaggtagaggctgcaatgagctgtgttcaaaccactgcactctagcctgaatgacacagcgagacctgtctcaaaaaacaaagataaaagattgtgagatagtatgcaagcacctgaaatttgggaaactgctttaggagatgtgcaagatttctttaagctcagatattttatagttacttgattctgagatacaacttctcccttggaaagcagtctctgtgagacaaggtaaaaagcaatagaaactttgctttgtcagccaaaggagcaaaaagtgttcctggatgcaccagctgatgcaggatgttacttttggctgggacctgaagaatgaggagaacctagaca

SEQ ID NO: 696044 - DNA, 1469 bp, Homo sapiens
tgatgtgagacctaacctctctgaaccttagtttctcaatgggagctattaatagaacgtgcataggagactgtcatgagcacggtgcttggcacatagtagttgctcactgcgtgctggctgttgggaccaattctgtaactttagatgtctgcttttcccctggactgtgagctcctcaaaggcagggctgtctcgctatctttgcatccccagcacctccctctggacttgatcagtgcccagtaagcatttcctgaatgaatggatgcatgggaggaagcatggtgtgatccaggaacgcttctcagaggaggcaggatcagggctgtattttttttttttttttttttttttggagtcaaagtctcgctctgtcgcccaggctggagtgcagcggcgcaatctcggctcgctgcaagctctgcctcctgggttcacgccattctcctgcctcagcctccccagtagctgggactacaggcacctgccaccacgccaggctaattttttgtatttttagtagagacggggtttcactgtgttagccaggatggtctcgatctcctgacctcgtgatccacccacctcagcctcccaaagtgctgggattacaggagtgagccactgcacttggccagggctgagtcttgaaggaaaaactggggtttgggtcaggacagaggagaccctggaagcccctgcttctctccactgcagtccctgttctgtgggatttgcgattggatgaagccgggaggtttgcacaactctgtccttaagtcagttgcaagtgacttcggcacctgagctgcaccagccgttaaagccactcagtctcttgaaatgcccgaggcagggcccagcctaggacaagaatagttctgtgaaatgacatcttgttgcacagtgaagtctccctcctgggcagtagacaatgagaagaccgaggcccggggcccagggagtgagacccttgcttctgacttcccttgagggaatgaggttgggtccagacaccccgtggaaggcaggcagctgtgtgaaagggcccagaygggacatctttccaaagaatgtcagagacttagagacccccagacctttccggtctgcgcatccccaccttcccaggctgtcttcctctatgcttcctaactctgatgtttaatccatttccctttttctcatttactgtgggtataatgacaagctgcctccaatcccacctgcgatggggcaggcagtggatggatggacagacgaacggacagacaggcaggccgcaccatgctgcggatgagacggatggatggacagacggacagacaggcaggagcaccatgctgcggatgagatggatggacggacgaacggagaggcaggcaggtcgaaccatactgcggatgagacggacggacggacagacaggcaggccacaccatgctgcggatgagatggatggatgg

SEQ ID NO: 696045 - DNA, 675 bp, Homo sapiens
gacagataattcatcataattatattattagatgcagaaaatacatgtgaaaaaattcaacatctgttcatcatttttaaattaataaaaaataacctagcagactggtaatagaaaagaatgcccataatctgataaatggtatctacataaacctacaacaaacatcacacttaagtataaaaagttgaaagcttgctcatttgaaataaagaggagacaaagattacttcaatttgacatcatctttgaggctttaactggtgcaatatggccaggaaaagaaattaaaattgcaagaattagaaaagaagaaacacaactgtcattatttgcagacaatatgtttgggtatgtagaaaataaaagtgactctacaagcaaattattagaatttagaagtatatttagcaaggatgctgaatacaagaataattagcaaataccaattgcattactatatactaacaagaacattagaaattaamgtaagctattacttataaaccatcctaaacttgcaaatagatccagtgaagcaagattgcctcacaacaagctataaggtattacttgtaataccttacttaagtaaatggcaggctatactgtattaatggatttgatgattcaattgtatatagaggccaatggtccccccaaattatttataga

SEQ ID NO: 696046 - DNA, 669 bp, Homo sapiens
cccattaacccatcatctacattaggtatttctcctaatagtctccctcccctagattcccagtccctcacagaccccagtgtgtgatattcccctccctgtgtctatgtattcacattgttcgacgcccacttatgagtgagcacatgtgatatttggttttcttttcctgtgttagtttgctgagatgggaggttgacaaagggacacggaagccaactaaaggagctcccggtggccaaagctggaaacattgagtaacaaagtaattacctaaataattaataattaaatagttaagtaaaatacttgacaaaataattagttcaattattaaataattcatcccctgaagtactggagtgtaaaccaaagcatacaataggtgtccataagtccatacggatataaataagtgattaaataaacaaacatgtgggggagaatgggaaaatcctccacacaggagaactccacagaacttargtagctattcccctgcaaggagataaagcaaaacttcccttttctttacgtataggctacaggtagcgacttccagaaagcacagtagagaaagaggtgggaaaatcactttatggtggagaaacctaatcaacactgccccagcccggtgaccaggactaatagcagcagtgataagccggc

SEQ ID NO: 696047 - DNA, 613 bp, Homo sapiens
gtggggatagtggaaataaagtcagaaataaaagggagttgtggaaggtccaggatgaacttgttggtcattttaagaactttagattttagtttaagttggtaagacaatactggagaaattttttagcggaggagactcatagtttattatttattttaaaataaattttgttgcatatatgtgtggaggagtagactaaagatgtcttaaaaagtactagaagaagtaaactggtatacatcttaaatcatatttcagtaatataaaattataaaaataaaaataaagaattgtccttatgatgtcagtcaagtcaaacacaaggttgtaaaactatctatgttgattaaaatyaaaatatctttcatccttagtagctttcttctcttttatgtgtatcactctttatgtgcatatgtatgtaacatttagttgctttactttttctttttttccttttgccatctccatgtcttttggagtgaaagagagcttcctgaaaattgattctgctctccatccagattcttatgttcacaccagaagcctttctcaggcaatggtttaattatagacagttcttgtttttcttctatgagccaaataaatg

SEQ ID NO: 696048 - DNA, 947 bp, Homo sapiens
aagtgacatgatttaactcatgttcttggtaaggacgtctcttgatcagtaagatacttgggaacaccgatctaacaaagatgatgagacctcacagtttgacactgaagtggccataggcattctgggttccaactaagggaaagttgaactgggcatacatttggcttgggtttagtggatataattatgtgtattgcagtcacgtctgcaacactcatctagctgtctaggtgcagaaatggcatccagcagtattcttattgcccacatggcaacttacctggcatccgcacaggtaaatgttcagggccagagatcatattgcaatatgaccttgtcctacaatgggcaacaccataagtatatggatagtgaaggggaaacaaggcttgaaatgaatggagataaaagtcagtctattggaaatgcttctagtcaccagatatgtaaaattgttaaggagggacaagtctgttttcatcttcctggtcaaaaaggaagttctgcttgtgaagaatatactcaatgatgccayatacacaattacaactgtttcacagttttctcctctctttcaatgggaatggtacaaaattgagtttatcagaattactgcgtatagggtacaaacttagcagtactacacacaatctgtctgatcttgatgaaggctgataacatgtcactcactggaagaaaatttaaatttatcaataaagataatataaactcatatgccattgaaataagacattgaagacaaactggttaatgagtgtggccaattcaaagagaacttaagatttatcactgtccaagaaaacttgaaatgcctttaaatcttacagccaatatacaaaaaaaatttgatagaggctttaccaaatttgacgataatcctaaaaatatacatggcattacttgtaatggattatagctaaata

SEQ ID NO: 696049 - DNA, 3490 bp, Homo sapiens
aagccagttatagccatgtatcactccttaatttaaaatgatgcctcacctaataatgcaatttcacagaacagtaaacaaaacagccatctgtttggcttttatatttcatctgaggatcaggaacaagggtttctgatatttgagaggattctttgggcaatctttgaggaaagtggttaagaaaatcacaatgtgaataataagcaaaggaggaaaggggatcttgcctgccttcatcctctggctgacgaagcagaatcactgcttctccacagaggaaggaaagtatgagattgtattagactgtgtttccattttccaaaagtaggttattttcatgtctaatcaattctttggttcatcaggatggttaattgctgagaaagtcatctgatcaaaacaaccagaccttaacaactgcttggcaatgcagcggggttttcagtcattgacctcaattgactcaaaaatgggtgatttacttagctttaatcagagcagttgctgctattataaagcttgactctgcttttcatcagtatcatggtgggttcagacgtagttgctgctggttatatggtaggtgcagaagatttggaatcagacacacctggatttgaaactgcctctgtcagttatgaatgacttttgacaacttacttgaatttttcaaggatgggttttctcacctgcataataatgaaattaatatctactgcatttagggagaatgtaaagtagtattaagtggtaaacttttagtgcatcctagttccctttggttatccttacactcaaaaggcctagccatataaacaggtagctctaagtgaacatgattctttatcttgacttaagaatctaacttgttaaataattttggttgaaaataaagcatactgtttacttacatacttttttgacaattgtatcatagcagtgaaaaatagaaacagcactattctaataaatcatcttaacagctcagtaaatgtttaatgtttgcttagcacatttatctgtttaaagaaaaatgaaatagatacaaagagtattctgctattatcctgccccagcaaacttgcagaacacattgcaaagacactgtgcattaataagaatatattgtatgctctggacttttttcttcctaaaaacctcacaagagttttaaaattttagattaaaaaaatagtgatagggtaataacaaagcccttttttcttccctatatggtataatgacaatgtgttagtcccaaagatattcccttatgttatgaatgaagtttaaaagttgtaccaagaaacatcaatctctctttggtagttgaggtccatttcctcttagccactctttaacatctaggagagaactaccaatatggagctgtgcataactgatgatattatatgaggatgttcaataggtcaaccacccccacctttttcagttgagacacctgaaatgctagaaatgtctaatgactcaaggaatcctttagttttagagtagaagatggcagtaaaaatagtcttcaagctctcatacactaaactaattaccatactcatcaccactaaagtacttccattttctcatttctctatcttctcttttatggcttcttaacctcactaaagatgtagcccctggtgttccaacagactttgaatccatgcatataaaaattgagaagcaggaaaaaagagggagggatgtaagaaactgaagatagcctaggtaggatgttatgagatttgcagttcagtttcacaaatatgtaatattgggtcactgcttttgcaaacccctgtagcacctatgaagatgaattagttatgtcttcagatttcctatattgaattagatatgtgtgtgtctaattctcagaaactaccaggaagaatcataagtaatccctaagatggggagtcagggagagggagaggctgatttccacgcgcgygcgcgcgtgtgtgtgtgtgtgtgtgtgattctggatattttgacgagattcttagtttcatttcaatgattgttgattgatgacagctgactggagcatagtgtagaagaagattctttcctcataggtttggcagaagagggtcctggtcaaagtgccagccatgtgacttaggtgggtgaaaggtaccaactttgttttcaaaatttcaatcccagtccctacagcataaaattcaatcttcctagtatggcatataagatttgtatagcatcctatgctctgtcatagcacacaagcatgacaaagtacttataattgacaaaatacaccatactgtttcacttctatgagcctttgttcacgtaactcttttcctagaataatttctctttcattccaatatcatcctcctagagaaaatctccttaacttttaaattcaaaatcaaaagacttttgtcttcattttatttcaaatagatatgacttcttttgttttacctatatttttcctatatgccatcagtatactgtctttaatgaatgggttgcttacactcaatgtcatattacatattagttatgccttgctgggtgacaaactgacctaaaactgggtagcttaaaacaacaaatgcttacttttttacagtttctatatgccaggagctcagggctggctcagctgatggttctggctcaaggtctctcattacattgtggtcaaggtgttgactggggttgcagtgattctggcacctaatggggactaaagaatctgcttcccaagctcacctgtggttgctgtcaagcctcagttccttgtaggtgattaaactgagggcctcgtttccttgtataccaatggacctctccattgagcttctgagaacatgataacttgcttactacagcatgagtgatgagagagagagagagagagagagagagagagagagagagagaaactcaaggcagaaacaacagtctttcttaataacctaatctcaaaagccacatcccatcacatatgtcaccttctattcattgaaagcagtaagtctggccacattcaagaagtgattatagagaacataaatactaggagtcaggaatcattgtcgggggtggagaaggtaatctaagagactgtctaccacatccagtatcttcctaactagacttaaagctatttgagagctgaaaccaaaccaaactcaatttctctgttttcctgtcatctgcctagtgtctggcacagtaaatattaaagaaaggaagaagagaagaagggagaaagagagagcgcaatcaaagataaatcacatattaaatcccttaaataattggaaatgattgatctatagaacaattgtttggaagaaagaaacagaattttaatattttagtcaagattgaaattatgtagaatttctagcaccatggcccttgattatggcattgacagaaacagaatttgtgattcaataactcatgtataagtctggaaagaatc

SEQ ID NO: 696050 - DNA, 3490 bp, Homo sapiens
aagccagttatagccatgtatcactccttaatttaaaatgatgcctcacctaataatgcaatttcacagaacagtaaacaaaacagccatctgtttggcttttatatttcatctgaggatcaggaacaagggtttctgatatttgagaggattctttgggcaatctttgaggaaagtggttaagaaaatcacaatgtgaataataagcaaaggaggaaaggggatcttgcctgccttcatcctctggctgacgaagcagaatcactgcttctccacagaggaaggaaagtatgagattgtattagactgtgtttccattttccaaaagtaggttattttcatgtctaatcaattctttggttcatcaggatggttaattgctgagaaagtcatctgatcaaaacaaccagaccttaacaactgcttggcaatgcagcggggttttcagtcattgacctcaattgactcaaaaatgggtgatttacttagctttaatcagagcagttgctgctattataaagcttgactctgcttttcatcagtatcatggtgggttcagacgtagttgctgctggttatatggtaggtgcagaagatttggaatcagacacacctggatttgaaactgcctctgtcagttatgaatgacttttgacaacttacttgaatttttcaaggatgggttttctcacctgcataataatgaaattaatatctactgcatttagggagaatgtaaagtagtattaagtggtaaacttttagtgcatcctagttccctttggttatccttacactcaaaaggcctagccatataaacaggtagctctaagtgaacatgattctttatcttgacttaagaatctaacttgttaaataattttggttgaaaataaagcatactgtttacttacatacttttttgacaattgtatcatagcagtgaaaaatagaaacagcactattctaataaatcatcttaacagctcagtaaatgtttaatgtttgcttagcacatttatctgtttaaagaaaaatgaaatagatacaaagagtattctgctattatcctgccccagcaaacttgcagaacacattgcaaagacactgtgcattaataagaatatattgtatgctctggacttttttcttcctaaaaacctcacaagagttttaaaattttagattaaaaaaatagtgatagggtaataacaaagcccttttttcttccctatatggtataatgacaatgtgttagtcccaaagatattcccttatgttatgaatgaagtttaaaagttgtaccaagaaacatcaatctctctttggtagttgaggtccatttcctcttagccactctttaacatctaggagagaactaccaatatggagctgtgcataactgatgatattatatgaggatgttcaataggtcaaccacccccacctttttcagttgagacacctgaaatgctagaaatgtctaatgactcaaggaatcctttagttttagagtagaagatggcagtaaaaatagtcttcaagctctcatacactaaactaattaccatactcatcaccactaaagtacttccattttctcatttctctatcttctcttttatggcttcttaacctcactaaagatgtagcccctggtgttccaacagactttgaatccatgcatataaaaattgagaagcaggaaaaaagagggagggatgtaagaaactgaagatagcctaggtaggatgttatgagatttgcagttcagtttcacaaatatgtaatattgggtcactgcttttgcaaacccctgtagcacctatgaagatgaattagttatgtcttcagatttcctatattgaattagatatgtgtgtgtctaattctcagaaactaccaggaagaatcataagtaatccctaagatggggagtcagggagagggagaggctgatttccacgcgcgcgcgcgcgtgtgtgtgtgtgtgtgtgtgattctggatattttgacgagattcttagtttcatttcaatgattkttgattgatgacagctgactggagcatagtgtagaagaagattctttcctcataggtttggcagaagagggtcctggtcaaagtgccagccatgtgacttaggtgggtgaaaggtaccaactttgttttcaaaatttcaatcccagtccctacagcataaaattcaatcttcctagtatggcatataagatttgtatagcatcctatgctctgtcatagcacacaagcatgacaaagtacttataattgacaaaatacaccatactgtttcacttctatgagcctttgttcacgtaactcttttcctagaataatttctctttcattccaatatcatcctcctagagaaaatctccttaacttttaaattcaaaatcaaaagacttttgtcttcattttatttcaaatagatatgacttcttttgttttacctatatttttcctatatgccatcagtatactgtctttaatgaatgggttgcttacactcaatgtcatattacatattagttatgccttgctgggtgacaaactgacctaaaactgggtagcttaaaacaacaaatgcttacttttttacagtttctatatgccaggagctcagggctggctcagctgatggttctggctcaaggtctctcattacattgtggtcaaggtgttgactggggttgcagtgattctggcacctaatggggactaaagaatctgcttcccaagctcacctgtggttgctgtcaagcctcagttccttgtaggtgattaaactgagggcctcgtttccttgtataccaatggacctctccattgagcttctgagaacatgataacttgcttactacagcatgagtgatgagagagagagagagagagagagagagagagagagagagagaaactcaaggcagaaacaacagtctttcttaataacctaatctcaaaagccacatcccatcacatatgtcaccttctattcattgaaagcagtaagtctggccacattcaagaagtgattatagagaacataaatactaggagtcaggaatcattgtcgggggtggagaaggtaatctaagagactgtctaccacatccagtatcttcctaactagacttaaagctatttgagagctgaaaccaaaccaaactcaatttctctgttttcctgtcatctgcctagtgtctggcacagtaaatattaaagaaaggaagaagagaagaagggagaaagagagagcgcaatcaaagataaatcacatattaaatcccttaaataattggaaatgattgatctatagaacaattgtttggaagaaagaaacagaattttaatattttagtcaagattgaaattatgtagaatttctagcaccatggcccttgattatggcattgacagaaacagaatttgtgattcaataactcatgtataagtctggaaagaatc

SEQ ID NO: 696051 - DNA, 604 bp, Homo sapiens
atgccaatatagttcttaatctcatggaacataccatctcatggaagaaccaggtaatagacaggtgaacaacaaatacagtaattactatttgtggtgaacactgtataagaaacaaacaggaagcagtgatatagaatatcaagtttttatagctaggaatgccagagaaagtaagatttaagtgaacaaacaaaggaagtgaaaaattgggttagggtagaggagcaaggttaaagaatctgaggaaaaaaccgacattggcacgcactagaactaaacactttatctacagcattataaaaacagtttgtggccgggtgtggtggttcacacctgtaatcccagcactttgggaggccaaggtgggcagatcacgaggtcaggagttacagaccagcatgaccaacatggtgaaatcccatctctgctaaaaatacaaaaatkagtcacatatggtagcaggtgactgtgattccagctactcgggaggctgaggcaggaggctcgcttgaacccaggaggcggaggttgcagtgagccaagatcacgccactgcactccagcctaagcgacagagcgagactttgtctaaacaaaacaa

SEQ ID NO: 696052 - DNA, 3303 bp, Homo sapiens
  misc_feature 2458, 2587: n = A,T,C or G
tgcatcaatatccagtgaaatccaccattggttggtaaaaagtggtgtccttcagaaaaggatccttgacaatgactattgctatacagaatggggtttgggttcagggagaaagccatcagtttttccagagtcctagtgtggaaggtaacttcagaacagagcaaaaaaaacaaaaaaacaaaaacaaacaaacaaacaaaaacaaaaacaattgcagacttttgactaacatggtcaaacatggtagaaatagggaaaagctgtgagtctgtgggtatttgggtgccagtggcagcaaaaataatttcagtctccattggttggtgagtttcaggctgttaatataatcatacagtttggaactgagtatggctacacatgcaggtaaaagatctcaggaatcacagccgctcatggaatacaggacataattataactatttgtgtggggagttcaaatatgtctttgtaatttaggctggaatgtatatgccaacacatttgtatcttgaatatataaaaccatatttgtgtctgaatcagcaccatcaataaaaaataccatattttcaaaatgtttatctatttataaagttgctccattattctttgactataatcttggatttaaaaggaaatattcaccctctgcccctaccttaaccaattttgtctgatggaagtgtttagcttggagaaaggtggtcttgtactgacactgaaaacattgacccagatggtcatttatgtcgcacttctaacccgacactacaatttggggaagatttttggccaaatcattagaatgctgccctgtgagtcaataggcttaggccaccatttacattttgtttcttcagtttttttctttttctttttatatatccatggattcctgtacacttttaatagcagcatattacaatcaggatattacagtgtaaagagccaagtctttggatacagatggacctaggttggatcccagcactactacttattaacagggaaatattgagctagttctctactttctctgagcctctgtttccttctctattaaatggggataataatacttgcctcaaggtttgttttgagaattagtgaggtaatagatagtacttggcatttattagacacaaaataaatattcattccatttcttctttaatactctttgtgattattaagctatctcagctggctgcatttatatttatgacattcaaaatatgaaagcattgttacaaaatcccaaatgtctagaattcagataaagatgttctctcatggaatgattcacatggaaaaactcattagatacgtctttccaaaataatcacattgataaactatgtattaaatgattttagttaaatacctacaacacattgtggaccattactaggtgctcatttattttaaggacagaaacaatacacacagggagagttagctgaacagcaattaaacacatttcatgtttcctgtgttgtacatcagcagtatttagagcaaagccttgaatctcatggggggccattcacatgcagtctgcagctcttcaacacctaaaatcttcatacaggatattatcattcagttctatgggccacatggtacatttcaataaaaaacactaaagcatggtggtcaaaaatacttgctctgtttttagacagttgacataactctttaacttgctgtgtgctctttggaaagttacttgtccccatgattcattttcttaatctgtaaaatggggatagtaataaatagtgtttacctccctggattattgtgaggattaaatgaaatactaccacaaaagttcttgatacattgagatcactaaataaattttatcattttttcatacctgcttccaaacaggatttgtagagatttatttcatataacaaatatataacagttaaaacaatgtggacaaaaagaacaaggatcctatagtaaaaggtggtaagtgtggaagtgaagtcttttactgtgctaagcccaatccagagctaagtcccctgagtccatgtccccacttaaaattttttcatgtatagctcctcatctgtaggaagaagaatattcaccctacaatgcatgcaaggacctccatgggtgacttctgcccacgtgggttgctagcagcactcactctttcatttctaaaattgaaacactatagatcaccattcattgtgtgtgtgtgtgtgtgtgtgtgtgtgtgtgtgtgtaagattctacgtttctgctctgcctcttgtatatctgtatatagtccctctctatctggaatactttctcctctgtttttaatcttccacaagtgaccaaacagtatgaaaaaggcttgagaaagtccgtgatcacattggaggaaggtttccaaaaaggccaacatgcttaaagcagtagaggctactggtgaggcagcagnttctagagagtgggsagtcaaactcctcaggggatctctatctggaaaggaagcagtccatacagagaaactcacagtgcacgaagccataaatatatacaggaaattggaggtgagtgaaatccagangggtttgtcacttccaagcccgaaccactaaattaatactgaatgttgatttatgttaatgacatttagtaatgtaattctctgtaagagcatctgtataatatttcagatattcccaggggtgcttagagaaggggagttagtcgaccatgtaatattgtgtaaaattaattaaacagagattttaatataaggaagctctgaattggaaaatacatctgttttgtatatgcacttttttccacctcacctgcagtgcttaggtttgcatagaatccctgtgttaaaagaatctggggtagagaaacctatgatcttatgctaatacagaaaataaagttataaggcttgagggcaggattacagctatgaaagtcatttacatatgttcattttcactaaaataaaacattacacaatacaacatatgtgaacatctataaatattatattagtgataaatattactatattactgatctctatcataatagttatttattttagacaatttgaaaattgcatttagacaattacagatttttaataatataatgagcaaacctgccactcaaaacaaaaactaggaagttgaccctatgctcctctataactccaaacacataatccccctcaatccatcacctcaggcaaccaatactctgaattccacatttatcactcccttcttttccatgttatgcactatatatata

SEQ ID NO: 696053 - DNA, 3677 bp, Homo sapiens
agtgctctttttttatttattttggtctcttcttttcataaataattacctacacatttgtttctgttttccatactggtcatatgttttctctcattattttcatagtttatctttgccctctgcagttctgaagaaactgagtgctccttcagtttcctttgcacaaatctgattctgttatttgttgcctccaaagacagatatcattcttctgtaacatttttgtttcttttcaattgtctgtactttaatatatccaatctctgtgttttttatttctgagtcattcaatgcatacacaaggatggaaaacaattttctaaaacattttttctgctttctgtattaactcttgctttatatatgcttttcctctgagactttaattttccatgtcaagtaattactactgacaacgagttttgctttaatggtcttgttatttttttctttactgatctgagattgtgataaaaatctattgaagtgtagggttttctaacagacaagtgacaagattgaccattagcccttggttctactgataacttgttttttttttcagcagaaagcttctaagcttcacagttgaagagtagattgttatgaagaaattcaggcccaaattccaatgagtagcagcattcaattaatgcaattcttctagaattgttggtagatggatcatcgtctttctccattctgtggtcgtctcaccttgatctgataaaatatctagagcctctctctctctctctcacacacacacacatacacatacacacacacacactgtgagcatgcacacattactactgtctctattcccactactgtaacacctacagtgcttttgggactatatctctttcccgggacatactgcattactgtaagttcttccttcctttcttcccttttcagagggagcagaaaaagtaatcactttttctgtagatgtagaggcactgattgaagaaaggtgcccatgtatgactgcttgattttctgagtgatacaaatcttggatctttgagtcatggggaagaaacacagggtctctctacattacttaaggccataggttttctttactttagtttgtgaatttcaatttagcaatgtagagtcttcccagaaactaataataggttgactgaaagtgtcagttttgaatattatcataaaatgtcatctttctctgggcccttacagccattttaagctaaatcaagcactgctaagaaaaaaaaacttatttctgacatcttaaactatgataaaaaacattccatcagcatcattttgagaaaaattcaatcttcctttaatgtttactcacaaccaaaagctattcccgaacatctgtgtaatattactttgacacagatggtaaaataattattaataaaatagcacatgtaaatatttggatccatttcagtagaactgagaaagccacaaaatcatcttacaaagtaaattttcattgctgactcaatgtgcattttactttgcaccaaaagtgctgcaattttctttggtagttttgaaatgaacaagtaacatttattttcaagccccttcaatgtagtgtgcaaatgagttcatttttatttcacaggaggccaggatccacctttatctcttagaattgtacacaggtcggtaaactgctttgaactgacaaggtctagtctcctaaatacagcttaacttaccttctcaaagaataaaaaaagaaaaaagaagagacataaaaaaacttgagaaagtttttcaaaaacataacacatattgaatttttagaagtctagatgtcttataaatcaatgtagaataagtcatttctacaggcttccaaatgtttcccctaattttttaatgtcagttgtttcatactactcttttataatttttgtcatttttcatttttcttgcaccagtttcattttaacaatttggaagttgatcttcttgtcccttggaccatacaacaggtttgttactgtgtgttcaggcagccaagggtactatgagaagtcctggactaggagatggaaaatctagattgagtgtttcacttgcatcacatgagttttaccagtgctgtatggtcagctgtcacctgtctgtatggtcaggctggtgtcaatttgcaaacaataactggtctgcaccatgaggattatggatattgggagaaagtatgaaaaatgttatataaatgaggtaattttttgtttgtagaatgataataaataagaataaaaatataaatctgtatattttctgtcttctttttatcatttcattttttctagcaagttttagtaattttacaaaaacattcaatctacaatgcattaaaaataaactgactcttaacccacagagagtctgagaagcactgagctctaatacatccagagagccaattagtctctcagaacctgaatttatctgtaaaaatatgaataatgaactccaccctgcattttttacagagtatgtgaaaactaaacacaattacgtattcataagctatttatacctataaggcctcatataaatatacagtcatcatatactaagtaataattatttgtgaagtagcatggcatctcagctaaaagaagcctggcatctattagatactaaaggtttttatactttttgtataaatacaaaaatagaaattttggcagtggatacaattgcacacaaaataactgtctcagggagcagcatatgatttaaaggcaagtcacatcatctgttaatagcaaactttctttatctataaaacaagggtaattatgactattaattttaggttgaggtgaggttgaaataatacacgaaagtatttagtggttattacttggtatgtgaaaagtattaagtattagtcttatatctttaagctctttatgctaagaaaactactgaattctttatatgcaatgtcttagttaatccttataaaaagtttaaccagacaacaacaataatctccattttaaaatagggaaacgaagattcaaacaacgtcagcaacttccacagtcctacacagctactttaaatccatgtctgtctataaaaaaatgtggtcaagtttcccatagaatactacctccctaaagtcttccaagtcatgaaaatacatttcacagggtacattttagaagctttctcattttatttataaactatgcagactttttgcataagacacagaatcgaaagatatcctgaaacctagaaaaagagacycacttaccagtttgaattgttgggctcttcatgctggtagtggccactttcggtgctctgctctgagcttcttctcataaccctatttccaggctgccaaaaaataggaaatgaaaagaaaaatgacactcgcttgcttcaagaaggattttactatattaatggccataacggtaataattaacatatatagtatttgttatataaaggtttgaaagaaacacagtagggattaattcacttcacatgtgtgtggttttccattttgaagttaagaatattgttatgtttatctgcaatccacggaacataacaatctattaaaattaatcattaaattatttatttatttatttattttgagacggagtctcgctctgtcgcccaggctggag

SEQ ID NO: 696054 - DNA, 3677 bp, Homo sapiens
agtgctctttttttatttattttggtctcttcttttcataaataattacctacacatttgtttctgttttccatactggtcatatgttttctctcattattttcatagtttatctttgccctctgcagttctgaagaaactgagtgctccttcagtttcctttgcacaaatctgattctgttatttgttgcctccaaagacagatatcattcttctgtaacatttttgtttcttttcaattgtctgtactttaatatatccaatctctgtgttttttatttctgagtcattcaatgcatacacaaggatggaaaacaattttctaaaacattttttctgctttctgtattaactcttgctttatatatgcttttcctctgagactttaattttccatgtcaagtaattactactgacaacgagttttgctttaatggtcttgttatttttttctttactgatctgagattgtgataaaaatctattgaagtgtagggttttctaacagacaagtgacaagattgaccattagcccttggttctactgataacttgttttttttttcagcagaaagcttctaagcttcacagttgaagagtagattgttatgaagaaattcaggcccaaattccaatgagtagcagcattcaattaatgcaattcttctagaattgttggtagatggatcatcgtctttctccattctgtggtcgtctcaccttgatctgataaaatatctagagcctctctctctctctctcacacacacacacatacacatacacacacacacactgtgagcatgcacacattactactgtctctattcccactactgtaacacctacagtgcttttgggactatatctctttcccgggacatactgcattactgtaagttcttccttcctttcttcccttttcagagggagcagaaaaagtaatcactttttctgtagatgtagaggcactgattgaagaaaggtgcccatgtatgactgcttgattttctgagtgatacaaatcttggatctttgagtcatggggaagaaacacagggtctctctacattacttaaggccataggttttctttactttagtttgtgaatttcaatttagcaatgtagagtcttcccagaaactaataataggttgactgaaagtgtcagttttgaatattatcataaaatgtcatctttctctgggcccttacagccattttaagctaaatcaagcactgctaagaaaaaaaaacttatttctgacatcttaaactatgataaaaaacattccatcagcatcattttgagaaaaattcaatcttcctttaatgtttactcacaaccaaaagctattcccgaacatctgtgtaatattactttgacacagatggtaaaataattattaataaaatagcacatgtaaatatttggatccatttcagtagaactgagaaagccacaaaatcatcttacaaagtaaattttcattgctgactcaatgtgcattttactttgcaccaaaagtgctgcaattttctttggtagttttgaaatgaacaagtaacatttattttcaagccccttcaatgtagtgtgcaaatgagttcatttttatttcacaggaggccaggatccacctttatctcttagaattgtacacaggtcggtaaactgctttgaactgacaaggtctagtctcctaaatacagcttaacttaccttctcaaagaataaaaaaagaaaaaagaagagacataaaaaaacttgagaaagtttttcaaaaacataacacatattgaatttttagaagtctagatgtcttataaatcaatgtagaataagtcatttctacaggcttccaaatgtttcccctaattttttaatgtcagttgtttcatactactcttttataatttttgtcatttttcatttttcttgcaccagtttcattttaacaatttggaagttgatcttcttgtcccttggaccatacaacaggtttgttactgtgtgttcaggcagccaagggtactatgagaagtcctggactaggagatggaaaatctagattgagtgtttcacttgcatcacatgagttttaccagtgctgtatggtcagctgtcacctgtctgtatggtcaggctggtgtcaatttgcaaacaataactggtctgcaccatgaggattatggatattgggagaaagtatgaaaaatgttatataaatgaggtaattttttgtttgtagaatgataataaataagaataaaaatataaatctgtatattttctgtcttctttttatcatttcattttttctagcaagttttagtaattttacaaaaacattcaatctacaatgcattaaaaataaactgactcttaacccacagagagtctgagaagcactgagctctaatacatccagagagccaattagtctctcagaacctgaatttatctgtaaaaatatgaataatgaactccaccctgcattttttacagagtatgtgaaaactaaacacaattacgtattcataagctatttatacctataaggcctcatataaatatacagtcatcatatactaagtaataattatttgtgaagtagcatggcatctcagctaaaagaagcctggcatctattagatactaaaggtttttatactttttgtataaatacaaaaatagaaattttggcagtggatacaattgcacacaaaataactgtctcagggagcagcatatgatttaaaggcaagtcacatcatctgttaatagcaaactttctttatctataaaacaagggtaattatgactattaattttaggttgaggtgaggttgaaataatacacgaaagtatttagtggttattacttggtatgtgaaaagtattaagtattagtcttatatctttaagctctttatgctaagaaaactactgaattctttatatgcaatgtcttagttaatccttataaaaagtttaaccagacaacaacaataatctccattttaaaatagggaaacgaagattcaaacaacgtcagcaacttccacagtcctacacagctactttaaatccatgtctgtctataaaaaaatgtggtcaagtttcccatagaatactacctccctaaagtcttccaagtcatgaaaatacatttcacagggtacattttagaagctttctcattttatttataaactatgcagactttttgcataagacacagaatcgaaagatatcctgaaacctagaaaaagagactcacttaccagtttgaattgttgggctcttcatgctggtagtggccactttcggtgctctgctctgagcttcttctcataaccctatttccaggctgccaaaaaataggaaatgaaaagaaaaatgacactcgcttgcttcaagaaggattttactatattaatggccataacggtaataattaacatatatagtatttgttwtataaaggtttgaaagaaacacagtagggattaattcacttcacatgtgtgtggttttccattttgaagttaagaatattgttatgtttatctgcaatccacggaacataacaatctattaaaattaatcattaaattatttatttatttatttattttgagacggagtctcgctctgtcgcccaggctggag

SEQ ID NO: 696055 - DNA, 856 bp, Homo sapiens
gttgatctacccaccacattttgagtaacaagaattcagaagataggtcacagttttagatggtttcagaaagattcttgaatgattcctattgtatatttctgtgtgtttgtgtgtgttttccatgtgcaaaaatactattataacaataagttttttaaacgtacattttcctcttcagacaaatgccattcctgtgagatcaacaatacatcactaagtagttaacaaaccatacatacttcttctcttacttactttgtaatttgtcaataattctgaataaagattgtccttgccttgaagataagtgtgcaccctgatgtcacctaatgcagacacctttaaatttaataacacatgaaatatataaaatactggaattttgtaattgaccaatatttgagctaacttctgcacttttctgtgcttttttctatatttctgattccttttacagtatacattttagctttcattcatgaagtcctataatacattgtggtaaatatgtgtgtttatatacttttatgtacttatgttatttcatttaattgataaattgatgaaattaaagttaaaagtagtagttatcattttgggctcttactaatggcgaggcactgtattagtgctttgtatatattaactatcattacaaaaatgaactattaatacatagagacagaattttgggatggaagaattagttcaagcatatatrttttaaaagtggcaaaaatgatattaaattcagttatgctcagccttgtttttataatcaagggaaatttaatttttttttaaagaatcatatctctgctagaagatattttaggtagccaattatattaca

SEQ ID NO: 696056 - DNA, 630 bp, Homo sapiens
ctttattctaacgatgcctattttagacactcartatatcaaaattgagaaaactgagtgacctgccagaagatatacaaccactaactggcaaagttaatacttgactccaaaatttgtttcctttctcctgtagcaagttcttaaaattttatgcccaagttttcctaattgcaaaaattttcaagctgccaatttaacacatggggataatgtaaattacttttttttcccttatggaacaaatatgaagagaaatagaatatcacaaatatagtaagattaaattaaacaaatcatgctgcatggaatgagtttacatgaacacatttagtttccagtgatcacttttagttagaaactttgcttggaggtgagggaactgaggctgtaagacatgggcttcgtatgatcagtcagctctctcttgtaacacttgagctctttcgcagcatcatattgccactctgaataagatgggagaaaaaaattttcaaaaccaaaaaataagagggaaaaggtatgaatagcactcatgtcaaggggaaataccaattgcattaaatttgtcatgcaatttcttctaaataacagtacacttcacaaacgacattctaagtgatgtcctaa

SEQ ID NO: 696057 - DNA, 630 bp, Homo sapiens
ctttattctaacgatgcctattttagacactcagtatatcaaaattgagaaaactgagtgacctgccagaagatatacaaccactaactggcaaagttaatacttgactccaaaatttgtttcctttctcctgtagcaagttcttaaaattttatgcccaagttttcctaattgcaaaaattttcaagctgccaatttaacacatggggataatgtaaattacttttttttcccttatggaacaaatatgaagagaaatagaatatcacaaatatagtaagattaaattaaacaaatcatgctgcatggaatgagtttacatgaacacatttagtttccagtgatcacttttagttagaaactttgcttggaggtgagggaactgaggctgtaagacaygggcttcgtatgatcagtcagctctctcttgtaacacttgagctctttcgcagcatcatattgccactctgaataagatgggagaaaaaaattttcaaaaccaaaaaataagagggaaaaggtatgaatagcactcatgtcaaggggaaataccaattgcattaaatttgtcatgcaatttcttctaaataacagtacacttcacaaacgacattctaagtgatgtcctaa

SEQ ID NO: 696058 - DNA, 630 bp, Homo sapiens
ctttattctaacgatgcctattttagacactcagtatatcaaaattgagaaaactgagtgacctgccagaagatatacaaccactaactggcaaagttaatacttgactccaaaatttgtttcctttctcctgtagcaagttcttaaaattttatgcccaagttttcctaattgcaaaaattttcaagctgccaatttaacacatggggataatgtaaattacttttttttcccttatggaacaaatatgaagagaaatagaatatcacaaatatagtaagattaaattaaacaaatcatgctgcatggaatgagtttacatgaacacatttagtttccagtgatcacttttagttagaaactttgcttggaggtgagggaactgaggctgtaagacatgggcttcgtatgatcagtcagctctctcttgtaacacttgagctctttcgcagcatcatattgccactctgaataagatgggagaaaaaaattttcaaaaccaaaaaataagagggaaaaggtatgaatagcactcatgtcaaggggaaataccaawtgcattaaatttgtcatgcaatttcttctaaataacagtacacttcacaaacgacattctaagtgatgtcctaa

SEQ ID NO: 696059 - DNA, 667 bp, Homo sapiens
aatacttaataaagaattattttccttcagattaatgttccttctaaacagagataatttttcttgcaatatatatgtacttgggtttaacatgttaaggaaaatgagatcaacattaatttgtttttttttttgacaaattgagcagctattatataaagtattaattctgataaagccagtgactgccagtgaccaaaaggagaacccatgttgttataaaaaaatarttagtttttatcatttgagaaatgctctgtttataagaattgatagatggtttattatatagtaagtaaaatggataagatcatttaaagtaacaagtgtattgaagaacagggagataaaaaatttcaaagtggagaattcattttctaatgttgataatagacacactattatcattcattttcacaaaactcaactgatacagttcaaatttaagaattgctctatttattaaaaatattatctgtaaatgaattctgtttttctttgaacatattcaatgacatcacaataaaggaaagaagagatgacatatattttcaatgtgtgaataatgtttatgttatacacttacacatgcacagagacacactcgttcatgcatacctatatatacaccacaccacagagcacacaggttataaatatacactat

SEQ ID NO: 696060 - DNA, 667 bp, Homo sapiens
aatacttaataaagaattattttccttcagattaatgttccttctaaacagagataatttttcttgcaatatatatgtacttgggtttaacatgttaaggaaaatgagatcaacattaatttgtttttttttttgacaaattgagcagctattatataaagtattaattctgataaagccagtgactgccagtgaccaaaaggagaacccatgttgttataaaaaaataattagtttttatcatttgagaaatgctctgtttataagaattgatagatggtttattatatagtaagtaaaatggataagatcatttaaagtaacaagtgtattgaagaacagggagataaaaaatttcaaagtrgagaattcattttctaatgttgataatagacacactattatcattcattttcacaaaactcaactgatacagttcaaatttaagaattgctctatttattaaaaatattatctgtaaatgaattctgtttttctttgaacatattcaatgacatcacaataaaggaaagaagagatgacatatattttcaatgtgtgaataatgtttatgttatacacttacacatgcacagagacacactcgttcatgcatacctatatatacaccacaccacagagcacacaggttataaatatacactat

SEQ ID NO: 696061 - DNA, 667 bp, Homo sapiens
aatacttaataaagaattattttccttcagattaatgttccttctaaacagagataatttttcttgcaatatatatgtacttgggtttaacatgttaaggaaaatgagatcaacattaatttgtttttttttttgacaaattgagcagctattatataaagtattaattctgataaagccagtgactgccagtgaccaaaaggagaacccatgttgttataaaaaaataattagtttttatcatttgagaaatgctctgtttataagaattgatagatggtttattatatagtaagtaaaatggataagatcatttaaagtaacaagtgtattgaagaacagggagataaaaaatttcaaagtggagaattcattttctaatgttgataatagacacactattatcattcattttcacaaaactcaactgatacagttcaaatttaagaatygctctatttattaaaaatattatctgtaaatgaattctgtttttctttgaacatattcaatgacatcacaataaaggaaagaagagatgacatatattttcaatgtgtgaataatgtttatgttatacacttacacatgcacagagacacactcgttcatgcatacctatatatacaccacaccacagagcacacaggttataaatatacactat

SEQ ID NO: 696062 - DNA, 634 bp, Homo sapiens
tgaaatgctattgtggacaggtgtaaacagagaggcagcacatcctctgctcctggtcatcctgagctaagttttgggtgggtcccagaggcagataggacctgaactctgcttgtacaaacactgcaatctaggtaagggcactgaaaaagttaaatgatggtgccaggtacaggcactaatcaaaaccaactacacttggacaaacagagaagatckcaagtttcagacaagaggtgctgtgcttctctggggatggcctgtggcttcaaactgagctattcaggaatgcctgtaggaagatgaggctatccaagctggtctggcgatctggggattgtaggggcaagccgagggtggggtctatggaatggttggaagcctggagatcagaaagctccacatttgtctagggaatgaggaaatacggtttggctagagcaggaggtaggcacaggaaaggagatagatgggcctgagatctgggtcagaactggagggcctgcaagtccagctgaggggtttggacttgatcccataggtaaaaagaacttttaatgagaaagtgatcatttgatccactggggtctgtcaggtgtcttaggtcagattccccagaagcagagcctgaggc

SEQ ID NO: 696063 - DNA, 1319 bp, Homo sapiens
tcttattgaatgtatgtgcttgcgttatgctgttttaaaaggcctggataggaggggttgggctagcttatgatatrctctttggagttggtcattatgcaaagcgtggccaacaatgatattgtataaaatttctttttgttgtgctagtttcaggcctcccagaggtctgctgtttcttaaccaggctctttaagagggaaatttataggtgatgtgatgggattaaaggtattcttcctcccccatcacccatagtttcaacctgcttcttccatagcacttcacaatatctatataagcttggataattgtttgtttgaattcagtaaacgcttcacacatgttaatgggatttttccaacagtctgagccccaccatgaaatctgatttcttctccccaccctaacccagccccattgtaagcagcccatgaaatgcttaccacatccctatatatgcatggaccttcaattgtagcttgagcacactcatgcttctaggccctccaacaggtgtataattgttatgctgtacaatgtcatccaaggaatttctcaacttatttatgcaaattctatatgccacaactactctgtttttgacaaaatttataccccaaaatagtccaaaacattgtgtaggctacatctctaaaaacaataatattaagtatgttacagctgattttttaattttaaatttccacatcaaaatgccaaagaatagatagatagatagacagatatagatatatatacatatagatagatatagatatagatatatagatatatctgttctcctctccctatctcaaaaatcaagtaaaaccctgtatagttttaaggaagaggattggaaggtcattgcttatgctatatgtgttgaacccactaagttcaattatataacaggttcattaagtattctctttggcatacttttgcctctctggacagtgaatttatgagctgtgtgaggtctcacccatatgctctgccttaatcttaaattccaacccaatttatgactcatcacctcaagtgggaatatgaacaatgacatctgctgcaacactgagtaatttttcctcatgactcagccaccaagtggtcataaatgtgtcattaagaaccactcaaatatggttgcactaagttgtcttgtgtaaataccccacattttaatctgaaactaatagcaatcataatctaagatagggagcactttcccatgttatcaaagagttgatctaccccagtttctgtcagcagttaccacataggatcatggtattataaaatcagctaaaacg

SEQ ID NO: 696064 - DNA, 1319 bp, Homo sapiens
tcttattgaatgtatgtgcttgcgttatgctgttttaaaaggcctggataggaggggttgggctagcttatgatatgctctttggagttggtcattatgcaaagcgtggccaacaatgatattgtataaaatttctttttgttgtgctagtttcaggcctcccagaggtctgctgtttcttaaccaggctctttaagagggaaatttataggtgatgtgatgggattaaaggtattcttcctcccccatcacccatagtttcaacctgcttcttccatagcacttcacaatatctatataagcttggataattgtttgtttgaattcagtaaacgcttcacacatgttaatgggatttttccaacagtctgagccccaccatgaaatctgatttcttctccccaccctaacccagccccattgtaagcagcccatgaaatgcttaccacatccctatatatgcatggaccttcaattgtagcttgagcacactcatgcttctaggccctccaacaggtgtataattgttatgctgtacaatgtcatccaaggaatttctcaacttatttatgcaaattctatatgccacaactactctgtttttgacaaaatttataccccaaaatagtccaaaacattgtgtaggctacatctctaaaaacaataatattaagtatgttacagctgattttttaattttaaatttccacatcaaaatgccaaagaatagatagatagatagayagatatagatatatatacatatagatagatatagatatagatatatagatatatctgttctcctctccctatctcaaaaatcaagtaaaaccctgtatagttttaaggaagaggattggaaggtcattgcttatgctatatgtgttgaacccactaagttcaattatataacaggttcattaagtattctctttggcatacttttgcctctctggacagtgaatttatgagctgtgtgaggtctcacccatatgctctgccttaatcttaaattccaacccaatttatgactcatcacctcaagtgggaatatgaacaatgacatctgctgcaacactgagtaatttttcctcatgactcagccaccaagtggtcataaatgtgtcattaagaaccactcaaatatggttgcactaagttgtcttgtgtaaataccccacattttaatctgaaactaatagcaatcataatctaagatagggagcactttcccatgttatcaaagagttgatctaccccagtttctgtcagcagttaccacataggatcatggtattataaaatcagctaaaacg

SEQ ID NO: 696065 - DNA, 237 bp, Homo sapiens
agtaaaaataaaaagttttaatgctgacatattattttgtgaagaaaataaaaattaaagaccaccttaccctaaaaaagaagatagaaattaccaatatcagtaggaagaacaaggacatcactacaaatcctacatatattaaaaagggaatgctatgaacaattttatgaaaataagtccaataacttgatgaaattgacaaatkctttgaaagacacaaacaaccaaagctca

SEQ ID NO: 696066 - DNA, 577 bp, Homo sapiens
ggctccaggccgctccctgctctaagtccccttggccctcttaccctccctggctactcctggaaccttcttcagatcagttcttcccaaaatgccaattcaagatctgtatgtgtctttcttttcctgattacccttcccccaacgcagtcaagacagctgtcctgggtcccagtcactttagtcctgaacagcagctcctccgtcattttgttcaacattgttataatgttgatgagaaaagaaatcaatgtccggccggggccactgtctgcatggcgtctgcrtgttctccccgtgtctgtgtgggtttttctccaggcactctggtttccttccacatcccagagatgtgcacattaggtgaactggtgtgtctaatggtcccagtgtgagtgagcatgggtgtgtgtgtgggtgcgccctgcgagggtgtgtgttggtgctaacctgtccagggtcggtgcctgcctggtgccctgagctgctgggacaggttcccgccactcacaactctgaactgaaataagtggattggaaaaatgaatgaacgaatgagtacaaagtattaaaaata

SEQ ID NO: 696067 - DNA, 1284 bp, Homo sapiens
ctttcctctcactagaacatcttgagtaatctcaactgaaatccaggatttgtgactgagaaatgatatgtcaccataagattttaacatatggcaagtccagaatattaacctaagaccaggagtgccttatatggtaataaaaggtatgtcagaatgtcttttatattatctgcttgctagggtttgcaacatctctttatctctctccccacctcgcgctctctctctcctccttctccttctctcactctctttctctcatatatatgagagatatatagatctatatctatctacatagtattataagtaatgctatattagtattatatatattactatattatatatatatcatatagctctatttttctctcatatatatgagagattttatatataaagaaaaatatgtgtatatgtatatataatcttaactcctttctcacagttttttaaattaaaaaaataaaatttggttcattttttataataaagaaattaaattcccatctaggaatttcagagaaaagttcacattgtaccaaaaaaaaaaaaaaagaaaaagaaaaagaaaaaactcttctttcaagaatcagttgcttgattttacargaaaaaaaaaaggttggtcagagaaaatgagaaagcttcactattgcagtcttaccaagcacccctcctgattgctatgagattagctcctggtctctagaacccagtttgtgacagagatgtcaaaggtaacagagagctttaggcccaggtttttccacaggcaaattctaacaaacatttagggatgaaataatactaattctgcacaatctcttccaggaaattaaagaagaagaaacacttccaaactcattttatcaagccagcaatgccctgatgctgaaatagacaaaggcatttaagaaaaataaaactacagaccaaaactgcagaccttctaaacagaaaccaagtgtcagcaaattgtagtctatgggctaatcatctataaataaagttttattggaacacaaccatatccttttgcttgctatgacagagtcaagcagttacagatgagatagaaaacatgtgttctgaacgtccacaatatttactgtatgatcctttaaggagtttgccaactccagactatcagtgcaaaatttctcaataaaatagtaacaagttgagtctaaaatatatgaaagcataaaatacaaactgaccaagtccacacagggggaaatgaggcagagccgaagcaaggcaaggagggcatct

SEQ ID NO: 696068 - DNA, 653 bp, Homo sapiens
tgtttaaaagactgagtaaagagaagtaatcagagaaaagtggaggtgagtgagatggattttataataatacaaagcaaaaaggttagacagtagacagtaaaacaaaggatagattgagagcccatgaagtaatgagaggttctgagacagaattagggccaatgaacattttgacaaaatgttcagagatygaagattaaagagtttgtatgattgaagatgtcactatttagaatttatgtttaatcacttatcgattctcaagctgagaggagaacaatgatggaaaaatataaaggctttgggttgttatttttaatgttcaaaaggatgcttttgaaatgtcttttctttctcccatgtatttagaagtaataactaatagaaatgggagaattttctaaggggaggatcacattgactgatctttgaaatattcttaaaagctttcaaaacattactcagagtataatgatagaaaacccttgtccttagctagttaacagaaacattgttattattttaagttgcaaatgtctttccagcccatcaatgtttaaatcagagtgcaaggtaattaaagcaagtagcagaatagcataatcagatagacattcaatgtacacaaaagagtcttaaagaaaagagta

SEQ ID NO: 696069 - DNA, 653 bp, Homo sapiens
tgtttaaaagactgagtaaagagaagtaatcagagaaaagtggaggtgagtgagatggattttataataatacaaagcaaaaaggttagacagtagacagtaaaacaaaggatagattgagagcccatgaagtaatgagaggttctgagacagaattagggccaatgaacattttgacaaaatgttcagagattgaagattaaagagtttgtatgattgaagatrtcactatttagaatttatgtttaatcacttatcgattctcaagctgagaggagaacaatgatggaaaaatataaaggctttgggttgttatttttaatgttcaaaaggatgcttttgaaatgtcttttctttctcccatgtatttagaagtaataactaatagaaatgggagaattttctaaggggaggatcacattgactgatctttgaaatattcttaaaagctttcaaaacattactcagagtataatgatagaaaacccttgtccttagctagttaacagaaacattgttattattttaagttgcaaatgtctttccagcccatcaatgtttaaatcagagtgcaaggtaattaaagcaagtagcagaatagcataatcagatagacattcaatgtacacaaaagagtcttaaagaaaagagta

SEQ ID NO: 696070 - DNA, 656 bp, Homo sapiens
acgttgtgcacatgtaccctaaaacttaaagtataataataataaaattaaaaaaaagaaagatttgctcttgtcacataatcataatttcatatcaggtataaacctgaaggatttgcaggtgatatcattgcaactgccatttactagccacccgcaatattcatttactcttgagatattattcattggtggccctatggaaaccagatcctcatttgatttctcattgatgtcgtcattactaaatctttgaaggtatggatcagcttttccacttcttccatgagcttcttgggctcatccacagaggcataaaagtactgagaaaactggttgatatggttactattttgcttacaccctcaaaaaattaaatacaatgtgtttgttaaagcaaaagttgattgatgacttacgtataataaaagccatacacatttatcacaaaaagcccaaattgcaaagaaaattagaaagtggaaaaaagtaatgcgtggtcctaccacccaaagaggtaatgagatagtcrttttacttaattgtcttcctttttttcataattgtaataataatgtactgatccctgggtcccgccccaaatattcagatttatttggtatgggggcatgttctagactcagtgtttttcaaaa

SEQ ID NO: 696071 - DNA, 656 bp, Homo sapiens
acgttgtgcacatgtaccctaaaacttaaagtataataataataaaattaaaaaaaagaaagatttgctcttgtcacataatcataatttcatatcaggtataaacctgaaggatttgcaggtgatatcattgcaactgccatttactagccacccgcaatattcatttactcttgagatattattcattggtggccctatggaaaccagatcctcatttgatttctcattgatgtcgtcattactaaatctttgaaggtatggatcagcttttccacttcttccatgagcttcttgggctcatccacagaggcataaaagtactgagaaaactggttgatatggttactattttgcttacaccctcaaaaaattaaatacaatgtgtttgttaaagcaaaagttgattgatgacttacgtataataaaagccatacacatttatcacaaaaagcccaaattgcaaagaaaattagaaagtggaaaaaagtaatgcgtggtcctaccacccaaagaggtaatgagatagtcgttttacttaattgtcttcctttttttcataattgtaataataatgtactgatccctgggtccygccccaaatattcagatttatttggtatgggggcatgttctagactcagtgtttttcaaaa

SEQ ID NO: 696072 - DNA, 218 bp, Homo sapiens
ctttcagtctgagctagtagagtaaaagttgtgtattttcttcccctatcattcaatgcaaacagagacagatatagatataaaaataaatttattccaaaaagtaattttggagtttaagtgttcctcaaaatgcatgttmtcatctgagaatttcattctgaaaacagacttaataaagctgaaatactgtgcatttgtgttaagtaaaaaaaaaa

SEQ ID NO: 696073 - DNA, 710 bp, Homo sapiens
ataactatcacagcgtcctcttcctgcctggtgttggtggtttgttctcagaggcttgtgtcaggactgctgataggaagatgtcttcaggaaacgctaaaattgggcaccctgcccccaacttcaaagccacagccattatgccagacagtcagtttaaagatatcagcctgtctgactacaaaggaaatatgttgtattcttcttttaccsgcttgacttcacttttgtgtgccccacagagaacattgctttcagtgatacagaagaatttaagaaattcaactgccaagtgattggtgcttctgtggattctcacttctgtcagctggcatggatccacacccctaagaaacaaggaggactgggacccaggaacattcctttggcctcagacccgaagtgcaccattgctcaggattatgggatcttaaaggctgaagaaggcatctcattcaggggcctctttatcgttgatgatatgggtattcttcggcagatcactgtaaatgacctccctgttgactgctctgtggatgagactttgagactagttcaggccttccagttcactgacaaacatagggaagtgtgcccagctggctggaaacctggcagtgatactatcaagactgatgtccaaaagagcaaagaatatttatccaagcaggagtgagtgctgggctgttttagtgccaggctgcagtggg

SEQ ID NO: 696074 - DNA, 652 bp, Homo sapiens
tggactccttcccccaactccatgaggacaggcagggagaagcagtaaagaggatggagatgaaagagatgggaaaggctttcctgagtagttctacgtggtcatcagttggttctctgggcttgatagtgtgcaggctaattctttctcccccagggcattttcatagcttccctggatagatagcctttttcacccatgctgcgaatctgtcacctactttgtcattcacaatgcactctcagtgtgaccactgatgactctctctttggcccctgtttccyggctggtccgttttcatacagactttccctactagggttctattgctccttcaagtgaccctcttgacaaattcttttaaggtcccgtgtccagcagatgaaaagcagtttcatttgactcctcaatggggatgcagtttccacactggtagtcctgactctgcggccataggctcagatgtgagtcaagcacctgtccagtgcatccccaagctgcaggggacacacatcaagttctctgaatggtcttattgatgccactctcaccaggcttgaggtgaagggtaggtacccatggggtgtggaggggacccatagcatagctctttccaaagaactttttttcccatgatcaccaaatcctaagt

SEQ ID NO: 696075 - DNA, 534 bp, Homo sapiens
ttatttcttaacaaagttttccttaatccctacttcacttaaaaacagtgaagcagttgataggttggtaacataggttcattggtggcttatgtttgtgagcaaagctctaaaacacaattttaatttttaaaaactatttgacctttaggcrtattaaataaatatatcaccattttagatgaaccatgggtataaaagcaaaaagtgtgaatgttagattgacaactcaaataccacaaccaacactgacattgacactgcaagtgtttccaaaatggcaaatatctattgtaatattctgaagtagaatctttcctttatttacatgatagttgtgtgcttagagaaattcttaaaaattttaagaatttatatattacttataattaacaattgttaataacatttgtgtttatatgtaaatttagattatgaatagctgttttacttatataaatacttcgctagatattgaaagtcatgggtagagatagacaaggtagcaagaaagttaactgcaatatgggtaat

SEQ ID NO: 696076 - DNA, 534 bp, Homo sapiens
ttatttcttaacaaagttttccttaatccctacttcacttaaaaacagtgaagcagttgataggttggtaacataggttcattggtggcttatgtttgtgagcaaagctctaaaacacaattttaatttttaaaaactatttgacctttaggcgtattaaataaatatatcaccattttagatgaaccatgggtataaaagcaaaaagtgtgaatgttagattgacaactcaaataccacaaccaacactgacattgacactgcaagtgtttccaaaatggcraatatctattgtaatattctgaagtagaatctttcctttatttacatgatagttgtgtgcttagagaaattcttaaaaattttaagaatttatatattacttataattaacaattgttaataacatttgtgtttatatgtaaatttagattatgaatagctgttttacttatataaatacttcgctagatattgaaagtcatgggtagagatagacaaggtagcaagaaagttaactgcaatatgggtaat

SEQ ID NO: 696077 - DNA, 671 bp, Homo sapiens
aaaacaaattttcagtcagttgacacttgataattattttttaaatgttcttcagaaaacatattttgccttataatttataattaatttgattacttaaaaatgtatttattaaatcatcatttcattccaaataaagacatatttactttagtaaaagagagggtttgtaagtatattaaaatattttaaattatcacaatagtacctttattttcctataattcatttataataaagaaaaaagcatatgtaatattaacaaaataataaatcgaacaatgagaacacgtggacacaggaaggggaacatcacacactggggcctgttgtggggtggggggaggggggagggatagcattaggagatayacctaatgttaaataacgagttaatgggtgcagcacaccaacatgaaacatgtatacatatgtaactaacctgcacgttgtgcacatgtaccctaaaacttaaagcataataaaaaacaaaaaacaaaataataagttttgataatcaaatttaaataattttggaaaaaatattaaatattctgaatgtagtattctttttaatctcttttcttgattttgattaaatacttgactttgggtaatttaactaagccccaatttctttatgtgttaaatagatatccaaaatacagcag

SEQ ID NO: 696078 - DNA, 1116 bp, Homo sapiens
cacaggaagcatttgcttggaattctggatacaaaattgcaagcatatacttactctaaattatttaaaacatcttttttaaacactgagaaaagtacgatactcacatttagatcacaattaagattagatgcctgcgttgactccacactctgagttggccatgccaaaatttcaggcttttccctatttgtttaaaattgataacttagttttttgggttttttttaattacaaaagtaatatataaattccaaaatacataaaattataaacawtataaaacccattcttaacaagctcctcttttaaaaacaaatgaatgcatgtatttagaatggattctttaaatatttacagctatattcgtggtaatgaataaaaaggttcagtgaactgaccagagcttcaaagtcattttctaactcccctcaaagttttcaggagccacttctgaaggggttggtggctgagactaggagaaagaaacagctcacaactgaggaatcagatggaggtgtagtgtgaaccagtacaagataccttttgggaatgttagcaacgaaccacgtgcctctggaggctgtgtgtatgtgtgtgtgtgtgtgtgcacgccactatacctggctaatttaaaaaaaaattttttttttagagatggggtcttgctattttgcccagtctggtcttgaactcctgggctcaagtgatcctccttagccctgcaaagtgctggaattacaggtgtgagccaccatgcccatcctgttttgtattttgcttctaagcttggcttgacccacctccagtttctaggagagcagaacacatttgtgagggtgatttgagtgtcctagacatcatggaaggaggaaaagcaggaatttgaaatcagtcaacataagtaagaataatctgtgtctgaactggaatactagctcagcccttaacagctgtgaccttgggcaagttacttaatctttcagttttatgatctataagatggagattaaaagattgttaggattaaatgagctaatattttaaaatatcgagaatctgacagggagtaagtgctatattcttggttaaatgtctgctctatgtaaaattaat

SEQ ID NO: 696079 - DNA, 590 bp, Homo sapiens
ttttaagtatgcaattcagtggcttgattattttcacactgtcatgcaaccatcaccactatctattttcagaacttttcatcaacccaaacagacactctgtagccactaagcaattactccccatactccattccccacccycagcccttccaagtatcttgtgaacacaaagttttgactatatactttcaaactacaaattaaaaaaaaaaaactgaacaaaaattaaactccagatatattggtatgggttagcaattctgaaactgttttctgtatattctagaattacacagatagtgagctgtatgatattaaatcagaactggaattattaatatgaaatcatgcttttaatacatatggaaatattattatggaaatagacatagatgtatgtatggatatggataaatgcaccctagctctgctaaggtgaactaaaagcaatgacattgtaatagcaatgaccagtcctagtgccctggattctagactctattcttcaaaaaaaggaggcaggccaggcgcagcggcgcacgcctgtaatcccagcacttttggaggccgaggcaggtggatcacct

SEQ ID NO: 696080 - DNA, 662 bp, Homo sapiens
gttttgctattggagagttctgtcatactcatagtagaatgtaaatacagttgcttatatttaatgacttttgtttattcatatagaaagaaaaaacttttaataatgatagcatgagataattaactgtttggtaggcagaccagaagtcctatatagatgatttataatacattaagagaaactaatgttattaagcggtttaagtgtagaatctggaagatacaagttttctaataagcctattatttgtgacagatcaagacactgctccaattatgcattttaactgcttttgttatctctaaagtgataaggctgagataaaatgaactccaagtgatttctaaatatttcaagaagtagcattgtattctaacatcgcttgaaaacagaataccttttatacgttccagtatgtaaaactggcagttagttatgaaacaccaataacttagtaataaactatgatcaagggattgccagccatctgtttacaaacctattatttaaatgaggacagggtacaacagagtcaacaatcaagtctcagtcaccaggcagtcatmtcaacatgtcatgcttttattcaaatagtgttacttaacataagaacaacttactttattaatcagcacgttgtaatttgcaatgtcttggga

SEQ ID NO: 696081 - DNA, 947 bp, Homo sapiens
agaactctgtgtcaaaactaaaatataaagttgaaatatcaattttattttttaggaatctggtgaacagtaacaaactttggtgaaatttcaggaaccatagccattgaagtggatgagggaacctatatacatgcactcaacaatggtctttttaccctgggagctccacacaaagaaggtttgtgtctggaacggaagatcctgccacaagtgtagattttaggacattcattcacttaggccaaactctaactagtctcaaacattttccaaaggaatggaaccattgcatttgactcttccatttttttaaattccttaatatgtaccagccattggcaagtccctctttctaatataagcatttgaaaacattccgtatagttccagaagagtatctttggaaatccaaacaatatgaataattaaaatagtaagtggaaagaaaaaagaaaacctatttgagtcaaacatatttgaatttcttttttattcagacctattaccaaaactaacctgggtgcatttaacagtttgaagtttccacattttctttagcccattagaggaagcactaatgagatacgaagtaattagaagataaaaagcagtatcatttcgtcagcaaggccatccattgaataaatgaaagcatttagcttttttaaataagtgcttatttatgactgtattttaaaacaaagagaagctatctcgaaagttattaaataagcattatatcaccctgtcttactcagtgtatamaattagcactatagttaaaagaaggtaaaatagatcttgattccaaagatacagtattacagtgacatcagtatatctgaatattcttacatttaattgcagaagaaaatagccacattttttaaagcaaaataatgtctttatatttatagcatatgtcaaatttattttcaaatgtt

SEQ ID NO: 696082 - DNA, 2902 bp, Homo sapiens
tgttgctatgatatttaaactcactgtttggaagtccaaagacaaacaggaagactaaaaaaaaggaatattgttgaaaccagcagagaatgttacagcatcataacgaccaaaagaatatttgtactcactatttttacagtcattttattttttattctcaccttgtgcagaagtatagaatgattctttgggtaaaagatactgaaagtgaatttacatattttagtaattggttacatcaacatgataatgatttctgttatataatcattaatgtataagggagtaaaagtcaattctggcatccgaggagattcttggtaaggtaaaagaaatyataattttaaaaaatcacattaagatgattatttctatactttctttgaaagtgataagtagggtgaaaaagaataaaagcagaggaagaaaaactcaatagttttaaactgctttacaattataaacaaaaaaggattataaataaaactgacaaatgagaaaatatttgcaacaatcttaataggcagtgagttcttactcttcatatgtatcttgtatagaattcatagcactgaagaccccagtagaaaaattgcgaacaatcagatctgaatagaaaaatggacaaggggcattaccagataatctaaaaactaaaaaggaaaggaaaagaaaaataattgttattctagttaactactaaaatgcaaattaataggatactgtttttttcatatcaggttttcaagtatttttttagagtcataacatttaaaaaaaaaatccatgatacaaaacatactctgttaatttgaggtaagaatgtaaatggaagcagcattttctggaaaacagtttgatgacataaagttttagtaatttattattgaagtttataactaaagaggtataattgaagcatgatgaattttgaaaatatttattatgtaatatataaggtacaatgtttatattaaaaaagcaaaatataaaactaaatttaaaactgtactgtccaatatggcaacaactagtcacatgtagcttttttttttttttgaaggcacagagtctcactctgtcacccaggctggagggcagtggtgtgatcatagctcactataacctcaaatttctgggctcaagcactcctcctgcgtcagcctcccaagtagctggtattacatgtgcacaccaccatgcccagctaactttttaaattttttgtaaagatggggtctcactatgttgtccaggctgatcttgaacttcttgcctcaagcacttctcccattggcttcccaaagcacagagattacaggagtgagtcaccactcagccacatgcatcttttgaacacttggaatatgtccagtctggaattttagatatgtacacacccacacacatacacatgtcctgttttgatgtcctataattaattttctcttagtttttaacttttatctatcttattaatgtacagaatcgccctgaaacctggctatggaaaatatcttagtataaattcagatgaacttgttgttggcgttcagatgcaattggaccaagagaacaatgggaaccagtctttcaaaatgtgagtgctgttattgtttataaaaacttcctgtcagtttaacacaaagtctgtagcagtcaataataatatatttaaaaagaaaaagtaggatgcaatagtacaatacattaaattggaataaatcagtaagaacacagagccttaaagagatctcaaaatatagtgcaacaaaaatagctttagtacttttgcccacaattatttctgtatacccttagtgcccgatatggatctcatttccattgaagaaccagtcaattttaggtcacagagtaggaaaacagaatcgttcctaagtatcttctttgtggcagaaatcatggatgctttcagaaactttagagactgtaagcgaacagtagagctagctaataccaagttgtgacaatttgcttataaaatataaataataatagttcattgaagtaaattatctctaaaagactttcagttcataaacttaaaatagtgtatgaaaagatagttttaatataagaagaaaaaagataatatactaattcttaattttagtaagtagacagttgtagtgtatggatgttttgttaaatctttgttgatacagaatatataatttcctttttctgtttgtgtgagaagtaaagattgaacaaaaatatgtgagtgctaaactgtctttaaaaagtagataactatatcaaaaacagtaaggaccagtgggcaccatgcagaacaagcaaatagaagctcagcctttgagtagcagctttggtagtatacaaaaatgaactgaaaataggaactcagcagtgttttaagatgacagattaaacaaacatcccaccagaaagaggtaatcacttagactaatttcctcatcccctaggataaaatcttaagtcagtgacttgaaaactattttgacccaatccattgagaaatgcatttttacattgcagcccagcacacacatatgtataactgaagcaagagttgtacttaacaatacttacttatccgtgtgttatgcatcttgatatttcttattctcttttaccccttcctctgtgtgtgtgtgtgtattctttttcccccccacccacccgataccgttcaggaaacactacgttgatttcattacctgctaatgtgttgcaacccctttgagatgatcctactagttatgatgagatgcttctaataaaagttacaccagtagaaaatgccaatatttcataaggccaggatgatgacttagatagtactaatattacaacactttaggaaagttcatttcattttatttttaggaaggac

SEQ ID NO: 696083 - DNA, 632 bp, Homo sapiens
gaaaagcagccatctggaatttccagctcctgtgggaaggggcgccctgtcagcgaagcagtgggcatagggacggaccgtagcagggtggacaccaacagtctctcaccaccatcccccactctgtcctccccaggccccagcaacaagggggaggtgcctccatygtgcacaaacggaaaagcaggttttactacattgaatgcaataaggaaaatcagcaagtaaagtgtatttgagattttttgtttttttttttttttttttttttgagacggagtctctctctgtcgcccagactggagtgcagtggcgcgatctcggctcactgcaagctccgcctcccaggttcacgccattctcctgcctcagcctcccaagtagctgagactacaggcgcccaccactagtgtagtcctttaaaatttgagattttaaaggaaagttctgcttttacctaggcgactgtattacatctaacactacctagcaattggagatgcgttgctgatgtgttctctctgatgatcatcagcatgttatttaatctcttgagattcaccagtctcctctctatcagggagtgaccatatcctcccctctgaattagattacactacatagattgcatg

SEQ ID NO: 696084 - DNA, 1126 bp, Homo sapiens
tgccagaagagctccagaatggtttctagtggtggtatcctaaacacacacacttccagggggcagttttgatgcagaaccctcatttggactttttcttttttttttttttttttttttaagcaaacctctctttgctttataccagattgcatagacagccttttagaaatcactcagaaaatgtgycttcctccagtcactgtagttcaccataataatgtgaaatgtaggacctgtggattgactttatgagtccaggacctatgttagcactgcattcctttgagtctggtcatcttcaagccaaagccagtaacagtgcaggcttgctcacccacctgagcctgcagctggtcctgagctttctcccaacaatcccctcagatctgtgtctgaaaatgcatctgtaacagtgatggcattccctcatcatatgacactttgtattttatttgtataaaataaagccagagttactgtattaggcagggttctccaaagaactagaaccaatggagatatataaatatatgtatgtgtgtatatatgtgaatttatatctgtgtgtgtatatatatattatattatatacaatacctgatgtcacaccattcagaattcagtaaatgtgttaacttttgtcactcctataaagtcaggcattgggtcctaaacatgtattagaacatgtcaattacctttttgtgttatgctctgtattaacagcctgaaccaaggagcgctataaaggctttgctttcccctcattagtggctgactttgcacgttatttctcatctggacattggattctgcaagtcctccatttatggtaaggaatggtagtttcgtttgtctggtttaggtagattttattgttgtttactttcagatttcataaaaatatgttactttcagatttcataaaatataaaaatttcagatttcataaaagtatgttaaaaatatactaaaaaatatttttggacatatgggcaaaggggcagacaaggatactttaacattaaagactttcttgggcctgatgtcttaaccgtcccagagggatctgtactgacccacctccactctcccaaacagtaattattcagaaaatataatc

SEQ ID NO: 696085 - DNA, 668 bp, Homo sapiens
aatttgagatagctaatggtggaagcaatgtaaatgcctaaccacaggaaacaaacacaaggcaagctggggatgctttgctgtgccagaaagcaagaaaaatgctaaaacaaagcaaaaatctcagagggatatgtgagaagaacacaggtgctcactgaaagggactcccaccagccatagttgggacaatttgaacatttaaaaagggcgtaatgggttatattacattaactaaaataaacaaagaaatcttcaagtccttagtaatacatttaaaataggggcaaggcagctcttctttataaagtaatactttttaataaatatcggaggaatgaaggaatttaacaataaaattttgcagtcaccacggtaatgactgatttaggcaagaatcagcagtgcacctaaaatcattggctgaagagttaggcacacaatctcaaagcatyacccacaggttatttttaagtataaagaggaaaaggatacaccttgaagaataaatggaagtcagaattgcccaatcatgggacacactaatgatgtaaaggaagcagactacagtgccaggtagttttcttgtcaaagctgtttaaacttcatcttgctaacttaagatatataaatttaggaaagaagactttatttcttgtaaagggtta

SEQ ID NO: 696086 - DNA, 586 bp, Homo sapiens
cctcacctctagtcctgcattagaagcagccggttctccttcccagagccctccctggcagattgtgaaccgactaggccatgcctcttcacctgtggagagtggctctgaagcagggtactctctcttaccctgggccctgcactccagtgcagaagcatccagcacctgtggcagactggtcatctgaaaccttgctacccgggtaggaccccagcttccttgtcctctggcttccgagcgaggactgggtctcgggcagccttgcagcacgyagcacatcaaccgcggatcttcttgggctccctcaagggtgggacctaatgctactccagtctccctgctgtgggcacgcctctgcctttgctgttgacttgaggatgtgcttttaacctattgcacctggcttcacactgagtgggcaaaggacagagggcccactggtcgagggtccagctctttcggaggacagcaggacgtcttttgccccagggccatcctctgcacttttatatgatgaggtgcagcagtgtttctaattctctgttgcttgagaagtatggacatttccctagatcttttggca

SEQ ID NO: 696087 - DNA, 665 bp, Homo sapiens
gacatgatgtctgtccctgaggttctttatatgttatttggagagctgaaatactggtcccaagatagataggtaatcctaggctacatcctcagagttctaagaactgagagtttactgttgacagrtttagttagaaagggctacagggggatgtgaggcttgagctgggatagtaagaaaggataccactgagatgggtgaagaggcagagggagaggaattcaaggagcaaagcctggtaggcataaaaaggaatggattgtggatgtggacattaacatgagaatggacttgctggagaggacagccacgaaaagaaccagtgagactgaaggtgggccaggcaaggctaggctaagtcatggagctcctcggatgccaaattgaagaactcgtatgtgatcctctgggtaatggtgaggtattttatgttccaagaatgacataatgaaagtagagttctaggaagattacccagcgtttgggataacatatgatcaaagagaaagagtctagagaacagatggaatcaggtggctgtgtgaggaacagaggcataagttcggaagaccttggttggcctaaagatctgactgaattgttcatttgcagctatcaaaaatggattgaaagaaggcttctaggccgggcgcggtggctca

SEQ ID NO: 696088 - DNA, 600 bp, Homo sapiens
  misc_feature 571: n = A,T,C or G
tgtctgttgtcagtttgagcacacataaacattcagagggagagggaaaattctttttatccctacaacaccaagaagaatttgaacaaacagtccttgctaatttcccctgcgtttattcccattagaccatattcttttatcctgtaattgtatttctccgtgactcttcattcttcatcaaacataggcataaaaatacataaggttacctatttcttagagtcttcatttccaaatgaagcttcccgtgtcacataaaacttacattaaataaatatctatgcttttctcttgttaatctgccttttgttataggggcctcaaccatgaacttaggttgggaaggaaagagatttctttttccctacaatttgatataaagtctccatggcacataagagatagtcagttaatgttgcttatcatcatcatcatttttttctggaaagggccacatagaacatgttttargctttgcaagtcataccttgtctgtcaaaactattcaacactgcccttgtagcaggcaagcagacatagataatgcataagtgaatgggtgtggctntgttccataaaacttatttacataaacag

SEQ ID NO: 696089 - DNA, 633 bp, Homo sapiens
ggttacaggggagacagtggtaaaagtagaaacatttaaatcacatttgaagaataagaaatctaacatttttttttcagggttgtattgccctattcttctagaacagatcattgcgaagaaattttccccatatgaaataaatatttgcatttgagacctatctcaaacaacttgcctgtgttcaaaaactccatttctgaaaagttcaacaggcaatgggatctattaacactcttgtcccagtcacctttggatgaacatatacctgggtttcgggcatcagcttatgtgtaacactgaytgacacatcccatattgacatgagatttttagtgactttgtcctacattgttttgggttggaatcaccaatacagaactgtcaactcagtttaaaatgactacattttgcatgacattctcaagggaaggagaaaaacatctttcatttagtgaagatagaagttgtttgtccagagaatgccctgtttcccttcaattcacctgaatgccgtgataaatctgccgagagttctgattgtcacaccaatcatcaataaaagacacacggtctctttctccaagttgccgagtctgctttaaactttaatagtactatttttattagctc

SEQ ID NO: 696090 - DNA, 633 bp, Homo sapiens
ggttacaggggagacagtggtaaaagtagaaacatttaaatcacatttgaagaataagaaatctaacatttttttttcagggttgtattgccctattcttctagaacagatcattgcgaagaaattttccccatatgaaataaatatttgcatttgagacctatctcaaacaacttgcctgtgttcaaaaactccatttctgaaaagttcaacaggcaatgggatctattaacactcttgtcccagtcacctttggatgaacatatacctgggtttcgggcatcagcttatgtgtaacactgactgacacatcccatattgacatgagatttttagtgactttgtcctacattgttttgggttggaatcaccaatacagaactgtcaactcagtttaaaatgactacattttgcatgacattctcaagggaaggagaaaaacatctttcatttagtgaagatagaagttgtttgtccagagaatgccctgtttcccttcaattcacctgaatgccgtgataaatctgccgagagttctgattgtcacaccaatcatcrataaaagacacacggtctctttctccaagttgccgagtctgctttaaactttaatagtactatttttattagctc

SEQ ID NO: 696091 - DNA, 596 bp, Homo sapiens
aatgagctgggcttcaaattcttccagctgtggagtcatttgcaggttgtggagcaggacaagtctgttgcagccaggccaggtgccaattccaacaggcgcatgtgtcatctctggcacaaaaatcacaggtcaccaaaccctgatttgagtttaaaggaagaggcatgaataaggcaactctgggttgtaaagctcaggctgctctttatctccaaaaatttgtcttaaatatgattcttctcaggggtgtttttcccctcttttaagcaaaacaagaagtcaagtacttgtttaccctaaattgcattttttgatctctctcttctgcyctctctttccccctcagttgtgtgtccttcccagggagaaaagtggttcagagtacagcctgggggtggagcttggggctgtgccagctcattttcagattaggtatttcgtaacagagttttaggcatgtgcagggtttaggcttctacccaaggaatctattttcacttgcagggaaatttcacactgtaattactatcatgaagcaaaatatggtgtggggtgagggaggagaacattgttactaacccttggatattaac

SEQ ID NO: 696092 - DNA, 679 bp, Homo sapiens
attactgatcactctgtactccttcttgagcatttgtcaacaaattgctccaataaaagtacttgtaataaatttcacgtgttctgtgggttcattgccttgtaggtacaattcttctcagatatattgcagtttggtggttcaatgactttgtaatttaaactgtaacttatagaaggaaggaaactgacttatcttctgaaagtaatgacttaaagctactatattctgaagacctgagagtttcatggctctgttgtttctgtcttgtttgtgtgttcattagagtgtgctcaaactggagaggggataattgagtctgagaactgtctcaaatcaggaacttttgaagcaactgtgcttatttatgttagagaagaaaaaacaggagacacatgctaacattattcagatactgcaagtaaatatcattaagaggaaatagactttgatggtatttccagtagggctaaccagtaagcacyggaggtaagttacatgggggcagatttgaatttaatagaaaaatgtattttctatcactatccaacaatggaacaaattggccaatgctaaaaatataggctgggtaacttttgaggttataattactctccaacatcattgtcaattttaagtcaattcattcattgactcattcctgattcattcattcaat

SEQ ID NO: 696093 - DNA, 629 bp, Homo sapiens
tgcaggattgacccaggttagatgtgataaaatacaaaggcataaagaagtttggggtatggacaagagtgattttgaaatgacggattatagcttgtaagttggataaggagaaaagtaaagaaaggaacaggctgaaagattgcttaacacacacggatccgtagaccagaggctctgatgagaccgaagaggaaacagtttaaagcaatcagtagagaggcaacattgtggttgatgggtaatatgcttggatttattattttaagatagaacatttttacataatattgatgtctacaatattacggtgtccaggtgggtttcctggggttgagtggaggaaaagttattggaaaagagwcagctaaataaattagacagaaaatcatctcatccctactactgcgatttcggggaatcatggctggagaaggagattttgttccaatgcatgacctgttgttttcttccaccctgatagtcaatgtgagggtggttgcaggtcagggatttaagtaggatgctaagactggtgtaggttatcacaaagtacatacaacttaggggtcaggacagtaacacatcaggctggggagacaacagaagccaggagggcacaattacta

SEQ ID NO: 696094 - DNA, 1635 bp, Homo sapiens
tggttatgtccttggggtatgagcagcttgatttctcctgagcagagatgagtcaaatgtatgtgtgattttcttcaggaatttttttaaaataaaattttaatacaaaaatatatggttatttttcagtggaccgtacagtggtgtttttcagatgaaaatcattacttattaggtgaatggtgaaataaattggtgattcttgaccagcattgtctttaatacgtaagaagaatgaaggagggaagacaaaatattatagaataccccacattgtaagggtaagtgtatggtagacacacctgatagcaataacttaagtgtaatctgagaatgtggttgcacctgatccacataaactgcatgcatcttacaaatgagaacagttctcctgttcagcccactgtcactggaatgctttgtatgtaagtcccctcaattaaaccccgtgttttgttttttggctccaggtctcttctttggcctctcaaacctggtgtcatccctattaaagccagcagggggtctggcatgaaagtaagtattatattttttcaagaactgaaactcctgtttcagttatatacctgtaaattttatttttgccgttagttgtgttttaaaagattgaaagccatcatcttagagccatcatctgtcagcttacctttactccaaatcttccaaaaactataacaacttagtgataatttactatgacttcaagattcagataagaagtcagccagctgttttggtacaaaaagtcgatctgcacttatattctttgtgaccccgctcatcgattaaatcctcaagtttctatttctaatcaggttgtaacattggattttgtttggttctcttttgtcttgtctctccttattgcttattggacttcctaaccatagagctctttctattgtgcagtttacttattttttcccgcaatcactttgagaccctcttcaaagttttttgaagctgttgtttcctttataggagaaaggaagcatcaatggtaaaataaaaagctggaaaggaacagaaatcctgtaggtcatctgtgttctggactgctgttaccttagggagttcacaaagggtgtcccatggggtaggatggtttgaagggaatcgctttggatcctctgccttcacatattttctttcctaaaattggttagactgagaacatcttacagtcaagccatttctttcacagttgccctcctcctcttcacagaagaatagctcaagtcccaytgtatcttaatatggtgcactgcttcagggtgtaaaaacctacaaggcacaaaatgaatttaaaatgctggtgtgtgagtgtcaggaaagtgaatgaccttaaagactgagtaacaaattcatgtgcatatcaggtagtttcctaatcatacttttaaaaaatggaaaaagagcaaatttgtgctgattctagatcattaaaaataatttttcaaaatatatcatgtgatttttggcaaatagttcaaaaggagttctaaaatataaatggcattattgtaataaaactattctcatttacataacaggtaagccatcatagattacatctataaaaattaaaaactacaacagaaaaggtgctgagct

SEQ ID NO: 696095 - DNA, 1200 bp, Homo sapiens
aaaatttctatgtatatgggataagacattcaggaagtttatcgaagatgtttttgttcattattctttgtataacatagatcacaaacgtcatggaagaattgaaatgacagtaatttatgataaagtatcaacgttcagtgtgcaatttctcagttgttttcaatgggtttccttcttttctatacactsttgggtaaggggaaggacaaagatgtgttattagagaaaacttatcacagcaattagcagtggtagaaaagaaaatgtccacggagaaagtaagtgccataacatttaacaactagcagcaacttctggcaatatgatactaattaaatcttgaagggcctgtttcatcctttagtcttacacagattgttctgcccaggcaaaatgataactcaggtagttatatggataatataaaaactttatcttctgcccctgctttcttcctttagggaaaaaaaggagagaagggttgattctgaacttttgctttgcacaaagatccatattgcttgagcaaagcatacatgcatatgtgtatgtgtatgaattctcatatagacagaacacgcctattgttgtcattgtattagttatagaattgatattctgtacatttgtaacagccaagctgaacgcatcatatgcaacctccctcacttattgcacatattttcttgctaatatcggaagaaggggtcagtcgtcatgtccactgtcagaggtgaatcctagggttgtagctgaaacaattttagattttccttcttttttttttttttttttttgagacagggtctttgttgcccaggctggagtgcagtggtgcgatcttggctcactgcaacctccgcctcccgggttcaagccattctcctacctcagcctcccgagtagctgggattacaggcatccgccaccacgcccggctaatttttgtattttttgtagagacatggttttgtcgtggtagccaggctggtctggaactcctgaactcaagtgatctgcccgcctcggcttcccaaagtgctgggattacaggcatgagccaccacacccagccagtttttcttttttttaccctagaatgtcatccaaaacaacagcactgccttcaaagatggcgattctcctgcggtgagaagtgattgcatcactgtactccagcctgggtgacaggagtga

SEQ ID NO: 696096 - DNA, 1200 bp, Homo sapiens
aaaatttctatgtatatgggataagacattcaggaagtttatcgaagatgtttttgttcattattctttgtataacatagatcacaaacgtcatggaagaattgaaatgacagtaatttatgataaagtatcaacgttcagtgtgcaatttctcagttgttttcaatgggtttccttcttttctatacactcttgggtaaggggaaggacaaagatgtgttattagagaaaacttatcacagcaattagcagtggtagaaaagaaaatgtccacggagaaagtaagtgccataacatttaacaactagcagcaacttctggcaatatgatactaattaaatcttgaagggcctgtttcatcctttagtcttacacagattgttctgcccaggcaaaatgataactcaggtagttatatggataatataaaaactttatcttctgcccctgctttcttcctttagggaaaaaaaggagagaagggttgattctgaacttttgctttgcacaaagatccatattgcttgagcaaagcatacatgcatatgtgtatgtgtatgaattctcatatagacagaacacrcctattgttgtcattgtattagttatagaattgatattctgtacatttgtaacagccaagctgaacgcatcatatgcaacctccctcacttattgcacatattttcttgctaatatcggaagaaggggtcagtcgtcatgtccactgtcagaggtgaatcctagggttgtagctgaaacaattttagattttccttcttttttttttttttttttttgagacagggtctttgttgcccaggctggagtgcagtggtgcgatcttggctcactgcaacctccgcctcccgggttcaagccattctcctacctcagcctcccgagtagctgggattacaggcatccgccaccacgcccggctaatttttgtattttttgtagagacatggttttgtcgtggtagccaggctggtctggaactcctgaactcaagtgatctgcccgcctcggcttcccaaagtgctgggattacaggcatgagccaccacacccagccagtttttcttttttttaccctagaatgtcatccaaaacaacagcactgccttcaaagatggcgattctcctgcggtgagaagtgattgcatcactgtactccagcctgggtgacaggagtga

SEQ ID NO: 696097 - DNA, 980 bp, Homo sapiens
ggaaaatctgtcccagaaggctctctgaagacatatgttctcgtctcactggccatgattaagtcacacatgcatgcctttctgcagggacgcctggaaaagcagtgttggccatttccagcctttctattgggaaataagtactggtgtcaaggaaggaatgttggggtagacaacaaattactccttcttcatgtttctcattctctttctctaaaaagcaaaaaaaaaaaaaaaagttacctgccaaaataaagctaatacattccttcctgcactggctctggtttgcatattctcagatagtttcacttattgttctcttctctcttcttttatgtatttatttcacttcctggacactcttatccttttcatttgggtgggtggatgttatctaagatgctttgaggataacagataacagaaatacctctagacttggcaaatgaagttctggattcaagaatctctcctgcacctgcccactattagccatgtggtcacagacaaggctcttctctgagccccatctgtaaagaggaagtgaaattactcttctactgatttctggaactaattgtggaggccaaatgaagaaagacgtgtaaaactsttttgtaaattgtcaagtgctatgcatattaaatgagctgctgacatccaaggatccttgttgcacccagaaacacctacacttcaattgccttttctcattcactatactgaggtcattttgcaaagttcttactgtgagtcagagatttctccacattggctggaaagaagccaatgcattcacaagtaaacagcatttgagcagctgcacttcagaatcaggaatgagggacataatggcctgtctctccccttgactacattgccctggccacgtcactagagttaagcagttggataggactgtctacaatggagtatgctacagatttggagaaaaggctacagatggtcaactattt

SEQ ID NO: 696098 - DNA, 996 bp, Homo sapiens
tagggcttacatatgtcaatgttggtagatctcaaaaatatattaagtgaaaaatatcatagaatgatgcataccatacaatgtcatttatgcaaacacacacataaggaaaataacactctatatatcttatgaatacataayatatctgcatgtaaaagtgtgctttttaaatggcacagaaggacacataccagctctctctctgggacagaaatgaaaaagggatgaacctagctcaaagtggcttttgcttttctctataattttgttttaaaaaaagaatacatttgtgtcttacttgtgaaataaagttttgagtaaaccatttaagtaattaggaaggcatggcctaaatacatgagaagcttagtagtaagagttcaccgataaccacgacaacaatataagcaacatcacaaggcagaatagatgtattgctccaccatcagcatctgcagtaatggccaggagttcagaagaggaagagcttgctgagtgctggggagctctgaaagggggctaagaagtcagggcctctttgaaagtcttttaataaaggaatgctgtgaccaggtggagctttgtgaagatccatctgggcacaagggtgcaatgtgtttaattaaaaaattgcattatgagtgtagaggtttttctttttttctccttatacttgccaggtcctggaaattgaagatggtatcatacgatctaagatctaggaggaagttagaataggaaaatgagggatgctttggtataatcctcaagccaaatgaacaagtgatcaaggacccccaggagggtgtctggggatcaccaaagtttacttagtttcctccactggattgtgaatttcttcagagccggggctatgatgtcttccctcctggagccccagtgcatagaatagaacagtacaagatgccacacaacaggtacacctcagtgaacacttgttgaacgaacgaatgcttgcatgcatgaatgaat

SEQ ID NO: 696099 - DNA, 618 bp, Homo sapiens
accacaatatataatgaataattataataaaattgagagtccagacttgtctgagcttgtattgataaaattaccaaatttgagtaaaaggataaagaggggagaaaaaacattaaaaaagtagttgtgtatttttaaatgcatagagattcccccattttaaatcaccattgcaatatgaatagctttttaaatatgtatttattttttcagatgaatccctctccctttatttctgttctttttttacattagaaaaatctgactattttttaagtgatgaaaaaaatttgcaaacacacattatgaaatatkaagaatcttgggactcactgaccacttcagtgattatgaaaactgtaaactatttttaaaagcagatttttcactgttcttcattaagtctgattaccttgcccattagcatttggctcttttattatgatgattgtgaaatactgtagatgttaccactaatggataaaaaaactttacatggttatcttgattaactcatcaataatcatttggaataatttttcttcattcagtgaatggatcattcacatgccctagaataattgtctacatttaggtgcatgaaattagcataaaaac

SEQ ID NO: 696100 - DNA, 650 bp, Homo sapiens
ctccactttccctaaatcccatctgtaatggaacagcaataactgatctttttacaaagaaaattatattacagaggtgaacataatcaaatgctacaaaactgggtctaattttcctgaaaattaatcttaaaggaaaatactgggagtaattttatttttgacttgatttaacaatcaattttattaattttattgtcccttctcgggcagggctatctgcacaaatctgttgagctttttcagacaccatcagatyaacttacttgtgcctctgaggcagagatgaagtggctatttttcaaatctcaagtgccctacccacaggaaaggaatattatttttcatttaatgagctgtagcacatgaacaattaagaagacataattgaatgaagctaatcagcaaaaagcaagagcttgcctctgggaacctgctgaagttgattgcggctgttatctgtggttttatctgttaagctaatagtaccaatgagtgggaaaacagtgactagtattgcacagtcctaaccgcctcccccaccaagtcttaaattaaaaaaaaaaaaaacacatattgctaggaggactgatgatgccaatgaaatgaatgaattatttgttaactattggttagcctacagctatgaa

SEQ ID NO: 696101 - DNA, 650 bp, Homo sapiens
ctccactttccctaaatcccatctgtaatggaacagcaataactgatctttttacaaagaaaattatattacagaggtgaacataatcaaatgctacaaaactgggtctaattttcctgaaaattaatcttaaaggaaaatactgggagtaattttatttttgacttgatttaacaatcaattttattaattttattgtcccttctcgggcagggctatctgcacaaatctgttgagctttttcagacaccatcagatcaacttacttgtgcctctgaggcagagatgaagtggctatttttcaaatctcaagtgccctacccacaggaaaggaatattatttttcatttaatgagctgtagcacatgaacaattaagaagacataattgaatgaagctaatcagcaaaaagcaagagcttgcctctgggaaccygctgaagttgattgcggctgttatctgtggttttatctgttaagctaatagtaccaatgagtgggaaaacagtgactagtattgcacagtcctaaccgcctcccccaccaagtcttaaattaaaaaaaaaaaaaacacatattgctaggaggactgatgatgccaatgaaatgaatgaattatttgttaactattggttagcctacagctatgaa

SEQ ID NO: 696102 - DNA, 650 bp, Homo sapiens
ctccactttccctaaatcccatctgtaatggaacagcaataactgatctttttacaaagaaaattatattacagaggtgaacataatcaaatgctacaaaactgggtctaattttcctgaaaattaatcttaaaggaaaatactgggagtaattttatttttgacttgatttaacaatcaattttattaattttattgtcccttctcgggcagggctatctgcacaaatctgttgagctttttcagacaccatcagatcaacttacttgtgcctctgaggcagagatgaagtggctatttttcaaatctcaagtgccctacccacaggaaaggaatattatttttcatttaatgagctgtagcacatgaacaattaagaagacataattgaatgaagctaatcagcaaaaagcaagagcttgcctctgggaacctgctgaagttgattgcggctsttatctgtggttttatctgttaagctaatagtaccaatgagtgggaaaacagtgactagtattgcacagtcctaaccgcctcccccaccaagtcttaaattaaaaaaaaaaaaaacacatattgctaggaggactgatgatgccaatgaaatgaatgaattatttgttaactattggttagcctacagctatgaa

SEQ ID NO: 696103 - DNA, 650 bp, Homo sapiens
ctccactttccctaaatcccatctgtaatggaacagcaataactgatctttttacaaagaaaattatattacagaggtgaacataatcaaatgctacaaaactgggtctaattttcctgaaaattaatcttaaaggaaaatactgggagtaattttatttttgacttgatttaacaatcaattttattaattttattgtcccttctcgggcagggctatctgcacaaatctgttgagctttttcagacaccatcagatcaacttacttgtgcctctgaggcagagatgaagtggctatttttcaaatctcaagtgccctacccacaggaaaggaatattatttttcatttaatgagctgtagcacatgaacaattaagaagacataattgaatgaagctaatcagcaaaaagcaagagcttgcctctgggaacctgctgaagttgattgcggctgttatctgtggttttatctgttaagctaatagtaccaatgagtgggaaaacagtgactagtattgyacagtcctaaccgcctcccccaccaagtcttaaattaaaaaaaaaaaaaacacatattgctaggaggactgatgatgccaatgaaatgaatgaattatttgttaactattggttagcctacagctatgaa

SEQ ID NO: 696104 - DNA, 650 bp, Homo sapiens
ctccactttccctaaatcccatctgtaatggaacagcaataactgatctttttacaaagaaaattatattacagaggtgaacataatcaaatgctacaaaactgggtctaattttcctgaaaattaatcttaaaggaaaatactgggagtaattttatttttgacttgatttaacaatcaattttattaattttattgtcccttctcgggcagggctatctgcacaaatctgttgagctttttcagacaccatcagatcaacttacttgtgcctctgaggcagagatgaagtggctatttttcaaatctcaagtgccctacccacaggaaaggaatattatttttcatttaatgagctgtagcacatgaacaattaagaagacataattgaatgaagctaatcagcaaaaagcaagagcttgcctctgggaacctgctgaagttgattgcggctgttatctgtggttttatctgttaagctaatagtaccaatgagtgggaaaacagtgactagtattgcacagtcctaaccgcctcccccaccaagtcttaaattaaaaaaaaaaaaaacacatattgctaggaggactgatgatgccaatgaaatgartgaattatttgttaactattggttagcctacagctatgaa

SEQ ID NO: 696105 - DNA, 634 bp, Homo sapiens
gaattcattgttaaagctgtaagttacaacaatattgtctctgcatgctgactgtaatcctctataatcttcaaaggcaaacaggaacagtaataatcttttcatgtactcttaacttccttctctgaaaggctagaaaatgtcttacatgtagcactcatagtgtcatttaatcaaacccagtttctatttttcttcaacttctagatgaatggatgcttagtctttcgggcacaatgtgaatttcttaagggtctgtagactacatctcctatttttacttctcaaagtttctctcaaattgtgataaaaagtttcactctattggtactrttaactgccaaccactttgaaggcctcctcctccacttttttctttttccccatatctaggcaagcagtaagaaaactcagagtctctattccttggctacggcagggaagttcaaaccatttaaatcctgaactattggggctgagggtaagggactcacttgggcccaacccttaaccccattaaataccagaactccactgactcttccttaggtttcacttcccactgaacctgagccctttttgttgtggattattttgccctttagtaggtaataataccatgtaagtaataaat

SEQ ID NO: 696106 - DNA, 634 bp, Homo sapiens
gaattcattgttaaagctgtaagttacaacaatattgtctctgcatgctgactgtaatcctctataatcttcaaaggcaaacaggaacagtaataatcttttcatgtactcttaacttccttctctgaaaggctagaaaatgtcttacatgtagcactcatagtgtcatttaatcaaacccagtttctatttttcttcaacttctagatgaatggatgcttagtctttcgggcacaatgtgaatttcttaagggtctgtagactacatctcctatttttacttctcaaagtttctctcaaattgtgataaaaagtttcactctattggtactgttaactgccaaccactttgaaggcctcctcctccacttttttctttttccccatatctaggcaagcagtaagaaaactcagagtctctattccttggctacggcagggaagttcaaaccatttaaatcctgaactattggggctgagggtaagggactcacttgggcccaacccttaaccccattaaataccagaactccactgactcttccttaggtttcacttcccacygaacctgagccctttttgttgtggattattttgccctttagtaggtaataataccatgtaagtaataaat

SEQ ID NO: 696107 - DNA, 993 bp, Homo sapiens
atgaaaatatgttattgtggataatatattaccctggatagatttaggggataattttatcaatatggtgaaattttaaaaacttgttccatatatctcaactttgagaaaaaaaactattgagagtgtttgtgacctgtttaatagaagcaaatacagttcctttaaaaagtcagggtcttgctctgtcacctaggcctgagtacagtggcatgattatagctcactgcagccttgcagactcaaaaccctgcatccaagtgatccttctgcctcagtctctcaagggtctaggactacaggtgggcactaccacacatgactaattttattttcattgttttcctttttatagagatggggtcttgttatgttgcccagagtggtctcaaattcctgagctcaagtcattctcctcagcttcccaaagctttgggattacaagcttgagcatctacacttgaccttaaataatatattatgtaataatgaggtgattgatatgttctgccgttaaaagtaaacacctttctttccattctgaagcatgtgtatctttattgtttttattaatatactaaataaaagaaaacatggtatatttctttctttagatcaaatatttttctattgatcttttagtcgaatcttaattttaaatgataaaatgaagactaccatttaggcaatagatttttgtstaccattttaacttcaagtaaatggtggtagctaaatagatctacctttgaaagtttgttgggtaggtgttgaatatgctttagagggtgtctattttcactcattttctctttgaaagcagaaaaaaatcaattccttttctattaagacttgtaaatgaggtttataattgaagcaactgatatggttgattagcatatgaacttttttttagtagaaattgggagttgataatcttatctactgaatgcttgtatgttagaatttctatgtgtttggataccattaacc

SEQ ID NO: 696108 - DNA, 643 bp, Homo sapiens
ctcactgcagccttgaccgctcgggctcaagtgattttcccatgcagctgggaccacaggtttgtgccatcacaygaagctttttttttttttttttttttttttggaagagacaaggtctcactgtgtttcccaggctgttctgaaactcctgggctcaaataatccttttactttggcctctcaaagggctaggattacaggcatgagccaccacacctggcttccttttattttaatagtggttactatgtgggcttcataacccgttaatgcatccccaactcagagctgtaaaatactgtttcagataagcaatatttactcccatttcattcatctatcaatcaatacatgtctgttgaacatccttaatatccaacgttctactcatagtgctgtatggctcatagacatctgttctccagggtctctggccctgggggactgagaagttctcttgtgtggtcacaggcactcaggtttcactaaggttaatgggttgggaattattcagcctagataaccaaaagactggttattaaccaaataaccaatatttcctgctactggaatgggtcagtaatgggttcataacaaaacacaatcaaagaagacagtaagaataaagttcagaggcatg

SEQ ID NO: 696109 - DNA, 1306 bp, Homo sapiens
tgacccccgcccctgcccgccagagaacaaccccctttgactgtaattttccactacctacccaaatcctataaaacggccccacccctgtctccccyggctgactcacttttcggtctcagcccgcctgcacccaggtgaaataaacagccttgttgctcacagacgcgcgtgacagcgatcctgcccccttggcctcccaaagtgctgggattacaggcatgagccacagcgcccagcctgtttgggtattttttaaatgccaagttattttgtgccctgacacatttcaggccacctctctgcccacataattttatgattatatgaccgcatttactgataaaaaacgaccaccaaaaatatctccttttcaccttggcttaatttaagactgtcactgaagcatttgatgataatgtcttaggcatctaaaatggcaaaattgcaggcctgtggacaaattaacaattcttctttggttcttgcattggaggttctgatacttcaaaacatagactcctttatgatttgtattaaagggagagcactataggaggaaagaatcagagtaacaatgctgttatcgaaaatcacaaacctttttggaattgcatttgatgcaaaattatagactgtcttcaacttcctttttgcagctgtgagttgtttagtatttaaccatgcaaccttaaattacagagaagatgggggaaaaaaatctctgttcagggcgttgtctccactcatctttgtagatatcttggtgtgaacatagcgtaatattcccattaattgttatatagactaattctaacactgacttctaggttctttgtgtagttttgacagtggtatattcataaaatggaaaatctggaaatttttcaaagctgaaataaaacggcaaggatttggaactaaaatcaagggtttaacctttaaaagaaatcaacttaattgtaaatttcacttcaaacatttcccgggatctggagaaggcaaactgcagaaaggtcagccagattgcagttgggcagaaaatctcatttaaactgtattatcacaaccaaaaagccctatttggaaatcagacgtaaataatgccaagcaatcagggaggtaggaaggacgggtggatctcagtgcctgccccagcccctgactgcctctgacgagaggtggacatctgttctgctccgggggcagaggcaggagtatggagctgtactgctgctttcatcacccaatagccggtggccttagaaaaaagcaaattaattttggaggcttcagttccctcatc

SEQ ID NO: 696110 - DNA, 2518 bp, Homo sapiens
aaagaggggagaattgggctgatccaaagctatccaaaaaactgtcctacaggacgtcatggagatttttctttccttcttttttttttttcttttaagacagggtctcactctgtcacccaggctggaatgcagtggcaccatcacagttcactcccacttccacctgccaggttcaagcagtcctcccatcacagtctcccaagtagctgggactacaggcacacaccaccacgcatgtctaatttttgtatctttagtagagacgggattttgccaggttgtccaggctggtttcaaacttctggacgtaagaaatccactaggcttggcctccaaaaatgctgggattacaggcttgagccaccgccctcggcagggattttctgataatctgtcaatgaagtcgttccaaactctcccaaccccccaaaatatgtttcagtaactttccaatttttatacatttgccccatttagttatagcttcatttccacatatactacctggagctattatgtatcataattcttaactaatcaaaatgcttttagtcctttgggattattaaccagatctgttgaaaatttctagtaattaatgttatactctccattatacttggtacagactcttctgtacattttcatccagagagccttctttattgtgggttaaggaaggaaactagcccctgagctccagtaatcctatcaatgcttctccagtgtcagataagtcacattgctatcattttctgtgtcagaaattaaccaccattcaatggccttgaaaaagaatgagattattgacttcaccattgatttaagcaacaggggaagtaaatgaagaatgaagtaattatgtctttaatctcttccataggcctggaagatttattccagtgtgaaaaatcatactggaagtccttacttccaaattttgagattacccaagtctagagactttaaaatgatcagtaacagaatttttctaaacactttaccttatagtcttcgccataatttgtaacatatagttgaaaaacatctcactttgtaaaaaacaggtacagagcatgcaccaaagtgccttcaggaagcatgtccaggccaggcgctgtggctcacacctgtaatcccagcactttgagaggctgagccgggaggagcagttgacctcaggagttcgagaccagcctgaccaacatggcgaaacccccatctctacaaaaaatacaaaaattatcagagcatggtggttgcatgcctgtaatcccagctactcaggaagctgaggcaggaaaatcgcttgaacctgggagatggaggctgcagtgagccaagatcgtgccactgcactccagcctgggcaacagagcaaaactctgtctttaaacaaaacacaacaacaaaaacaagcaggcccagctcagcattcctcaatctgagcactgtggggcccaagatgtccttccacctctttcctgatctctgcctacagcagtcttgacctggagactcacagtccactgtggtctgttaaatgtcatctctatcctctccattctccaatggcttcctaaagcacattgaatgaaatacaaatcccttattgtaacccctatggatggaccccttctccccaggcatacagacctccctgctgttccacttacaggcccacccatgctcaggcttcaggtttttacccggcacttgctgcccctctgtcaggaccactcttcctcttctccaggctcctctcctctaccaatccttccctgcaattaagtcacaagtcatttcctcacagctgccttccctgaacagccggtatttagaagcatccccttttcctttccagtctccaatccttatttttcttcatttcacttatggcttcctggcatgcttcatattatttatgtgtttattggtggtttccccaaaagagtagaagagctgtaaggagaggttctatgcccagtgcctacaaaagtgcccgacattagtaggtattcggtaattatttgttgaattaattaaaatgaatgaatgaagaaactgcttggctttcactgggcaaggtgctgtccactgttaatgayataggagttaaaaatatatatttaggcagatagtgagggtaaggaagtcctcaataaggtttccttgtaataaaaagcatcctgaaaatcatttcttttctaacaaaaagcagtctgaaaaatcaagctgcaagcataggtaagcaaactagaagctttcataggtaaatgccgcagctgtgccaacaggaaaaggctacctgggggccaggcatgttcaacctggtggctccatctttccttttctttgtctgtcaaccatgtgtacagtgaggaacagacaacatggcactggacaggtagggaacccatctgcataataaaagattcgggtgggatggccagcttctacgcgcgctatgcaaacgtcacacctggtccggccaatttctcaggccctgtgtaaa

SEQ ID NO: 696111 - DNA, 2518 bp, Homo sapiens
aaagaggggagaattgggctgatccaaagctatccaaaaaactgtcctacaggacgtcatggagatttttctttccttcttttttttttttcttttaagacagggtctcactctgtcacccaggctggaatgcagtggcaccatcacagttcactcccacttccacctgccaggttcaagcagtcctcccatcacagtctcccaagtagctgggactacaggcacacaccaccacgcatgtctaatttttgtatctttagtagagacgggattttgccaggttgtccaggctggtttcaaacttctggacgtaagaaatccactaggcttggcctccaaaaatgctgggattacaggcttgagccaccgccctcggcagggattttctgataatctgtcaatgaagtcgttccaaactctcccaaccccccaaaatatgtttcagtaactttccaatttttatacatttgccccatttagttatagcttcatttccacatatactacctggagctattatgtatcataattcttaactaatcaaaatgcttttagtcctttgggattattaaccagatctgttgaaaatttctagtaattaatgttatactctccattatacttggtacagactcttctgtacattttcatccagagagccttctttattgtgggttaaggaaggaaactagcccctgagctccagtaatcctatcaatgcttctccagtgtcagataagtcacattgctatcattttctgtgtcagaaattaaccaccattcaatggccttgaaaaagaatgagattattgacttcaccattgatttaagcaacaggggaagtaaatgaagaatgaagtaattatgtctttaatctcttccataggcctggaagatttattccagtgtgaaaaatcatactggaagtccttacttccaaattttgagattacccaagtctagagactttaaaatgatcagtaacagaatttttctaaacactttaccttatagtcttcgccataatttgtaacatatagttgaaaaacatctcactttgtaaaaaacaggtacagagcatgcaccaaagtgccttcaggaagcatgtccaggccaggcgctgtggctcacacctgtaatcccagcactttgagaggctgagccgggaggagcagttgacctcaggagttcgagaccagcctgaccaacatggcgaaacccccatctctacaaaaaatacaaaaattatcagagcatggtggttgcatgcctgtaatcccagctactcaggaagctgaggcaggaaaatcgcttgaacctgggagatggaggctgcagtgagccaagatcgtgccactgcactccagcctgggcaacagagcaaaactctgtctttaaacaaaacacaacaacaaaaacaagcaggcccagctcagcattcctcaatctgagcactgtggggcccaagatgtccttccacctctttcctgatctctgcctacagcagtcttgacctggagactcacagtccactgtggtctgttaaatgtcatctctatcctctccattctccaatggcttcctaaagcacattgaatgaaatacaaatcccttattgtaacccctatggatggaccccttctccccaggcatacagacctccctgctgttccacttacaggcccacccatgctcaggcttcaggtttttacccggcacttgctgcccctctgtcaggaccactcttcctcttctccaggctcctctcctctaccaatccttccctgcaattaagtcacaagtcatttcctcacagctgccttccctgaacagccggtatttagaagcatccccttttcctttccagtctccaatccttatttttcttcatttcacttatggcttcctggcatgcttcatattatttatgtgtttattggtggtttccccaaaagagtagaagagctgtaaggagaggttctatgcccagtgcctacaaaagtgcccgacattagtaggtattcggtaattatttgttgaattaattaaaatgaatgaatgaagaaactgcttggctttcactgggcaaggtgctgtccactgttaatgacataggagttaaaaatatatatttaggcagatagtgagggtaaggaagtcctcaataaggtttccttgtaataaaaagcatcctgaaaatcatttcttttctaacaaaaagcagtctgaaaaatcaagctgcaagcataggtaagcaaactagaagctttcataggtaaatgccgcagctgtgccaacaggaaaaggctacctgggggccaggcatgttcaacctggtggctccatctttccttttctttgtctgtcaaccatgtgtacagtgaggaacagacaacatggcactggacaggtagggaacccatctgcataataaaagattmgggtgggatggccagcttctacgcgcgctatgcaaacgtcacacctggtccggccaatttctcaggccctgtgtaaa

SEQ ID NO: 696112 - DNA, 607 bp, Homo sapiens
ccagctttttcctgggtgtagcatatggccattgactctgatcttcctgactctggcaagctctgaatcttccattctcctacccaccacccagccaaaggaatctctttatagattggagaaaactctcctagtgtttccggccatgattctttggctatctagaatcaggagttctgtcctttttatctcactgtgaaaaccatcgaaatgctcttawgtgcttaggcttctggaagataatagttggaaaggtaagtattttacttccaaacttcagttttcttctctgtcacatgcatgaaatgagctgatgagcacagagcaaactctttgatgaactggggggaaggaaaggagagaagcaaagaggcagtacagtgagaagaaaagaaagatagattcacaacttggtgaaatggtcacctgtctcccaataagctatagacagaaaaaaaattacttggtgcatggcttgagtttccaaagaaaaggaggaatgaactcacttttgactaagtgtttgaacactaagcttagtgtcaaataatgaacctttgtggttctatataaccattttcttataaaaacattttcctatagttat

SEQ ID NO: 696113 - DNA, 672 bp, Homo sapiens
tagatgaaattgctgagtcaaaggtcaggctttaagctgtctattagcatatgagggttaaaagtagagaccaggggccagattatcagggctcttctttcttagctgtaagaccttgggctatgaatttaacctctccattttcttaccagtaagataaggataataatatattctatttcatagaattagtatattaacatacagtgcctggaacataatgactaaataagtacttgttaaacaaataaggtctctgagaaattcttgagaaaaaatttgacgtagagttttcctaacctactgctctcctttcttcctcccttgcccccaacaataactttcactgcgatacctatgctttaaaacactcattagaaaattcactgaagaaagtttcttgaaattacttttctttatttttttactttatttyattttcttttagagacagggtctcactatgttggccaggctggtttcacactcttggcctcaagcattctcccattgtagcctcctgaatggctgggattacaggcatgagccacaatgcccagcttgaattcactcttaataaaggatttttaaaaaaaagtttaaaagggatctccagtgtacatttcaatcataattctaaaaggctcagaaattaaaagagaaaattccaaa

SEQ ID NO: 696114 - DNA, 602 bp, Homo sapiens
tattttcaacaaggaaagtctctcgatttagttttaaagccagttcttagaagagaactgatcagtcatttctacctattaaccagagttctgcctactctaacaaatgaaaaagaattctaaatctcctaatctccggttatttacttttctcactgaaacaccatgaattgtttcatttaataaatagacatatactaaattttcagttatcctaaatatattctgctaaatagcttttactgattgggagtaaaaatttaagtccaaaaatataattatttagattttaaaaatgtatttcattttgttttccctttttgggtactgctgtaattttcaataaacaacaattgttcttgtatcattttctgtcattacgtttttttttttttccycaacaatttcattaatttacatttgggttagtcactataaatatattgataatcttaatctgcctttgattttactttgctcaaaattttcaatggtttttaatccacctggtcctctttctataaaccactttttctaaacaaagaaatattcaaatgtcattatgttgtttgctaaaacacacccagtccattgattttccc

SEQ ID NO: 696115 - DNA, 628 bp, Homo sapiens
tattatcaactacatgggaagttgtgcacccccatgcccacctacttttttttttttaatttttgtagagatgggatctcactatgttgcccaggctggtctcaaactcctggcctcaactgatcctctcgcctcagcttcactaagtgctgggattgcagatgtgagccaccgtgcccggccagcaaatcacagagttttaaagcccaagggaaccttaacttcttcttgaatcccatcccccaacactttaagaccaaagcccttgcaactatacaactcgtscaactatacaactcgcatcaactacatgggaagcaaaacatgaatcacatgatcagaaatgttaaattttatgccttctaattagagatgctggttcaccaaggataagctttttattattatcatttggctttacttgagaattttaagaagcctggaagaatttattcacaggaatttaaaaaaaaactatgcctagtttatgaaaacatatcaaaatgcttcttttctttcttctttttttatttttacagaggccaaatttgcatatttgaaatacaggaattttaaatgtacaatttgccaaatttttataactgtatataccaagtaaccatcaccc

SEQ ID NO: 696116 - DNA, 3155 bp, Homo sapiens
accatggagacaataggcatcatctgtcacagattatctttcattctaatcaaaagagacattttaaacaagctttttaggatctctgaaatattgtctactcataatcatgtattataaagttcagctgttttaaaagttaactataccaggagtgtactcattaggtatgataacaagttaactggttaatctcatacagatggaaagttcttataagttagacatttttgagttgtgcacctatatttggaaagaacaacttttagtcatatccctcatatatctgttttgacgttttatgtcagccttatgtttaaatgtgatacctcattataacgtcctaaaggcaagaaacaatatacccaaataaaaatatgtctatgcttctgtgttataatttataagactggcttcggtaattgaataaacatgttaaggtattttatttcaattatttatactccattgagttgttcaaatgagtatgaatccttctagcaaaaacccaaccctcctttggatctattcgcaaggtgcacttcaaaagtttatcatatagtcgatgtttgtaattctgtctgtattatttcttcaagaatacctatgcaccttgagggaaagttctgccttattcttgcataagctcaataggcacacatttataattcaatgcttgtaatattttctcccatttctgagatacttaaaaaatttaacctcattatcaccatcattacctcactatcaccatgaaaatctcagtgacaaatagagcaacagtgatcagcttgtgagtaaaagccaaataccaggcactaacaagagttctcttttcataagaaaccttcaaggtcactgcatgaggacgaggccaggccagtattcaacatcggatttatagatcctaaagttggccactttcctctttgccatgctgaatctttaaaataaatcctaattcaatcttttaacctaatggcatgtccaagtcaaattttttactacacacttttcccagattcacctcttttattatatattggaaaatataatttcacaaagattatttcgaataaagaggtaatttttccaatcgtgtaaatgaaatccacaggaaaggagagctcttctgtataaatagcacaaattcagaggaatgcctttgcaaactctatgcttcaccaacacagatcttccctaggaagagaattcaagattgaccccaaaactcatctcctgaactcagttgatacatcttttcagtaactgccaaagcctcatttgcaatttcaaatacctttgacaaaaagccaaaatgttctgaaatgtcaaattcacttgtactttacttcttccactctaatgttttcaataaatatattgtcagctacagcaacaatttccaatttcccttgtaaataagtgaaatagcttgggaggatcttctgagattgcattgaggtgtgctcacagggctatttcatttataaggtgtcaagtcaggtaggtgggctgatctgtttcttcaagtagcatctgtgtaatagggtgttgttcagttaagagcctgagtcctgcatctcagtgtcttactatgggatgctgaacaagctaaacttttttattttattttatttttaagttctgggatacatgtgcagaatgtgcaggtttgttacataggtatacatgtgccatggtggtttgctgaacttatcagcccatcatctaggttataagccccgcatgcattaggtgtttgtcctaatgctctccctcctcttgtccctcatccccctacaggccctgatgtgtgatgttcccctccctgtgtccatgtgttctcatttgaacaagctaaacttcctaaacttcagccctaccatatgtacattggaaattataacagtgccttgtatggcatttagtcacaatgtctggtgtagaatagatgctctaaaattattattattatatgctgaagggcagacatctcatcttatttttttttttcacttaaaagaatatattttttcagagacaagatctcgctatgttgctcaggcaggtctcaaactcctgagctcaagtgattttcccatcttggtctcccgaagtgctgggattacaggcgtaagccaccatgcttgggccacatcttattttcattgtgttcagaatacaatatagggttgcatataacagcattaaatgaactgttgtcatgcttcccttgctgatgtgtgtgcatatctgtaatccactttatggggggataaagttttgtttgggctcatgtcggaactgacggagttgtctcttcattagaaactggagggtctagtttaaaactacactgtaaagacgtgatgtggccttagttatggcatttaaatagtgggtttaactcatcaaatttccctaataatataacactaatatatttagctagtccacagaaacacatatttttgtagattttctttttttttttttttttcggagatggggtctcattctgtgtcccagtctgtaatctgtagtgcaaaggtgcaatcacacccattgcagcctcaacttcccaggctccggtgatcctcccacctcagactcctgagtggctggaaccacaggtgcatgccaccatgcctggctaatttttttttctttgtagaggtggagtctcactatgttgcccaggctggtcttgaacccttgggctcaagtgatcctcccaccttgacctctcaaactgctgggattacaggtgtgagccaccacacctggacatgtagatgttcaataacaagaaatgtaaacagtaaagatatagtattagagacaattatmtattttttaagacctccagacagcgattattccttcagctgcgagaaaacgtaaatgcaaaatacctgcaaaatgcgatgacttcctgtaatgtggcatcacaggcaagctgtggcttttcagaagatacattcaccctgttaccttacagctctaccaagtgggacaccccagagatccttatatattatgtctttttaatagttattcccagacattgtttctctgcatttattttcaaagtattaatccaatttaacactcatcttcctggcaagaacagtaaagggtctgaaatttta

SEQ ID NO: 696117 - DNA, 2753 bp, Homo sapiens
taatagtaggggaaattcctgcaagaattgcccactcccaccctctcatttcacagatgaagtcccgtgacccagaagtgcaaagccatctgttgccgctcccatcctattggaaacatagccctgactcttcctctgagttggggtccagggctctttctcttcctctaaatagccacctcagcagagcctcctggcaagtaggatttagtctacaccaggcttcctgcatgccactatttactttcctaatgaagacagaaaacgaggtgtgaaggcagcagcatgttagatttttcagttctaatgggaagaataaaaaactcactatgatgcactaaagagccattagtgaaaacagttttaagtccctacctcaattcccaagaaagctgatggagaaaaacggcagcttcaacatttgcactttgacttgcctttctccatgggaacttcagatttccttactacagctaacacaatcctaaatttctagtgtggctttcagggattaccaaagacagaatgttgaatgcattgtatggtttctgtcttcagtcataggaaccattctttgctctaggagtagcaatgagatccaaatccaggaaatatggcaatatcttcgatttacatcattagccctcagtatttttttttttttttgagactagaagcagaaggctgcttcatgcctggctgcctatcaaaagaagcaattttcataaatctatagctctgaacaatgaaaacggttcctttcacctctgctgaatcagtgtctggagcatcagggacaggggaaaagttctaacattagcttttttcttctacctgctgctaatcagagtgcaagcgagaagttgtattcttctcagggccagtaaagcagggaaagaaatcactagtgctcctctccggtctgaggatcaaataaacagcctttttttatcatccagctgctaggggtatggcttgagctacagacagctcattagaaagaaccacaaagttagaaatttggcctttggggggaaaatgtcattcttcaaattccctgtcttgtattctttaactaagtacatatcctttttaggggccagatgggatggggacacctgttttgaaccttaagacaataataagagcttagatatttactgaaggaatgaaatggtctgtctgaaagttgcccagtttcacaactgttgttccataaaaccaaagagaacgatgcttgccacgtgggtaaaagctgactttagttgacgtctcttccttcattctttttcagctcacacatcctctccattctctgaattcccacaaagactgttattgctggggctcataaaattatactccaaagtatgacgctttggcatccagagtgctttgaactaaaggagactgaaggccccagaagccaagtttccctctgaccttctcctgccttcctgtcttccaccccctacttttcccctgaagtgagtcctggaaaccagaattcttcttgcccaaagcaagccgtgacaccctggaaatatcactctaaccttccttgcctttccgtgtggcagctggccatgaagaaattctctgacctaccttgtttgatagcagatcacaagaccctggttccagagcggtcctgctttacaccgagggaaaggaatgtcatacagaaaggccaagaagaatctgaagagatgtccaatcacctttgcacgtggctgcccattcttcattgaacctaagcattaaaatagacagtttcccctgggtctttgggtcttcatttctgaagactccatgtcatgtaaaactttgattaaatgaatgtatcatgcattacttttgctaacctgtcttttgttatagtagtgtcgcctgtgacctttatgatgggtaaggaaagatttcacatcttttctacccctacattatcatactgtgaaattttattatatgctgtcttgccctcatagaaagagaattttggagtttgaaagaatcctgctaatcatgaaatctggtcctttatttaacagaaaaattcccagagacatgaaatgattagtactgtttcacagagaagcagagggagagccagaccctcagtcagtccaggctctgctgtctttggaggtggggtttcaggtctccccagcagggttgtgaggtcccaaagaacgggaggcaggccttgggccatagtctcctgcatccctccagagcctgcagcaggagctgggcccaaggatgctgckgagtgagtccacatgactgacatacactgctctggaagcaccattccggcagactagccctcttcttcccatgtaatccaggaaggttgttatagatagtccagatttttctagataatcttgtaacatattcacattcaacatacatacaaaaattcacacttggtatgggtaggagaactgtgcagacttcagtagaatttatttattaaagctttctgtagacggtcatttaaggccagcaaaatgttttcgatctcaggggttaaatggattcaaaacagaaatcagtaaagctgtcattgcagatttctgtaatagagaggcaagtataacaattgattaagaactctatccctttatatctatagaacatataaggcccctggatacccctggacctcaacgctccacattccccatttcagaaatccaggaggacgtgtggcaccgtgaggggaccacagagaccctgtctctcct

SEQ ID NO: 696118 - DNA, 1330 bp, Homo sapiens
aactctaaccagtgaaagatttccatttaaaaacaaagaaactattttcattttagttctcaaaaaatatttagaaaagtagaaattactggagtttagatgacaatatattgaagctcaaaacaaaaataaaatttaactcttaacatgcgtacacacacacgcacataaaaaactcacgtgtggccgggcgcggtgactcacgcctgtaattccagcactttgggaagccgaggtgggcggatcatgaggtcaagagatcgagaccatcctcgtcaacatggtgaaaccatgtctctactaaaagtacaaaaattagctgggcgtggtggcgcatgcctatagtcccagctactcagaaggctgaggcctgagaatcatttgaacctgggaggtggaggttgcagtgagctgagattgcaccactgaactccaacctggcgacagagccagactctgtaaaaaaaaaacaaaaacgaaaaacacctcatgtgcacatgcaaatgcacacaagtatagatggaggcatctatcagtaaatacacgtattactcagacctggtgggttatctccacagcctgtccaaaatccttggggattataatcctatccaccaaattcttcctctgtgttgatttagattttctaaaaagagaatgatacttaaattgataactataatttggacagattaacatagcaaagtaaaatattttgaaaaataattgcttaaccataatcatttttttagtaattttattttgaaattcttgtggactcctaagttttctccactgtcatcttctacatgactgtaaacaaggtggaggtgtttgagacatggtaggcctttcattttgtttttatttttgctttttagcaattatggtgataaactgccttgaatccttgggctgaaaagcaaaatgttttgagatgcttagagttttaaggaattagatctgaatttgaagaaggcattttagtttataccaatgctcactgatatggtttgaatctgtgcttctgcccaaatctcatgtcaaattgtaatccccagtactggaggtggggcctggtgggaggtgactggatcataggggcggtttctcatgaatggtttagaaccatccccttggtaatcttctagtgatagtgagttctaaggagatctgattgttgaaaagtgtgtggcacctccctccacattggtcctgctcctgccatgagagacatctggctactgctttgccttctgccatgaytgtaaatttcctgaagcctctgcagaaactgagcagatgccagcatcatgcttcctgtacagta

SEQ ID NO: 696119 - DNA, 1213 bp, Homo sapiens
ccaggtaataaccactcacccatgagatgtactgccttggtgagatagtaagctgtctattgctacagatgctctggcaggggcaatgtaacaataaggtcacaaatactgctgagaggagccctgcactgagtggaagatcagaatagatggctttctaaagtccttttcagcatggcattctttcaatatttgtttagatacagagatattatgactaaatgtttgtgcacatgttttcacccacgcatagtagattgttgttctctgcatttgtctgcgcccctcccttatccacaacttttacctgaactcaccttctgtgattggctaactttattttctttggttctttcacctcttgttttccagaaattaaatttttggtacaatatatattttttgactttagtgaatattcttatgaactaaaatttttttctgtttccttaatttttaaattataaaatatattcaaaagtgtatgaaaactaaaatatacacatttgattgaatgcgcaaaaatgaaatgagcttttgtgaatctacctcccaaggcaagaaacagaattttttttttttgagacagactctcatgttgccaggctagagtgcattggcgcagtatcagttcactgcaacctccgcctcctgggttcaaatgattctcctgtctcagcctcccgagtagctgggactacaggtgcctgccaccacgcccggctaattttgtttttgtagttttagtagagatggggtttcaccatgttggccaggatggtctccatctcttgaccttgtgatccacccgcctcggcctcccaaagtgttgggattacaggcgtgagcctctgtgcccggccagaaacagaattttagcagtacagtcgtctgtcagtatttggggggaattcgttctgatactcccctcaaataccaaaatctcaggatgctcaaagccctgcagtcggccctgaggatatggaaggcagactgtacttcagggcctcccatgtctctctctaattgcatctktctctcacccacatgctatactgcattttgcagaaattattcccttcctttctttatattttatcacatatgataggtcccttaatgatctataatctggcttttgattgcttttgtattttgtataaatggaatcatgctatatgcattcttcttgattttctcgtgcacagcatta

SEQ ID NO: 696120 - DNA, 1146 bp, Homo sapiens
attccgtgaggaggcacagcaattgcatgacactcctggcctctgccccttcctctctttcgcaccactcttccaggtcattacaggactgccctgctgggtgaggcctgagtcttcccgaacacatgatgaccttatagctaagtccaccacattctgggtttaggacaagtcctcactccagttatgagccatgctctctatacttcagcattaaccacaatacattttggtcaccttattgtttgctgtttggtcttatcctcaatttctttaaaacttggttgatgaaaagggtattatctattgaatatctctcctagttcataagcaagccattgttcccttcagcactttttttttttggccctcagggattctaaaacagctgtctggtgtctctgcttgagaagtcattgtcacagacttaacttttcctggaagggtacatttgcagctcaacaaacacatcccaagagctaagcatggccaatcccaagcttcccaaactaagtttagggccccatgccaggctttttggttatcttgcaactcagaagcaatatttccaatggccaaatatttctttggaaaaagacaaacatggccatgtggacccctgttgctttttgcccgatatcacagtcccatagtcaaggaggcaaaattctatcccatgggagaacagctgagcacgtcctctgaggttgtggatactaccacctagatgaatctctcagatacctttgggttcataatattgtcttcacacagcgtcttaatatcattgacttcacgtttattgagcccgaagggatgcagaggtaaacccgacatgattccccatcaaagaactcttggtctgaagtgggagagatgcataaattaagaattataatgtaatacgaaggatactgggcattacaggtacactggaaagagtatctaacccaagggtgggtgggtggaaaaagaaggtgtcaaagaaagtcttctataatatcagatttttttttttttttttttttttgagacagagtctcactctgtcccccaggctagagtgcagtggtrcgatctcggctcactgcaagctccgcctcccgggttcacgccattctcctgcctcagcctcccaagtagctg

SEQ ID NO: 696121 - DNA, 1146 bp, Homo sapiens
attccgtgaggaggcacagcaattgcatgacactcctggcctctgccccttcctctctttcgcaccactcttccaggtcattacaggactgccctgctgggtgaggcctgagtcttcccgaacacatgatgaccttatagctaagtccaccacattctgggtttaggacaagtcctcactccagttatgagccatgctctctatacttcagcattaaccacaatacattttggtcaccttattgtttgctgtttggtcttatcctcaatttctttaaaacttggttgatgaaaagggtattatctattgaatatctctcctagttcataagcaagccattgttcccttcagcactttttttttttggccctcagggattctaaaacagctgtctggtgtctctgcttgagaagtcattgtcacagacttaacttttcctggaagggtacatttgcagctcaacaaacacatcccaagagctaagcatggccaatcccaagcttcccaaactaagtttagggccccatgccaggctttttggttatcttgcaactcagaagcaatatttccaatggccaaatatttctttggaaaaagacaaacatggccatgtggacccctgttgctttttgcccgatatcacagtcccatagtcaaggaggcaaaattctatcccatgggagaacagctgagcacgtcctctgaggttgtggatactaccacctagatgaatctctcagatacctttgggttcataatattgtcttcacacagcgtcttaatatcattgacttcacgtttattgagcccgaagggatgcagaggtaaacccgacatgattccccatcaaagaactcttggtctgaagtgggagagatgcataaattaagaattataatgtaatacgaaggatactgggcattacaggtacactggaaagagtatctaacccaagggtgggtgggtggaaaaagaaggtgtcaaagaaagtcttctataatatcagatttttttttttttttttttttttgagacagagtctcactctgtcccccaggctagagtgcagtggtgcgatctcggctcactgcragctccgcctcccgggttcacgccattctcctgcctcagcctcccaagtagctg

SEQ ID NO: 696122 - DNA, 1498 bp, Homo sapiens
cttgggacaaaggaagcatggccaagtccatcagagtctgaagcaggtggatttattttccatatgtaacaaggcgtttgtgcagtaaaaagaatataaggcaagcaggcgtatcaacaacaatgatgataatcactgagagcactgagacctcagtggattcagtgctttgcctgctccatctcctctaatccccagagcctgtgaggccaggtcccttacagccccattctatagatgggaaaccacagtgcgtggtaatttgcacacagctaaaaacaggtagagcctgtattcattccaggctcagagcagagattcttaatgccatcaggaaactaaagtctgaggctggccacagacctcacctgcctgatggcctgggcctctctcctctcatcatctgaacaaggggggttttgaccaggtaacccctaaggttctgtttcactcagtttgggctgccataacaaataccatacactgggtggctcaaacaacaaacatttattcctcgaagttctggaggggaggctagaagtccaagatcagggtgccagcatggtcaggttctagggagggctggcttcctgggtcacagagagctgcctgtttgctatagtctcacgtggaggaaagaagtcatctctcttatgtctctgcttacagaagcactaatcctatgcaagagggttccatgcaaatgatccaatcaccctgcaaaggccctacctcctaacgccatcacactggggattagagcttctacatataaatttaggggaatacaattcagtccatagcaggttccctccagctaagtcacctgggatgctaagtgttcggggtggggtgtggcagtgcagatgaagaggaggaaaaagtggctcatcaatgtgggggataaaggaagcatgagaaaggggagcactagctcaggtggagaaggcaaatggagccactccccactttggttgtgactgctgctgactgctggaggcctagtgccctttgagttttctctgagtgactgataattcctgagcggagctgggccccagcagagcctgggagctgtgccaagctctcccwccaggccccagccgtgccacctccaagaccagaacaagaaccctagcctcagcagggtctccccaacaccatgcagataaaaagtggccaagaaaatgtcaccttaaaactcaggaacacagcatggacatccaggcttctcctcagtttccttctaagggcccagggctcctgttattcctgcttgctgtgctctaatgcctgggacttacagagaaggctggcaaacagagtccagccagcacccagcctccaaaagcctcttgtgccctgagcccagagctcactgccacctccccgagcctccagcagcccatgggggcttttctggtctcaggcccagctgctgctctccccttcaccagagcattttcagttcccacttctctggcctgagtggccccct

SEQ ID NO: 696123 - DNA, 614 bp, Homo sapiens
ccccggcrctacctgagcccatgggactcagctcttcatcctctcagggcctcttttagtctaggtgcccagggcactgagagggacctggagtgacaggaacacttgactcatggatcagaggtggagcagcagctcagggtggctgtgtgccctccctgggggtcattccctctctcttgtcctaggagcttggggtgcccatgcttgaggcaggaggctgtgtgctcctgggagctggccatggtgccatcttccagggccatttctcatgcctcccagtttccagtccctcctgactcccctccttctgggtcctccgcggcacaatgatatatttcatatttctatggaaggggtgtcatgtctcagcccccacactggcacacacacaaaaatgtatatgtgcatatacatatatatatatatatattttttttttgccaagtaagtcagcttggactcaaatgtcagtttctttgaacagatttgtcaatgacctcaaattaaactctcccatttgaggaatggcaggtgctgcccttaatatatcttgcaggcctgggagtgacaggtgtggggcctgctcacctcggatcaaccctatgggcctt

SEQ ID NO: 696124 - DNA, 614 bp, Homo sapiens
ccccggcactacctgagcccatgggactcagctcttcatcctctcagggcctcttttagtctaggtgcccagggcactgagagggacctggagtgacaggaacacttgactcatggatcagaggtggagcagcagctcagggtggctgtgtgccctccctgggggtcattccctctctcttgtcctaggagcttggggtgcccatgcttgaggcaggaggctgtgtgctcctgggagctggccrtggtgccatcttccagggccatttctcatgcctcccagtttccagtccctcctgactcccctccttctgggtcctccgcggcacaatgatatatttcatatttctatggaaggggtgtcatgtctcagcccccacactggcacacacacaaaaatgtatatgtgcatatacatatatatatatatatattttttttttgccaagtaagtcagcttggactcaaatgtcagtttctttgaacagatttgtcaatgacctcaaattaaactctcccatttgaggaatggcaggtgctgcccttaatatatcttgcaggcctgggagtgacaggtgtggggcctgctcacctcggatcaaccctatgggcctt

SEQ ID NO: 696125 - DNA, 614 bp, Homo sapiens
ccccggcactacctgagcccatgggactcagctcttcatcctctcagggcctcttttagtctaggtgcccagggcactgagagggacctggagtgacaggaacacttgactcatggatcagaggtggagcagcagctcagggtggctgtgtgccctccctgggggtcattccctctctcttgtcctaggagcttggggtgcccatgcttgaggcaggaggctgtgtgctcctgggagctggccatggtgccatcttccagggccatttctcatgcctcccagtttccagtccctcctgactcccctccttctgggtcctccgcggcacaatgatatatttcatatttctatggaaggggtgtcatgtctcagcccccacactggcacacacacaaaaatgtatatgtgcatatacatatatatatatatatattttttttttgccaagtaagtcagcttggactcaaatgtcagtttctttgaacagatttgtcartgacctcaaattaaactctcccatttgaggaatggcaggtgctgcccttaatatatcttgcaggcctgggagtgacaggtgtggggcctgctcacctcggatcaaccctatgggcctt

SEQ ID NO: 696126 - DNA, 508 bp, Homo sapiens
ttgatgaaggtatagacacatgtattaatgaaacagaatacagtccagaagatcaacacacatatgaccaactgatttatgacaaaggtgcaaagacatttcaatgtggaaagaatagttttttacagcaaatagtgttggaataattggacatgtatatataaaaaaagtgaacattgacctaacccttaccttagaggagaactaacacaaaatacatcataggtcaaaatttagaatgaaaaattataaaacttttagagtactttgatatgacgctaaaagcataatccataaaagaagaaaagtgataactggattccaataaaatgaamtacttctgctgaacaaaaagccctgttacaagaataaaaagacaagctgcagattgggagaaattgtgtgaaatcactaacaaagaaggaggattacctactagatatccagatttcacctactgctacagtgcgaggctcaaagatagacaaatggaccaattgaatagaaa

SEQ ID NO: 696127 - DNA, 1906 bp, Homo sapiens
actgtaccttttcagaaggacaggagaaggtagcctgtgaggaaccacccttcattgaaaatggtgcagcaaatttacactctaagatttattacaatggggataaagtgacatatgcatgtaaaagcggctaccttctccatggatcgaatgagataacttgtaatcgtggaaaatggacacttcctcctgagtgtgttggtatgtatgctacatttaccatcagtagctaaacttatggtgtaaaattttccattctgttactttaatctgaatattcctaggaaaagaccactgcttaggcaaattagaaacacattgctacagcacctactcttctgctttgcatgtgtgcatgtgtgtgtgcctgtatgtgtagctatctgtagaatttaagtcaatgtaaagaattcttaaacaaaagttttttttgaacgctagtgctaagcacggttatctgatctgtgtcatgccattacctgtaagttctaaatgacaacacataaatgacgatgtgcttcattagataagtaaataagggcatggtggattgagtgacgggccatgagcattatctacttcttctccccatatgtcctgcaaagttagggtagtgcattctgttcttgaccttgggtaagtcctgctgatattttgcatctggccattctgaaccttatgcccttctgagacatgtccctggtctttcattttactgaaaggcaccaccaggctacactatcattcctggagactactcttcctgtcatctatctcatttcttaatcagatcagagcaacatctccacacacatgtttatctaggatatttattaaataagacaaaagcaatgaaggatgctaaagaaatagataaagtgagagaaagataccaaaaagaggaaaaaaattgatatttccttcatgggtctattgagacctgagatgaagaggaatgaaaaagaagaaaataaaagtggggtaatgccaaagagcaattttagaattgaccataatctttaggttgaagaacagtttctcattctataggtttaagaaatgtgtatatcataattccttcacaattgagaaaagagaaaaatacgtatagttgtttttaggtaacatatttgctgtcaactcttgcttagcaaattttaaaaatatttgagctgaaaaaatttttcatatttgtaatgaatttataaaacaattgtcctaaattatataatacaaatatcgagacactatagtatgagttactatagtatattgttatgagctcatattaattttaaaacaacctcttttcttagaaaataatgagaattgtaagcatcctcctgttgtaatgaatggggctgttgcagacgggatattggcaagctatgcaacaggatcctcagtggaatatagatgcaatgaatattacttactgaggggatcaaaaatatctcgttgcgaacaaggaaaatggtcatccccacctgtttgcttgggtaagaaagagaacacatggaatgtctacgtttgtacttttatgtgattttcttacagtgttttatatcatgaaaatgatgattttgtacaaatcttttttcacaagtgttttctctctcatttctttaagtagaaagtccctaaaatattagtgtattttttctattgtggtaaaatatacataacataaaatttaccacygtagctatttttaagtgtacaattcagtggcattaagtatattaacatttttgtgaccaattagcttttgggttgtctttctcctagctgaaattccctccctggtatacagccctcaatatctctgcttgtattgccctcagaatgtcatttcaagaagaataattagtcctattctttccttggtagagtatattgctaatat

SEQ ID NO: 696128 - DNA, 1325 bp, Homo sapiens
tcccacaactctcctgactgcacaccttttcttgtttccctacgtgcattttgattttagcagacactttgtagggaatgataatgatgatggatgcaggcttgcagtaactatggaagccatcacagttcacttacacaaaagtgtttacggagagaccactgcaagagtgctgggaccagagcrtagagggaaaaaaagtcaaacaagtaagctgaaggaactcaggaagactgccttccctttagagcatctattcttgcagaagaaagtggcaataaacaaaaatacaaacagcaggtaatgaaggaacaaaaagcagtgtaaagaagagagggactgggggcagggatgtgtgttattttatatagggttgtcctgcaaaggcctgtgagtgagggacatttgcagatacaagaagaaactgactcagactttgagaacctcctgccagatgctcagagttcagattctggggttcccaaacctactattttgcatcccccaccaaaagcctttttgcttcacagctgactttgtccttccagccactctgaacacatcaaagccagagagactgtctgaatcatcttgatttcctttctgcccagagttctctcctgtttagttaaaagtgtgaatgccacttgctcccaacctaaaacctttcagatgtcacagacatctttgaagtgtaaaacgtctgagtttttcaaagccgcctttgacttaatgggtctcctggatccagttctctttaccatctcaggtctccctgacatttgcttcctgagggcttttttttttttttttttgcatttggccttgcctttgaacttggtctaatgagccatgtggatcgagagtccttgtcagaaaagaaggaaactggttttcctaaatattagcctgtggagttggagggagtttagagatttttgcttttgattttattttgggcttgttctgaaaagaaatcactctgaatattatcattcaatatttacttctacaggatttaaacacatttcagttcttggggtgtaaggctgcattttccacaatgagccaacagaacaaggacaaacaggctacggggctgcggggttgtgagtcgttaaaacggtaacactctacatagatagggccctctgtttaggtgattacaaacgtggcgaatgaaaatgtaaaaagtgccttgctttggggacttttgccccttctcagggtatttttggcccttttctccaggcacagagaatggttaccatcaaaaggaagtatcggaaagggaagcttcaggtctgtggaagtaaaatgttacc

SEQ ID NO: 696129 - DNA, 1325 bp, Homo sapiens
tcccacaactctcctgactgcacaccttttcttgtttccctacgtgcattttgattttagcagacactttgtagggaatgataatgatgatggatgcaggcttgcagtaactatggaagccatcacagttcacttacacaaaagtgtttacggagagaccactgcaagagtgctgggaccagagcatagagggaaaaaaagtcaaacaagtaagctgaaggaactcaggaagactgccttccctttagagcatctattcttgcagaagaaagtggcaataaacaaaaatacaaacagcaggtaatgaaggaacaaaaagcagtgtaaagaagagagggactgggggcagggatgtgtgttattttatatagggttgtcctgcaaaggcctgtgagygagggacatttgcagatacaagaagaaactgactcagactttgagaacctcctgccagatgctcagagttcagattctggggttcccaaacctactattttgcatcccccaccaaaagcctttttgcttcacagctgactttgtccttccagccactctgaacacatcaaagccagagagactgtctgaatcatcttgatttcctttctgcccagagttctctcctgtttagttaaaagtgtgaatgccacttgctcccaacctaaaacctttcagatgtcacagacatctttgaagtgtaaaacgtctgagtttttcaaagccgcctttgacttaatgggtctcctggatccagttctctttaccatctcaggtctccctgacatttgcttcctgagggcttttttttttttttttttgcatttggccttgcctttgaacttggtctaatgagccatgtggatcgagagtccttgtcagaaaagaaggaaactggttttcctaaatattagcctgtggagttggagggagtttagagatttttgcttttgattttattttgggcttgttctgaaaagaaatcactctgaatattatcattcaatatttacttctacaggatttaaacacatttcagttcttggggtgtaaggctgcattttccacaatgagccaacagaacaaggacaaacaggctacggggctgcggggttgtgagtcgttaaaacggtaacactctacatagatagggccctctgtttaggtgattacaaacgtggcgaatgaaaatgtaaaaagtgccttgctttggggacttttgccccttctcagggtatttttggcccttttctccaggcacagagaatggttaccatcaaaaggaagtatcggaaagggaagcttcaggtctgtggaagtaaaatgttacc

SEQ ID NO: 696130 - DNA, 609 bp, Homo sapiens
caaaattaactgttattagtctgataaaaatmatgagtttatttctttaatgctataaacctgtcattcatcctataatatatgcacatttgccagccatttccttgtttactcaatatttgattagctgtgttgaatagtcatcacaactaaacacttttccattctctttattctcattctctcctttgaaaagtgtaatcactgtaagaagaaagcagtgtagaagctaggttgtattaaataacttttgaggccacttttacaattcaccctttactaattctagaatattcacaaaatgtcctattcctccctttaaagaactatcttgtgttttaaataatgatatattttgacagctctaggacctttatctgctccaaatgatatttgtgtatgcaaacgcagtcctatgagaattatacaactgattttgttaaatctatcactttgatcttgtatttaatcatcattttttttaagacagggtctcactctgttgcccaggctggctttgtactcctaggctcaagtgaacctccagcctcagcttcatgaatagctgagattacaggcatgcacctctgcacccaacttaaataccat

SEQ ID NO: 696131 - DNA, 655 bp, Homo sapiens
tcagctgagaatttgggcctgtccagaagagaaaagggtgggcttcacttaaagatatatggaattagtaaatcagatcggaaactaacattgaaaaaagacggatgcttaccttgacctggattattgagataattgccacaatacttggtttccccattctgtggtgaccaggcaaggagtctcactgtcagaccagaacaatgtttctactattacctcctatgccccacggcctcggttgggttcacatcaaaacrtaaaggttaattctgttaagaaaccacccaggtgagactttcagatgcaaattcatgcccagacgcaccgaaggtcctcacactttatggattactgattctgtgatgcattacaaccctttaaaaaatcaggtttctctaaagtgttataaatacatttattggaaaaaaaaattgtctcacatcattgagttgctgaggctggttacaatcctggctgatatgcccaccacagcctgaagaccacccagccctacttctgactgtggccactcgagggccccagctctactgacatacatcatgtcctctgccagaagaactccgtcataaactgtggcttgcctctgccatgagttaagtcaggactggagaaaaataaggttaaacttgat

SEQ ID NO: 696132 - DNA, 1401 bp, Homo sapiens
ctctgggattggggcatgtgtggggttggaagaagtgttgactcctttgaaaaattaactcaacagtggtcacagtttatgtggaaatggggtgtgccatgactccctctctggggttctgcagtggggatgctagttggttacttcagtggtaaaagaactgctgtgctctgtggaacaggcaaatggggacaatagttattcctgccccgtgattgatatgataacctcaacttttcttctttatttctggtgcacatatggtgtctcaggtatattartatcaccagtgacactttctatttggattttttttgcactaatttattatggtagattatttataagcccttgaaatatttctaggttattttggtttgaagatagacacacacacacacacacacacacacgcacacacacgtatatatatatatagttggtggaggggataagggctgatatcagcttctccaccatcttgaagatagacatatatatatatatatatatatatatactgatatcagcttctccaccatcttgttgatgtcaaatctaagtaccacttatttattgtagcttttgaggcatgtgtttttggtgtcctatcaaagactttattaccaagaccaatgccaaagagatgttttcctatgttttttaaaggcactttaaggttttggaacttgcagttaagtgtttttaaattttttatagatgcagcagatacaagtgcagatttgttgcatgtatatattgcatagcagaaaagtctctgaaagggtacattatattaattaatttttaatctctcacccacttccaactttcctgcccttcggagtccccagtgtcttttattccactttctgtgttaatgtgtatacattatttagctcctgcctagaagtgagaacttgtgatatttgactttctgtttatgggtaatttcacttaagattatgatcaccactattatacatgttgctgtaaaacacacaactttgttatttttatggcagaatagtattttattatataccacatttactttatcaaatcatccattgatggacacttaatcagattccatatctttgtactgtgactagtgctgggataaacatacatgtgtaggtatttttatttatttttaaaaatttttaaatgaagcagaccttgcacgcactttcctttcagttcttatctagctgaaaaaatggtgtacactgctgccttgactcttcccactgcccattgttaatcatttccatccttttattttatttacttaatttattttttatatttatttttatttcaatagttttggggaaacaggtggtgtttggttgcatggaaaagttctttagtggtaatttctgagattttggtgca

SEQ ID NO: 696133 - DNA, 1138 bp, Homo sapiens
ttttttaattgataagtaaacattgtctatatggtgtaaaacataattttttgatatatatgtacgttgtggaatggctaaatcaagctattttatatatgcattaccttacataattatttgtgtgtatgtgtgagtgtggtgagaacactgaaaatttactcgcttagtaattttcaagtatagaatacattaaaactatggtcaccatgatgtgtaatagatctcgtgaacttcctcctaacaaattttgtgtcctttgaccaacatctcccaattctcccagcccctatcctcacaaaattgccattttatcctgtttctatgaagtttttttccttaactgtcttcacctgttaaatttttctaataaattcagaacttgagacttgtgcacagatgagagaccctgagtgtccasctacctacatactaaagccactttctgaaatcacagaggccaaaattttctttatcctattttctcttctctgacatatttctaacctagtttctatcactgtgacatcttgtgaggaccaggcttttcagactgtagatcctcagcttttgaaatagtcagtcctaaaatacatgtatgtatgcatacacatttagggtcataaaaatatgccacacatacatataatataggtttaaagtagtatttggcaataaacagaaaattacttaatagtaactttggatgtgtttaccagctaatcatcaaatcatacaaatttttaaacttagatccccttcatttattagacactattctttgtataagtagattaagataagccctaattttaccatatttgcagttttgtggaaaatatttctcatttctgcaagcccttaagttactctggaggggtaacaaattaagaaataattattctccataatggacctattaacagagccccaccttactcgtttttctctaaggtatattctggtattttaatttcctttctcaagctgatctttagtccttatataatgttacacaaatattagcaggaatgaatgcttgtaggcattagttcaattctgcaagcattgatggagccccgtaatgtgccattctctgctaactaagaggataacacagagcaggaagaagttgtgc

SEQ ID NO: 696134 - DNA, 2964 bp, Homo sapiens
tgtgtgctgtcactctcttgctctttttcgttttttcttgttttcttgctctgcatttctctgtttttgcctccccgttaggcaggcttccccctcatagaacaagatgattaccagcaactctaaaacaacactgctacaagctcagcaacctcagtccctccaaagtgttccaacaaaagccccatattgagtcttgttgaaccacgttcaattaaagacccatctctgaatccatttctgtggccaggggatcaatgccaatggactagccttgagccagccttatctaacccaaaaggaagactgggcttccattatccgaagaaaggagcatatattaaaggtaagcaaaatcacagttaactactactgaaaaacaggtagaaacattgtagactaagctaaaagaaaggaaacaggactgagaaaatctgcatgcttcaggggcaaatgggaggaaggtgagtcatggaaaacacccactcagctcatcagcttctgaaatcttgaagcttgcattagcttaaaccccgattttgcttccagcagccggtggttgttgtgacaggctactacaagccaattggtggaaaatttctggtcatataacatgttgagtctctgacactgccacagttgccagcactgtttctctgtccacactcactaagaatagctggccctgctccaagcttctgatgttctgcttacaccattggaccccatagccaaccagtagattaagaatgagctgttgaccagagggtaactcagcctgaagcaaaagactaaggcactgtaaccaaagagggacaggttctgaagctctaatgttgttggtggtagtcaggcaatcctatgtcttggttcacccggaacatctcagtttatacctgctgtcctggagaaataatcaatcctactgcctttcatattcaaaagattcatgatttggatgagaaatgatttgagtcgtcctgcctataagttcatgtaattttgggggaggtagccactcacaactgagagagatggggaaacagaaagatgattatgaggagaccatgcaatacttgaaagctggagacgatatacctccttccccaccatggtaccaagacactgtctgggcctgaatgccttacattccaggagacacttcacttcgataactttttctttttgacttgagctactttgtataggtagctttgattaaaacagaaattcccccaatttacaataatgtatttttttcctgggtcattgccagacactagagtttgctgagagtgtattattttcatttgtttttactaaaaattttatatattttaatgtcttactcatttcatgtgcttttaaaatctgcaccatgcttttctgaacgctagaggtgaatcagtctatttgcaattaggcctatttctaccactgtgctttaaccaatccagtgaagaccaccccatattaatattacttgggatgaagatggaatttcagacaacctcctagtcatttgaaggtcaccagacttatagaaagataaatggtaccttcattcactacgtaaggccagaatgcaccttctggagcatttaacatgtattcacagagggactaatttatttatgttgtagcatgagctattattcaattagttctcatagcctcctgaggcctctgcatgcctcccagcaagtaaagcagcacaggtaaacaccaaacaggtggcatacaggcacatttccaatttgattagatttacactgtttaaaaaatgacatttgacaactgaaatgaacattttcatgattgcttatgccatactccctccattcccctaacaaataactttggagaagcattagtgtaatcctatatagcattcagtttaaaaaactgaaacagcagtctgtaccttcactacataatgcttggggcactttattttgccaagaggaaactttgcataatacgtagacttcaaaatctctctgggctttccctttatatattatccataaatgaatsagacaaaaacacttacaaactcagttgagaaatgctatagctggtacaagacagaggaaagaaagtattttgtacctggaagacttgagatttcaaatttaaaaagaccactttggatgacaagtaactgctttgttagttttgccatgcgatttttaagatctagctctcttcccattctaacacgcatttaacaataattcggcatggttgtgctacctaatcctatttaagaaattcatcttgtattcattcttttagagagcaaaatgtacccacggtagttctcagtgaagtgaatctataattggctaaaagcgtgatgtgcatctgtcttcttagctcaatctctttgcttttatcttgttttctctttcatatttatattgatagtcaactgggtgcaaaatgagcagaggctaaatctggtctgtaggaatatttaatttggccatgatgtgttttaaaagtcagaagaatgtcacaggaaacaaggatttctaccttaaatagtatgacagggcacacaggggtctgaattactgtgtagcaacaaccgacatgagggaagtagctactgcaaccttttgaatggacatgagacctccagttgccatagttgccccattctctcttctttgcaaccagccctcttcatgcatttccatgacttgcttgggctgcataggcatttgagtctgtgcttcccatatactcaaggccccattacaaaacttcatggacaaaaagtctgcaacttaaaatatcaagtacttcccttctatttttgagcaccacaaaatcataaaaactaagaaaaatgatagccaaacatagtattgtatgcttatttcaatcaattgacggttttattttaaatgtgtatgagaagtagttgtgtttcttggcaatgaccttatttggtca

SEQ ID NO: 696135 - DNA, 2964 bp, Homo sapiens
tgtgtgctgtcactctcttgctctttttcgttttttcttgttttcttgctctgcatttctctgtttttgcctccccgttaggcaggcttccccctcatagaacaagatgattaccagcaactctaaaacaacactgctacaagctcagcaacctcagtccctccaaagtgttccaacaaaagccccatattgagtcttgttgaaccacgttcaattaaagacccatctctgaatccatttctgtggccaggggatcaatgccaatggactagccttgagccagccttatctaacccaaaaggaagactgggcttccattatccgaagaaaggagcatatattaaaggtaagcaaaatcacagttaactactactgaaaaacaggtagaaacattgtagactaagctaaaagaaaggaaacaggactgagaaaatctgcatgcttcaggggcaaatgggaggaaggtgagtcatggaaaacacccactcagctcatcagcttctgaaatcttgaagcttgcattagcttaaaccccgattttgcttccagcagccggtggttgttgtgacaggctactacaagccaattggtggaaaatttctggtcatataacatgttgagtctctgacactgccacagttgccagcactgtttctctgtccacactcactaagaatagctggccctgctccaagcttctgatgttctgcttacaccattggaccccatagccaaccagtagattaagaatgagctgttgaccagagggtaactcagcctgaagcaaaagactaaggcactgtaaccaaagagggacaggttctgaagctctaatgttgttggtggtagtcaggcaatcctatgtcttggttcacccggaacatctcagtttatacctgctgtcctggagaaataatcaatcctactgcctttcatattcaaaagattcatgatttggatgagaaatgatttgagtcgtcctgcctataagttcatgtaattttgggggaggtagccactcacaactgagagagatggggaaacagaaagatgattatgaggagaccatgcaatacttgaaagctggagacgatatacctccttccccaccatggtaccaagacactgtctgggcctgaatgccttacattccaggagacacttcacttcgataactttttctttttgacttgagctactttgtataggtagctttgattaaaacagaaattcccccaatttacaataatgtatttttttcctgggtcattgccagacactagagtttgctgagagtgtattattttcatttgtttttactaaaaattttatatattttaatgtcttactcatttcatgtgcttttaaaatctgcaccatgcttttctgaacgctagaggtgaatcagtctatttgcaattaggcctatttctaccactgtgctttaaccaatccagtgaagaccaccccatattaatattacttgggatgaagatggaatttcagacaacctcctagtcatttgaaggtcaccagacttatagaaagataaatggtaccttcattcactacgtaaggccagaatgcaccttctggagcatttaacatgtattcacagagggactaatttatttatgttgtagcatgagctattattcaattagttctcatagcctcctgaggcctctgcatgcctcccagcaagtaaagcagcacaggtaaacaccaaacaggtggcatacaggcacatttccaatttgattagatttacactgtttaaaaaatgacatttgacaactgaaatgaacattttcatgattgcttatgccatactccctccattcccctaacaaataactttggagaagcattagtgtaatcctatatagcattcagtttaaaaaactgaaacagcagtctgtaccttcactacataatgcttggggcactttattttgccaagaggaaactttgcataatacgtagacttcaaaatctctctgggctttccctttatatattatccataaatgaatcagacaaaaacacttacaaactcagttgagaaatgctatagctggtacaagacagaggaaagaaagtattttgtacctggaagacttgagatttcaaatttaaaaagaccactttggatgacaagtaactgctttgttagttttgccatgcgatttttaagatctagctctcttcccattctaacaygcatttaacaataattcggcatggttgtgctacctaatcctatttaagaaattcatcttgtattcattcttttagagagcaaaatgtacccacggtagttctcagtgaagtgaatctataattggctaaaagcgtgatgtgcatctgtcttcttagctcaatctctttgcttttatcttgttttctctttcatatttatattgatagtcaactgggtgcaaaatgagcagaggctaaatctggtctgtaggaatatttaatttggccatgatgtgttttaaaagtcagaagaatgtcacaggaaacaaggatttctaccttaaatagtatgacagggcacacaggggtctgaattactgtgtagcaacaaccgacatgagggaagtagctactgcaaccttttgaatggacatgagacctccagttgccatagttgccccattctctcttctttgcaaccagccctcttcatgcatttccatgacttgcttgggctgcataggcatttgagtctgtgcttcccatatactcaaggccccattacaaaacttcatggacaaaaagtctgcaacttaaaatatcaagtacttcccttctatttttgagcaccacaaaatcataaaaactaagaaaaatgatagccaaacatagtattgtatgcttatttcaatcaattgacggttttattttaaatgtgtatgagaagtagttgtgtttcttggcaatgaccttatttggtca

SEQ ID NO: 696136 - DNA, 2020 bp, Homo sapiens
taagcctttacaaagattcatagtgacatagaactacatcaaattcgtcaaaagttctattcagtaaaacatgcagtttttccccttgaggaaagtaaaacaaaatgctttgtcattttaagatcagttaaatagtaatatgaattaattgagatcaattttttttcttagcaaaatgtatcgaaggcgactttagtcttttttttttttttttgtcctggatgaaattacccagtatatttatctaggattcaaatcaaaatccaataaattattcttttgcttaatctgtgaaagaagtttcagaagtatgtttttatgtcaagattgatattttaaaatatttttataaaacatcatagaataatgttacaaatgtctttgactttttatcttgcaaatttaatttgaagatttttaaggaggagggtaatccaatccaactgagttttcctcaaattactatcaaaatgagcttgactcacagttaagcttgagtctttttccataattgttatgacccctctctcaaaacacgcacacactcaaagattaaagaaagaatccacttcaagtctgattttggccagagttttacacagttggggtatactcctaccatctgaggttattaaaaacaaaccaatcattactcaatttgtccctcttggagtctctttcctggtagcagcatttaggatcaactgggatcctgagttcccaaactggcctgttaacacgaacacgtttatcagtatttggctcaaggacaaagcactaaaacaacagatggaatcaatattacattttacaaagcgattacatcgcaaaatcaacagttctttgtaatgactgatggtgattgtgtaaatttcttctgctctcagcattttcttcttataagaatgtctaagtaagtgccataggtgccagttatgaagtagctctgattaggtattaattgggtttcatccaaggctgtaatcagttgtgacttagtcaccaaagaaggtaaagaacagaaataattacctgtgcctttcaattaacgtatatatatggggattcagcatttcacaatgagatctttccccaaacacacccccccccmcacacacacacacacacttttctctagtttctcaatattgctattgacaacattttggtcaatggttatgttcagtggctcacattcttatgactatgaaaatactgttcacagctaagccgtatattacaccatgatcacatttcctttcttgtatatctatgcacttttccatgcttacaaatttcttaattagtttgcttagctatttttaatcttactctttcacttatcacgttgcaaaaactgtaaaatttaaacacatagggagagaactcagtgactatatataattatatatatatatatgtgtgtgtgtattttaaataagaaatacctcttggccaggcgcggtggctcacgcctgtaatcccagcactttggtaggctgaggcgggcagatcacagggtcaggagatcgagaccatcctggctaacacggtgaaaccctgtctctactaaaaatacaaaaaattagccgggcgtggcagcacgcaactgtagttccagctactcaggaggctgaggccggagaatggcatgaacccgggaggcagagcttgcagtgagccgagatcacaccactgcactccagcctgggcaatctgggcgacagagcgagactccatctcaaaaaaaaggaatacctcttgcaggcaccttccattctcctgccccaatttttattgattgttctctaaacctgctacaccagagtcatcataaattttccttcaccatcattcagctattccccttgcttttcgtattctgtatgtagtggatgtattacatacaggaattattctattttgctctacttcttcattcatgaaacatgtcttccaagagtaaaattttaaaggccttataagcttctatgaattagttattatcagcttaaattta

SEQ ID NO: 696137 - DNA, 3507 bp, Homo sapiens
aggctttagacatatgaataatccactcaccttggctcactgacacaatacgccacagaattgtattgtatggatcattggcatggccgatgatagcacctcctgtggagctattgtggtccaccttgtggaaggcagcttcctcactttaaaagtaatgccctctaggtggtccctgatccagaatgtgtctcaaagaacaatagaaaaccatggattgattctgacattttttattccattgtgatcatcagaaatttctaaaattcaactcaccctattagaatttcatagcccataatagatatgcatttgaagcagttctgttgaaaactcatattattcagctttcccttaaatgcacataaaaaaactaaatagagaatagctgttatatgacacacaaatatttaatttgaaaactcaattctcaaggttaaaagatcaatgacaacagcaagaaaaattaccctgtgtttctcaatgtatattataaaatataaaatcatctaccctggttgtcacactaataattttcacataataagtttgagaaattctacctcagtggttctcaaaatgtggtttatagagcagcagcagtagcacctggaaacttgttcaaattcaaattcttaggtcccattgtaagaaattttaaaccagaaaccttgattgtggggctcagtaatctgttccaacaaggcatccagatgactttactgattttccttccacccaaataaacgttcacactggaatctctagaaactgcaattgtgttacattacatgaaggaagggactttgcatatgtgactaaagggtatggacctggattatctggatgggcccaatctaatcccagaagcccttaaaggtggagaactttccctggctggagtcagagagatgcaatagaagaggaagcagggggcttgcaaaaggagaaggcagagagagtccaagtgggagagtatacaaagcactccttcactggttctaagatgcagtgggccacatgcaagaactagagagaggcctggaatagttaaggctaggtccccaggtgacagccagcaaggaaatggggacctcactcctacaacacagaactgaattccaccaacaatttggatgagctgagaggtggattcttccccagagcctccaaaaagaaggaagccctggcaacaccttgatttcaggctcgtgagactggaaacggaggaaccagctgagccacaytctacccagacttctcaccctcagaaactatgaggtaatgaatcatttatgtgtatgttaatcggttaagtttgtggtgcctattacggcagcaatacaaaataaataccacactcaagtttgaaaaccactgctgtgcataatcattaattatcattatcatttattctattgatggcatacagttggaaccacatcgatgaaaaatatttccttgatcgacctgcttattcatgccagcttctgtataaagtaagaatatagcatagcacagcacatggaaatcatggttagtcccattctttgggagttctgatgtttataaacatttaactgagatagacctggggctaatgacagatccatcttctttctaaatgtgcttcttggttaaatttatttaagctttctatttttttatgttatttttttgaatttaatttaattttttctttttgagacagagtctcgctctgtcgcccaggctggagtgcagtggcacaacctcagctcactgcaagctccacttcctgggttcacgccattctcctgcctcagcctcccgagtagctgggactacaggcgcccgccaccacgcccagctaattttttgtatttttagtagagacagggtttcaccgtgttagccaggatggtctcgatctcctgacctcatgatccgcccacctgggtctcccaaagtgctgggattacaggcgtgagccaccgcacctggcttttaagctttctttagtaagaattctcttcgtagaatgaggtagcaatacccacccaatagaattgcttggaggataaaacagataacatatacaataaacctgacatttatttggtactcaataatgactagttctttctgtaagagcaatagaaaccacattttggaagcagacataaccagtgaagatcattgtctcaggtctgttttctcagaagcagagttggagatgtgttcttgagcatgtgattcatttcaggacagactataagggaaacatattagggcaggagagataaagatgtggattcgaggggaaacaaatgtcatcctcttcccacggggaaagcttcacagcacaagttggagtcagggccagccattggctcagcagtcattggacttggaaggggagaaaagacaattatctagggaaaaggctgctgtgcattgggagcaagcaacactcccagcagcaggtatggcaggcacaaaagggtatctgtgtccgacactaacaacccacaacaattattccatttccaaattaagtctctggcttgtttttcacttgagggccaaagccagcaggtatcactcgactctctgccttgtacaatgcatagcttcagcaatggaatttttttttttttctgagacggagtttcgttcttgttgcccaggctggaatgcaatggcgtgatctcagctcagtgcaacctccgcctcccgggttcaagcaattctcctgcctcagcctcctgagtagctggggttacaggcatgtgccaccacgcccggctaattttttttgtatttttagtagacggggtttctccatgttgatcaggctggtcttgaactcctgaactcaggtgatccacccacctcggcctcccaaagtactgggattacaggtgtgagccactgcacccggccagcaacagaattattacaactccatctgcctagtggctctgcttttccctctttgcttatgagttttagccatgaatcacccatatggagatctagatttgtatggagtggcagtctctgctaaaatagttttatttttccatggaaagttatggctggaagcattctgtgataattctgttgccagtctttagaaaccaattacaaaatgcactgattcattgattatttaaattaagaaagaaaattagaatacagctttctttttcctacctggagaatttgatctttactttaaactcatcttcctcctcccacagtgattgtccagtgtcattctgcctcattctgcctggataaatatagttcgttagattcccacatttagacctctagtggaaacatcacattaaatgtaatatgagaatactgtataaaattatataatagcatatttttcctcaacgtttctccagctcccatctgtgccactttatccatattatataacccactaatttgctagttttgccaaaaattctgttaacctttatttctttctgtagtactgtaagttttgga

SEQ ID NO: 696138 - DNA, 1702 bp, Homo sapiens
aatgtaattttgtaggaaaagtgatgcttgttttttcagatattccaagatgttgtatgtatgtgttttatttcttatgtttcttgatctattcaaagaatttgatggtgttctctccttcttcatattaaatgcctgacatcttccttaagtattgttctaaaactagtcaagtgcagtagtgagaaggagctgggggtgggggggaatataacaaagagtttaatctataactgaccgtgaacaattgagattgagataacttgctacctctggaccagtctctcctcaactttttgatactgctcctctcaaacatttctcccagcttgctgactgctcctcctggtcttctttgctctgtatttctggctttccttaatcttgttcctccttagggaacaactgtaaattatcttatctactcattctatggaatccccttcagtgatataaaatgatgattcaaaaaatacatatcacgagttcaaagctctctctgagataaaatccacatccagagcaacagagcgaactttcacttggctgccacaaagtcttctccaatgcaacatgttctgcaaagcagtaaacaccaccccattaaccaagtcagaagcctgggagccattagacttttgggggtggcagtgaaaatattttacaggtgaaaagaagtcacatataggtacagagggtgagaacattgcccactgtgctttgcaggttctctcatgaagaaattccattggccaggtgcagtggcccacgcttgtaaccccagcactctgggaggtcatggcaagtggatcacctgaggagtttgagatcagcctggccaacatggtgaaaccctgtctctactaaaaatacaaaaattagctgggcacggtggcacaggcctataatcccagctagtygggaggctgaggcaggagaattgcttgaacctgggaggtggagtttgcagtgagccgagatcctgccactgcactccagcctgggtgacagagcgagcgagactccatctcaacaacaataacaacaaaaaaaaccaaaaagaaagaaatgatatctttttgtttactcattgaatctgtactcctcttaggacttggttagactaatataatatggtgcagaagtgactttgaggaacatctgagactaggccttaagaggcaaagacactgttaattgcactaaagttgggctaagaatccctggtttgtgccaccacattgtctaacactcctacaaattgctgggcagagccactgtgcctcagcaatgtgtcactgaaaaacttgtcatcaggaatgaatataaatttacaaatttatatttatacaaatttatacaaaatctctatacatagagagatgtgctacaagcccaaataatattttccccaagttaaggagaaactttcattctttgcattgaaagtcatgttttgtggaggcaaaaacctggagtctggtaaattatgagagacccaagtcagtcatcacaagcaagaggctttctaacatttgctgttgcacaattgtttgtgtttgtgcacctcaaaaaaaaaaagaaaaagaaaacctcaaatgactgccattgttaaacctcatttaaataatttttctttaaaataatagatttgttttctacaatcacattctaaaaccatccttattttgaagtcagaaca

SEQ ID NO: 696139 - DNA, 653 bp, Homo sapiens
actccagacgcgccaccttaaaagctgtaacactcaccgcgagggtccgcggcttcattctttaagtcagtgagaccaagaacccaccaattccggacccactaattacagtaaaattatacaattagatttgaatgatgccagttcgttgggggtgaaataagttgcagaagaactccctgaaaacgcaacacgtgtgtcatgtaatgtttgtcatcaaggatgacaaggtttcactttacttaggtcagaaaggctttggttwtttttttttgtttttttttttttgagacagagtcttgctctgttgcctaggctcgagtgcagtggtgcaatcttggctcactgaaacctccacctcccaggttcacgccattctcctccctcagcctcccgagtagctgggactacaggtgcccgccaccctgcccggctaattttttgtatttttggtagagacggggtttcaccgtgttagccaggatggtctccatctcctgacctcgtgatctgcctgcctcggcctcccaaagttctgggattacaggcctgagctacggtgcccggccgaaaggctgtggttttattccctcaacacactaggtacttctgctttgagtacatgttttccaaaagctagaactctccagtca

SEQ ID NO: 696140 - DNA, 653 bp, Homo sapiens
actccagacgcgccaccttaaaagctgtaacactcaccgcgagggtccgcggcttcattctttaagtcagtgagaccaagaacccaccaattccggacccactaattacagtaaaattatacaattagatttgaatgatgccagttcgttgggggtgaaataagttgcagaagaactccctgaaaacgcaacacgtgtgtcatgtaatgtttgtcatcaaggatgacaaggtttcactttacttaggtcagaaaggctttggtttwttttttttgtttttttttttttgagacagagtcttgctctgttgcctaggctcgagtgcagtggtgcaatcttggctcactgaaacctccacctcccaggttcacgccattctcctccctcagcctcccgagtagctgggactacaggtgcccgccaccctgcccggctaattttttgtatttttggtagagacggggtttcaccgtgttagccaggatggtctccatctcctgacctcgtgatctgcctgcctcggcctcccaaagttctgggattacaggcctgagctacggtgcccggccgaaaggctgtggttttattccctcaacacactaggtacttctgctttgagtacatgttttccaaaagctagaactctccagtca

SEQ ID NO: 696141 - DNA, 653 bp, Homo sapiens
actccagacgcgccaccttaaaagctgtaacactcaccgcgagggtccgcggcttcattctttaagtcagtgagaccaagaacccaccaattccggacccactaattacagtaaaattatacaattagatttgaatgatgccagttcgttgggggtgaaataagttgcagaagaactccctgaaaacgcaacacgtgtgtcatgtaatgtttgtcatcaaggatgacaaggtttcactttacttaggtcagaaaggctttggttttttttttttgtttttttttttttgagacagagtcttgctctgttgcctaggctcgagtgcagtggtgcaatcttggctcactgaaacctccacctcccaggttcacgccattctcctccctcagcctcccgagtagctgggactacaggtgcccgccaccctgccyggctaattttttgtatttttggtagagacggggtttcaccgtgttagccaggatggtctccatctcctgacctcgtgatctgcctgcctcggcctcccaaagttctgggattacaggcctgagctacggtgcccggccgaaaggctgtggttttattccctcaacacactaggtacttctgctttgagtacatgttttccaaaagctagaactctccagtca

SEQ ID NO: 696142 - DNA, 1446 bp, Homo sapiens
tttttttttttttgagatggagtcttgctctgtcgcccaggctggagtgcagtggcacgatctcggcgcactgcaagctctgcctcctgggttcacgccattctcccacctcagcctcctgaatagctgggactacaggcgcccgccaccacgcccagctaattttttttttttttttttttttaaraagaaacagggtttcaccatgttagccaggatggtctcgatctcctgacctcatgatccgcccactttggcctcccaaagtgctgggattacaggcattagccactgcgcccggcctctgttaattctttacctttcttacttacataatagtttaaggaggaaaaaaaaaaaagatccataaaacatgaagaaggaaatcaaatcaattatatccctcactcaataaaacattctataaatttgtgaatggcaagaatgccccacttgcctcttttcccctctcctgggaatactgttttaatcaatggtcacttacatttcccaaaaaaaaagggatcaaatcatttagactgccatggagaaataaaggaaggattagaagactaacccatgttgcttgaattccaaaataattacatactgatctcatctgttcttccctgaagtgcctgatgacacagacacagtaaggcaccttctctgtagagcaccagtcatttttaaaagctgctcagagaacatctgtgtcctgtttaaatccagaataaaatccttaatgccaatttttaaattcccaagaagtaatataacagggagtcatgcttttccccacattgtcacctgtgaagtgctggggctcctcactttacataaaacgtacagcccttaaaagttgaataatgtaagaaaaattgtattttaactgcaccataaaagctagatgaaaattaaacctataattaaaaaattaaaattacaaaagttaaaaaataaaaaaaaataaaatgacaaaagttaaacatattcaatttataagtgagttgtgctttatacttgacatatgtaagcagtattagaaaaactaaacagtatgtcccactcctccctgcccctagggcttaataaataactagcatgaaaagaacacattacatcaactgcttctttcaaacatatttcactggagagcctgaatatactagaattatgttttatacggttcatgaacttcataggggaaagtgtccacaatcaactactattatgagcaagccttgtgtgatacctgttccaattgttcaggtgtccatgggttatcaccaataactcgtttggctgcataaaagctcattcccggaggaggctgtgggattccagaacctccgccactgtttgaagaagaaccctgtgctgaagatgaattttggcgactctgggattcatttaacacgtaactggaaaggaaataacacttta

SEQ ID NO: 696143 - DNA, 1446 bp, Homo sapiens
tttttttttttttgagatggagtcttgctctgtcgcccaggctggagtgcagtggcacgatctcggcgcactgcaagctctgcctcctgggttcacgccattctcccacctcagcctcctgaatagctgggactacaggcgcccgccaccacgcccagctaattttttttttttttttttttttaagaaraaacagggtttcaccatgttagccaggatggtctcgatctcctgacctcatgatccgcccactttggcctcccaaagtgctgggattacaggcattagccactgcgcccggcctctgttaattctttacctttcttacttacataatagtttaaggaggaaaaaaaaaaaagatccataaaacatgaagaaggaaatcaaatcaattatatccctcactcaataaaacattctataaatttgtgaatggcaagaatgccccacttgcctcttttcccctctcctgggaatactgttttaatcaatggtcacttacatttcccaaaaaaaaagggatcaaatcatttagactgccatggagaaataaaggaaggattagaagactaacccatgttgcttgaattccaaaataattacatactgatctcatctgttcttccctgaagtgcctgatgacacagacacagtaaggcaccttctctgtagagcaccagtcatttttaaaagctgctcagagaacatctgtgtcctgtttaaatccagaataaaatccttaatgccaatttttaaattcccaagaagtaatataacagggagtcatgcttttccccacattgtcacctgtgaagtgctggggctcctcactttacataaaacgtacagcccttaaaagttgaataatgtaagaaaaattgtattttaactgcaccataaaagctagatgaaaattaaacctataattaaaaaattaaaattacaaaagttaaaaaataaaaaaaaataaaatgacaaaagttaaacatattcaatttataagtgagttgtgctttatacttgacatatgtaagcagtattagaaaaactaaacagtatgtcccactcctccctgcccctagggcttaataaataactagcatgaaaagaacacattacatcaactgcttctttcaaacatatttcactggagagcctgaatatactagaattatgttttatacggttcatgaacttcataggggaaagtgtccacaatcaactactattatgagcaagccttgtgtgatacctgttccaattgttcaggtgtccatgggttatcaccaataactcgtttggctgcataaaagctcattcccggaggaggctgtgggattccagaacctccgccactgtttgaagaagaaccctgtgctgaagatgaattttggcgactctgggattcatttaacacgtaactggaaaggaaataacacttta

SEQ ID NO: 696144 - DNA, 583 bp, Homo sapiens
ctgatcaactttgccagtgarttttcaatactattaaatatgttcaaagaaccaattcttggaattattgatcctctctaaaataatggtatgttttttattttattaatttttactttcatctttgttattccttccttctactttctttgggcttattcttttgttgtttctctaacataggcagacttatttatagctccctttttgtaagaatgtatctctggggaggaagtcatagtttatgctaggagtcttctgtctgacgggcttccagaggccacgaaaatcaaagcctaaatttcatctagtttggcaactgccctcaatgagggaagctggcttcaatgatctactcaccaatgtggcttgccatttttacttggttttgagcctctgagtattttttactaacttgccaactcaatggtcaatttcaaatgacctaaaaaaaagttaagggccgggtgaggtggctgtaatcccagcattttcagaagttaaggtgggcggatcacaaagacaagagatggagactatcctcaccaacatgttgaaaccttgtctctactaagaatacaaa

SEQ ID NO: 696145 - DNA, 650 bp, Homo sapiens
tttaaatttccaaaggaatacatgttgttataactagtgaaacagtgcaaaactgtatttaacatccttaaggctctgtctccaacctttcgtcatttttatctccatgaagttattaatattaatataactttatatgtttccttccatrtttttctctgttaccttgtgattaaattttttcaataatttaatttgagatatttattctaatttaattatttatggtcagagaatatgctttgtttggtttgagtccttctgaatttattgagacttgtgaatggccaaggatatggtctattttggtaaatattccatgtacacttgagaggaatgtgtattgtcttattattgggtatagtgttctataaatgacaatcaggtcactgattgttaattagcttgattaattaacactaattaataattagattgtacagtgtcacagttgatactgtacaattctaccacatcctttctaattttctgcctacctgttctatcaattattgacaaaggagttttgaaatctctgactgtaattgtagatgtatgtttctccttacagttctatcagctttttcttcatgtattttgaaactgtattattagatgtataaacatttagaattatgtcctcctgttta

SEQ ID NO: 696146 - DNA, 583 bp, Homo sapiens
ccaccattccaccagcccgggatggtaagtacagctaaataggcaatacgttcagctgatagggagttacagacttcttatttacgctgcatgtgcatcatttacaattaatatagaacatttctgatctattattgctgctgaagagtttttagattgaaagaaaagataaccagtaatttgtttctctccatctctgggcacattttggtgtgaataaaatcagtcataaattattccagatcttcagctggaagtctgtttcctcagttttacagatttaggtcttccatggtccatagttacatggtggacatttctttctgctagctgctggcatcagtaagcgctgtgaacccttttggctatatttgcgaccgaagccctgaggctgttggctttaaaattcctggtgtccaacctgagaagttccctggattatacaatgctaaaaaattttccattcaccaaaatttgaaagataattgtaacttgcagtgaactggtgaaaygacatactgatttattaaggttgatctctcagcatttgagggcaattctctagcactttgtcaaattaaat

SEQ ID NO: 696147 - DNA, 643 bp, Homo sapiens
gggtctgttcttcatgtctcagtgcctctgatctagtcaacacaactgtcctgaatgtgaaagaacttgctaaatttctagtttcttgttaggtggctaaaatagatttataagacttccttacttacccatgactgctgaagtttgaattcttagcagtacgattcgttttcttgtaaggtgagcagcttaggaaagattggccatcttcctgtgcaaaaagaggcaaacttaatttctactcaaagcatgcttgaatttggaatcagggcttccactcttccgaagttggagtgtcactgcgacaggcatgtgtcccgaagggctcgtgtctctgctatactcaaagtttaaatggagcccagcaagccagatgtcctttacttctaggttccctcaacagtttctcctccgctttagagaccgcattgaaaatattcttgttctgctgttgtgttttggctttggaatgatgtgatgcagctcaatgggtcccacccccaasttgatcaaagtaagaaacagctgggaaagtcagtgcaaatacaagttcattgtcctccttgcagggattctgattcagagggctcaggtggggcctggaatgtgtttgttaacatgactcagatgtgcagtcaatttg

SEQ ID NO: 696148 - DNA, 1989 bp, Homo sapiens
tgtgccctcaccaccctctgaaccctcatctccctggggtcccggacaactcctatcaaagcccccgggatgccagacaaactcccaggcacactcgtctcctgggttctgatcccacccccagggctcycaggctcctcccccttgcatcctggttccactctcacactcctccctaccctggctctgcccctagttcccaagctctcatcctaggctgtgatttcccttgctagaccttttcccagggtcctggctctgtatgaccagggacctgtctccctctctaccaggaccctaacactgccgcagcctcctccctccaccggctgcccaagcacccacccccagctgcccaagcacccccacttctgggctggcttcagcgcagagccctcgaccacctccttgggggtcctgacaccctcagacactatttctcagggctctggctgcaccccagggcgctcagactcctcccccagacacgcccccacccccacctggagggcgcgagcccctccccctgggcctctggctgcgcccagaaaactcaagccccttcctacctggaccttcagctggcaaaagtgcagggcggagagaatcagggcaagcgagcgtggagtcgtctgagcaggccggggaggggcctctgcggggcgaacggcctcggcccggcgaggagcgccgcggtggagacggggtccgctggcccgagagcccccgcaggctgcggtcggacgctgttggacgcaggctgccgctctcagcgtcagacaggacggcctgagggtaagggagggaagcaggaggccgcagagttaggaacttcggggttagctggcaaaaacgaccaggggaggctgggggccgcctcatcccaaatgctcccgcttacaagaagccttctgatttcacctcctccactagctcagtcctcagctcgccgctgaggcatcccatttattgcgaagacatcatttggcattgctcacaggtgggctccgagagggccgtgcctcccctctgagactgggggctccccagggcagaggccgggtgagctagcaggggtgctgagcagctacagcctgggtcccagggccccacccatctgcagttcaatccgaagccaccgaaaggcgaggcgggggagcccaggaccgcctggcagggccctgtcttcccgcctttctgggctcacacctgtgccaggtcccttaggctccgctgtagcccctctccatcctctgtctccagggccgcctgctcctgtagccgcagggattcctggagtgcggtgagggagacaaagagtggtcggggttctgtcttacctgaaacctcccctttccctccctccctggcccaccactgatcaggtggcctctgaagccatgtccataggccagccacctggtagaccccacagcaggcccgaggccctcaatgaacagaccaggcccagagaagagctgggttctgccccaggtcacacagtcgattgcaggagagctggacctagaacccaggccaggccccacacagaggggtgactaaaccaggctggaccctgggggagtgagtgtcccactggtgggggtggacagttgggattccaaaggcagcatctggacctggagagcgtggatgggagttcaagtcccaactctcctgcttactggctctgagactggacaagcatttcccctcttgggcctcagtttcccatccgtgtcattaggattactctacagggctgctgggagggagaaatgggatggaggaagtgagtgtgcttcccacaaagcctgcacacctgtgtgggctgaacctgagtgtgagtgggatgctgggggtggcccaggcagcccagccctaagcctgtgtccatggatctggccggtaccccatcccaccctgccccatctcaggggcagctgaagctcaccagggcctcaagcttctcggtgaggtccttgtcga

SEQ ID NO: 696149 - DNA, 649 bp, Homo sapiens
ttatggttaatagcacaggcctggggaataaggctagaccaaattctcactccatctcttagtagcaatggcagaaattactaatttgctgctctggcttctmtctacaatcaccttcttcctagccatcttccagttaggggtgaccatgtaacacagttctggccaatgacaaataggcaaaagcctgctgggtgaaacccctgaggaagctaggggattcagccagtatgacccttatgtcttctttctcttcactttttcatatatattgtgtagtggtgaagtcttggctattagtgtactcatcacccgtctttctttatttattttacctggagtcctgtgattccagaagatatagcagctatcatataactatgaggaaggtagtacactgtgcgtgggggtggggacagcaaaagaaacagcctacccgtccttgtccaaattacttagtaggtaaaacagacctgaattgcctatctccaatccccttttttactttttgaagaataacagccattgtttgtttatgccctgaagttggtttttctgttactcacaggtgaacacacttctaactctatgtcctcagtttcctcttttattatttgaaaatgttaatagtacctacttcatagggttg

SEQ ID NO: 696150 - DNA, 662 bp, Homo sapiens
tgttaaaccaacggaggcacagtatgggaagcacaactataccaacactgaaaatgaaatgattctctatgaaattttctcactaagaatcaaaygaatggttattttctctagaaactgtggagcagatgccacactcccccaaaacactaaacacgtgcacccaggtttacaatatagcacagaatgccgtacatattctcatattctattatccccaaaatcaggtggtaccttacaatcgcagtcggccaggttgcagtggtgtagttgtccttgcctgatcacgtgcacacctgatcatcactgttaatgccagttacttgagttaaatagtgcatgcttcaggtattacacatcttaagcttaatgacactatagttcagtaataaaaagttaaacatagaaagtaactaaaatactcagtggggcacaaactcgtattaacttaagaacatctgccacttgacggatgtctacaattctgtattttcctgcaaagtaatcaattcattttgctatttgttttagacatatacacaagagtaaaatgatacaaatccatgtctcaataaatctaaataagcttatcaataagtataaaatattaagaatctcagtggtgagaaagagttgagtcatagtttaatcagaagagcttg

SEQ ID NO: 696151 - DNA, 1694 bp, Homo sapiens
tgcagaggctcctgcggccgaggacacccccgggaacccaagcagagaaaaatcgccttctaagcacagaggccccctgcacctcctgtgtgcaaagcctcgagacaagggctctacatgagtcacctccttttgttctgacagtaaccccccagggtaggtacgatcataacccccctcttcagatgaggaatgcgaggttcaaggttcagcaaagttaagtgacttccccaaggccacacagcagggaagccagaacaggcctgagcccccctcggaaccctgcttcggagctggcagagtcgtgctggggcggcgcgggcccccagtaggactctaggagctcatcctgaggctccctccctcccccgggctccgcagtcccctcaacccctcagcagggctgggagcttgctccggcctcccccagcaggaagctcagagcagccactgtccccaggcttcccccaccagcttgcccagcccagtccctgtcctgtgccaaacaccctgcctcactcaaactcccctcccaccaaccacaggcggacgaggggctgccctgtcctttcctcaaagcctggggcaggtgtcgctgtgccagaccaggacacagtcacacggaccccaaatccaggtcctggactccttgcctccccggggagcaggggcaaagccaaggttgccggaagcctggagctcagggagccctgctggccactgccaggcgggtgacttgtgccagctttgcccagcaaggcaggaggcccagggagcagcccagcacccaaaactaagtgaggctgagcccagactgggcccttctggtggcatcggagcagtgggctcctgctgagggaaagcccaggtgctgcctcagtctttttcaggagccctcagactggagtccactggcctcgagcgaagccccgtaagagacccctctggggtctgcaggaacccagcctcctcagaccgcctgagctcagcccccaggcacctgggctgctcccacactcaggctctgggcctgacggggatttggatcccatttcccttcttcccagctatggcctcgggcaawgcatttgacctcccaggctcttgtggaagggtgtgcaggcttacattctatgaggcggagacacccggggcaccatcgggccagggcaggacctccaccaacagtggctgtgatggggatgactagggggtgggggggagggggggaagaatccaaaatgggtggggccgggcacggtggctcatgcctgtgaccccagcactttgggaggctgaggcagacggatcacttgagctcaggggtttaagaccaacctgggcaacagagcgagaccttgtctcaaaaaataaaaaaaaaagtccaaagtaaatcgaagcaaaaggcccctcaatgtgcctaagcccccaatcccaccagcacctggctcaggcagctgggaggcggttctaggtcagggcccaggccactggccaggctgtcctcgtggaaggccactcgctgacccttgccttggtcctgggctgggacactcccaggagacccagcagctctctgagccaggacttgcccatcttcagctgcgtgagctcattcagggcagccccctccccctctgctggggctcgctggggccaccggggacagggaccccagtgaggaatctggtgtt

SEQ ID NO: 696152 - DNA, 629 bp, Homo sapiens
ctggtccgggtactactcaactcaattgcctactctaaatttcaatactaaaaataaaggacaagaaaagtttcagatgaactaccagaggctgataatgtctgatgaaaactgaaaacaaatatttttaaaatgcttaagacaaaaaagaaagaaagaaagaaagaaagaaaaacaaaatatttagaagctactatgaaaaatagcttctccagagggacctgaagcagwtagttttgataaactctatattctgggtatgtgctctcacataagatacatatttatacaattttaaggcaatttgtgaacttcaactttgcttatttgtataacacactatctcagtgaataaatagactaactttggtgagcagactatttaatccactaggatatgataaaaataagctgacagaccatctttttaggtaagcaaattatactgttgttatgctaattgcttaggggtaccattttgtgaaaatgtctagtatgaaggggatacgataaatattgtaattgctaaaataagtaaatgattttgcctttttctcattttttcaaggtagttatggtattttatcatagaggaaaaagcttggtctcttcttcaaaatgcactgata

SEQ ID NO: 696153 - DNA, 671 bp, Homo sapiens
aatgactctgttaggtagaataaactgaattaggaagggtcaaccaaccaaacaagtggtagagctaatacttgaatccaagtcggtttgattccacagcctgtactcttaatcaatatgcttgactataaggcctctgttaattaattttctggactcagargagagtagatattagctattctaatgttgatgtgattatgataatgacgatcaaagtgcttaataaacatctgttgaaattaaaaaatgattaaattaaataaattcactacgattaaagcttattttgtaggaccatgcaaaacaaattataaattacttgttcaaaacttgctcttttaatatgtttagtgaggttgggttattactataacatttctttggtacctctgagagagacaaattttatgataatggcgatattgaggacagaaaaaagaaaacaaattcgattcctcaagaaataggcatcctctgtagctaatctcctgtccagtcatttcatcttgacataataccaatcttagagaaagataggaaaggtgaggaatctctttagagacgaaaatgtcaacaagaatcttaaaactcaaaatataacctagactattcagcagttgggaatacagtgttttaattctaaagagcatattaactatcctgactaa

SEQ ID NO: 696154 - DNA, 657 bp, Homo sapiens
tggagggtctggccattgtttgttggtatgttcagtctcacagcccctcttttggtcattctatcacttgagtgaggttgacaaattcagggaaagctaaagatccagatctttattgcttgaacattgtctgcttgtctcmacagttaattgtatcatgaggtcctcttgaccatttttttgttgtattattgtggcaagcatttgccaagaaggttactgctcagaatcacttaagactctggacagaatgtaacaagccagcatcacaaccactatgaccaaaacaaaaacaattaaaagtcactgtaagatctttggagaaaggaaccccaattgcccaactcaggccaagagaactaatctcataagtcatgaggatcaactttagaaagccatgtagctgtatccataaggcaatatataaatagctgttctatcttgccagtttcattgatccatgtccagcaagtaatatcagcaatggcagaagcaccaaaatgattagccaacaagaaatctaaagcaatgcaattgtctatcactaatcatgcccacaagactaatctgtatttagggcaaggggagtatcatcaatgatatctgttagttagtgatacatttcttaactgtcttttctcttagtatgattactac

SEQ ID NO: 696155 - DNA, 657 bp, Homo sapiens
tggagggtctggccattgtttgttggtatgttcagtctcacagcccctcttttggtcattctatcacttgagtgaggttgacaaattcagggaaagctaaagatccagatctttattgcttgaacattgtctgcttgtctcaacagttaattgtatcatgaggtcctcttgaccattttkttgttgtattattgtggcaagcatttgccaagaaggttactgctcagaatcacttaagactctggacagaatgtaacaagccagcatcacaaccactatgaccaaaacaaaaacaattaaaagtcactgtaagatctttggagaaaggaaccccaattgcccaactcaggccaagagaactaatctcataagtcatgaggatcaactttagaaagccatgtagctgtatccataaggcaatatataaatagctgttctatcttgccagtttcattgatccatgtccagcaagtaatatcagcaatggcagaagcaccaaaatgattagccaacaagaaatctaaagcaatgcaattgtctatcactaatcatgcccacaagactaatctgtatttagggcaaggggagtatcatcaatgatatctgttagttagtgatacatttcttaactgtcttttctcttagtatgattactac

SEQ ID NO: 696156 - DNA, 657 bp, Homo sapiens
tggagggtctggccattgtttgttggtatgttcagtctcacagcccctcttttggtcattctatcacttgagtgaggttgacaaattcagggaaagctaaagatccagatctttattgcttgaacattgtctgcttgtctcaacagttaattgtatcatgaggtcctcttgaccatttttttgttgtattattgtggcaagcatttgccaagaaggttactgctcagaatcacttaagactctggacagaatgtaacaagccagcatcacaaccactatgaccaaaacaaaaacaattaaaagtcactgtaagatctttggagaaaggaaccccaattgcccaactcaggccaagagaactaatctcataagtcatgaggatcaactttagaaagccatgtagctgtatccataaggcaatatataaatagctgttctatcttgccagtttcattgatccatgtycagcaagtaatatcagcaatggcagaagcaccaaaatgattagccaacaagaaatctaaagcaatgcaattgtctatcactaatcatgcccacaagactaatctgtatttagggcaaggggagtatcatcaatgatatctgttagttagtgatacatttcttaactgtcttttctcttagtatgattactac

SEQ ID NO: 696157 - DNA, 657 bp, Homo sapiens
tggagggtctggccattgtttgttggtatgttcagtctcacagcccctcttttggtcattctatcacttgagtgaggttgacaaattcagggaaagctaaagatccagatctttattgcttgaacattgtctgcttgtctcaacagttaattgtatcatgaggtcctcttgaccatttttttgttgtattattgtggcaagcatttgccaagaaggttactgctcagaatcacttaagactctggacagaatgtaacaagccagcatcacaaccactatgaccaaaacaaaaacaattaaaagtcactgtaagatctttggagaaaggaaccccaattgcccaactcaggccaagagaactaatctcataagtcatgaggatcaactttagaaagccatgtagctgtatccataaggcaatatataaatagctgttctatcttgccagtttcattgatccatgtccagcaagtaatatcagcaatggcagaagcaccaaaatgattagccaacaagaaatctaaagcaatgcaattgtctatcactaatcatgcccacaagactaatctgtatttagggcaaggggagtatcatcaatgatatctgttagttagtgatacatttcttaactgtcttttctcttagtatgattrctac

SEQ ID NO: 696158 - DNA, 613 bp, Homo sapiens
agggaggaacactagcaaagtaacagttttatttgcttaaggtcattttgcttaaggttgtttacttaaggtcattttccatgtagattcaagtggaaacactgtcaggtgttatttcccatggttttatttcatgagactagaatttcccagagatttttatcatggtgatccagtgatggacagcatgtgcagcagttggtgagattgaaggcaatgaaaacagtttggaaacctaagaagggcattagaatgagtatgttctgaactaataattataataaaaaggaaagaaaagaggaaaagattattagagtgaacaacaagaaagggaaatgaaaagagatattattataagcaaacagatgaaaacaaaacaggaattagacaggaactktggtctgatgtcttgggcagaagctgcccgctttctgaagtcattgccttgttccatagttcttaagtcagctctccttctgaagatctgaagatccttaattgtattccattattagagtagcctcctgattgtgaggaattctgaagtgttttttcagttgtgaaacatgtacctagggattgaccttctagagtttcacttctatatttgtta

SEQ ID NO: 696159 - DNA, 613 bp, Homo sapiens
agggaggaacactagcaaagtaacagttttatttgcttaaggtcattttgcttaaggttgtttacttaaggtcattttccatgtagattcaagtggaaacactgtcaggtgttatttcccatggttttatttcatgagactagaatttcccagagatttttatcatggtgatccagtgatggacagcatgtgcagcagttggtgagattgaaggcaatgaaaacagtttggaaacctaagaagggcattagaatgagtatgttctgaactaataattataataaaaaggaaagaaaagaggaaaagattattagagtgaacaacaagaaagggaaatgaaaagagatattattataagcaaacagatgaaaacaaaacaggaattagacaggaactgtggtctgatgtcttgggcagaagctgcccgctttctgaagtcattgccttgttccatagttcttaagtcagctctccttctgaagatctgaagatccttaattgkattccattattagagtagcctcctgattgtgaggaattctgaagtgttttttcagttgtgaaacatgtacctagggattgaccttctagagtttcacttctatatttgtta

SEQ ID NO: 696160 - DNA, 646 bp, Homo sapiens
ttctgtaaatgccaactccattcctgcagttctttaagtgacaattttggcactacctttgacattttttctcagactccatagcagtctttcagaaaatcttgttcatgttaacttggaaatatatgcagaatctgattccttctcaagctcacatgatttctctcctggattattgcagtggactcccacattgtgatctcactgctactgttgccccacctgcaatccattgtccccatagctgcaaatggctgtttatttcacccrgggaaaagccaaactctctccactggcaaaacaaacaaacaacaacaaaaaacaaaacctctacacaattctatttcctggaaatatctgacctcatctccaacattctttattctttatactaccctttacccaaagaaactcctggttctctttctcttcttcacagcttctctctggcatttattgcctaccttcctcatttatttctttctgtagtactcagcaccattgagatacaagattttgcttatttattcatttttttccctccactagaatgccagctctagtgatcgcccaaagtagacacttaataaataaaggttgaaggactggattaaataaaacatatatcaaatctgaatatcaataa

SEQ ID NO: 696161 - DNA, 666 bp, Homo sapiens
cattttattcagtttttcaagtaaagaggtccttaatacttgtaaccctgtgataaatcaatgttctactctcaaaaatacccctaatgaaataacacttcttatttttaaaagttaaaataaatatcttaattgttttttaaaaaatatttatttagacaaagttggatctggccatctgttgccacatagttaactagtaatatagtaaatacagtatgagaacacacatctgtttccactcactgaactcattaatcgtgtggcctaatgtgactgcacagtgccactcacattttaaatttgtaccatggtggcaaaggctaattctggggtatttcatttatttgtgattgccaagaaacaaatgaaaataaaatttaatattgtgctttataaaaaacccattgtggtggagaaaatatgcaaatttatrtgagatacaaaatgggatgaaatgcaactggtacatatgggaatctcagagcaggtggtctccttttgctctaactctagtacattttttagaagcttggtatttgaggatctcacattccaagagtctctcctgccaatagttttgcctggaacatactgtacaaccaggcttacctacctccaggcagaagacaaattatcaaccattttcattgattctatggatga

SEQ ID NO: 696162 - DNA, 1980 bp, Homo sapiens
ttacgttcttcttactgctcacttatagattgaggaaataagatgttcaatgatagaataacatggaagagtcttaaattctttagcaaatgtagaaaactagttaggactctttacatgatatagcttgttacaaaataccacctttaatacaatcctttttccattgagtcaaaataatagtggtgtatagaaggctccaacagcagtaattttcattcattttaaaatacactcatgttcaaggttagaaattttcaattgtcccacaaaaatgtgtgtggtgtgcccatagcatctatgtttaatatatccgtggattgctggaaatgatgaagaattgggtaatacgcaaacattttgtactttattcaatacatcagcacttgcatacttctgaagaattatagtgtagacacatttgaggtttattcagactacggttttatatatatatatatatatatttttttaatttttattttaggttcaggggtacgtgtgcaggtttgttatataggtacattgtgtgtcacaggggtttggtgtacagattatttcatcgcccaggtaataagtgtagtacccaataggtagtttttcaatcctcagcctcctctcaacctcagctctcaagtaggcccaggtatctttctttgtktccaggtgtactcagtgtttagctcttacttacaagtgagaacatgcgtatttcattttctgttcttgagttattttgctgaggatgatggccttcatctttatccatgttgctgcaaaggccatgacctcattcttttttatggctgcataatattccatggtgtatatataccaccctttcttcttcttttttttttttttttttttttttgagacagagtcttgctctgtcacccaggctggagtacagtggtgtgatctcagttcactgcaacctatgcctcccaggttcaagcaattctcctgcctcagcctcccaagaagctgggattacaggtgcctgccaccgtgcccggctaatttttctatttttagtagagacggggtttcgccatgttggtcaggctggtctcaaactcctgacctcaggtgatccacctgccttggcctcccaaagtgctgggatcacaggcatgagccatggcgcccagccccaccttttctttatctagactacagttattaactggtatgggcatatgaatgggatgacttctctcagtgactgtgttggccccacagcagctcacaagctgcaggtgtggtgcgggagatacaaggggaagtctcaaggttgagtcaggtgtggatccttttaaaagaaaaaaaaaatgaattattgtgtctctggcattgacttaattatttttgttatacacatatgtgacataacaaacatgttaagcatgtacatatacaaacctggttataaactgattctgagagctcttgtgaaaccataaaatccaaacaaattaaaatcaaatataggctacaaaatcacttaaaatcaagttaacaaaactaatttaatgtggcagaagatgttgtttggctgaaattaaattactgcttaaaatgtgaatatggtactagactgctgtggcaacagtgcttttgagctcagcgtgcctgtatatttcaagtttggggtgatagttttctggaagaacacaggaaagtcttcatttattctttaaatttacttggtgcaaataaatcatttatttattaagtccactttttaattcttgcctgtactacttgttgctgttacacacaaaaggattgtttagtttatcatcaaaataaaatcataaaggtattataaatcaaatcccttagataatgtggagaatcttaaaaacatgtccaagcacttcctctctcccatttctgatgaccatggacaccagtttgaaaagagtaccttggaagatagtaaaacttattatgaacctgtactatatgaaagag

SEQ ID NO: 696163 - DNA, 1376 bp, Homo sapiens
taaagactttttagtttacctttctgaaagaagatgacttaagaatggaattcagaaagtttagagggggtagtgaagaaaggcatggaggctagaaataaagtagataaagttattcttttcctagcactattttcattgcatgcttcatttcttctcaaccatgtcataatgggatctattaatatattagttcttgggtcctgatatttcaggaaattaactttagtatctgtagttctgtccatgtatgtttcagtctaatacagagtgtagtggtgaacagcaaggattctgcaaccaaagtacttgggtctgaaaggggctctatcctggctcaccaccacagtgaccttgggcaggtgacttgtgctctctgtgctggggtttccacatctgtaaaatcaatggaaaaggtattaagttcatatatttaaagtgcttagaaaagggcaaggagcagtagctcacacctgtaatcccagcactttgaggggccaaggcaggaggataacttgaggtcagaagtttgagaccagcctgggcaacatagcaagactcccatctccacacacacacacacagacacacacacacacatttaatttaatttaaaagttagctgagtgtggtggtgtgcacctgtagtcctagctactcaagaggctggatcaggatgatggcttgagccccggagttcaaggctgcagagggctatgagtgtgcctctgcactccagcctgggcaacagaacaaaaccctctctctctcaaaaaaaaaaaaaaagtgtttagaagagtaaggggcacatggtgacacttaataaatcttagctcttactatttcttttatttttctgctcatttctgaatgaaaggacagcttcttgtttagtgtggtttctccatgttatttggagacataccagcatgttacaaatgaacagaataagttaatttaaaaacctaagtttgtgttaatacagccaatttgtattttgaaggtcaagtgctggttgtgatgatcartctcatcattctggtttttatgtttggattgtggaagttgtatccacagaagcagtgaatctcaaaggcctgtttcctgcctttttcctttcccagtcatttgcctctaccacattctcctatgcaatttctttctagagtgtccttctgtctccatttttgctttttccttcaccatcagttcctctgcaggtctggttgtctcattctcatctgctagggtactgcctttcctctcttcacttcatgaaattcaggtttcccaaactcacctttactcttggtaaactctccactcacgaggagataaacattacaaataacacatgaaaagaaaagaaaagaaaa

SEQ ID NO: 696164 - DNA, 1376 bp, Homo sapiens
taaagactttttagtttacctttctgaaagaagatgacttaagaatggaattcagaaagtttagagggggtagtgaagaaaggcatggaggctagaaataaagtagataaagttattcttttcctagcactattttcattgcatgcttcatttcttctcaaccatgtcataatgggatctattaatatattagttcttgggtcctgatatttcaggaaattaactttagtatctgtagttctgtccatgtatgtttcagtctaatacagagtgtagtggtgaacagcaaggattctgcaaccaaagtacttgggtctgaaaggggctctatcctggctcaccaccacagtgaccttgggcaggtgacttgtgctctctgtgctggggtttccacatctgtaaaatcaatggaaaaggtattaagttcatatatttaaagtgcttagaaaagggcaaggagcagtagctcacacctgtaatcccagcactttgaggggccaaggcaggaggataacttgaggtcagaagtttgagaccagcctgggcaacatagcaagactcccatctccacacacacacacacagacacacacacacacatttaatttaatttaaaagttagctgagtgtggtggtgtgcacctgtagtcctagctactcaagaggctggatcaggatgatggcttgagccccggagttcaaggctgcagagggctatgagtgtgcctctgcactccagcctgggcaacagaacaaaaccctctctctctcaaaaaaaaaaaaaaagtgtttagaagagtaaggggcacatggtgacacttaataaatcttagctcttactatttcttttatttttctgctcatttctgaatgaaaggacagcttcttgtttagtgtggtttctccatgttatttggagacataccagcatgttacaaatgaacagaataagttaatttaaaaacctaagtttgtgttaatacagccaatttgtattttgaaggtcaagtgctggttgtgatgatcaatctcatcattctggtttttatgtttggattgtggaagttgtatccacagaagcagtgaatctcaaaggyctgtttcctgcctttttcctttcccagtcatttgcctctaccacattctcctatgcaatttctttctagagtgtccttctgtctccatttttgctttttccttcaccatcagttcctctgcaggtctggttgtctcattctcatctgctagggtactgcctttcctctcttcacttcatgaaattcaggtttcccaaactcacctttactcttggtaaactctccactcacgaggagataaacattacaaataacacatgaaaagaaaagaaaagaaaa

SEQ ID NO: 696165 - DNA, 653 bp, Homo sapiens
tatcctattagttctgtccctctagagaaccctgatgaatataggaggccagtattttaaaaataattttaaaaagctctcccaacttataacacaattaatcatttaattgtgattgtaataaggccctgatgataaattagatgaagcagaagagtgaggtcattgtcagccgaaataacaagcagagagagtctctctaaaagaaaagatgtttactgggaatagagtgttgcaatgggaatatatgtgccatagttaactatatgtatattcagggaggtgaagcaagacaaaggtttttaaaggaaaaaaaaaagggggaattttacataattgttttgaaacaattatccttggctacaaggattaataataagggtgacctccakttccaggttggataggtagttgctgggcagatgttctcacgtaagtattgtttttgtttcaggttgtatggccgttgtatgaggttgtgatttttgcagtcttttgtgatagattttgttgccaggccccaagcatgagaaccctttcttcaaggccttccctggttcaatttatcagggttttcctaacatcagtgactccattttaattctgacaacttgcacagcaaataccccagactgagggaatagccaatgtgt

SEQ ID NO: 696166 - DNA, 633 bp, Homo sapiens
attacctttcccttggtctctcccacaacacgtgggaattctgggagatataattcaagttgagatttgagtggggacacagccaaaccatatcagagacagactgaggtgataggaagaacattactaaaattgatttcctaactaaaatatgggacaatcaacacatttctacagggaaaagaggctgggcttcacactagattgtcataaaacagctaatacaaatggtgtgatagcttctttttagaataagattttcagcaacaacagawcacattttagcacaaacggtctccagattgcaagcttcacggaggtgggatccatgggttttcttttgaatctccccagtgtcttcaatacaggcaggacaaatatttttaaattaatgaagcagaatggtgacctgaaaggaacttatattagaaccttcttctagatatggctctgtcactgaccagccttttgacatgggaagagttattttatttgtaaaatgagaaaatagggcgatcttttctaagctcctctttttataagtctaagatgaattaattttaaattagaagtaaataaggctgatgtaaacacacacagcaacaacaaaatcaaaacattaaatctagaaca

SEQ ID NO: 696167 - DNA, 668 bp, Homo sapiens
ctttagcatgagcacttatttcatgttgggataattgcacaaggccttgcctacctaattggwttcttatttcaacctaaactgcaatttaagctaacactgattttcagtgagctcatctaaaaatgtcttcataaatgcctacaaacaaaaatcacatccataatacacgttttccagattaaaacacatactgcaatgtgtattaacctaagaaaccaggatgcattatcaattaaatgaagtacaacatgcacagctttccaccattgtgtgtttctttaatgtgacttgagcaaacagcaggtattaaataaccttccaaaagactgtaagttcagcattatctgcatatttgcttgaacagcagtaagtaaaaggaaaagcaatgagtgtctttggggctgccttgatctaaggaaaacatcttcaaagagtcatgtactgtgatattcttcttccaatgaggggtgaagtaatgtaacacttcagaaggagtcactgataagttatattcatcttccgtgatagacagttagaccttgaaataacaacagaaaaggaagattttcatcaaacctgaattgaagaaggaacaagtagcaaaaagagcaatggaccttggggtttgttcagatacaaactgctatttactagctgtgtgtctt

SEQ ID NO: 696168 - DNA, 668 bp, Homo sapiens
ctttagcatgagcacttatttcatgttgggataattgcacaaggccttgcctacctaattggattcttatttcaacctaaactgcaatttaagctaacactgattttcagtgagctcatctaaaaatgtcttcataaatgcctacaaacaaaaatcacatccataatacacgttttccagattaaaacacatactgcaatgtgtattaacctaagaaaccaggatgcattatcaattaaatgaagtacaacatgcacagctttccaccattgtgtgtttctttaatktgacttgagcaaacagcaggtattaaataaccttccaaaagactgtaagttcagcattatctgcatatttgcttgaacagcagtaagtaaaaggaaaagcaatgagtgtctttggggctgccttgatctaaggaaaacatcttcaaagagtcatgtactgtgatattcttcttccaatgaggggtgaagtaatgtaacacttcagaaggagtcactgataagttatattcatcttccgtgatagacagttagaccttgaaataacaacagaaaaggaagattttcatcaaacctgaattgaagaaggaacaagtagcaaaaagagcaatggaccttggggtttgttcagatacaaactgctatttactagctgtgtgtctt

SEQ ID NO: 696169 - DNA, 600 bp, Homo sapiens
taaggaaaagagatttaatggactcatagttccacgtggctggggaggcctcacaatcatggcagatggtgaaaggcacgtcttacatggcggcagataagagaatgagaaccaagtgaaaggggtttccccttacaaaaccatcagaccttgtgagacttatwcactaccatgagaacagtataggggaaactgcccccataattcaattatctcccaccaggtccctcctacaacacatgggaattatgggagctacaattcaaggtgagatttggtggggcacagccaaatgatatctggaagttagctgctaaacaactgaagaaaagattaggtaagcaacaagggattaaagtaactggaggatgggatacagaaggttctatgtggaagctttattttcagggccaaccagaaaaccgtaactgttgacattcaaaacgatcttgaaatttatagaaggctgaaaattgctctcacagctactgtggtgtgatcccatatgttttgccagttgtttttcttgttacttactctaatactgtcctgataattattcgctgcatgtaaccattattcactgtcaattactcaggc

SEQ ID NO: 696170 - DNA, 704 bp, Homo sapiens
ccatcaacattaaggtaagacactccaccagcgaaaagattatgacatggtaaaggctcagatgattgttagtactttttagcaaaaaagtatttttaaattatgtacatagatttttttagrcataatgctattgcacacttaatagactgtagtggaaacataacttttatatgcattgggaaaccagaaaatttgtatgacttgctttattgtgatatttgctttatcgcagtagtctggaacagaacctacaatatctgcatggtatgcctgtaattaattcctctcttttccatttgtgactactttgtaacctctttctagcatgcacaatccttattaaatttaaaaagtcttaaattttctagttgttaatgctttcaaatataatttctatcataaagtagattcaaaaaatatggaatatgctccctctcccttcttttttagactgccacctttctattttccttaggttagaatctggtattcttaaagtctgctattattttatttggcagggaggatttgcatgtgtcctccctatgtattccctaccctacacttaaccaagacttgcacagcatgacacatatattaggctaattttcatctttgtgctgcaattaacatttaatcatcagagatcgtgaccaagaagcaccactaaattttagatatatttttcctacaatccaata

SEQ ID NO: 696171 - DNA, 704 bp, Homo sapiens
ccatcaacattaaggtaagacactccaccagcgaaaagattatgacatggtaaaggctcagatgattgttagtactttttagcaaaaaagtatttttaaattatgtacatagatttttttagacataatgctattgcacacttaatagactgtagtggaaacataacttttatatgcattgggaaaccagaaaatttgtatgacttgctttattgtgatatttgctttatcgcagtagtctggaacagaacctacaatatctgcatggtatgcctgtaattaattcctctcttttccatttgtgactactttgtaacctctttctagcatgcacaatccttattaaatttaaaaagtcttaaattttctagttgttaatgctttcaaatataatttctatcataaagtagaytcaaaaaatatggaatatgctccctctcccttcttttttagactgccacctttctattttccttaggttagaatctggtattcttaaagtctgctattattttatttggcagggaggatttgcatgtgtcctccctatgtattccctaccctacacttaaccaagacttgcacagcatgacacatatattaggctaattttcatctttgtgctgcaattaacatttaatcatcagagatcgtgaccaagaagcaccactaaattttagatatatttttcctacaatccaata

SEQ ID NO: 696172 - DNA, 598 bp, Homo sapiens
agctcttagaaccatgagctattaaattatctttaatcccctaaactatagtcaacaaagactaattgataaactggaatgtataatatccatgtcccaattttacaggcaaggaaaaccaagaggaaaaatgcccaaggctatacaactaacaaaggctgcatttatgattaaaacccaaatctatctgacttcaaagcccctgtctttgacagcaatctcaaacaatatattctgagcaaaccactaattgcaaagaacaagaaatatgcccctaaaaccttcctacttttctgaatgacatatgaatttctcaaccttgatctctttaacccagtggtaaatgtaactatcactagcttgtactattagtaaaacactaaattaaaaaaagttttgtcggtttatgattcactgcraaatgtagcatttcttgttgttgttgttgttgtttgctttttgtcctgaatttacaattttaggttcataggtttggcccagtttctgataaagtaggattctgtgaaaattttcatattccctataactttgtggcttcatgatgtctttccatgtacctgtgtgtttgcctatgatg

SEQ ID NO: 696173 - DNA, 1889 bp, Homo sapiens
tttttctctcatcactggatgctcaatgttttgcacagtgcctgacacaaattaggcactaaatatacacttattgaatgaacgagtgagtgagtgaatgcacaaatgaatgatgccaatgagcctgaaagggtcaatgaatcggaagactcatttatcttctgttaagatccctcttacttctgaacatactgagaaaggaaacatcgtcaattgcttctctagtactagtgaggagatgtttccgttgagcgtcagacctttgaggctgggaagcagttttcctcaagttcaggaatatcctaatcaccagccacatatacggcattgttattagtcataatgagagaacaaaaccgaataagtcaggacgcctgtttaaactctttaaagcatattttaagattcaagaaagaaactcaaataactcaaacctaaggcataatatgaaatacgctgtgaaaatgttgcatatgatgtgctttgggaacatagagcaggatattgagaaatgccttttagaggttgctttagttttggtgattgcttattaatttttatttctaaggtaatatcttctcatgaacaagactgatacttatggtatctggtgaaaagcctccctctcatctctttttcccatcatctccagccccaccaacccaaacaagaaagtcccttatgttctttcagagttcctttctacaaatctaagccaaaaaagaaaatgctgatataagtattcttccttttctccattttttactttttactaaaaatgtagtacattatacatacttttctgcacatgctatttgcacttaacagtatatgttggagatctttgcatgtcagtacacatagaactttagagtttgctttccagctggctcttgaaaaggaggaatcttatttaaaaaaaaaataggggaaggtaatttcagaggaatgacctggaaagtttggaaaagcaaggttatcctgtttatctggcatacagaggaggagaaagggagtcacttgagataaagcaggtggagacaccttaagggtgatgcaaatacctttggaggacattgttgggtgaaaaaggatgtgatggagcatcaaagtactctaggaaaatcagtatacagtgggggacagaagatagagataagaaacagggagatcatctaggaagctaactaatctaaatctaaaccaggcatggtggtggaaaaaaaaaatggcaggaaaaggatgtaaatcttaaagacataggggagatgtattccacagcagaagttgtctaccctttttgtccggctgtcacacatgataaagatcatttgtactattcaattctgtgggcctatttagtgatatgtacatttcccagcttgctgggctcacttctatccattcctctagaagaaaaaaaatcagactttatatgagtgagaatgatgacttatagagttgattttgactcccctctatttgatatacttgtcaaaaagtaaatcatttataactttggcattttattattagcaatagtaaattattttgcagctgattgacagggtagtctaacatgccaacttggaaccactgattcccagaacttggtaactaatcctgaatagggttttaaagaggccagtgcaggaggaaggagctgatacaaatcggagtgactggatgcttgggatgtaattaataaagackgaaaatgaagcaggaacatagttttgtaacagtgaagacagagaacagcaggtataatcagctatgtgccttacattatatttagaaatctaaaccttaaaaaatgttcagagtaaatatatgaataagcacatggcctgagcctcttcatttattctgtctattccagtagacac

SEQ ID NO: 696174 - DNA, 1889 bp, Homo sapiens
tttttctctcatcactggatgctcaatgttttgcacagtgcctgacacaaattaggcactaaatatacacttattgaatgaacgagtgagtgagtgaatgcacaaatgaatgatgccaatgagcctgaaagggtcaatgaatcggaagactcatttatcttctgttaagatccctcttacttctgaacatactgagaaaggaaacatcgtcaattgcttctctagtactagtgaggagatgtttccgttgagcgtcagacctttgaggctgggaagcagttttcctcaagttcaggaatatcctaatcaccagccacatatacggcattgttattagtcataatgagagaacaaaaccgaataagtcaggacgcctgtttaaactctttaaagcatattttaagattcaagaaagaaactcaaataactcaaacctaaggcataatatgaaatacgctgtgaaaatgttgcatatgatgtgctttgggaacatagagcaggatattgagaaatgccttttagaggttgctttagttttggtgattgcttattaatttttatttctaaggtaatatcttctcatgaacaagactgatacttatggtatctggtgaaaagcctccctctcatctctttttcccatcatctccagccccaccaacccaaacaagaaagtcccttatgttctttcagagttcctttctacaaatctaagccaaaaaagaaaatgctgatataagtattcttccttttctccattttttactttttactaaaaatgtagtacattatacatacttttctgcacatgctatttgcacttaacagtatatgttggagatctttgcatgtcagtacacatagaactttagagtttgctttccagctggctcttgaaaaggaggaatcttatttaaaaaaaaaataggggaaggtaatttcagaggaatgacctggaaagtttggaaaagcaaggttatcctgtttatctggcatacagaggaggagaaagggagtcacttgagataaagcaggtggagacaccttaagggtgatgcaaatacctttggaggacattgttgggtgaaaaaggatgtgatggagcatcaaagtactctaggaaaatcagtatacagtgggggacagaagatagagataagaaacagggagatcatctaggaagctaactaatctaaatctaaaccaggcatggtggtggaaaaaaaaaatggcaggaaaaggatgtaaatcttaaagacataggggagatgtattccacagcagaagttgtctaccctttttgtccggctgtcacacatgataaagatcatttgtactattcaattctgtgggcctatttagtgatatgtacatttcccagcttgctgggctcacttctatccattcctctagaagaaaaaaaatcagactttatatgagtgagaatgatgacttatagagttgattttgactcccctctatttgatatacttgtcaaaaagtaaatcatttataactttggcattttattattagcaatagtaaattattttgcagctgattgacagggtagtctaacatgccaacttggaaccactgattcccagaacttggtaactaatcctgaatagggttttaaagaggccagtgcaggaggaaggagctgatacaaatcggagtgactggatgcttgggatgtaattaataaagacggaaaatgaagcaggaacatagttttgtaacagtgaagrcagagaacagcaggtataatcagctatgtgccttacattatatttagaaatctaaaccttaaaaaatgttcagagtaaatatatgaataagcacatggcctgagcctcttcatttattctgtctattccagtagacac

SEQ ID NO: 696175 - DNA, 1330 bp, Homo sapiens
atattttttgctattgaaacgtcaaggttttttttccacttctcttttcactcaacatatgcctggagaaatttctgcaacacaagtgataactatgagatgggctgggtcctcgtctatatagtaacatctcatgagaataaccagagcctttttagcagctcattaacaagggttatcattttctaaatgattacttcacggcaataaatgataacctagtacctgattaagtgaatataagtatcaacgcatttcctctattattagaaactctttatgcaccatatttcattggttccttattcatattgctgtgttatcttattatgggttgtgagaatcattgttgagtgatgtatcaaaagccttactacctcaaaatacctcccactgtgggtgccacgtgtctttgcaaccacatcccagagggcccacagtcattctgcatttaagagaggctgagttggggtaagactctttttcttccctgccaaacttcctattctgacgattatatgtctgctatcatcacagggaatagaatatcctcttgcactagcctaaagaaggggttccggaaacatctgcctattctaacaggacaactgtagatctaatgacagattctaggtgattacaaaatcgaccagaagggccctcagtgagtttgacaaagaagatacagtcttggtggccctcgtccttgagcagctcattcaaaagttaatcatcttaagcagcagaacacactgggcatgtggcatgggaggccgaggtgggcagatcacttgagctcaggagttcaagaccagcctgggcaacatggcaaaaccccatcactgcgcgtgtggggcgcgcacgcgcgcgcgcacacacacacacacacacacacacacacacacacacacacgcacaaagctgggtgtggtggcgcatgctggtagtcccagctattagggaggctgacgtgggaggataacttgagcacaggaggttgagactgcagtgagtggagactgcaccactgcactccagcctgggtgacagagtgagaccctgtctcaaaaatacaaaaaaataaaaaaacaaagcagcagaacaaaaggattgcgtggcatgtctcacaggcaactattggtaagacaaatacttatagcatcccccatatcggctcacacacactaagcatttggggacacatctaactatttaagtaaccatgatgccattttgtaaaatttaaaattcaaaccaaatgtatactgaaaaatataatatgcagaacacaaaatatgcaaaataccttttaaakaattagattttatca

SEQ ID NO: 696176 - DNA, 656 bp, Homo sapiens
atggggtactaccactgaaagacaggccatcctacagtccttatttaagaagaagcttctaaggaaactcaactatcatgaggaagacaaagacaaggataccagaggaaatgttaccttctgacacctacagctataacaaacagtaaatacaatcttagtcctagtcaggtaaacattaaaaacctcacactaatggccttttaatctcagttccttttacccagtatatagtgtctactatcagccaaaaattacaaatcataccaaaacaatggtacaatgaagtattgatattaataaaacccaaagtacttctgaggtacaagaactcagtttgtagaagaagaacataagaattaaaatgaaaaatacaatctgtagaagaatgcagacagtccttgatgctaaactgaaaggcaatgaagagcctctgattatttggyggaccaggagtcaccaattataaatattaatcttgcgtcagtgtgaagagtggcctcattcagaagaatagttgcgttgtaaatgagtggccttatctacaatagcccagaagtgagtatggatgacagatgtgaaaatgcaaagattatgaaaacatataatcagctgagaaagagagctgacagaatttgaaattgagagagaattaa

SEQ ID NO: 696177 - DNA, 1331 bp, Homo sapiens
ctgaatttgttggccttctcataaagaattttgtttttcccagagggtcaaaattaattaatgtccttacaatttattcagcatcccattatttcagagatgcctaaatagtctcactcagccgtattagtgtatcaagaatgatataatcaggctgctttgaagagagcactctgtaaaatatactgtctcaagtagtgattaacaaggaggataataaagtattctgtcagaattactgcttttttttaaatctgcagacaacattgcttgtatataacattacataaataaccagattcaaaacttttcatgtgatctttgatgaacatacacaagctctaaaagttcaaaaaagaaaaattaatactcttaataatctttaatgtttccattaaaaggtatcaattgaacactcgtgttttctttctgaacaacagatgtaaactttctcatatctattgactatactttaatcttgttctcaactgagcctgcagtttttgtatcattagtattattatagcagaagacatgctctgtagttttcaaataccgtcctaggataagggaagattatggcagataatatctaacgagctcacaggcatttgtgtccacacgttattgtccagatcttagcagaataaatgaaaattggcttgtttctcatattttctcaaaaaatcccatatattcatctttgggaattatagaagtaaaaaagttccatctaaatgtcaatttgttgttgtgatatttatcataatggagaaaataatatgtttataataagattttataaattttgatattttcaaaaagtaaaatactataaaactatgctgtgcaagatacttcactacatataaacttatttacactacatttttagaattacagaatcaaatagaaacctatttctctctgaaaatgcataacattaagaaagaatgggagtatgaacatacataaggcttatcgatggctttaacattactctgagkttactagaaaagttttttctgcttatttatattttaaaaattttagaaaagtttattatttagtaatgtaaaattgataaatagaaatattgaagaaaaagtaaatattaaaaggacaagaacagttcagacctttcaagtggcaaaccttaatatattcaccacgcttttcacaaacacacaaatgtgctaccaccatgtatactggattttcttttcaggtacagttcctgttacttgcttcttcttttcttttcttttcttttcttttctttttttttttttgagacagaatcttgctggagtgcaatggagtaaacacga

SEQ ID NO: 696178 - DNA, 1331 bp, Homo sapiens
ctgaatttgttggccttctcataaagaattttgtttttcccagagggtcaaaattaattaatgtccttacaatttattcagcatcccattatttcagagatgcctaaatagtctcactcagccgtattagtgtatcaagaatgatataatcaggctgctttgaagagagcactctgtaaaatatactgtctcaagtagtgattaacaaggaggataataaagtattctgtcagaattactgcttttttttaaatctgcagacaacattgcttgtatataacattacataaataaccagattcaaaacttttcatgtgatctttgatgaacatacacaagctctaaaagttcaaaaaagaaaaattaatactcttaataatctttaatgtttccattaaaaggtatcaattgaacactcgtgttttctttctgaacaacagatgtaaactttctcatatctattgactatactttaatcttgttctcaactgagcctgcagtttttgtatcattagtattattatagcagaagacatgctctgtagttttcaaataccgtcctaggataagggaagattatggcagataatatctaacgagctcacaggcatttgtgtccacacgttattgtccagatcttagcagaataaatgaaaattggcttgtttctcatattttctcaaaaaatcccatatattcatctttgggaattatagaagtaaaaaagttccatctaaatgtcaatttgttgttgtgatatttatcataatggagaaaataatatgtttataataagattttataaattttgatattttcaaaaagtaaaatactataaaactatgctgtgcaagatacttcactacatataaacttatttacactacatttttagaattacagaatcaaatagaaacctatttctctctgaaaatgcataacattaagaaagaatgggagtatgaacatacataaggcttatcgatggctttaacattactctgagtttactagaaaagttttttctgcttatttatattttaaaaattttagaaaagtttattatttagtaatgtaaaattgataaatrgaaatattgaagaaaaagtaaatattaaaaggacaagaacagttcagacctttcaagtggcaaaccttaatatattcaccacgcttttcacaaacacacaaatgtgctaccaccatgtatactggattttcttttcaggtacagttcctgttacttgcttcttcttttcttttcttttcttttcttttctttttttttttttgagacagaatcttgctggagtgcaatggagtaaacacga

SEQ ID NO: 696179 - DNA, 1331 bp, Homo sapiens
ctgaatttgttggccttctcataaagaattttgtttttcccagagggtcaaaattaattaatgtccttacaatttattcagcatcccattatttcagagatgcctaaatagtctcactcagccgtattagtgtatcaagaatgatataatcaggctgctttgaagagagcactctgtaaaatatactgtctcaagtagtgattaacaaggaggataataaagtattctgtcagaattactgcttttttttaaatctgcagacaacattgcttgtatataacattacataaataaccagattcaaaacttttcatgtgatctttgatgaacatacacaagctctaaaagttcaaaaaagaaaaattaatactcttaataatctttaatgtttccattaaaaggtatcaattgaacactcgtgttttctttctgaacaacagatgtaaactttctcatatctattgactatactttaatcttgttctcaactgagcctgcagtttttgtatcattagtattattatagcagaagacatgctctgtagttttcaaataccgtcctaggataagggaagattatggcagataatatctaacgagctcacaggcatttgtgtccacacgttattgtccagatcttagcagaataaatgaaaattggcttgtttctcatattttctcaaaaaatcccatatattcatctttgggaattatagaagtaaaaaagttccatctaaatgtcaatttgttgttgtgatatttatcataatggagaaaataatatgtttataataagattttataaattttgatattttcaaaaagtaaaatactataaaactatgctgtgcaagatacttcactacatataaacttatttacactacatttttagaattacagaatcaaatagaaacctatttctctctgaaaatgcataacattaagaaagaatgggagtatgaacatacataaggcttatcgatggctttaacattactctgagtttactagaaaagttttttctgcttatttatattttaaaaattttagaaaagtttattatttagtaatgtaaaattgataaatagaaatattgaagaaaaagtaaatattaaaaggacaagaacagttcagacctttcaagtggcaaaccttaatatattcaccacgcttttcacaaacacacaaatgtgctaccaccatgtatactggattttcttttcaggtacagttcctgttacttgcttcttcttttcttttcttttcttttyttttctttttttttttttgagacagaatcttgctggagtgcaatggagtaaacacga

SEQ ID NO: 696180 - DNA, 618 bp, Homo sapiens
ttttctgaaaatgtattaaatgtgtaatttactatattcaactataattgacaacatgatgcctctttacttaatgaaaaagaaagaactataggcctaaaagcagttgatcactaaacgtaagatattaaagtataacttagtaagccaagtgttggcttcaattgaacaaaattaattgtaatcacgtaaactctcacagaactctattacgaaaaagggaagaaagagtgcagacttctacatgagactagcaaagctagaataataactctcagtttccttctgtcctgaatcaacccatctaggaatcattctgcttcccttgagaggaaaggaatttctcttattgaataaagctttctttctaaaatcttagagaaagttttgaagaatttttccttttcaagttgccagaatcatttctagattgagttactaaccataatagaatttcaacatattacttggaaagttactaggagagagttcaagaagcatattctcatgtctaagattccctttacacaaayacatgtgcaaaacctcatcttctttcattaagacactctctccagcatcttgaagcccaaatcctgtctcctgcatgacatagat

SEQ ID NO: 696181 - DNA, 3104 bp, Homo sapiens
tgggttcgacagaatcatcttgcaaaacttgaggccatttttgtactgcttctgttcataacatttctgtaaagaaatatgaacaaaagttattttatcaaatgaatacataatggagcaacttctcacagcatcatatattctaaactcaagatccaaaattaggtctaaaatgtgatagaaaggatatcacttacaaacatgcagtgtacttttgttacctattcttgtcaaattgttctaaaatctacatattttcatttttataaaagaccatgaaaaaagacatttaaaaaacaggaaatgtggctcagcaaggtggctcacgcttgtaattccagcactttgggaggcaaaggtgggcggatcgcttgagctcaggagttcgagaccaacctggccaacatggtgaaaccgtctttactaaaaatacaaaaattagctgggtgtggtggtgcgtgcctgtaatcccagctactcaggaggcttaggcaggagaatcgcttgaacgcaggaggcagaggttgcagtgagcagagatcacaccactgcactccagcctgggaaacagagcgagactctgtctcaaaaaaaaaaaaaaaaaaattacaaaaattagccagacgtggtggcgcatgcctgtaatcccagctacttgggtggctgaggcaggagaatcacctgaacccaggagctggaagctgcagtgagccgagatcatgccactgcactccagcctgggcgactgaatgagaccctgtctcaaaacaaacaaacagaaaaaaatgacaattcaccaatcaatactgccacagaattttttattttgtttccctttcctagtacacagaattttttaattcaaaataattccaatgctttgggaggccaaggcgagaggactgcttgagcccagaagttcaagaccagcctggggaataaagcaagatctcatctctacaaaaaaattaaaaattcctcaggcgtggtggtgcacatctgtggtcctaactgcttgggaggctgaggtgggaggatcacttgagcccacgaggctgaggctgcagtaaggcatgactgtgccactgcactcagcctgggcagtagagcaagacaccatctcaaaaaaaaaatttaagcaaaaacatatgtggcaacagaaaaataccagaaactgcactaaaagcctttgctaccgcaagaatgaaaccaaagtgcatgggtgtgtgcacgcatacacacacacacacaaatactaccacttattgagcagctatgatatgtctgtaaaaaatttgtaatctcttacttaataccaattctttaatgtaggtgtcattacttccacttcagagatgtggaaactgaaactccagaggttcaaaaacttgtttataagctgctcagcttagctgcaaactctgatcttactccaaagaccatcattagtccaatgcaaggataagcaacatctttatttccgaatgccaccagccagggtacacaattaacatctctccctggcagccactgatgcgaagaacaccccattgctttccactcttccctggcttacattgttcagtcacactgggtgttaaattactcaacatgccaagcttatccccacctcaggcctcctacacttgtgttccttctgcctgaattgctttcctagatcttcccatggatggttcctcattatccaagtctcacatgtcccctacttgcccactttatcaaatactcccatcctccttccttccccaacatattctctaccatgttactctattttccacacagtgctatcatttcctgaaatcttatttatgctattatttagtgtctgtcttccccaccatcatataatggatccttagaacaatgatctcacctatctttcttatttattttttagagacagtctcactctgttgcccaagctggtgtgcagtgacacaatcaccataacctcaaactgctgagctcaagtgatcttcccaccttagcctcctgagtggataggaaggactacaggtgtgtgccatcatgcctggctaaatttttttttatttttttatttttggtagagatgaagtctcactatgttggtcttttgctcctgggctcaagtgatcctagctcccacctcagcctcccaaagtgctgggattacaggcatgagccactgcgccggccttagcctattttacatactgctgcattgccatggctaaacaaataagaaactgctccataaatacagcctactaagttcaaagcaaaatgccactagcaatggatgagaccatctttaagccttgcagcaggggctggatgtggaaggaattagaaaagtcttcatggaaaaaaagtttatattgaggcctcttgacagcctctggggaagggaactaggtgattctgcgataaggataggagagaaacctaaattttgaaccatgtgaatatactgcctattccaaaaatattttaaaataaaaaatgacaatctgagtttgactacaagtctgtctcacaaatgacaagaaaaaaacaagagaaaggaactactgagaaagacaaatagaaatactagtttttctgacttaccaggttatctgaaaataataatamtcatactgccaataacagtaataatagttaacacctattggaagcatttactatacgtccagacactgttatttttttccttcatcccatgacagcttatttactctttatttaaatcccaggaaagcctatgagatgcatgatatccccatttagatagagaaactgaggcatagttatagagtttatataactattaagtgccagagccacaactcttaaccaggtagtctgtccccagagtccaagtactcgggtaaagacaagtcaacctgtaatctcagctactcaggaggctgaggcacgagaatcgcttgaatctgggaggcagaggttgcagtgagatcttgccactgcactccagcctgggcgacaaagcgatacactctcgcaaaaaaaaaaaaaagacaaatctacattcactcaggaaccattatatactaagcagaaatgatagattctag

SEQ ID NO: 696182 - DNA, 1828 bp, Homo sapiens
ttgccttcccaaaatcctcggattacaggtgtgagccactgcgcccagccattataaaggtatttttaaaacctcagctctgtgtatatttgtgactgaaaggggaaaaggcaagttcttcttgagttggacagagaatggagcagcgcagtatagggagtagcagtagtttgctgtttgttgagctgcagaaatgcccggatgagctaggaggaagaggccaagctcggggactgaaaggacaggtaatcatctgtggatgctgctgctttctgggtgctcatacggagttctcatttacatatcagaatctaaagagccaactacagctataatcataacccagctagtttctgaagtgtgctaaacctaaaatgtttgtatcttttgtgatcttttcctgattaacctgtctcatttaactgttccttggttctatcttaatttggtggaagctacagtttaccttctgatccctgttatttttcagggctagtagtagaatgccaacaagaaagatcacagataaaaaataaagaaatagcctttcgtgtgttgagagctagactctaccagcagattattgagaaagacaagcgtcagcaacaaagtgctagaaaactgcaggtaagatttacttggtataataatttagtgactgtttaaagaaaagtcattttctgtagagaatgcagtgtttgttcttgcttaaatgggaatgttttagagcatagagaaatgtgctcctttgtaaataagcagtaactcagtacaaatgaactgatgggttatggctmaacttgggcataccagtttgcaagttagtaaatgtaagatgtataaactaaaaattatttcctagttgtttccctcttgtgtttatatcattactgtcttaagaagaaaacggtttaaaagacaaataattctttgagaattaagaacgttttttatttctaaaaattaaaacctatgcttgtactataactctatgtgagatcaaatacaaatggcactgcaaaaaactgggaacagtgaatactactgatggagactagggacaaggggtagaaaggaaatttatttttcattatgtaccatttggtactttttgaattttgtacaatatatatgatatagtgttactttttcaaatagataaatagatgaattctaagcaaaatgaataaatgtcattattttaagtaaacctaatatataatttaaattctttttttttttttttttttaatgacagagtctcgctctgtcaccaggctggagtgcagtggcgtaatcttggctcactgcagcctctacctccctggttcaagcgattctcctgcctcagcctcctgagtagctgggattacaggcacgtgccactacacctggctatgctacagtaatttaaatttggaagattttgtggccttttaggataatgaattgtctaaacctaagcattagttatacttttcatctagatgtatcctagctttttcacactttcacgtttctagctttctttacctacacgctaacttgcaggtaataaaagtgacaggataaataatattaacactattagtggtaatcccagattgtagtgcatcatcagtgtatacacttgcagataggaatgctcatttacaaaccataacttatttttgcttttaacaagcaaacaatataccctgggtacacaccatcacttcttggcaaataagtgataaccacagacactatgaactctgccacatttgaattttaaaaagacatttggatttacttgccgtttaacattttggcaccaggcgttgcacaa

SEQ ID NO: 696183 - DNA, 1557 bp, Homo sapiens
tctgcccattctttttctttgtcattttgtatatatgwcttttagaaagtatctaaattgttgaaatggtcatttgccaagtgctttttccattgtaatgaagacatttataaaggtaaaatataaattgctttttgttatggcacaggtgggaacaagagcccagtcagagcgaattcggacatataatttcacccaggatagagtcagtgaccacaggatagcatatgaagttcgtgatattaaggtaatactactgagtatgctttgcctacctttgatttcagaagaaaatatagtcaaattctagaacatatatgtagatattaccaagtatatctaaaatattaccaagtaatttaaatcattaagccaccctaaaatttacaaacacttttattagtttgctggttaaaaaaataatgatctttatgccattttgaaacaatggtcttttctaaattccaaattcttcgttatgcaatcacaatgcatgaacgtatattcagtctgcatatatacatgggtattggttttctattgacaggtaacaaattaccacgaatatagcaacttaaagcagtacccatgattaaagtattatctcatgatttctgtaggtcagaaatctagggacaactgagcttagttatcttctcaggatctcacaaggctgaaatcaaggcatggccaggctccatactcttctggagcttggggtcctcttccaagtttatgtggttgccagcagaatgccattgccttcgattgtaggactgaagcccccattcccttgctgacagtcagctggaggctgcttttcagcgcgtaaatactgttggaagttgtttcccagtggctacctccagagactctctcccactttgaatctcttcttgcaggaatgactcgggcctttttaagggctcacctgtttaggtcaagctcacctggataatgttccttttgattaactcaaagtcagctgcttagtcacctaggcactagaatgatactccatcattttcacaggtcctgtctgcactgagagggagttattcacagtgtgtacaccagggggcatcttagaattctccctaccacaatgtgtcttcattagattgaggtgttacagttaggctgttggggaaaagactcggtcaagattgtttgaacattaacctatctaaatcgcatccagcaaagaccactgacataaatatataaatatattaatgatgaagcacagaaaaatgtcttttttgttgccactgaaggagaaagtgaactggtcccataaaggactatgtggaaaaggcagcagacagaaatctttgatgtttttccttggtgccatgtgatacctaaggcttctttcacttgactctgtcccatcctattctcaaaattaaagtcctagttttacaagggaaatataccttgtaaaaaagtcctagttatacaaggttaatatgtttgtcaatttctgtatgtcttatgccacatcctctgtctcctcagcaggataaggctatcttgcttaggaacatagccatg

SEQ ID NO: 696184 - DNA, 627 bp, Homo sapiens
actcaagaactagaaattgaggaaaggaagcacatcggtcacrgaaccctgaaagcacagcaagcgagaaaataagtattaggaaattttttcaaactagctgaataatgtgtttcaggtataaagggattatcaatagatcaacagaagtaatatcaataaacatacgaaaatattttcagaagagacatcggcacataaaatttttgaaacagattatactgaaaaaaattaacccaatgaataaaagataatgaaatggaataaagcacctgatactaaaatttgctattgatgcaattattggttaatactagtagtgattgagtcaaagtataagacaagatttttgaaagtgaacaactgagatatctatcagcaaccaaaggcatagtaattgatatatttttaatttgtcaacattatatttatcaacttgtccaaatttaatcaacagcagagaagataaactttagtggaatatttatagtttgatatacactaaagccaaatgctgagaagaaaaacatgtaaaatgccttttttttaaaaaaaagaaacttttattctttttgggaagaggttgaagagatgtgcagaagaaattttaaagaaagaagaagagga

SEQ ID NO: 696185 - DNA, 627 bp, Homo sapiens
actcaagaactagaaattgaggaaaggaagcacatcggtcacggaaccctgaaagcacagcaagcgagaaaataagtattaggaaattttttcaaactagctgaataatgtgtttcaggtataaagggattatcaatagatcaacagaagtaatatcaataaacatacgaaaatattttcagaagagacatcggcacataaaatttttgaaacagattatactgaaaaaaattaacccaatgaataaaagataatgaaatggaataaagcacctgatactaaaatttgctattgatgcaattattggttaatactagtagtgattgagtcaaagtataagacaagatttttgaaagtgaacaactgagatatctatcagmaaccaaaggcatagtaattgatatatttttaatttgtcaacattatatttatcaacttgtccaaatttaatcaacagcagagaagataaactttagtggaatatttatagtttgatatacactaaagccaaatgctgagaagaaaaacatgtaaaatgccttttttttaaaaaaaagaaacttttattctttttgggaagaggttgaagagatgtgcagaagaaattttaaagaaagaagaagagga

SEQ ID NO: 696186 - DNA, 627 bp, Homo sapiens
actcaagaactagaaattgaggaaaggaagcacatcggtcacggaaccctgaaagcacagcaagcgagaaaataagtattaggaaattttttcaaactagctgaataatgtgtttcaggtataaagggattatcaatagatcaacagaagtaatatcaataaacatacgaaaatattttcagaagagacatcggcacataaaatttttgaaacagattatactgaaaaaaattaacccaatgaataaaagataatgaaatggaataaagcacctgatactaaaatttgctattgatgcaattattggttaatactagtagtgattgagtcaaagtataagacaagatttttgaaagtgaacaactgagatatctatcagcaaccaaaggcatagtaattgatatatttttaatttgtcaacattatatttatcaacttgtccaaatttaatcaacagcagagaagataaactttagtggaatatytatagtttgatatacactaaagccaaatgctgagaagaaaaacatgtaaaatgccttttttttaaaaaaaagaaacttttattctttttgggaagaggttgaagagatgtgcagaagaaattttaaagaaagaagaagagga

SEQ ID NO: 696187 - DNA, 627 bp, Homo sapiens
actcaagaactagaaattgaggaaaggaagcacatcggtcacggaaccctgaaagcacagcaagcgagaaaataagtattaggaaattttttcaaactagctgaataatgtgtttcaggtataaagggattatcaatagatcaacagaagtaatatcaataaacatacgaaaatattttcagaagagacatcggcacataaaatttttgaaacagattatactgaaaaaaattaacccaatgaataaaagataatgaaatggaataaagcacctgatactaaaatttgctattgatgcaattattggttaatactagtagtgattgagtcaaagtataagacaagatttttgaaagtgaacaactgagatatctatcagcaaccaaaggcatagtaattgatatatttttaatttgtcaacattatatttatcaacttgtccaaatttaatcaacagcagagaagataaactttagtggaatatttatagtttgatatacactaaagccaaatgctgagaagaaaaacatgtaaaatgccttttttttwaaaaaaagaaacttttattctttttgggaagaggttgaagagatgtgcagaagaaattttaaagaaagaagaagagga

SEQ ID NO: 696188 - DNA, 2009 bp, Homo sapiens
  misc_feature 1312, 1313, 1314, 1315, 1316, 1317, 1318, 1319, 1320, 1321,1322, 1323, 1324, 1325, 1326, 1327, 1328, 1329, 1330, 1331,1332, 1333, 1334, 1335, 1336, 1337, 1338, 1339, 1340, 1341,1342, 1343, 1344, 1345, 1346, 1347, 1348, 1349, 1350: n = A,T,C or G
  misc_feature 1351, 1352, 1353, 1354, 1355, 1356, 1357, 1358, 1359, 1360,1361, 1362, 1363, 1364, 1365, 1366, 1367, 1368, 1369, 1370,1371, 1372, 1373, 1374, 1375, 1376, 1377, 1378, 1379, 1380,1381, 1382, 1383, 1384, 1385, 1386, 1387, 1388, 1389: n = A,T,C or G
  misc_feature 1390, 1391, 1392, 1393, 1394, 1395, 1396, 1397, 1398, 1399,1400, 1401, 1402, 1403, 1404, 1405, 1406, 1407, 1408, 1409,1410, 1411: n = A,T,C or G
tgaaactaaacaaattaratgtatagtcaaagcctgcctccataagtgggtgaaattccttgcatatgtttttatggttatctagctgtgtcttaatttgactaaaaagttgtgaactattgtgacaacttattatgatatgtctccttttcctatatctataatcttgaactataatgtgactttgtacctcttctcattaaaagatggaattgtctttaatacaggtggctttacaacttgctttggccaagataacagtagcaaaattgaagcgggaacatacttgaaaattgctcctgtgttaagcttgccatctcactgcctggggaactctgatgtcatgtgaacaaccctagacaagccagctagcggataacacacaggagacacttcatctaccccaaccatcccagaccaaaatgttataaaccagccagccccacatattattaccctgtagatgataacagctgtgaaaggatgaggccaaataagaacaactgcccatctgaaacaaacccaaagtttttactcacaaagcatgagtgaaataactgattattgtgttaagccttaaattctggggtagatgtttacacaggactagataactgatacaactggaaaatagagagtttccttcagcatccaagtattgaccataagagagaatgagaaacagcagctggaaagagggggggaaaatgatgatatttacatgtgaatgattgacagtagatggaagcagaaagttcagatatatcctgcctgataaattctattatctgcatgaaatgagaggttgggtcttctgagaatcaggtggtgagatagtgagatgcatgagagtaataaaagtttgaaatatatcttgagggaaagggaaacagagatgtcaagggactcttgaaaatgcttaatgtcctactgaattcagggaatctgaaattgttgggggatttgtcatagattaacatgagccattccctagaagttattacacttttgaagtcccagagaaagtaaaaaggaagacagctagcagaatctaggggtcttacttcagcaaatattatacccccaagcaattgaattcagtgaaaatctgagtccataatttggctcaaaaagagaaatctttaaaatgatttcctaaaccaaaaactaaactcctatcaatatccctgtgtacagccatcagatatcacccactggcaaacagggaagaattttgagaggaggttattagttgagactattttgagatggttctgaattcttattacccaatagcttttatctatagtannnnnnnnnnnnnnnnnnnnnnnnnnnnnnnnnnnnnnnnnnnnnnnnnnnnnnnnnnnnnnnnnnnnnnnnnnnnnnnnnnnnnnnnnnnnnnnnnnnntgatttcgaattcgagctcggccccctaagtaaaacagccagacctttaataacaaacacaatcactcccatataatattctaactgagattttggactagcattactgacatttaaatatacttatgtgattctatagctgagagtgagacatcaaactcatatgagcagagagtagaatggtgtttattagagactggaggtgggggaatgcggagatgttggccaaagggtacaaagttgcagttagatagaagaaatacgtgacaaatatttaaggtaatggatatgttaattagcttgattcaatcattccacactgtatacatacaacataacatcactgtgtaccccataattttttataattgtaatttgtcaaaaaataaaataataaaaaagaaactcccatccttaatatgaatattctaattcaatttcctgggaataaaaaggaaataatttttacaaatctctggctagtcaacctcaaggattaggtaatcactcttctcccacatgatcaaaacaaaatttcctaggtttcagacctccctttaattacaatgcaggatcaataaatatcattaacactata

SEQ ID NO: 696189 - DNA, 650 bp, Homo sapiens
acaagcgaaagagagaaataaaagcactagcccagtaagaacatcctctatttgccttactcataagccatttcagggccatatctgcaaaactaggaagaaactgctaagtgctaaaacattttaaccaatcactttaagaaaggcagaggaagcaaatcactctagtagataaaacaggagagactgaagttgctatagttgtaatctttttaaaaataatctatttgttttgaagaaaatcccaataggaaggtgtcttcatttttaaaggtatctctcttcagatactatttaatattcaatgtgctaataatgtcaaaaatkgttaaatgcatatatatctgtatttcaaataggatagtttatcaagtcaggttttccaagaagctgatactatgcaattataagtcactcaaaaggttatgagaggaacgttagataaagattaagaagaaaaagcagatctaagtgcagggagtcttcagtgatgcaagcctggcttctgtcaaaggagggggagaaggaagaaggatgagaatgaaagagtcacagcctgaaacacagtttaggaagttttggcccggacaataggagtctccagtccaaagtcttctgttggaaggttatcacaaatcttaaaaatggcc

SEQ ID NO: 696190 - DNA, 814 bp, Homo sapiens
taatcctcttctcaggacctatttaaaagacaataaaaattttgtttttgtgtgttgaaagatttctccattatcaagagagtagtccttaactttagaatgactgcatatatagatatgaaaaataaggaaacaattattaggaaaactaatcaaatattttactaacatttagtaattttaacaaaattattgtgcattgtattttgtagcatttatgcagaggatatactaacctgtttaaatttttagacaaaaatagtaraaaatagaacatcgtcattttcaggagcaaggaagtaacctgtgaaaaagtgaatgcctttcttcaaataatatgctaatgaaaggctgagatattaatgtctaaatattataaaactttcattttaatataatgttttactttatatttatattatattgtataacaaagaaatgtgagtcttgttacacctgagaacttgaactggcaatctacatattgttgttgaaacaattttaagttaaacatacaatgagagggaaaaatgattctgttgcctcaattttaaaaggaatattttgaagaactaattttccatataatagcttgttatgatcttgccttttagcctccctggataaagaaatgcatacttataataattgaaggaagacaattttccttgttttctgcaaattagaaatatattaggctattaaatacataattcaaaatatacagaataaaggtattatagaacctaagaattatataaagaattatatacataaagtaatgaatacatatacaaatagtataaaaatacta

SEQ ID NO: 696191 - DNA, 1275 bp, Homo sapiens
  misc_feature 544, 546: n = A,T,C or G
gttcgagcccagggtgcgcctcgggccgctaggggtaccccaaagtgtgcagaaggccyatgaggggaaggtgaggcacctggggcagagaaaaaaaaaaaacacctcgccgcggagaagcggggactgggtccccccacggacgaaagtgtcttcccatcagcccttgcgctgggccacagggaccctggcttccctggttcgagcccacagtgcacctcgggccgctaggtgtaccccaaggcagacagaaggcccatgaggggaaggtgaggtttgagggaggagcggtgaggcacctgtggcagaaaaaaaaaacgcgccacggagaagcagggcatgggtcccccacggacgaaggtgccttcccatcaggccctgcgctgagccccgtggaccctggcgaccttgactcaaacccacggtgcgcctcgggccgttaggggtaccccgaggcaggcagaaagcccatgaggggaagttgaggtttgagggaggaaaggtgaggcacctgtggcagacaaaaaaaaaaaaaaaaaaaaananccgcaccgcagagaagcggggcctgggtccgccacggacgaaagtgtcttcccatcagcccttgcgctgcgccccggggaccctgacgaccctgattcgagccgagggtgcgcctcggtccactaggggtaccccaaagcaggcagatggctcatgaggggaaggtgaggtacctggggcagccaaaagaaaaaaaaaactgcgccgcggagaagcggtgcctgggtcccccacggacgaaagtgtcttcctatcagcccttgcactgggccccgggaaccctggcgtccctggttcgaccccatggttcgcctcgggccgctaggggtaccccaaggcgggcagaaggcctatgaggcgaaggggaggtttgagggaagggaggtgaggcacctatggcagaaaaaaaaaacgcgccacggagaaggggggcctgggtcccccacggacgaaagtgctttaccattagcccctgcgcttggccccgtgcaccctggcgaccctggttcgaacccagtgtgcgcctcgggccgctagccgtaccccaaagtgggcagaagcccatgaggggaaggtgaggcacctggggcagagaaaaaaggaaaaaacctcgccacggagaagggaggcctgggttccccacgaaagaaagtgccttcccatcagacccggtgctaggccccagggaccctggcatccctggttcgagcccagggtgcgcctcgggcc

SEQ ID NO: 696192 - DNA, 1275 bp, Homo sapiens
  misc_feature 544, 546: n = A,T,C or G
gttcgagcccagggtgcgcctcgggccgctaggggtaccccaaagtgtgcagaaggcctatgaggggaaggtgaggcacctggggcagagaaaaaaaaaaaamacctcgccgcggagaagcggggactgggtccccccacggacgaaagtgtcttcccatcagcccttgcgctgggccacagggaccctggcttccctggttcgagcccacagtgcacctcgggccgctaggtgtaccccaaggcagacagaaggcccatgaggggaaggtgaggtttgagggaggagcggtgaggcacctgtggcagaaaaaaaaaacgcgccacggagaagcagggcatgggtcccccacggacgaaggtgccttcccatcaggccctgcgctgagccccgtggaccctggcgaccttgactcaaacccacggtgcgcctcgggccgttaggggtaccccgaggcaggcagaaagcccatgaggggaagttgaggtttgagggaggaaaggtgaggcacctgtggcagacaaaaaaaaaaaaaaaaaaaaananccgcaccgcagagaagcggggcctgggtccgccacggacgaaagtgtcttcccatcagcccttgcgctgcgccccggggaccctgacgaccctgattcgagccgagggtgcgcctcggtccactaggggtaccccaaagcaggcagatggctcatgaggggaaggtgaggtacctggggcagccaaaagaaaaaaaaaactgcgccgcggagaagcggtgcctgggtcccccacggacgaaagtgtcttcctatcagcccttgcactgggccccgggaaccctggcgtccctggttcgaccccatggttcgcctcgggccgctaggggtaccccaaggcgggcagaaggcctatgaggcgaaggggaggtttgagggaagggaggtgaggcacctatggcagaaaaaaaaaacgcgccacggagaaggggggcctgggtcccccacggacgaaagtgctttaccattagcccctgcgcttggccccgtgcaccctggcgaccctggttcgaacccagtgtgcgcctcgggccgctagccgtaccccaaagtgggcagaagcccatgaggggaaggtgaggcacctggggcagagaaaaaaggaaaaaacctcgccacggagaagggaggcctgggttccccacgaaagaaagtgccttcccatcagacccggtgctaggccccagggaccctggcatccctggttcgagcccagggtgcgcctcgggcc

SEQ ID NO: 696193 - DNA, 1382 bp, Homo sapiens
cgtgggtatccacctggatcctgattttcaagtggggagtggatatagacctgggaactgatggccacctatgctataagtaacccaaccacctggggcctggtgttcacctgtggcctgatatccacctggtacctgtgtgtcaatctagagcctggtgtccacttgaggactaggcagacacctggggcttggtgttcaccaggggcctggtgttcaacttgcamccagtgtccacctggaccctgtgtatcaacctgtggcctaggtggccacttggagctttatgtgcacctggggcctgagaggttcctaggatctgatgaccactggggcccaggtatccacctgggatatcaggcttcaagtgtacacccaggctccatgtggacaccaggccaggagaacgccagcccttatctgaacatcaggtcctggatggactcccaggctccatgtgtacatcaggccccaggtatacacgggactccaggtggacaccagcactcaattggatacacaccctgaaggtggataccaggccccacgtgaattcctacactccaggtgaacatcaggtcccaagtggatacctggaccccaggtggataccagtctctaaattaataccaggcctcagatggtccttaggagccatgtgggcattagtcatcaggaagttacctaggcccaaagtggacatcaggccccatgttgacacaagatctagttggaagtcaggccccaggtggacacccaggccctaggtaaatacttaggtcccaagttgacagcaggccctatatgaacactcagaactcaggtggacatcaggcctcaggtggacatctgagttcatctggaacctcatgttacaggccccatgtaaacaccaggccttagatggatacccaatctctaggtagacatcagagctcagattgacacaaagactccagtagacataatgtaccaatgaatatccaggcgcccggtaaatacccaggccccagattgacaccacggtctatgtggacacagaggccctgggtagtaaacaggcccaaggtggacactggactggacatcagatcctaggttgacaaccatgctccaagttgacaccaggccccaagcgaacatctggccccagctggacactagtcccctggtgaatacctagtctcaaggttgacatcagaccctatgtgaacactagaccccagataaacacttatgccctaagtggacatcaggcctcaggtggttacccagtcccaaggtgaacatcaggaccccgatggcaccagttatcaagtggattcctaggccccaggtgaatatcaagccctaggtggatactgagccccaggtggatacct

SEQ ID NO: 696194 - DNA, 1382 bp, Homo sapiens
cgtgggtatccacctggatcctgattttcaagtggggagtggatatagacctgggaactgatggccacctatgctataagtaacccaaccacctggggcctggtgttcacctgtggcctgatatccacctggtacctgtgtgtcaatctagagcctggtgtccacttgaggactaggcagacacctggggcttggtgttcaccaggggcctggtgttcaacttgcaaccagtgtccacctggaccctgtgtatcaacctgtggcctaggtggccacttggagctttatgtgcacctggggcctgagaggttcctaggatctgatgaccactggggcccaggtatycacctgggatatcaggcttcaagtgtacacccaggctccatgtggacaccaggccaggagaacgccagcccttatctgaacatcaggtcctggatggactcccaggctccatgtgtacatcaggccccaggtatacacgggactccaggtggacaccagcactcaattggatacacaccctgaaggtggataccaggccccacgtgaattcctacactccaggtgaacatcaggtcccaagtggatacctggaccccaggtggataccagtctctaaattaataccaggcctcagatggtccttaggagccatgtgggcattagtcatcaggaagttacctaggcccaaagtggacatcaggccccatgttgacacaagatctagttggaagtcaggccccaggtggacacccaggccctaggtaaatacttaggtcccaagttgacagcaggccctatatgaacactcagaactcaggtggacatcaggcctcaggtggacatctgagttcatctggaacctcatgttacaggccccatgtaaacaccaggccttagatggatacccaatctctaggtagacatcagagctcagattgacacaaagactccagtagacataatgtaccaatgaatatccaggcgcccggtaaatacccaggccccagattgacaccacggtctatgtggacacagaggccctgggtagtaaacaggcccaaggtggacactggactggacatcagatcctaggttgacaaccatgctccaagttgacaccaggccccaagcgaacatctggccccagctggacactagtcccctggtgaatacctagtctcaaggttgacatcagaccctatgtgaacactagaccccagataaacacttatgccctaagtggacatcaggcctcaggtggttacccagtcccaaggtgaacatcaggaccccgatggcaccagttatcaagtggattcctaggccccaggtgaatatcaagccctaggtggatactgagccccaggtggatacct

SEQ ID NO: 696195 - DNA, 1382 bp, Homo sapiens
cgtgggtatccacctggatcctgattttcaagtggggagtggatatagacctgggaactgatggccacctatgctataagtaacccaaccacctggggcctggtgttcacctgtggcctgatatccacctggtacctgtgtgtcaatctagagcctggtgtccacttgaggactaggcagacacctggggcttggtgttcaccaggggcctggtgttcaacttgcaaccagtgtccacctggaccctgtgtatcaacctgtggcctaggtggccacttggagctttatgtgcacctggggcctgagaggttcctaggatctgatgaccactggggcccaggtatccacctgggatatcaggcttcaagtgtacacccaggctccatgtggacaccaggccaggagaacgccagcccttatctgaacatcaggtcctggatggactcccaggctccatgtgtacatcaggccccaggtatacacgggactccaggtggacaccagcactcaattggatacacaccctgaaggtggataccaggccccacgtgaattcctacactccaggtgaacatcaggtcccaagtggatacctggaccccaggtggataccagtctctaaattaataccaggcctcagatggtccttaggagccatgtgggcattagtcatcaggaagttacctaggcccaaagtggacatcaggccccatgttgacacaagatctagttggaagtcaggccccaggtggacacccaggccctaggtaaatacttaggtcccaagttgacagcaggccctatatgaacactcagaactcaggtggacatcaggcctcaggtggacatctgagttcatctggaacctcatgttacaggccccatgtaaacaccaggccttagrtggatacccaatctctaggtagacatcagagctcagattgacacaaagactccagtagacataatgtaccaatgaatatccaggcgcccggtaaatacccaggccccagattgacaccacggtctatgtggacacagaggccctgggtagtaaacaggcccaaggtggacactggactggacatcagatcctaggttgacaaccatgctccaagttgacaccaggccccaagcgaacatctggccccagctggacactagtcccctggtgaatacctagtctcaaggttgacatcagaccctatgtgaacactagaccccagataaacacttatgccctaagtggacatcaggcctcaggtggttacccagtcccaaggtgaacatcaggaccccgatggcaccagttatcaagtggattcctaggccccaggtgaatatcaagccctaggtggatactgagccccaggtggatacct

SEQ ID NO: 696196 - DNA, 1875 bp, Homo sapiens
ttgaatatgagtggtgagagagggcatcccagtcttgtgccagttttcacagggaatgcttccagtttttgtccattcagtatgatatttgctgtgggtttgtcatagatacctcttattattatgagatatgtcccatcaatacctaatttattgagagtttttagcatgaagtgttgttgarttttgtcaaaggccttttctgcatctattgagataatcatgtggtttttgtctttggatctgtttatgtgctggattatgtttattgattttatgcaagaataatctaaatttctctggtgaaaaaacctaaacatgccttttaaaaatttatatatcattccttttgtaaaatctaatgaaaataacaattttgtctattgtaaaaggcaagtgattgcaacagatggaaatcactttatttcctatatctttgtaaagataatgactgctaataaacaacatgaagaattttcaggtataattttgataaaaatttaatggttttgggcttctaggccaaatctgcaatacaacccttcataagattgtactttgaaactctcgttgtcatctgacatatgcagatagtacagaaatataatcccctttctaaatgtttacattgtctccctggtatgaattagcttgctggaaacatcagtaatcactgacataaagatcccactattaaataaaactgatactttttaaaaccatgcagcaaataagcaacatttcataaagcaacacaggattttatatgtttcctactccattagaggctattatgctgaattggatcctcattccaacctgtgtccatattttagggttgaaatagtctaaaacataacatttactgttctcctgttgtgatatctgtatagctaatatgttcacattctctgtattcatctatgttaataattttaaaaaggaaaagaaagggggctttaggaagaactttacatcacacgtcagagtaaacatcaaatcaagttctcaatttactaataaacccatttaagaaaaagtattccgctagagagcaatgaatcttattgtctttgtgtctgatccatatttctccacctgatacatggaaataaccagagagttactataaaatacctcaggtgcattgttgaaagtaatttcctgcttttgtgggataactgaaacataaacgtaaataagatagtttgaaagttcactttctcatcaatgctcaaataatttgttctaataaagcccagtaaaatttagcttgtaatgccatcaaggtaaatatattcatgaagtactcacttgctaaatttttaaacacaacacattatctcatctttaatctttagttgttatttcaattatccattgctgtgtaattagcagtcatcaaatttagttgcttaaaacacaaactcacaatttgttaactttggttgggctcaggaggataatagtcggagtcttgcctaggtttccttatatgactgacaaggcctacatagtccaaagtgacatcactcaaatatctggcacttcactggtgctatcagctgggttctcctccacttagtctctctggtagagtagatcaggttctcatttggcattgctgccattttaatttggcaagcctaaatttactatcatttgtcaagtgtctattaagtcagtgtcagagagggctatataaggatatggctatgaggaggcttaataaatcgagggttctttgatataacaggctacccagttacatttcttgttctaaagattttttcagatacaacaaacaatattttacaatttaacttgtagatgaatgagtttcctgagatataatttaactaagcaaactctttc

SEQ ID NO: 696197 - DNA, 1875 bp, Homo sapiens
ttgaatatgagtggtgagagagggcatcccagtcttgtgccagttttcacagggaatgcttccagtttttgtccattcagtatgatatttgctgtgggtttgtcatagatacctcttattattatgagatatgtcccatcaatacctaatttattgagagtttttagcatgaagtgttgttgagttttgtcaaaggccttttctgcatctattgagataatcatgtggtttttgtctttggatctgtttatgtgctggattatgtttattgattttatgcaagaataatctaaatttctctggtgaaaraacctaaacatgccttttaaaaatttatatatcattccttttgtaaaatctaatgaaaataacaattttgtctattgtaaaaggcaagtgattgcaacagatggaaatcactttatttcctatatctttgtaaagataatgactgctaataaacaacatgaagaattttcaggtataattttgataaaaatttaatggttttgggcttctaggccaaatctgcaatacaacccttcataagattgtactttgaaactctcgttgtcatctgacatatgcagatagtacagaaatataatcccctttctaaatgtttacattgtctccctggtatgaattagcttgctggaaacatcagtaatcactgacataaagatcccactattaaataaaactgatactttttaaaaccatgcagcaaataagcaacatttcataaagcaacacaggattttatatgtttcctactccattagaggctattatgctgaattggatcctcattccaacctgtgtccatattttagggttgaaatagtctaaaacataacatttactgttctcctgttgtgatatctgtatagctaatatgttcacattctctgtattcatctatgttaataattttaaaaaggaaaagaaagggggctttaggaagaactttacatcacacgtcagagtaaacatcaaatcaagttctcaatttactaataaacccatttaagaaaaagtattccgctagagagcaatgaatcttattgtctttgtgtctgatccatatttctccacctgatacatggaaataaccagagagttactataaaatacctcaggtgcattgttgaaagtaatttcctgcttttgtgggataactgaaacataaacgtaaataagatagtttgaaagttcactttctcatcaatgctcaaataatttgttctaataaagcccagtaaaatttagcttgtaatgccatcaaggtaaatatattcatgaagtactcacttgctaaatttttaaacacaacacattatctcatctttaatctttagttgttatttcaattatccattgctgtgtaattagcagtcatcaaatttagttgcttaaaacacaaactcacaatttgttaactttggttgggctcaggaggataatagtcggagtcttgcctaggtttccttatatgactgacaaggcctacatagtccaaagtgacatcactcaaatatctggcacttcactggtgctatcagctgggttctcctccacttagtctctctggtagagtagatcaggttctcatttggcattgctgccattttaatttggcaagcctaaatttactatcatttgtcaagtgtctattaagtcagtgtcagagagggctatataaggatatggctatgaggaggcttaataaatcgagggttctttgatataacaggctacccagttacatttcttgttctaaagattttttcagatacaacaaacaatattttacaatttaacttgtagatgaatgagtttcctgagatataatttaactaagcaaactctttc

SEQ ID NO: 696198 - DNA, 626 bp, Homo sapiens
gtgtgtttgttctgtttgaagatacttcaaaagtaacaactgtaaaagagattactgctttgatcagagaatctgaatcccctttgttgaccatgaatgattggtctttgtgatgttaatgtttcttttaaggaatatcagatctgtaaatgcaccttaattacaggcaagcagttttggagggaatttgtgacagcattttatggaaagtctttcctagttccccttcaaatctaattatagtagaaagattgttttaggccaagcagcaaaaagctataattattagtgctttcattaatgttcatgtaggtcaaaaaagttatcttatgaagaataagatttaaatctcaaaaatgcttaattttccctataaagcacaraacaacatgcagagccttaactgagatgtccttactaacctgttcaccataattatgctggcagctcaggaggccgttttacgaagactttacatttagaaacagcacgtaggaatccacaactcaaacaatttctgattcccaaattttatttttaaatttgcaaccaacagtccaattagagtacatgagtaccatatggagacagaaattttttttcagttctgctatgttcattttgtg

SEQ ID NO: 696199 - DNA, 651 bp, Homo sapiens
tcaagttaaaatggtctttcccttatttgctcactttcagacacttcccagtttatgataatttttttctcctcttaggccattagactttcatttacttttccttgtataaaagatgaaaatccaccttaatttaaaacattttatttttattagagttattaatgcttatagtttaaagagttaaataatcctacaagaartaagaaaaccagttctcacctgcctgcctctcttctccatttttaggctctttagaagcatcctctttcaaacttttagttgttacttttgagaattatagccacgtcactgagcaactgcttattacttatagtgctatatcaagagctttcagttaagatattgtctacttacttcctgatatggaagatgagaatttagctctttagtaatattctctttttctctttttatgattttttttttttgtacagttggggtctcactatattgcccaggcaggagtacagtggcacaatctcggctcactgcaagctccacctactgggttcaagcgagtctcctgcctcagcctcctgagtagctgggattataggcatgcaccaccatgcccggttaattttgtatttttagcagagacagggtttcgctatgttggtcagtctg

SEQ ID NO: 696200 - DNA, 651 bp, Homo sapiens
tcaagttaaaatggtctttcccttatttgctcactttcagacacttcccagtttatgataatttttttctcctcttaggccattagactttcatttacttttccttgtataaaagatgaaaatccaccttaatttaaaacattttatttttattagagttattaatgcttatagtttaaagagttaaataatcctacaagaagtaagaaaaccagttctcacctgcctgcctctcttctccatttttaggctctttagaagcrtcctctttcaaacttttagttgttacttttgagaattatagccacgtcactgagcaactgcttattacttatagtgctatatcaagagctttcagttaagatattgtctacttacttcctgatatggaagatgagaatttagctctttagtaatattctctttttctctttttatgattttttttttttgtacagttggggtctcactatattgcccaggcaggagtacagtggcacaatctcggctcactgcaagctccacctactgggttcaagcgagtctcctgcctcagcctcctgagtagctgggattataggcatgcaccaccatgcccggttaattttgtatttttagcagagacagggtttcgctatgttggtcagtctg

SEQ ID NO: 696201 - DNA, 651 bp, Homo sapiens
tcaagttaaaatggtctttcccttatttgctcactttcagacacttcccagtttatgataatttttttctcctcttaggccattagactttcatttacttttccttgtataaaagatgaaaatccaccttaatttaaaacattttatttttattagagttattaatgcttatagtttaaagagttaaataatcctacaagaagtaagaaaaccagttctcacctgcctgcctctcttctccatttttaggctctttagaagcatcctctttcaaacttttagttgttacttttgagaattatagccacgtcactgagcaactgcttattacttatagtgctatatcaagagctttcagttaagatattgtctacttacttcctgatatggaagatgagaatttagctctttagtaatattctctttttctctttttatgattttttttttttgtacagttggggtctcactatattgcccaggcaggagtacagtggcacaatctcrgctcactgcaagctccacctactgggttcaagcgagtctcctgcctcagcctcctgagtagctgggattataggcatgcaccaccatgcccggttaattttgtatttttagcagagacagggtttcgctatgttggtcagtctg

SEQ ID NO: 696202 - DNA, 1419 bp, Homo sapiens
gtaagtctagaatgaagtccagaaatctggatttttaacaagctctgcagtgaactatgattccgccactgcactccaacctggatgacaaagcaagaccctatctcaaaaaaaaaaaaaaaaaaaaaaaaggaatgcagggccacaatttgaagtagtaatgttctatagttctatctacttcaatgacttcagtcatcacttccatgctggttactctcaagtattttaacatcccattcatgaattttccttacttggaccatactttgtggatcttaagaccaaaagcggagctgataatcaactaccatgtccttgctttaattattgacataataaaatactagcagaaacactggtaaatagctctacactaagatcccactgtccgttccaccacagtctcatctgtcctgtggcccctctcctgagacctgcctgtaatccagcgacaaagaggtcatacctgagacacagagtttcaccaatattttaattggttgaaatgtatcagttaaatattaccgctgttaaagatgataatgttaatcacgtgggaacatgagagaaggaactggtattagtagggaggattacaagttcaagacgtaaaatgatttacgtactaatttggatggagtggcctacatcaagtccaagatcactaggactgtattcttcaaatctggctgattatcagaatctgagacccaaccctgagaaattttgattcagtaggactggggcccaccagaatcactagtaggacccaaaaatcacttattttttggtttgtttttctgggttttttgagacagagtcttcctctgtcacccgggctggagtgcagtggcgtgatctcggctcactgcaaccacctcctggattcaagcagctcttgtgcctcagcctcccaagaagctgggattacaggcatgcgccaccacaccaggctaatttttgtatttttagtagagacrgggttttgccatgttggccaggctggtctcaaattcctgacctcaagcaatccacccaccttggcttcccaaagtgctgggattacaggcatgagccaccacgcccagccagaaatcactatttttttttacattttccccagcaattgagaacatagagaagttgtaccaaagtgttgcccccctatcggacctcaagcaggcctttttcattcctagcacgattaaaaagattaagcaaggatatgtgactgattctgtacaaactaccaccactgctagaaagtatcacttgcatatattttatagacagaaagcaactcaatgttaaattccactcagcagtattcattttattcctggcaataaagaacttcatttctagtttctgtgaaagtaaactccccaaggaaaaaaactccacatgtaggaaaaa

SEQ ID NO: 696203 - DNA, 923 bp, Homo sapiens
tcaaggtcatccctatgatcatgactgtgttatacacaaactgccttagaacatcctggacctgttaagtgtgaaggattatttcaatggcacytaaccctgactgcatagtagaatcaactggggagcttttacaaactattcatatccaaattctattcccagcaactccagttggtcttaagtgggacctgggtattgggattttgtaaaagttccccagatgctcttaatgtgtgtccaagatttaaaaactctgcatggttctcccctgcattaaatgcctaactgcgtaactcagaactgctatgcttttgaaagtattttttctctcttctcccactcttagctatcttgtcctcataatcgcttctaatgtaccattcacattaaatcacagttgtcaaaagagaagccaaatcatcaagtttgttatcattgaccttaatttaacataactataagagagtgcgggcctgaaagaatagctttatttttttttcctgtggaatggagtgcatcaacttgatgacagctccttttctttctgttcagaagctttttaaacttagaatgacataactgactgttagataaagtagatattattgtaattgtcaacattttctttggctttaagcattggaattaggcaaacttgagcagcttgaatctcagctctaccacttattatcggtgtgcccttaggaaaattatttaacttctctgagcttcaattttcttatgtaaaaaaagagaaaatagaacccaactcactgagttgtcatgagatttaaatgaaataacatacttatagtgccagagacatagtaggtcttcattaagtgttagtttcattaagtgttagtttccatccccaagacacatagatatttctaaatagaggagtcaacttccacatg

SEQ ID NO: 696204 - DNA, 635 bp, Homo sapiens
ggcacctccagatatctagtttcctctaacaataaaaatagtaataaaagttaccatttattatgattgattttttataggtaaattaacctacattaagggaatgtaacttatgtgacctactgataccacagagtagagacaagatgcagcccaggcctacaagaccacaaaggccattccctttgagccctctyccctcagcctttcccctctccctccatctgagggagacagaagcttgggtgagacctgcttcttgaagctacatggtccaagtcccctcagtttccaagcacttggggatcacttgtgggctatcactacagtggaagataagcaaaccactgggcgtagtaggaaagaggccgttttctcagaggtcaagaactgaagaagggagtttcactgtctgacctccaatggccctactgtgtgtatgatcttggatgcgtcactcactatgcctcagtttcctcatcaggagaaccagaatcatacaacaggcccagaatcctttccctgaaatccttcggtacagatgtgttttataaatcagaatttcttgattttagaaaggtaatagagttcacattttataacactcctaacggagtctggtacagtacccatta

SEQ ID NO: 696205 - DNA, 635 bp, Homo sapiens
ggcacctccagatatctagtttcctctaacaataaaaatagtaataaaagttaccatttattatgattgattttttataggtaaattaacctacattaagggaatgtaacttatgtgacctactgataccacagagtagagacaagatgcagcccaggcctacaagaccacaaaggccattccctttgagccctctcccctcagcctttcccctctccctccatctgagggagacagaagcttgggtgagacctgcttcttgaagctacatggtccaagtcccctcagtttccaagcactyggggatcacttgtgggctatcactacagtggaagataagcaaaccactgggcgtagtaggaaagaggccgttttctcagaggtcaagaactgaagaagggagtttcactgtctgacctccaatggccctactgtgtgtatgatcttggatgcgtcactcactatgcctcagtttcctcatcaggagaaccagaatcatacaacaggcccagaatcctttccctgaaatccttcggtacagatgtgttttataaatcagaatttcttgattttagaaaggtaatagagttcacattttataacactcctaacggagtctggtacagtacccatta

SEQ ID NO: 696206 - DNA, 1405 bp, Homo sapiens
gaaggacatttctaatgrtatgtaaaaatataggtaaaaagcacttataaaaagtgaattataatttataattcccctttctcaagttttgaacttttaaaagaggagagagaaaaccttcctttgacatataagatgttataagaactattattcattaaaccatacccttttgggaaattcaggtaaactgccatgtgaaggacaaatgaattctaacttggtattttaggtagaaggggataaacagagctctcccaagcacaaccaactccatgcttcctttatgtcagatggcttaattctctttctttcttaatgtaagactcgatatttttctcaaattctcttgttctagctactgagcttttgattaattagtgtataaagtctggactgagtagacagttctgaatttagatccttgtcctgtgacactggcacatacttcttcttttctgaacctgtttttccatccaaaaaatgagaataaaacctgatactgcataataatcttttacaaattaaagatgtgcttaaagcacgtagcacacagtaggtgttcaataaataatggccaatgattgttttattagtcccactcaaaggttatgaaccttaacttgtttttctctccagacaaaataagtttatttcagcaacacgatttctttactgcccactccccacaactctgtttatttgtgacatttcacactcacagagcaggtcagtgattgtgcctgccaatcatgagtgtgtattcatacttgtgttcttagcactccatggctctagctctatggccccctctgtgtcgtggcataaaaggttcatgagacaagtgtgtaagacgatgtagccccagtggtacaactaatccagcagaagtacttctggacctactagatacattttgatgtccacgtggatattcccccttagaattttttatatggttcttacctggtatattcgagcaggcattttctccacaaacagtcctttcttctcgccttttttaaccagcttggtaagaatagacagccggtcattgttcggcctatggggccgaggggatgactgaggtgaaatttctggtgaagatggagctgacctaagagatagaatcagaaaactctgtctagtataaagtggctattttttcagtagttactaagacttgccaaattcacataaacgggtattagactatttgattattatacatgtatcgaaacataaaactgtaccacataaatatatacaatcataatgtaacaattaagaaattaaaaatgcaatactttctaattagttgggagaactgattgacattatagaagataaaatagtgcagggcaaatttaacacaaatttttacttaagtggcatatgagattta

SEQ ID NO: 696207 - DNA, 600 bp, Homo sapiens
tggtctgatgatgcgcccttccctggagtcaggggtgaaatcagtccctgcaatctacgtgggccgatggtggaaaagacgtacagaccagggttgtgttccaggaggggaatggacatcaggcaggcagtaggacttcccagccctttctacctcactacacaagctggtcattagcacaaaaatgaccaatatttgtgcattgcactgaacaaataaatagaagcggctgctcccagacagtagcggacttcttgcaatccgaagccccgttcagtggcctgtgactgacaaagccaacatctcagcccatctgcgtggcagcatcctgcccggccctcatttgaggccactgacattccatccctagcttatctttccaatctcccctcttgcttctcctggactaggtgccttcctttgactgtgccatcatatatatatatatwttttttttttttgggggaggggggtggtagttccttctttattttttattttttctaattttttattgtggtaaaatatacagaagatttatcatctgaaccatttttaagtatacaattcagtgggaatcattacattcacgtcgttgtg

SEQ ID NO: 696208 - DNA, 1081 bp, Homo sapiens
aggatttaaattaatattgaaaatgactctaattatatatatgcatgtttaagtttgaatatatttgtatctatagatacatgaggtatgagtatgtcttctacctatgtgaatttttaaatatgttttcagtttatatttctggttgctgaagtaatttttactttttctaaagtatccatatattccaaaatgtttttccagaaataggtgtgcaaatttgtataattaaaaatgatgcattaaaaatatataaatatattattttgagagaacagtgaaagtcagaaacaggtgcagtaattggaagggatttaaacatagaagtttggaaacagttgtgaggaatagtccatgaacaatggactcctcaatagcactaaacatggaaaccatttttttctccacttaaagctagaagttctataaataacttcaaagttaatctaaaatagacctttcctagtgggaaaatatatatatrtgtgtgtgtgtgtgtgtgtgtgtgtatgtgtgtgtgtactgatatagatatatgtgtgtatatatgtatagatataggtgtaaatatgtatatatgtgtgtgtgtgtatatatacatagagagacagaaagagagagagagcattttgcaagagtaggagtgggacaaattgaatcttcagcagttacagtatctatatagtttcagcaatcaaaaattactacagagtaaattttaataaaaatataattttcttaaaatggtattcaagtaagaaactatgtaatttagaaataaaaaaattagaagtgttgaaagattattaaagaaagccttaaatacaaagaagtttctaatttgtattaatacaagtagactgtaaatacagaagagaaaaaataagttagaaactagcatagatatgtgattttaaaattgagatatttcttaaatccataatcctagcctaatcatgagaaaagcatcatgcaaatcatcactgagggtcattctacaaaacacctcatcagcactcctcaaaagggtcaagctcatcaaaagcaaggaattctgagaaactggcctaaggattgtttg

SEQ ID NO: 696209 - DNA, 608 bp, Homo sapiens
gcctagaaaataccccaccctgaccttcctcctctcccagagccaggggaccagccaccaggctcacgcttgcctggatctcctccatccagcaagccccaaccatgcagacccccaggcctctcctccccatccctacatgccgccatctctagttttccagcacaagacccaagtgggcaagtgtctttgtttgcagctgttactattttggccttcgccactaatactgcttcttcctctctcctccctcttcctgtcccctcaacaacccagcactgccctggaaagcaggggccactggcttagcccaatcaacatccaaactgcaccgcatgaatataactgtggttggtggggagacttccatccctcggctgcaycgaggtcaggcactgaaaagaggcagtgagtgatacctgagaagcaatcaccctccacaagcttaggaatcaggtcgagtctccaatctttatttctatatttaaacctaaaaataaccctgtagcaatgacagagtttttactagaagtcatgcccctaaccaggaaatagatccaggggctagcttgtgtcaccctaaggaacagaggggtggctgggagagc

SEQ ID NO: 696210 - DNA, 651 bp, Homo sapiens
ggacccctcaggaagtgagtgggagctgcagagcccttctaggcctgaacccggccccctgacccttctggctagcacactgctcagttccagtttcactcgatcgctcacccgctcgctctctcacctacctcgggctgcctgccgctgtgcaaggcgctccctctcagagaagtcacgcctccaacggaatgaagccgcccatacgcaggttgggggaggagggaggagggggggaggaggagcggcctacgcaaggccactgaggcccagaaagcagctcaactcctgacatgctcccgcctcccctccgcctgctcaggacctgtgcttggtgacgagctacatgctgccacccccccaccaatatatctcgctcctgaaaatgcctaagaatccatgagtagggtagagcactcctttgggttaagccttgccatcttcctctcccgtctctcttaaatgcagatgcccctggaaagggtagtccctgaagtggctaaggtgcrgggtgtgggggggataacttttgaggtatttttgtccctgacaggtgtgaaggtattggcaggtaggcaaaagcttatgtgtaaaaggacagaagttggaggaacataaagacagcggccacccaattcacaagcggacatc

SEQ ID NO: 696211 - DNA, 1311 bp, Homo sapiens
ctgtattaacaagggaataaattggtgttatggcttttaaaaacttaatctggcactaaatgtcaaaatatattctgtttggcccagcgttttcactcctaggaatttatcctatggatataatcacatgagtgggcaaaaatacccataatggaatgctcattgcagcattgttcataaaagcaaaagatgggaaacaactgaaatgtctcattaatagaagacaagttaaataaattatggcacataatatagatggaatgctgcatagtcattttagaaatgaggtatatctgtatttgtgaccatagaacaattctaagacatagcattaagtagaaaaaaaaagatccaatacaatgtcatagaatgcttctactgtgttttgtataaaagcacaaatatacatttgtctgtgcttccaaagcactaggtatctttggatggatatacaagcaactgtcaacaacaactgactctagggaagcaaactagtaggtttgaggtaacaacattacagaataaaaaccatgaccccatcaccaaatataagaattagaatattaccaatayctttacatatacccagagtcataggtagcccatccagagcctctgtgcaaattagaaaaaaagctcctcttctttgggttggacacaactctaaaccaaggtgccttgcttgccaaacagaacacaggctatattaattacatgacccacttctgccctggtgtgctttcagacttatgtaaatggaattctactgtatatattatcctacaaattatcttttttacttaacattatgtttgtaagatatatcaatattgttacatgtagtactccattttcactgctgtgtaatatttctttgcatgtttacgtgctaaaagaattaactctatatcccactatttcagttacagggtatctattgaagggtgaatgtgactaaactaaaagagaaatgtagatcacataaagatggataaaggaactctggatcttattttgggtcagggaaagccagtgtgctttcatttgatgagaaataattgcattatattaggcaagagtgagctggtaaaggagtgagcacaacagtaaatgtctggtgtccatgcagtgaatattttacattcacttattttctctatggcattttctgtcctttaataagctttttcactttaataatgtggaaaatacagtaatagtgacaatccatgcctatttaagtaatgggagcacaatatgtgagcttactagagaacggctatgactgaaatggactctacatcttttcat

SEQ ID NO: 696212 - DNA, 1353 bp, Homo sapiens
gaggaaggcaggacgcttgagtcttcttctcagatttgggtccatctacataaattctcagattatttttactgtctagggactacatgggcttttattttttctttggtttggaccagtcttaatttcattagtgagttttggagaaaacgtctgttttgtacctttatttcaactccattctgggaagcaaataaactactatattctatcctgtttatacataccacttattcctcacaatgatcatattttatagatattattattattatttcgatttaccaaataaaaataagccttgtggattttccataacttactcaaagaaaatcatgaggtaaatgaaaaaaaataaaaacctggctactatgttatcctgaaacttctgaacttaaacacaacattaagaacattctctctgaaaaaatgaaatttaaatatatggtgctttctattgtacataggaagaatttctagtggatgcaataaagttgttttcttgctcaggtaatgaagggtagtgttagcagaatactgatactaatgttatttataatagtaatagcaatactccatttattaaaataacgattccatgtggcagaacttgaattgaactttttaatataaatagttgtttgtttcatgactcaaatttaaaactaaaaataagaaaatgttattgtcataatgacaccaacttaacacacattttagaatgtaaaatttcacattgggacaagaaatagattaaataaatatacaaaattccataatggagccattttttacacattcttaaattactctaaagatagtatgaaatcattaatttcataactatgaagaacaaaatcttcatatttcataatctttacacaacttgctcaaattatactttgtatataaatttataaattgtgttttatatttctctccttttatttgctacatacaaattgtacgggtgggttttaaaaaggtttaattcactaattaactaacatttacaaatacataaaaactgatgttatttactcattgtgctacacatmcacacacacacacacacacacgatggcttatgaaaccacttgtaaatccccgcaaaaagttcctgtgtttcaaaatagaaaaattataatgcacttgcaattttcctgttatgaattgactaatgcagcattcaaataattttcactttttgttctatgaatatttaggtctctgcatcagctattttgctctgttccccaggccaggctcaggcatacacccttgtccagctgcctgtcatctgcatgagtgttctaggatgacctgctctgagctgatccagctgggctgcct

SEQ ID NO: 696213 - DNA, 1353 bp, Homo sapiens
gaggaaggcaggacgcttgagtcttcttctcagatttgggtccatctacataaattctcagattatttttactgtctagggactacatgggcttttattttttctttggtttggaccagtcttaatttcattagtgagttttggagaaaacgtctgttttgtacctttatttcaactccattctgggaagcaaataaactactatattctatcctgtttatacataccacttattcctcacaatgatcatattttatagatattattattattatttcgatttaccaaataaaaataagccttgtggattttccataacttactcaaagaaaatcatgaggtaaatgaaaaaaaataaaaacctggctactatgttatcctgaaacttctgaacttaaacacaacattaagaacattctctctgaaaaaatgaaatttaaatatatggtgctttctattgtacataggaagaatttctagtggatgcaataaagttgttttcttgctcaggtaatgaagggtagtgttagcagaatactgatactaatgttatttataatagtaatagcaatactccatttattaaaataacgattccatgtggcagaacttgaattgaactttttaatataaatagttgtttgtttcatgactcaaatttaaaactaaaaataagaaaatgttattgtcataatgacaccaacttaacacacattttagaatgtaaaatttcacattgggacaagaaatagattaaataaatatacaaaattccataatggagccattttttacacattcttaaattactctaaagatagtatgaaatcattaatttcataactatgaagaacaaaatcttcatatttcataatctttacacaacttgctcaaattatactttgtatataaatttataaattgtgttttatatttctctccttttatttgctacatacaaattgtacgggtgggttttaaaaaggtttaattcactaattaactaacatttacaaatacataaaaactgatgttatttactcattgtgctacacatccacacacacacacacacacacgatggcttatgaaaccacttgtaaatccccgcaaaaagttcctgtgtttcaaaatagaaaaattataatgcacttgcaattttcctgttatgaattgactaatgcagcattcaaataattttcactttttgttctatgaatayttaggtctctgcatcagctattttgctctgttccccaggccaggctcaggcatacacccttgtccagctgcctgtcatctgcatgagtgttctaggatgacctgctctgagctgatccagctgggctgcct

SEQ ID NO: 696214 - DNA, 651 bp, Homo sapiens
gaaggagaaggttatgtaagaccttattgtgggctttacatgctttggcatccagtacaatggaaagagttagaaaatagaggagcattgaaagagaatccccaaggctgggtttagtactgcaatttgcaaatgagggcattagtgaaaagcatcctccatggatgtgaagcagaacttgcagtaggcagcagtgctctgggagggcattttagagggggatacacagcactgaaccttgaaagatggagaaactcagtgaacacagatgggtccggaaatgcacacaggacatcagtctacttacaggatggtttccgagagcaayaaagtgagtgaaaagactaacaactaaaaatgaggagaggtttggatagcagagaagagtggagtgattcttccttaaaggggaattgacacttaacatcagatgaatgacttagaacctagatctatcagttatactttgcactgaaaagctacaaacttttaacacttagctgtcccatctgtgaatctctgtggctcattattgctgtgaggattaggtgaaataaatacatcacagtgtctggcatatattaaattcctaataaactttcagttttatttttctactttccttttccttctctttatattggcagtggg

SEQ ID NO: 696215 - DNA, 1663 bp, Homo sapiens
attaagcttgtgctcaatcagttccatctatgactggaagtatgtatcagaaatactttgggctcctcagggaaaaatagtcgatgctatttttgttgacatcattatcaccattgaaaccctctgaaatcatttccccatctactttttttgatttcctaatatttttgttcatgtatatgattctctaacacagaggtctagcaaagaacattactgttctttgatataggcatatcccattcatatgcctaagatatgcttctatgtattccttcaaatctcacaaaccatagtttctgtttcccatgatataaaaaacattgaggaatactgtttcaacaaagatgtgcataaaccatacttagctacctctagaacttcactttgatgcattttgcttgaaatatcttccccaccaagctccctttcttccggtttaaatgctgctcatcctccatgtctcattttaaggagggcaaaggagaccaaccattttctgttgttgaatgattaatgagtatccatgacacattaaagaggcactgtgattaccatgccaccatctcttacaccaggggtgtccagtcttttggcttccctgggccacatttgaagaaaaagagttgtcttgcaatacacataaaatacactaaaactaacaatagctgttgagctaaaaaaaatcacaaaaagactcatgatgttttaagaaagtttatgaatttgtgttgggctgcattcaaagctgtcctgggccacatgtggcctgtgggacatgggttggacaagcttgtcttgtaccatgtctgaacttttagaaaatctattctgcatatttgttgaaaaaaagaagatgttaaaatacaagctgataatgtaaagtgacacgattgaatgccaaagggatgacaagacatgtacagtaaccagagtcaacacatctgtaagtccagacttcactgcttgtgtctgaaatcttgctggtctttataacatatatatatatatgtaatgtacagtcgagccttggacaatgtggaagttatagggaatctgacccctgtacagttgaaaattcaggtataacttttaactcccatcaaatttaattactaatagcctaatgttgaccagaagccttaagataacataaatagtagattaayacatatttggtatatgtatcagatattgtattattacaataagataagctagagaaaagcaaatgttcttaaggaagtcataaggaagagaaaatacatttgaagtactgtgctttatttatcaataccataagtttatgtcatctgtttacaagatgaattgtgtctgaaatggcaggcacccgcagctgcaggcctcaatccacggtatatatcaagcaatttaactttttcttataatgtcaggacttttctctgcttcttgggagcacttccagcatcactagcagaactttgtatgggtcccatggtgttatgcaaggtttaaggtactgcactaaacacaatgaaaaatatataagaacagcaagagagagagatcactttttactggatatacaatttactggagaggcaaaatgcttacatggagatgattagtatcacacgtatttttaagcaaacacgctcaacatttgggctcaccacgatag

SEQ ID NO: 696216 - DNA, 1227 bp, Homo sapiens
tcggctcactgcaacctctgcctcccaccttcaagcaattctcctgcctcagccaccatagctgtgattacaggtgccaaccaccatgcctggctaatttttgtatttttagtagacatggggtttcaccacattggctggtattgaactcctgacctcaagtgatcctcttgcctcggcctcccaaagtgctgggattacaggggtgagccactgcacatttctgttggaatcaaatgctacactgatcaagtgaacaagtagaaaccatcagtcaccaaggaagacaaacttgttaagaaagaacaattgctggaagacttagtagctcatagttggaataaaatttaaccagtaaacacgtccgcaggcactgtttgcagatcctctgctcggaaagataaatcttatacctggggattgttttaaaatttgctttctgaaaagtaaaacggtacttgcatcccttaggacatagaaatgacagccctagtttagatagagtggctcaagcacaacttcattttaggagagacaacagagtaagaaagttgtcaaagcagaagatatttcatgtttcataccattcctccacccctaccattagcatgtgagcatcttacagggttggcagaagaggacattataattcggattcagcaaatgtctgtacctaagcagatatgtgtgctttgtgtgatgagagtgccattctcaccatttctaggataaaacgatccattttagaatactagaaatttctcccaaatgcatgcatttgttgatgattctgagacattggttctcctatagatagttcatgttttkcctccacttaacagaccatgagtgtcttgacaacagtgggactcccatgcaattcggtgaaatccagccttctcagattagtgagctatgcaatataggcaacaaaggaacacagatgtacaaaatgggtatggagtgtgagggggtgtgagcacagcatgggtacacatgcactgggaaagatcaggctccacagattacagcccaggggccaaacacagctgcttttgtaaataaagttttattggagtacagccacatctatttgtttgtattgtctatggttgcttttgtactacaatagcagacttgagtaaaagtcaacaaagcctagatatttactctttgaacaagtttgagatttacttttaaaaaaaaaaaaacctgctgatccctgaa

SEQ ID NO: 696217 - DNA, 1227 bp, Homo sapiens
tcggctcactgcaacctctgcctcccaccttcaagcaattctcctgcctcagccaccatagctgtgattacaggtgccaaccaccatgcctggctaatttttgtatttttagtagacatggggtttcaccacattggctggtattgaactcctgacctcaagtgatcctcttgcctcggcctcccaaagtgctgggattacaggggtgagccactgcacatttctgttggaatcaaatgctacactgatcaagtgaacaagtagaaaccatcagtcaccaaggaagacaaacttgttaagaaagaacaattgctggaagacttagtagctcatagttggaataaaatttaaccagtaaacacgtccgcaggcactgtttgcagatcctctgctcggaaagataaatcttatacctggggattgttttaaaatttgctttctgaaaagtaaaacggtacttgcatcccttaggacatagaaatgacagccctagtttagatagagtggctcaagcacaacttcattttaggagagacaacagagtaagaaagttgtcaaagcagaagatatttcatgtttcataccattcctccacccctaccattagcatgtgagcatcttacagggttggcagaagaggacattataattcggattcagcaaatgtctgtacctaagcagatatgtgtgctttgtgtgatgagagtgccattctcaccatttctaggataaaacgatccattttagaatactagaaatttctcccaaatgcatgcatttgttgatgattctgagacattggttctcctatagatagttcatgtttttcctccacttaacagaccatgagtgtcttgacaacagtgggactcccatgcaattcggtgaaatccagccttctcagattagtgagctatgcaatataggcaacaaaggaacacagatgtacaaaatgggtatggagtgtgagggggtgtgagcacagcatgggtacacatgcactgggaaagatcaggctccacagattacagcccaggrgccaaacacagctgcttttgtaaataaagttttattggagtacagccacatctatttgtttgtattgtctatggttgcttttgtactacaatagcagacttgagtaaaagtcaacaaagcctagatatttactctttgaacaagtttgagatttacttttaaaaaaaaaaaaacctgctgatccctgaa

SEQ ID NO: 696218 - DNA, 612 bp, Homo sapiens
ataagctgaattcaaggtatccgcagggcaagacttccttttccagcttctggtggctgctggcatcgcttggcttctggcggcatcactccagtctctgcctctctggtcactttgccacctcctcttctgtaaaaattccctctgcctctcacttgtaagaacccttaaaattgccttgaaagatcacccgggtaatctaggataatcccttatttccagtatccttaacttaatcacatctgcaaaaacactttattctcatataagrtaacattccaggtttccatgagttcagatttggatatctttgagaggagtcatttttaccacagataacgatcaagtgtcctcaaaaataatttcaaaatttaaaacaaagaagagaaagaatggagaagaaactataaattaaaagagattttagagccagtcactgactcttgcctgtaattcaattactttggcaggctgagatggtaggatcgcttgaggccaggagttcaagacacacccggtccacatagtgagaccgtatctctattaaaaaattaaaaattatctgggcatgttggcaggcttctgtggtcccaactgcttgggaagctgagg

SEQ ID NO: 696219 - DNA, 626 bp, Homo sapiens
tgaagttttcataaaggtggagagtgctcaagaaaaagaatcattgtgaacataaaagacttcccatagtggcataaacttctattcaaaatgctaaaagttctgcaacacactaatgctaaacctggttccgttcacacttaaaaaaatctactgttttaattttatcactttttttttcttacctccctcttttgagatacttgaaaacctgtcaatcaaaatacaaaataacaattatttgaatcagagggcacaggaatttaactggatcatacagagcttgaaaggccataaattactattgtactgtttggatgctttccaggataggggaaataaaatgaatgacagatactttttaaatcattaaaatagaaaagatcacctaaaatttaaamagcagttaagaaataaaaatgaaaaagagggcttcctaatacaaagttgactcgtataaatattttctctttttaactttattgtaaattgacaatttttaattacatattcacgggatacaaaatgaagttatcattcatgaatacaatgtggaataattaaatctaactaatttacatacccatcacttcaagtatttattatttttgtagtgagaacatttt

SEQ ID NO: 696220 - DNA, 589 bp, Homo sapiens
taagaactttgattgcataatttaataatcaaaacaactttaaaaaatattaayggctgggcacggtggctcacgtctgtaatcccagtactttgggaggctgaggcaggcagatcacctgaggtcacaagttcaagaccagcctggccaacatgctgaaaccacgtctctactaaaaatacagaagttagctggtcgtggtggcagatgtctgtaatcccagctacttgggagggtgagacaggaacatagcttgaacccacaaggcggaggctgcagtgagctgagatcacaccactgcacaccagtctgggcgaccgaacaagattccatctcaaaaaaaaaaattatattattcacatttatagaaacagacttaaagaacttaaacggttgcctaagttcacctagtgagttgtaaaaccaaattttcaacatagatagaagaacttcagaatttgcacatttaacctctacagcagaaccgttctcacttggttctatcagtctttttcatgtgttagtaggttttatcattctaacattggtaatcaactaaatggtaagtaatattaaatattaatgatat

SEQ ID NO: 696221 - DNA, 679 bp, Homo sapiens
ttcactttccataagagtggcaatttgaaaataaaaagtggagagagaaatatttgttctactttggaaattataaaatatatcttaccatacacactggtcagaaggctcttccaagattgtacagcagtctaacttgtatctttatgtggtttgtgagaattagtgttgtagaaaggattgagtttgtgtcatgcaatttgccatttaacatactttggaacatgcagattctcagagaaatgtgaacttaccaagtcagataaattcagtttttggtagcctagccaattaagatgtttaaacaggcctggcacagtggctcatgcctgtaatcccagcactttgaaggctaaggtgggaggatcacttgagcccaggagtttgagtccagtctgggcaacacagggagaccccatttctacaaacaataaaaaataaattaaccaggcgtggtggcrtgtatcggtgatcctagctacttgggaggctgaggcgggagaattacttgagcccaggaggttgaggctgcagtgagccgtgtttgcaccactacactccagcctgggtgacagagcaagaccctgtcttaaaacaaaaaaaaataaagatgtttaaaccctatactttgagaattcatttaaaagtaagtttgcatatagttgaattaagtctattt

SEQ ID NO: 696222 - DNA, 679 bp, Homo sapiens
ttcactttccataagagtggcaatttgaaaataaaaagtggagagagaaatatttgttctactttggaaattataaaatatatcttaccatacacactggtcagaaggctcttccaagattgtacagcagtctaacttgtatctttatgtggtttgtgagaattagtgttgtagaaaggattgagtttgtgtcatgcaatttgccatttaacatactttggaacatgcagattctcagagaaatgtgaacttaccaagtcagataaattcagtttttggtagcctagccaattaagatgtttaaacaggcctggcacagtggctcatgcctgtaatcccagcactttgaaggctaaggtgggaggatcacttgagcccaggagtttgagtccagtctgggcaacacagggagaccccatttctacaaacaataaaaaataaattaaccaggcgtggtggcatgtatcrgtgatcctagctacttgggaggctgaggcgggagaattacttgagcccaggaggttgaggctgcagtgagccgtgtttgcaccactacactccagcctgggtgacagagcaagaccctgtcttaaaacaaaaaaaaataaagatgtttaaaccctatactttgagaattcatttaaaagtaagtttgcatatagttgaattaagtctattt

SEQ ID NO: 696223 - DNA, 591 bp, Homo sapiens
ctgaagtgctaagagtttgagtctagcctttgcaacataatgagacccccatttcttttctttttttttttttttttttgagacggagttgcccaggctggagtgcagtggcacaatctcagctcactgcaacytctgcctcctgggttcaagcgattctcctgcctcagcctcccaagtagctgggactgcaggtgtgcgccaccacgcccggctagtttttttgtatttttagtagagatggggtttcaccatgttggccaggctggtcttgaactcctgacctcgtaatccacctgcctcggcctcccaaagtgctgggattacaggcatgagccactgtgcccggcaagacccccatttctacaaaaaaaaaaaaaaaggagaagaagaaagaaatactgataataggaaaatgacagttcttctcaattaaatctttgttgttattagtggcacttggacattatcttgtttttcttatgggaattgacagttttgaggtgacccattcccatccacacacccaaaagcatgtattttgagacagcaaaggttaagggtgtactctggtgcatggaacagatgttt

SEQ ID NO: 696224 - DNA, 587 bp, Homo sapiens
ctcaaagttttcatagtgtgatttcccttagggctggtacgatagttttcacagacatattttgcacctcaagccactatgtaaccactctgtaattggggaatatgctttgacaacttccgtcktttccacattgttagataccatggtaaagaggaggaaattctaacctgtgtctctttcaggaaaaatggcatttttaatacgtggagaaacagattattcccatacatatttgtcttttttggacaggtattcccaatgttctaagtatttcttctctctggaataaaaatacgcttctgtcagagttttcacaaatcccatttttgggtgcacaaaataagagagatttgatcaattaaataattcatctgaaaatttaatggagtatgtacgattgcctgttcatgcatcaagctactgattacatattgaaccaaaactttttatttccatgtttttgaaaaatctctactttttaagataatacagtacttatggagtagtttagttttcaaaggttagtacatttgattcagattagatttcacacatatgaaacaatctcaattatgtaataaact

SEQ ID NO: 696225 - DNA, 587 bp, Homo sapiens
ctcaaagttttcatagtgtgatttcccttagggctggtacgatagttttcacagacatattttgcacctcaagccactatgtaaccactctgtaattggggaatatgctttgacaacttccgtcgtttccacattgttagataccatggtaaagaggaggaaattctaacctgtgtctctttcaggaaaaatggcatttttaatacgyggagaaacagattattcccatacatatttgtcttttttggacaggtattcccaatgttctaagtatttcttctctctggaataaaaatacgcttctgtcagagttttcacaaatcccatttttgggtgcacaaaataagagagatttgatcaattaaataattcatctgaaaatttaatggagtatgtacgattgcctgttcatgcatcaagctactgattacatattgaaccaaaactttttatttccatgtttttgaaaaatctctactttttaagataatacagtacttatggagtagtttagttttcaaaggttagtacatttgattcagattagatttcacacatatgaaacaatctcaattatgtaataaact

SEQ ID NO: 696226 - DNA, 587 bp, Homo sapiens
ctcaaagttttcatagtgtgatttcccttagggctggtacgatagttttcacagacatattttgcacctcaagccactatgtaaccactctgtaattggggaatatgctttgacaacttccgtcgtttccacattgttagataccatggtaaagaggaggaaattctaacctgtgtctctttcaggaaaaatggcatttttaatacgtggagaaacagattattcccatacatatttgtcttttttggacaggtattcccaatgttctaagtatttcttctctctggaataaaaatacgcttctgtcagagttttcacaaatcccatttttgrgtgcacaaaataagagagatttgatcaattaaataattcatctgaaaatttaatggagtatgtacgattgcctgttcatgcatcaagctactgattacatattgaaccaaaactttttatttccatgtttttgaaaaatctctactttttaagataatacagtacttatggagtagtttagttttcaaaggttagtacatttgattcagattagatttcacacatatgaaacaatctcaattatgtaataaact

SEQ ID NO: 696227 - DNA, 1182 bp, Homo sapiens
gccagcctatagaccatctataatttcaagcagagtaggtatataaaggcaaggttgcatcccaaaaagatgaagcttgtttgagaagacaccaatatttagagagggataataattttggagacttatggttgatattaatgttcttaacatgtagtggctacctttggktgtcaaagtaatcagcttgtgaactggttttaagaaaatatttccagtgtagctgatacaagattaataccttctttcctgacccaccactcctgttatgattttgagtagaagtttccatattgtgaaagaattttgcctcagccttcgagagaatatcttatcatgagaaatctattttttaaaattcttatgcagtggttttgaacctcagcactctaaattgggttaacaagaaatattatttctttttcttaactcaagttaatttccagtttgtaggccctgtgaattgttcactgactgctccagcagaatattttataatagacattctagggggtgctcctcttgagggaccctctcttctccaggattttacagtagtttctgtgtcttagataagcaaaacacttacttgtggaaggcactttctggattctggttatcttcttgacatcgtacaaataaattgacctctgttttaaataaaatgatttcaaataaaaggtcctccattatttttcctcttgatattttcatgtctggcttaaaaccaacattctaaaatcaatagaaaatcattagttaaaaatgtaaccctcagttagtatttaatggggacagagtttcatttggggaagatgaaaacttctggacatggatgctggtgatgtttacacggtgtgaatgtacctgatagcactgagattaaaaatgtttaatgaattttatcacaactaaacaaataatattcaaagtaaaaaaaaaggacaggtatttttacagtaagttattacatacattaaaataggtagtttctaacaaatacggtttcccactttttgtgactttttatgggaaactgtctcaaatttatttcatgaagctactagatacctgatacccaaatcagatgaggtgtttttttaaaaaaggaataataaaggattctcgttcactgtcataaatgtgaataccaggacaaatattagcaatcgaaatctgaca

SEQ ID NO: 696228 - DNA, 1182 bp, Homo sapiens
gccagcctatagaccatctataatttcaagcagagtaggtatataaaggcaaggttgcatcccaaaaagatgaagcttgtttgagaagacaccaatatttagagagggataataattttggagacttatggttgatattaatgttcttaacatgtagtggctacctttgggtgtcaaagtaatcagcttgtgaactggttttaagaaaatatttccagtgtagctgatacaagattaataccttctttcctgacccaccactcctgttatgattttgagtagaagtttccatattgtgaaagaattttgcctcagccttcgagagaatatcttatcatgagaaatctattttttaaaattcttatgcagtggttttgaacctcagcactctaaattgggttaacaagaaatattatttctttttcttaactcaagttaatttccagtttgtaggccctgtgaattgttcactgactgctccagcagaatattttataatagacattctagggggtgctcctcttgagggaccctctcttctccaggattttacagtagtttctgtgtcttagataagcaaaacacttacttgtggaaggcactttctggattctggttatcttcttgacatcgtacaaataaattgacctctgttttaaataaaatgatttcaaataaaaggtcctccattatttttcctcttgatattttcatgtctggcttaaaaccaacattctaaaatcaatagaaaatcattagttaaaaatgtaaccctcagttagtatttaatggggacagagtttcatttggggaagatgaaaacttctggacatggatgctggtgatgtttacacggtgtgaatgtacctgatagcactgagattaaaaatgtttaatgaattttatcacaactaaacaaataatattcaaagtaaaaaaaaaggacaggtatttttacagtaagttattacatacattaaaataggtagtttctaacaaatayggtttcccactttttgtgactttttatgggaaactgtctcaaatttatttcatgaagctactagatacctgatacccaaatcagatgaggtgtttttttaaaaaaggaataataaaggattctcgttcactgtcataaatgtgaataccaggacaaatattagcaatcgaaatctgaca

SEQ ID NO: 696229 - DNA, 1182 bp, Homo sapiens
gccagcctatagaccatctataatttcaagcagagtaggtatataaaggcaaggttgcatcccaaaaagatgaagcttgtttgagaagacaccaatatttagagagggataataattttggagacttatggttgatattaatgttcttaacatgtagtggctacctttgggtgtcaaagtaatcagcttgtgaactggttttaagaaaatatttccagtgtagctgatacaagattaataccttctttcctgacccaccactcctgttatgattttgagtagaagtttccatattgtgaaagaattttgcctcagccttcgagagaatatcttatcatgagaaatctattttttaaaattcttatgcagtggttttgaacctcagcactctaaattgggttaacaagaaatattatttctttttcttaactcaagttaatttccagtttgtaggccctgtgaattgttcactgactgctccagcagaatattttataatagacattctagggggtgctcctcttgagggaccctctcttctccaggattttacagtagtttctgtgtcttagataagcaaaacacttacttgtggaaggcactttctggattctggttatcttcttgacatcgtacaaataaattgacctctgttttaaataaaatgatttcaaataaaaggtcctccattatttttcctcttgatattttcatgtctggcttaaaaccaacattctaaaatcaatagaaaatcattagttaaaaatgtaaccctcagttagtatttaatggggacagagtttcatttggggaagatgaaaacttctggacatggatgctggtgatgtttacacggtgtgaatgtacctgatagcactgagattaaaaatgtttaatgaattttatcacaactaaacaaataatattcaaagtaaaaaaaaaggacaggtatttttacagtaagttattacatacattaaaataggtagtttctaacaaatacggtttcccactttttgtgactttttatgggaaactgtctcaaatttatttcatgaagctactagatacctgatacccaaatcagatgaggtgtttttttaaaaaaggaataataaagsattctcgttcactgtcataaatgtgaataccaggacaaatattagcaatcgaaatctgaca

SEQ ID NO: 696230 - DNA, 920 bp, Homo sapiens
aaagcctaaaatatttcccatctagctcttcacagaaaagcttgctgacctctactctaaagagttgaggaatggctggctgagaagcagacttttttttgcatgtacatgaagagcattactaaccctcccaaactcatcttagaacttttctcccaggttctcttgtctagtctttcaaatattttagatgttattctctggaatctaagtttttttttttttccaaagttccagaccactgtttttaaacaactttggactgtgatcctcataaaggacatattttatatgtcacccctgtaatgacatacaataaactgcatacacacagatgtccccaccacacacacaaaccacacaaaacacatacagaaatgaaagttttaagaaacaatgcttgccttactatatgtgataagctctcgtattttctatgaacaccagtcaggatcagcttgatgatgctgtggtaacaagtaaccccaaatctgagtgccttaaatcaayagacatttatttattgctcctgctccacgtttgccctggatcactggggatcctgaaggagcagaacatcacacactgatctccaagtgtctgacaagagtggtactcaccatttctttgaatatttctttggtcaaagcagctcacatgaccataactttcaatagagtgaagaagtgcagccctactgtggacccagaaggtgaatctgagatatttggtcaacagcattaagataactaccatatggctgggcatggtgtctcctgcctataatcccagcacttttagaggccaaggtgggaggatctcttaaagctaggagttccagaccagcttaggcaacatagtgagacctcatgtctacaaaaagttttaaaactagccttgcatggtggtgcatgcctgta

SEQ ID NO: 696231 - DNA, 920 bp, Homo sapiens
aaagcctaaaatatttcccatctagctcttcacagaaaagcttgctgacctctactctaaagagttgaggaatggctggctgagaagcagacttttttttgcatgtacatgaagagcattactaaccctcccaaactcatcttagaacttttctcccaggttctcttgtctagtctttcaaatattttagatgttattctctggaatctaagtttttttttttttccaaagttccagaccactgtttttaaacaactttggactgtgatcctcataaaggacatattttatatgtcacccctgtaatgacatacaataaactgcatacacacagatgtccccaccacacacacaaaccacacaaaacacatacagaaatgaaagttttaagaaacaatgcttgccttactatatgtgataagctctcgtattttctatgaacaccagtcaggatcagcttgatgatgctgtggtaacaagtaaccccaaatctgagtgccttaaatcaacagacatttatttattgctcctgctccacgtttgccctggatcactggggatcctgaaggagcagaacatcacacactgatctccaagtstctgacaagagtggtactcaccatttctttgaatatttctttggtcaaagcagctcacatgaccataactttcaatagagtgaagaagtgcagccctactgtggacccagaaggtgaatctgagatatttggtcaacagcattaagataactaccatatggctgggcatggtgtctcctgcctataatcccagcacttttagaggccaaggtgggaggatctcttaaagctaggagttccagaccagcttaggcaacatagtgagacctcatgtctacaaaaagttttaaaactagccttgcatggtggtgcatgcctgta

SEQ ID NO: 696232 - DNA, 592 bp, Homo sapiens
cacaagaacagcatgggaaaaacccaaccctatgatttaattacctcccactgggtccctcccatgatatggggtgggagagatttgggtggggacacagagccaaaccatatcactttctctaaaattaaatgacttacttgaggtaaagcagttacaacagggcctggtatgtaggaagcacwcaataaatgcacctctgctattgcaagcttgtattttttaagtattctatgatactgtcatgtccttgggacctctggtcagctctttacccctgcgggttactgtaccccttcctccttctttactgcttctaatagcctatcaatggcaagcctatcaattatacacacttgctaaaatttcactctaaaaactagtcaataccaggctgaataagatatcaggaagatgtcaggttcttatcacgggaaactgtacatgtcaccttatgtggcaaaaatactttgcagatgggattcagttaaggatcttgagatgggggattatcttggattatccaggttggccccaaatgagatcacagttgttcttataggagagaggcagaaggagatttcacacacac

SEQ ID NO: 696233 - DNA, 671 bp, Homo sapiens
cccttcagcagcctcagccctcacccagcaggaaggccacagctgtcctccagygcaggacaaatcctgccctggaaaaaaaccatacagggcaagcctcagttccgctcataaatcaatgtctgcaagtctgtttctacgtgtagttaagttacacggaaaagtacaactggatttgtccccggttttcccattagggataatataaagtggaggcggaagttaattgagttcagagttcgccgtgtgatgtcagggaagcggggctctggcaagcaggtcgtgtgtaacatgtgttctgagggtagtgttttcacacaacctccctgggggagaaaagcgttctttcaccaggagtgcgatcttcagaaaacaggcttctggggttccaaaggggctttcacctacattacaggataaaggtctcattttccttacagagacgttcgtgcaatgagcatgcctgtgatattcaagaaagggtaataaaaacccctgcctttcaacaagagtcataaaggtcggtggttcagaatagagaccctggagccagactgccagatcagtcagtcacaagtagggagacagggcaaggatcacttcactctctgggcctcgattttctaatctgtgaaatggagcattcaattagagcctctacctcataaatt

SEQ ID NO: 696234 - DNA, 671 bp, Homo sapiens
cccttcagcagcctcagccctcacccagcaggaaggccacagctgtcctccagtgcaggacaaatcctgccctggaaaaaaaccatacagggcaagcctcagttccgctcataaatcaatgtctgcaagtctgtttctacgtgtagttaagttacacggaaaagtacaactggatttgtccccggttttcccattagggataatataaagtggaggcggaagttaattgagttcasagttcgccgtgtgatgtcagggaagcggggctctggcaagcaggtcgtgtgtaacatgtgttctgagggtagtgttttcacacaacctccctgggggagaaaagcgttctttcaccaggagtgcgatcttcagaaaacaggcttctggggttccaaaggggctttcacctacattacaggataaaggtctcattttccttacagagacgttcgtgcaatgagcatgcctgtgatattcaagaaagggtaataaaaacccctgcctttcaacaagagtcataaaggtcggtggttcagaatagagaccctggagccagactgccagatcagtcagtcacaagtagggagacagggcaaggatcacttcactctctgggcctcgattttctaatctgtgaaatggagcattcaattagagcctctacctcataaatt

SEQ ID NO: 696235 - DNA, 671 bp, Homo sapiens
cccttcagcagcctcagccctcacccagcaggaaggccacagctgtcctccagtgcaggacaaatcctgccctggaaaaaaaccatacagggcaagcctcagttccgctcataaatcaatgtctgcaagtctgtttctacgtgtagttaagttacacggaaaagtacaactggatttgtccccggttttcccattagggataatataaagtggaggcggaagttaattgagttcagagttcgcygtgtgatgtcagggaagcggggctctggcaagcaggtcgtgtgtaacatgtgttctgagggtagtgttttcacacaacctccctgggggagaaaagcgttctttcaccaggagtgcgatcttcagaaaacaggcttctggggttccaaaggggctttcacctacattacaggataaaggtctcattttccttacagagacgttcgtgcaatgagcatgcctgtgatattcaagaaagggtaataaaaacccctgcctttcaacaagagtcataaaggtcggtggttcagaatagagaccctggagccagactgccagatcagtcagtcacaagtagggagacagggcaaggatcacttcactctctgggcctcgattttctaatctgtgaaatggagcattcaattagagcctctacctcataaatt

SEQ ID NO: 696236 - DNA, 589 bp, Homo sapiens
gaatcatgtctgtggcttccctaactcctcccctccttcctcagtgctcctcggtgcctttcacatgcttcccccatarcactctgcttcaggagttcctctcctgtaattcggcttctcggaaacagggattctgcaacatttatctctgctttcccacacctggccacacatgggttcctaaatatgtatatccaactaaatgcactttgtaaatgatgcaaccctctgatgattatctacagtctaggaggggaaatggaacatatccatagatattaacgtatctgtcaatattagcatatcaatgagcatatctatcaaaatattccattttccctcctagactgtagatactttgagagcaggggtcagacctactttatccatgtatctaccacagcgccaaactagacacacaggtaatgttcagtcagtatatgtggaaagcaaggagaaagatgggtatgtgaaaagcaaggagaaagatctgaaggggagagaaagaaatagaaactccccctccccaacagcagcagctaacccagccagttcacctacccactcagccactgggcagacccatact

SEQ ID NO: 696237 - DNA, 589 bp, Homo sapiens
gaatcatgtctgtggcttccctaactcctcccctccttcctcagtgctcctcggtgcctttcacatgcttcccccatagcactctgcttcaggagttcctctcctrtaattcggcttctcggaaacagggattctgcaacatttatctctgctttcccacacctggccacacatgggttcctaaatatgtatatccaactaaatgcactttgtaaatgatgcaaccctctgatgattatctacagtctaggaggggaaatggaacatatccatagatattaacgtatctgtcaatattagcatatcaatgagcatatctatcaaaatattccattttccctcctagactgtagatactttgagagcaggggtcagacctactttatccatgtatctaccacagcgccaaactagacacacaggtaatgttcagtcagtatatgtggaaagcaaggagaaagatgggtatgtgaaaagcaaggagaaagatctgaaggggagagaaagaaatagaaactccccctccccaacagcagcagctaacccagccagttcacctacccactcagccactgggcagacccatact

SEQ ID NO: 696238 - DNA, 589 bp, Homo sapiens
gaatcatgtctgtggcttccctaactcctcccctccttcctcagtgctcctcggtgcctttcacatgcttcccccatagcactctgcttcaggagttcctctcctgtaattcggcttctcggaaacagggattctgcaacatttatctctgctttcccacacctggccacacatgggttcctaaatatgtatatccaactaaatgcactttgtaaatgatgcaaccctctgatgattatctacagtctaggaggggaaatggaacatatccatagatattaacrtatctgtcaatattagcatatcaatgagcatatctatcaaaatattccattttccctcctagactgtagatactttgagagcaggggtcagacctactttatccatgtatctaccacagcgccaaactagacacacaggtaatgttcagtcagtatatgtggaaagcaaggagaaagatgggtatgtgaaaagcaaggagaaagatctgaaggggagagaaagaaatagaaactccccctccccaacagcagcagctaacccagccagttcacctacccactcagccactgggcagacccatact

SEQ ID NO: 696239 - DNA, 629 bp, Homo sapiens
tcaaccaagtcacttggcctctctctgcccctgggacacatgacttatacagggatgacctatctgccctacccaccacaagaccagatattcaaactgaggatgattgtagaaaatgctctggagtcatggaaagaggacaactttttggctctgtgaactcagatacatcattcatatctccaaagctctacttattcaactgttaaatggggatagccatacaygcttggtctactttgcagagtcactggaggtcttaacctagaccttagaaggaaaaaaggctttgtaagaaataaagaacactgacagtgtaactgtctggtgtagacctgtagttaatctactcacccctcaatttcaaagactggctcttcctcaggtgattcacttagcctctctgatcctcagagtcctcatctgaaaaatggggataataatcatagcctagcacactctgtagtgttgtgagaattgtatgaaataatagatatggaaacctttgtcaatgttaccatgctatataaagtaaatatgaggggtgatatggttttgatctgtgttcccacccaagtctcatgttgaaatgtaatccccagtgctggaggtggggcctggtggaagat

SEQ ID NO: 696240 - DNA, 686 bp, Homo sapiens
tttaaaactatgtaacataaaattaaattattttcagtaatttcaaagccctaaaatataacatattttaaaaatctgaagtgtgcataactagccataaaccagaccatcctttaaaaatttctcaatagccccaccttcatcttttttgtttcaatgatagtcatgaggttacagctacaattaattcttgttgttctactgagatggcaattgtttttgttgcagtcatgccaattgtcttctgtagtctactttgagtttggcagctttttcaaaatacaacagtcattaatcagtgcttatcagaaatcctacatataaacactttacataagttgtatttgtgattggacttttatccccagtattttattggaatagattcattctgctaaatttccagcatcatccaaaaatttttcccaagcttaaaaaaaaaattaaacyctactactattaaatttattttaaaaagtttgatgtatcaaggggctaaagggagagtggacttttttatcttgccaattgctgagcatttagctgttttataaacactagcttcagtggtacaggcatccaggccatttaaaacattttccttttaccagccaaatggaaaacagtgtcatttgtgagatgttgaagctatatggtaagaatgtttttgtttttgttttttgaga

SEQ ID NO: 696241 - DNA, 1371 bp, Homo sapiens
ccaaacaaaagggttgctgaaagaatgaaaacagcaagtttgacaattatgtgctagatgagtatccgataatatgtttgtcggaggatcacaagttcttaatgtctaacttcaatgacatggatttttgtcttttggacattgaaaagttcagcttaattgtaatacactttacgttttacgtttgagaaccaattgctactacctaaatcctacatagatttcagtgtttttcacacagtgtattaacacacaatgtttyaatatatcctatgcagggaaattctgaatttattacatatatatacatacctgtatatgcatacacatgctttatctgaattttaaaggtgcagatgaaaactagtgctttgtcatatttccatttggatattctattctatggtaaaaatttctgagtaaatgcaatttctttctttttatttatttatttatttatttttgagacggagtctcgctctgtcgcccaggctggagtgcagtggcgggaacctccgctcactgcaagctccgcctcccgggttcacgccattcttctgccacagcctccggagtagctggaactactggcgcccgccaccacgcccggctaatttatatatatatatatatatatatttagtagagacggggtttcaccgtgttagccaggatagtctcgatctcctgccctcatgatccgcccacctcggccttccatagtgctgggattacaggcgtgagccaccgtgcccggccctgagtaaaatacagtttcattttatgcccctcacttgtttgttttccataaattaattttattttggaccatatgagtgttatgctaaactttgttagaaagtcaataaaatctggagaaactgttctgcaaaagctaaatatctgacattcagtaactacgtgtttaaagtgaccaatatcccaggcactttttgaggtacttgagaaatatctgtgaccaaaaataaaaccccttgcccttttggcatatatcactcctttgttttactatattcataagctagacctttccacctgcagataagttaaaaaaaaagattttaagtggaaaattgaataatttgaaatattattaatgcaggagaggagtcactcacaatttttgtggacaagcggaagttgagcaaacgagctgaaggaagtgattccaccaccaatagctcttcggtcactctggagacgctacatcagctagccgcttcttatttcattgacagggacagcacccttcggagacttcaccacattcaaattgcatccactgccataaaggtaagaatgagtttacgctaaaattatcaccttccattgtttgtttcctctatatcc

SEQ ID NO: 696242 - DNA, 1517 bp, Homo sapiens
cagaaagtagttaccttcctgtgtttgaaggtactgtataattgtatttctttaccatgtcgacttcctgtctcttaaaacgcagcaattacgtgtgtgtttgtgtgtttcttcatctgcttcatgcatataaatatgtgcgggtgtctggggttttgttgttagctgagaggtgggaagtgtttccacacatctgaatatttgctgccgaccttcttgatgatccgtctgttaatgtttttatcaagctggcacacctcatgtgggatcttaataaagtaatcagcattttccctctaaaacaagtttgagaaaatcctagttaaactattctcttcaacacttgaaggccttggttgtacagcaagcagctactaattcaggaggatttatttggcttttcctgagttctctgaaaaatctatttgtgtaaaaagaacatactgcatgatccccagggctcctggaactgaaaactcaaggatttagacgaagctacccagtttgtttaatcatttgaagttttgtttcagcagctcatgctttcctcttacattttggcagaggcagaaatctcagatgattgtttttgggtacacatgtaaaaattttctcattaaccttgggggtggtgtaatgataaaagagataacattttgtttcaaaaaaataatactaactgagcacatatttcaatgcattgcaaatctgaaggaattgtcatggctaacaccatctcagtctcagtatttgtgccccagttttttttcaggtcaagaatgtagggaaacactgtactaagttctcattggatcccttgatgcctcataagacacccagacccctagctctcaatttcatttctaaatgtaccccagctactagaatctctctcacaatgatgacaaacatcctctttaataggacagataaatattcctgtcactcttgactgagagacaatactccaggtctaggggacatgatctgcaaggaacttcccatgattcaggcaccactattcctgttcattttttttccattgtcccgggatttacagctttcaggagtaccttcatgttactcttctcataagagggcaacaccatatttttctcactgaatcagaagacccaacaccacctctttccccagagcastgccatttgcatcctatccagctaggtagggcaaaagtgtctttcattagactaaggacctccacaggcagtgcttaattttcatttacctttgcctccatagtgccttatatgtagtgcctaaatacggatggtgggtgactgcttagagtaataatagctaatatttttgtgacattagaaatggacacagtggtaatacaggtcaggattataactcaaaatcttggcaatgtgatgtttattggaacaaaggaacctaaagatcagaatgctttctctatgtaagatgactaggcctgtaaagtagagtgggtcactattctacagaaacacagatatcaatatttacattac

SEQ ID NO: 696243 - DNA, 653 bp, Homo sapiens
ttgacaccatatcatcaaaacaaaaaaaactaatggtattcaatgtttatatagattgctatattgaatatagattgctatattgaatgtattctttgaattatttaatgtattaatatccacttgaattttatttttttaaatttacttttacctatcctccttgtatctgagttttgacaaattacccgcatgttagatgtaagcacttctcttcagaggaggaggcagagcaagatggccaaagggaagcctccactgatcatcctccccacaagaacatcaaatgtaacaactatgtacacgcacgcacacacacacacacacacacacacacacacacacacacaaagcaccttcataagaaccaaaaatcagcttagttatcaggtcgtccacagcagggtagagccccaagatgccccgttacagcagaaaacaaaatcagaatgaaytcagctgacacctacccgtggagggagcatttaaatcagccctagccagaggggaattgcctggcccagtggttggaaattgagttcccacaagccttgccactgtagactaaagtgctatcgcgccttaaataaacttggaaaggaatcttggccacaaggactgcaaatcctaggaaagttctagtactgaactgg

SEQ ID NO: 696244 - DNA, 632 bp, Homo sapiens
gggcaccattcctatcgcagatgaggctcgcctaaggccaccagcaaagtgattcagcctacttcaaaccctgaggtgtggctctggtccctaggctcttgatatacatagaccctaagggtctcttgagggcagaggccaagaggtggaggcagaggggctttggagaagcaggggcctgggcatccagggtctagcctggcaggaattcctggcagccctaccaatgcagactctgccatctgcccaggaagctgtgagactgggctgtggcccccccagccctaggaccccctcccagcttggtggctgtttttctcactatctcagccatgccccccacaaggcatcttccttttgaaaataaaaaccaggagtgggcaatttcagtcccccactccataccacaaaaccctgatgaaggagttccactgccttctgggaagaggagaaaggaaacacacacacacacacacaagagcaagtcacaaattaacatcacagcacatgaggtaggcacacctgcatttctgcagacacgcctgggctcaggagmctgccaagccccaaccagcctgtgtcctgcagggatgtatatcccacttccagcaacagtagggccctgacattta

SEQ ID NO: 696245 - DNA, 2176 bp, Homo sapiens
tataaaatcaccttttgattggacagtggaaattttgtaaaacagaaaaaaaaatcagtgattttggattcctattgtggatctatatctacaaaataaaatcgtctggtaatacaccttattgtatgaatgaatgggctgttttgaggaccagttacatccaccttgtactgtgatttttaatacatgtttctaagctagaacctctataatacagttgttaccttgtctcgtaacatcagtattagaataaaggtcctactctgtgtgtatactttaggtaagcaacaagattcctcctgctgctcttctgaaattcagggatatctggactagagcctaaagtcctttgttatttgaaaattaagtttgaaaacccaataaaaatattctttctggacagcaaaaaatattacattaatttcatttgatttggatctttctgtttacttagtgaaagctcttaaaagcctattctgattattttggaacaaaattttaaaaaattaagtacatttttaaagtgatgccatatagttctctctcagtttatacagggactatatactcatattaagttttcatcatttgtttatggaatagcattagaactttctgggaaaaaatatatatcctggaccgtgtatctcaatttcaatatatttatgtgtcctgtgtgtgtttagtcacacaatgaaagaatagcctatgtaaagcattgtctggaagaaggggtgatgagtttataataatagcctttgactaaatataaggattagatgagtttggtatgtgaccataggctatcgttctactttctctggagcaaattgcactgtttgaggaattcctgtaagctcataattatagtagataagcattttacaatttcacatgaagatctaaattgactaattgaaagaggttactttaaaagtggtgaaagtgatgagacctatacgcccatttaacatgaactctaatttccctctgttgaatttgtgaatttacagtcattcttctccctttcattcaactcttcaggggtcaaagatttctaccctgttggaagaagccactgttgaagtgtgaaaggctactctgctttctgcgtccatttaacctttggcctgccctaaagagccagccaagtgtcaatcagggctgattgggcacctgtgcctggaaacaagacagagaaatttagctcttccaggtcatcaaaccatctccagatggcaaagaacttctgaagttatgaacctaacttgcttgtgatgcaaattagtgacctagggtgagatgcttcattaatgcttactcctgtgagcctccaaggtgtcagaagttggactgcttactctcacattttttttttgctgtgtaatgtgcattaaaataatttatattcatagagatggtccaataaattgcatatggctagttaataagctgctaaagcagagaagaaaattagatttcatttagaagaaaacaatatttggctttccccatggaaatatgtgaaaaagctttagaaaattctgttaacattgaggtctcagaagagactgtgattaaaaataataaaaagaaaaaaatatgaatttctatccagatcactatttttttatccaagtgatgagaaaaattatgcaaacccatgcatttgccctgagttatgattgtattatattaacctcagctgacaatatcctatgctagctttggcttacttagaattctgcctcttgggtataaacacacatctgaaattgactcagctcatttctttcttgctggggtcactttactggttactcccaactactgaacttattttatgtgttttcttttttacaatattacattctaaaatttttatcacctaagaattcctctctgatgattttattactcaattcaagatctataattacgaccaaatctcacagataacaagatgctaagatgggctaataaggttttgcttcttttactttattcawggtaaagtactggttagagtgaacactgcccagtcatttgcaagcaatgttgggactatcaggagtggcttgtattttcccataaactatcctagtgcagtagaaatgcctgacagtacttgatggctggtatctttggatctgagtagttcagatagaaaaagcaa

SEQ ID NO: 696246 - DNA, 650 bp, Homo sapiens
tgtttatttaaacatagactgtattaattatggagtgcgtgctttggactgatttttctagtcaagaatgactttgcctattaataggatgacaatcggcttttacttcttttaaagagtcactaaaccaagttgaatgaattaattaacaaagcacggacaatacaaaatattaaaaagtctatacatctgttctttaaaaatagatctcatttatctgaaaagggaattaggataattgaaaatgtccctattgaaaagttgacactaataatagaatagacatatttagagttgacagaatgttgttaaaagaaaatcattccaaatataaaacattgttatgattttgtaaggtctttttttctatgagaaaactcatgaaatatgtcctccctgatttttaaaaagccttaaacacttttatttcctccagaaggaagggggaagaagaccgactctctccagcaacttggggccayttcattaactaatgcctcaaagaatgtacccagccctgtgaaatgataggcaaaagcttcagaatggtatcacatatttctgaatattattagagtgaaaattatattctcaaatcattatatgttgagcttgtttctttgtgtgtgcatgtcttgaatataattaaa

SEQ ID NO: 696247 - DNA, 617 bp, Homo sapiens
caatctttattctctgatagattaaaatggttaaatatacttgatkgtatcaaactcaagataaaacttttttttttttaataggttgaacatttgtacctttggcttattgctatgtttggtgttcattttataaatatataattctagagacactttacacattttttaaacattgaatttcataatttaaattacatttctgaaaatagtgttctcgatttagaaaaagtgtagtttagctattttatatgattataagtgctgcatactgctatattaaaccctcagaagcatgagggctctgatagactttgcctatattattgaagtaagttactaggctttttttttttttctttctagctaacttgtttgctcagataactaacaatatacctagtcttgtggatctccttgtctttactggcactgcaatgcagttcatactctcatttatcttactgggctaagtagcagatgatgattcatataatttcaagagatgaaatgctaaaagtagaataggctattttacattgcagataatcataagtctacattattaggttttgtctattaaaattactttaattcttacaatatattttagaata

SEQ ID NO: 696248 - DNA, 617 bp, Homo sapiens
caatctttattctctgatagattaaaatggttaaatatacttgattgtatcaaactcaagataaaacttttttttttttaataggttgaacatttgtacctttggcttattgctatgtttggtgttcattttataaatatataattctagagacactttacacattttttaaacattgaatttcataatttaaattacatttctgaaaatagtgttctcgatttagaaaaagtgtagtttagctattttatatgattataagtgctgcatactgctatattaaaccctcagaagcatgagggctctgatagactttgcctatattattgaagtaagttactaggctttttttttttttctttctagctaacttgtttgctcagataactaacaatatacctagtcttgtggatctccttgtctttactggcactgcaatgcagttcatactctcatttatcttactgggctaagtagcagatgatgattcatataatttcaagagatgaaatgctaaaagtagaataggctattttacattgcagataatcrtaagtctacattattaggttttgtctattaaaattactttaattcttacaatatattttagaata

SEQ ID NO: 696249 - DNA, 675 bp, Homo sapiens
atcaaagacatggaatccgcctaggcctccatcagtggtggtttggataaagagactgtggtatatatatatatatcatggaatactacacagctatgaaaaagaataaaaacttaccctttgcagaaatgaatagagctggaggccataatcctgagtgaattaatgcaggagcagaaaagcaaatactatatgttctcacttacaagtgggagctaaaaactgagcaaacatggacataaatatgggaataatagacactgtggactaccacagtggggagagagggagggagccctgggttgaaaagctacctcttgagtactatgctcactccctgggtgcaatatacccatgtaacaaacctgcatatgtacccctgtatctaaaagttgaaattaaaaaacagttaaataaaaaatgtattcaagttgaaaatagtggatttaaaatattgcatgaataaytgtaaattataatttaattgagcaaattatagccagagctgtgacatggtacaaaaatgatgggagtttaaaaaacagggtttaataaaagtctcaattttaaaagaaaacatatatacatacatgtatatgccctatcaaaagatttctcccacatgtgaagacattccaaataatattgtagactttcagaattaagttttaaact

SEQ ID NO: 696250 - DNA, 2379 bp, Homo sapiens
  misc_feature 644, 700, 701: n = A,T,C or G
ctgaaactgaagagaaaaaaactgaagagaaaagcactgattaagaattttgacaaaatcaaaattcttcctagaagctatatatttcacattctattcatattattataayaattttatatgtggaagaagctggccagttataaggctttttaaatataaatattttagaaattttgatattttgaaaatgttttgctgtgagctgctcttatagcattttaactgacttataattccagaaaatacttggaaaccttgataaaccctatattgcacaaaataaagatataatagaagatcacaaacattgatcacaaacacaaaccttaaaagacataaagatcacaaatactgacaagctatggctgctttttgtttgtttgttttgtttttggtttgtttgtttgttttttgagacagggtctcactcttgtcccccaagctggagtgcagtagcatgagctcagttcactgcaacttctgcctccagagctcaagtgattctcctgccttagcctcccaagtaactggtactacaggtatgtgccaccacacctagctaacttttgtatgggacggggtttcaccatgtttcccagcctggtctcgaactcatggccttaagtgatcctcccacctgngtctcccaaagtgctgggattacaggcagtgagccatcgctcctggccacatgttnnttctttctttctttctttctttcttttttttttttttgagatggagtctcactctgtcgccccagctggagtgcagtgccgcgatctcagctcactgcaagctccaccttccaggttcacgccattctcctgcctcagcctcccgagtagctgggactacaggcgcctgccaccacgcccggctaattttttttgtatttttagtagaaatggggtttaaccgtgttagccaggaaggtctcgatctcctgacctcctgatcctcctgcctcggcctcccaaagtactgggattacaggtgtgagccaccgcgcccagcctttctttttttaatgtaatatatgtatatagttttaaaaactctaacagtacaaaggctgcgtgatgaaaaaatcagtcttcttgtcatcctgaccctactctcctctctaaaggcagacactccagtcagcctgctaagtatcacacagagatattcggtgctcatacttagagaatacatgtatatcctctgcccttccatttttacgtctgtgatactctcacattcatctacattgcttgtttgttttaaataatatgttttgcaggtcattcctttatcagcttttataggcttgttcattctttttaatggaaacgccatattttcaatttataacatatcatttatttaatcagttatgtgtgcatgtgtgtttgtgtgcgtgggtgtgtgtaaaagatcattgatcacagagataactcaaaaaagaattaggaaaatacataaaaaatttttgttacagctaatgttagttacttcagtgagtactacctactaaagaaagcatgaaaaggacagcaagttacatttgttcaagttcatgtgtttattgtaggttacatttgcagatttgagtcatttctcttctttaacttgtgcgataaattacttactattgcactgagcaataaatactgggatgattaatatgttatttctcatattgatattgaacattgatgtctagaactcagttccaattgattatatcttaatttaaaattattcgtcttttgcaaaatgtaacttgaatacataagtcataaaaatagattattacattgtctctaatttctattacttttttctgggtggtgttttaataactgcttttacgcttttctgtaatgacagtgccaagaagaatagaaaaactgataacaattttgaagatcatcttagaataaattcctctattacacatattatagtcccagattcaattccatatattgaacaagctactataaagtttatactataaaatacatttttatttcatttgattttattttatgaaaaacagagaaaaggtattatcaagttttgactgttaaatgtgtgaacatataagaaaatcagaaatatccaaggtcaaaattagaatttcccctttaccaattgattaatcatgagtaatttatgcactgaacctccatttattaatatgtaaaattcaattaataatatgcataccacaaaattatgtgacaataagataatttaagatacagaaatatttttattgttcaattcaggagagattgacgactctgtcagccactgtactagacagatattggtgactgttactgttaatgatgtaggccaaacaaaaatataaatatgtca

SEQ ID NO: 696251 - DNA, 2379 bp, Homo sapiens
  misc_feature 644, 700, 701: n = A,T,C or G
ctgaaactgaagagaaaaaaactgaagagaaaagcactgattaagaattttgacaaaatcaaaattcttcctagaagctatatatttcacattctattcatattattataataattttatatgtggaagaagctggccagttataaggctttttaaatataaatattttagaaattttgatattttgaaaatgttttgctgtgagctgctcttatagcattttaactgacttataattccagaaaatacttggaaaccttgataaaccctatattgcacaaaataaagatataatagaagatcacaaacattgatcacaaacacaaaccttaaaagacataaagatcacaaatactgacaagctatggctgctttttgtttgtttgttttgtttttggtttgtttgtttgttttttgagacagggtctcactcttgtcccccaagctggagtgcagtagcatgagctcagttcactgcaacttctgcctccagagctcaagtgattctcctgccttagcctcccaagtaactggtactacaggtatgtgccaccacacctagctaacttttgtatgggacggggtttcaccatgtttcccagcctggtctcgaactcatggccttaagtgatcctcccacctgngtctcccaaagtgctgggattacaggcagtgagccatcgctcctggccacatgttnnttctttctttctttctttctttcttttttttttttttgagatggagtctcactctgtcgccccagctggagtgcagtgccgcgatctcagctcactgcaagctccaccttccaggttcacgccattctcctgcctcagcctcccgagtagctgggactacaggcgcctgccaccacgcccggctaattttttttgtatttttagtagaaatggggtttaaccgtgttagccaggaaggtctcgatctcctgacctcctgatcctcctgcctcggcctcccaaagtactgggattacaggygtgagccaccgcgcccagcctttctttttttaatgtaatatatgtatatagttttaaaaactctaacagtacaaaggctgcgtgatgaaaaaatcagtcttcttgtcatcctgaccctactctcctctctaaaggcagacactccagtcagcctgctaagtatcacacagagatattcggtgctcatacttagagaatacatgtatatcctctgcccttccatttttacgtctgtgatactctcacattcatctacattgcttgtttgttttaaataatatgttttgcaggtcattcctttatcagcttttataggcttgttcattctttttaatggaaacgccatattttcaatttataacatatcatttatttaatcagttatgtgtgcatgtgtgtttgtgtgcgtgggtgtgtgtaaaagatcattgatcacagagataactcaaaaaagaattaggaaaatacataaaaaatttttgttacagctaatgttagttacttcagtgagtactacctactaaagaaagcatgaaaaggacagcaagttacatttgttcaagttcatgtgtttattgtaggttacatttgcagatttgagtcatttctcttctttaacttgtgcgataaattacttactattgcactgagcaataaatactgggatgattaatatgttatttctcatattgatattgaacattgatgtctagaactcagttccaattgattatatcttaatttaaaattattcgtcttttgcaaaatgtaacttgaatacataagtcataaaaatagattattacattgtctctaatttctattacttttttctgggtggtgttttaataactgcttttacgcttttctgtaatgacagtgccaagaagaatagaaaaactgataacaattttgaagatcatcttagaataaattcctctattacacatattatagtcccagattcaattccatatattgaacaagctactataaagtttatactataaaatacatttttatttcatttgattttattttatgaaaaacagagaaaaggtattatcaagttttgactgttaaatgtgtgaacatataagaaaatcagaaatatccaaggtcaaaattagaatttcccctttaccaattgattaatcatgagtaatttatgcactgaacctccatttattaatatgtaaaattcaattaataatatgcataccacaaaattatgtgacaataagataatttaagatacagaaatatttttattgttcaattcaggagagattgacgactctgtcagccactgtactagacagatattggtgactgttactgttaatgatgtaggccaaacaaaaatataaatatgtca

SEQ ID NO: 696252 - DNA, 400 bp, Homo sapiens
agatcaacatcactcagtaatcattcattacaaggaaatttatttctcttccctttctcctcttatttcataaattattgttgccattgttgttagtttaagaaacatcctgtaatatatagctccttttttttctttttaaaattctagatatcaattacagtggcctgactgtctcatgggcaaactccttccttgttttgggatgtatttcatctgagccagaattgctaaacttgttcagagctattacaatcttttcrcccgctttaaacttaaatttctctcaacaacattcattctatcctttctagttcatagatcactcacaatgacaagcaaagacaagtaaaatagagttgagtgtctttgccttctctttgtcacttatcaacattca

SEQ ID NO: 696253 - DNA, 972 bp, Homo sapiens
atgtagtttaatttgtataccttctttagagatttccacttcagctggtcagattaaacttcaattgtttaatccacaatagaagttgcaaaaactcgtctctcgttatgtgtcaatatattatgtggaaaaaaaaattctatttttaacttattttcccttatggaattttgtagctaccttattcacaaactattgtgaacataaaatgataacttttcattttcagatcaacaaagaaattatgaaaagagaatttttgctatgattatatagtaaattataaccaaattattgctaaaatcattgttttaatagcataattataatttgcattactcataataaaaaaagaaaatattcataaaataaaattattttttgcctcctaatttccacatttaatttgttcttgccagcatttatgtatatgttgaccataactcagtagctaaaaaaggtaaaagaactttctctttcacaccaacagaaagagacttctaaattaaagctactttttattttcagtcttttcacaataggaaatgatratctattatttcattggatttgggcttttgacaacaaaagtaaaaagagatctggtaattcagagaattaaactgtgtttaattctgtaccaaagattaaattctgtaccaagattaaattctgtaccaaaaagaaaaaaaagaaacagctagagagaaattcatattgatatgagacaaatgttttgatgaaggcttagaaaaaaaagaatagacagtaatcaaactaagtatcattcatgcactacacacagtgcaaccaaaaacagatgtgaagggctaatgtgacagtaatactagataataaagctattcaatgccagctcacatttacctgattattactggttctttgattgaattatatgtaagaaaagtatgttggtaaagtactaaatgtgtttcaattattgaatttgcc

SEQ ID NO: 696254 - DNA, 624 bp, Homo sapiens
gctagcctctgccaacattcccttaatcattctggcctcacagtccctcgggtgctacaatggaatgcctctgacaagcaaagaaatacaactgagtcaaactgttgccttagcatacaacatacctttattctcaagtttattatgtgtgttgaataaactgtgttgaaacacctagggctattcccaactactcaaatgggactaataagctttaatagtaagtcaggtatatatttagttcaatgcaggaaacctgaaaagggtatgaagaattattcttttctttattgaaaaggcaaacattaatatgtaccatacaagaaaaagaaacttctcagctgggtgtggtggctcatgcctgtaatcccagcattttgggaagccaaggcgggcagatcacctgaggtcaggagttcgagactakcctggccaacatggtgaaaccccatctctaccaaaaatacaaaaattagctgggcatggtggcaggcacctgtaatcccagctactcgggaggctaaggcaggagagtcgcttgaacccaggaggcagaggttgcagtgagctgagatcatcccattgcactccagcctgaacgacaagagtgaaactctgcctcaa

SEQ ID NO: 696255 - DNA, 1326 bp, Homo sapiens
tatttagttatattttagttaaaatactatttaattattaataaaatagtaagaaatgtgattaaaatatgctgggctgataatatattattggtttctgtttcattaataataatttataaaaatggatgaatacatcatctcaaatgaagatatcaattcctgacacaagaggtttctttattcacctttggctgcttcaaggtttaataatagaaagctaaagaaaccaagaggacagaagacttttatcaccttctaaatttagggctttgaatgataaggactttatgtgtcacaacactaaacaatttcacctacagagtgctacagtgaaattaccacttatttggggtccccgagatagcacatttcatttttaccttgttttattttacctatttcctgggagcaggcttagtcctacaagggaaatacaaaagctcccttcacactatgatatgagaactgtaaatagccctgcctgggaaaactgatcttatccagaaagtttactgggcagacatctgtactgttacattaactatgactacatagaaaagctccagtctaaaatgtgtaaataccatctgaccaaggcctttgggccctcctctctcactaacaccctaggagacgttatcctccacagttaagatgctgatttcctgatgatgggatgggaatggaaagaaacatgaaggccaatccgaggaagcagcccgcagatgaagagaaatctatttccattaatatttgctagggccaggcttgcagggaagaaactgggttttagtagtttctctgctgatccgtactcattatcagctgtaacagacaaaagatgaagatgggaaaaagagaaaaagaaatttaaaagatgcaaaggcaaaccatcaatactcaactttcaagatactacaaaccagaaattgtgtgaggagcttctaagagctgcagtttcctctctgattctggagagaagaacagttcaggagagatcagagtattttctcatttaaaaatgatgtagcagttgctaactctaaaatattgctgggaagataatgatgctcatttgcctcagaaccagacaaagtgagatkggactccaacaggaggaccccacggatcctatactgctttaggtaatatcacaattcctatattcccttaaattttattttatactttaaacacaaatgccattgaacatcatgtctattcagagctcactatttttctgactcctcatcaagcagcagagttaatggattttgcaaatcaactgcatcatatggcaaaaagattcctgaagttagaacc

SEQ ID NO: 696256 - DNA, 616 bp, Homo sapiens
ttatctacttattcctttaatgtgtgcaattttgctttacatattttgaggttatatattatatggatacatatttaggattgttatatcttcctggtgagttgatcacaaaacatctttctttttctttaagaatgacttctccacaaagactatttgtttgttattaatacactagctttttttccattactatttgcatggtttattgtttgtatacttttaccatmagtctttctgtaaccttatgttttcgatgtcagattgtaagcaggaaataactggatttttttaaatttgcatggccatctttgttttttataggagtctctagtcaatgtaaatttaatgtaattaccaatctatttgggtttaaaggtagatttctactcttattgagtttactatccttacaaccccctgtacatttgcagttgagaatgctctccaaacctaattttgatttgatatgaaggatatatgagaatagtcctcagaaaaaaatgaagagaaggaattgaagcctaagatgagcaaaaaatcatgtgatctgggcaatttatgtctcagaatactgagatcactttctaaaagatgcatgaaacattgtcaatga

SEQ ID NO: 696257 - DNA, 468 bp, Homo sapiens
ttgacccagttattcaaaccttttccccaggactttgataaccctccatgggtgctgggtctccatgtgttacttcatttaaatcccatgcctcactcacattctggtttcctggacctggcgaggacaatgacctcttgctcccctgagggtgaattgtgcttccataaaagtttgctgcctgagaagttaaatggcagccccttgtgctatttttacttgaaaaccttaaccctgtggacaactcatcaacgaatccaatcactgcctctcccatgagactcatttgtcctcacataatgggagcccctgtcaatctttcagctggttggcacagacctgcctgtacatgcctgatttcacagcmcatagccagtttaagtcctcactcaaggatcctaggtaaaacagtaaggaaaatatttagctagttatggtttcatcatcgttaattacagcattgataaa

SEQ ID NO: 696258 - DNA, 576 bp, Homo sapiens
gtgacttaaaaaaaatcaatcccatgcatttgcagatggcaggcatgggcacacagatttacttygtgatgatgtcttgcttatacagatcactggtattgactgtggttaagattattgtaagatagatcaatcaaatgcatggcctcaaggtgcatacatgtgagttactgaagatggtgggttctggagctaaaaggaccatttgttgaatgtgataaagccgagtataatgattagcccaggtggaaagcaaagatgataggtcttggagatcacaatgcctttctaaatgagctatcaaaaaaggcaaaacttccaccacgcaagattcttcagcaaataaaacttgaagtttccagggccacaattccttcctgaatcctctgcatgggatgtggctgcatgtgcatttctatatgcaatggttgcctctaaatgagtgggttggcatctgaatgaatgtggatggttagttccaccgagtgagttatggttacaattgactctctttggggtgattcactcttgtgtaacaactgaggtctgaaaacaaaatcacagtgctaactgtga

SEQ ID NO: 696259 - DNA, 576 bp, Homo sapiens
gtgacttaaaaaaaatcaatcccatgcatttgcagatggcaggcatgggcacacagatttacttcgtgatgatgtcttgcttatacagatcactggtattgactgtggttaagattattgtaagatagatcaatcaaatgcatggcctcaaggtgcatacatgtgagttactgaagatggtgggttctggagctaaaaggaccatttgttgaatgtgataaagccgagtataatgattakcccaggtggaaagcaaagatgataggtcttggagatcacaatgcctttctaaatgagctatcaaaaaaggcaaaacttccaccacgcaagattcttcagcaaataaaacttgaagtttccagggccacaattccttcctgaatcctctgcatgggatgtggctgcatgtgcatttctatatgcaatggttgcctctaaatgagtgggttggcatctgaatgaatgtggatggttagttccaccgagtgagttatggttacaattgactctctttggggtgattcactcttgtgtaacaactgaggtctgaaaacaaaatcacagtgctaactgtga

SEQ ID NO: 696260 - DNA, 299 bp, Homo sapiens
gagaggtagcataaactgccatgttgacaattgctttagagagaaagtgaacttgtgaacaatcatctttctggtcccatgtcygcactgattaagcctccaaaagtttgcaggcaggtcagtcaaaacagttagagatgaacctctaagattctcctatcaggggtaaaatggtatcacctagcagtcccagagtgtaatgatacaataaagtaagaacataggcactcaccaatttattcctcgtttaccccatctaggtagatgcctggagttccggtcctatctaaatctaccca

SEQ ID NO: 696261 - DNA, 1049 bp, Homo sapiens
tcaggaattgaggcctgctatgtacaaaagaactgtaatttttgagtgattatgacatgaaaagttgcattctactgcctgtcacagtcaaagttgaaatgcatatgtgttttccttaacactggaagtactttttggacaccctgatattgattatactaattactccctgatcatgttaccctctccagagcttcacccactcactggaattctagacctttgtttttcattccttcccatctttccatctccccctcagacttcaaattatcttttctctctaactatgcccaggacaacttctgtatatgaaaaaccattgctattcaggtgaataaatggactgctctgaaactgagggatttttttttttaactcctttgaaaatcatttgccttccttacaagtcagttttgcttaaaaatataattttgattgtaggtaatactagaaaatatgttacaggcttaagaggtttaaatatgtccctaaatraaatgtttttaaagcagaccttgccattaagtattcaattcctgttattattgttgttgtgcactaatatcatttccccaactcttccatatgtatttatgcttatccaacgtttatcatttattaattttcacaaaagggtattttccccagattttattgcaattttataatacttcatattttaacaattttcaacattgtattgtttcataatcatgttagcactactttatttagagtttctgtaattgttactaaagtatttggtattctgtttattttacagatattttctccattgctgtcaattaataccttgttatctctactatttttcctaaagagattatgacaattgcccactttctgactccttgcagtcagtgaatgtccatctctcacctcccatgtgaaagacagcctgacagattttgtcacagagggcacaacctttttttaatataatgcagataatgagcccttgtttttgacatttggcattgcagaacagcttaacgtcaacctcattatttcttcatttctgtcta

SEQ ID NO: 696262 - DNA, 1084 bp, Homo sapiens
gaatggtgggatgaacctgttgtgtaagtaagagaataccaatttggcagggagttaaatattattaacataatttaataataaggcaatttataaaatcagtaacaaaaatattttctcaggtggttgtgagacaacttcaacaagaagcggctgacagcctaaaaaaattaactacgttagagtctccactggaaggtatgtcacattatcacattaatttggatgagacacaggccccaaagaagaaattatttcaagtgaaaagtcaagtgtgtatggaatttaacatgtcaactcttattctgtagctagttgagtttatataacgtgttttaggatactaattttggcagaagcttgattttttagtttcattacaatgaattatttacattttactatctttataatgtacttatttttttatattgtgactttcattctaccattttgaaaaaccattacataccttttctgttacaatatgtacccttggaaaagtggagaattatatatcattcctcatagaaaactgacttttttcctgtaaaaacagtatttttaagtaatttttgtattgttctgatgaggcaggccagattaaatcagaggagaatatttcatggaaagttccagaaagttgtcttatttcttcactttcgtgaatggacacagaatctgtgtctatttatttcacagaytgcaggttaacttgtacagaaaggccattatactattctttgaaatgtgcatgttttaggttaatttacaaactatttgaaaatttaggcattttctttatctttaatttaaaatatactataaaactctaaaaatatttagatttgatatagcatgtaagtcaaaaattgagagttgagaaaattatcttgatcctgcctttggattttaaaaacagtttcactgagatatcattcacatttgagagagttcaaccatttaaaatgtacaactgagtatctattagtatattcacagcattttcatcaccctgaaaagcaaccccacatctcctaggcatgactgcagccttcctccatgtccctccacctacccctgt

SEQ ID NO: 696263 - DNA, 2066 bp, Homo sapiens
agggtgggaggagggagaggagcagaaaagataactattggatactgggcctaatacctggatgatgaaataacaggtacaacaaacccctgtgacacatatttaactgtataacaaaccctcccgtgtaccccctaacctaaaataaaagttaaaaaaaaagaaacacagctttttattttttttctttttaatcccataaaggtcatgggccatttgccacctgaacagtcagtaacacatgagtggaaagaaactgaacacccagggacaccagagaccgttcactgtagaggaaggaggcaggtataactcataaggtgaacttcctccagtcccagagttgttcccctctccttaaatgtgggtcccatggaattcagactaggaagtaaagcaaatgagaaaggcctacaggggagcagttcaaatgtgtggaaaaggatagagcagccccaatgaggaaggaaggctggacaagcaatggatttgtagggaagacaatgtgcacccatcggagctctgattccttcattttcactaccctcccctgcccactaacataaaaaaagtattgatggcaagtgttgggccataagacatttccttgctttataatctggatttggggggttacatttcagagataatgaaaatctcctcctttagttaacttttaatttcataattgtaactttgtttttacagatttgtgaacatgtaaaacaaagaaaacagcatgggagtaatttataatcaacaaatatgtgttcactgagtgacactcacatggcatatggcatatgggcatcctgagagtaggatcgtggggcatccgatggtgattgtccttagagttggtcggagcccagccttccacggtctgcgcactgctgtgtgtacaatcggtgccttctttaagttcacagcaatgccacaaggcaaatagcactgtcttcactttctgtgtgagagaactaaggctgggtgagagtatgcagagctggatcatggatttgtttggctccttctagtttcaaaacctgtaaatattttgctgtctctaatgctaatcttagcactatatttggaataagcatataaacatataaccacaatccactcaggtaataggcaaccaaattataaataaatgctcaacaagattatgaaatgattgaatgagttatatataagaataataactggtggaagtgttattcataggataaagtagaaatcatttaaatggctaacagtataaggagggttaaatcaagcatccaggtgtggaaatagttgatttacatatatagtttatgccatgtaagacgtttatgatccaatattggatgaaaaaacagaaacattttatgtacagtataatctaaaatttctacatttcattaaaagtgcaggaatataattatcaaaatttgagtgataaaattatgaatttttctttttcttataactcattttatatttaccaaagatcctccaaagagaatatacacttttataattagaaaaaaagttatttgttaaagagatcataaatgacataatattttacagaagttaaaagctgagattgtgaggatttccagggactcctgccaccagcccatctcgcatcatcatttacatggaaatgttgggactgaggtgacttcatgcctctcaattcccagccagctttctctccctctggctcctagccagcctgttaaccagaaaataatcagtaagacaaaaaacaccctagtgttctaacaagttacacataattgcttgcttaccaattgcctacctcagaactctgtttccctcatagagtcaatataatcatttattttaaattcagcttctgccattttacagtctgagatgcaggactttgcatagggcatggatgggtttccacagtccacaggaggatgggaggagagcagggcagatccagccgcactcagtgagagttctggctggagttacttggstggacctcactccagagagaggagaccttcttctggaccagctaccaagacagcccctagttg

SEQ ID NO: 696264 - DNA, 3059 bp, Homo sapiens
atgtgatttatgagttgtccatgaagagtttatataaaacacttcatctaattgaataacatgtattttcctgcaaataaccagttctagaagcagagactcttaataccaatatggtaagtctttatcatcataattttgtcattgtagtttatttaaaatatttacttggccaggcgtggtggctcacacctgtaatcccagcacttttggaggccgaggtgggtagatcacctgaggtcaggagttcaagatcagcctggccaacatggtgagaccctgtctctaaaaaaaaaaaaaaaaaaaaaaaaagcacaaaaattatccaggcatgatagtgcatgcctgtaatcccagttgctcaggaggccaaggcaggagaatcgcttgaacccaggaggcaaagattgcagtgagccaagatcgcaccattgcactgtaggctgggtgacagagcaagactacatcttaaaaaataaaataaaataaaataaaataaccagtcaaaggacttatatcatattctgaaaagtttgaatgtcagaaggttttctatttagttttttaaatgatcattcattggaagcttctgcataccataagctactggggggcagataacatatttgtgtggatcctggagaacctagaatacagtcatccatgtaagaagcattttacttgttgttttttgagatggggttttactctgtcgcccagggtggggggcactggtgagaaacttggctcactcccgatctccatttcctaggctcaggtgatcctcacacctcagccatccaagtagttgaaacaatagagctatgtcaccatagacctgtgtcaccatgctgggctgagttttgtagagatagggttttgccttgttgcccaggctcttctttaactgttgggctcaagtgttctgctcgcctcagcctctcaaagtgctggggttacagacatgagacattcagccttaatagttgtttaatctgaataaataaacaaatgaatttttatataatggaatgttataagtaatataataaacctaatgtatctaatcattaaatattgtatttaaaatattgcttacattgtattattttttaatatttaagggtgtataagttttgacatgttatgttgagaaattatgccataattaaaaaggaaataaaagagaaataggtcatcggtagcaaagagggttacaaaatattttctagtatcattcaactggaatcttaacattgagattttagattaacatttcttaagctttttattagacccaactcatgttccattaaatataccatttcaagccatacattactctttattattattattatactttaagttctagggtacatgtgcacaacgtgcaggtttgttaaatatgtatacatgtgccatgttggtgtgctgcacccattaactcgtcatttatattaggtatatctcctaatgctattcctcccctctccccccaccccatgacagaccctggtgtgtgatgttccccatcctgtgtccaagtgttctcattgttcagttcccacctatgagtgagaacatgtggtgtttggttttctgtccttgcaacagtttgctcagaatgatggtttccagcttcatccatgtccctacaaaggacatgaactcatcattttttatgctgcatagtattccatggtgtgtaagtgccacattttcttaatccagtctatcattgatgggcatatgggttggttccaagtctttgctattgtgaatagtgccacaataaacatacatgtgcatgtgtctttatagcagcatgatttataatcctttgcatatatatccagtaatgggatggctggatcaaatggtatttctaattcttgatccttgaggaatctccacactgtcttccacaatggttgaactagtttacagtcccaccaacagtgtaaaagtgttcctatttctccacatcctctccagcacctgttgtttcctgactttttaatgattgccattctaactggtgtgaaatgatatctcatagtggtttcratttgcatttctctgatggccagtgatgatgagcattttttcatgtgtctgccatacattactctttagaattctggtgaccaattctttttctgggtggaaagttgatggaaagttccagttttctctctctgttataataatgttctttcaggtaatggtagatgaccatatttagctaattgaatgtcttatagtaagaaacactatcacagaagtacttacaaaaaactaattgcagcataaatattaattagtattatcagagttatgaaagaccgaaggctctgttatagatctatttccccatgtactttattgtacttcatgtttttcgttttctttcttggcttaagctcatatttcattgactaattaggcttgttttttgtttgtatctctctttgttctcacattttaaattgaaatttttggggaggcagggtctagctctgttgtccatgctgcagtgtagtggcatgatcttggctcactgctgtatccacctctcaggctcaagtgatcctcccacatcagcttcccaagcagctgggactacaggcacacaccatcatgcctgactccttttggtattttttgtgtagagatgtgtcctcattatgttgcccaggctggtctccaactcctgaactcaagcaatccacccaccttggccttgcaaagggctgagattacaggtgtgagccaccgtgcctgggcaacattgagattgatttaaagaaattgattagggctgggtgtggtggtgcacaatgcttatctcaacattttgggaggcagaagtggaagatttgcttgagcccaggagcttgagaccagcctgggaggtataatgaggccttgtctctacaaagataacaataaaaacattagcatgacatgatggtatgcacctgtagttccagctattcaggaagttgaggtgggaagattgcttgaggtcaggagtttgagaccacagtgagcca

SEQ ID NO: 696265 - DNA, 533 bp, Homo sapiens
actaatgttaaccgttttgggaagggtcagttaatcattttgggaatgactcatctgtgaaactatccagtcacctttcacattttaatttaatttaattcacttttytgagaccgggttttctctgtcccccaggcttaagtacagtggcacaaccacagctcactgcagccttgacctcccaggctcaagggttcctcctacctcagtctttcaagtagctgaatagctgagaccataggcaaacaccatcatgcctggctacattttttgtcattatttgttgagataatttgttgagacagagtcttgctatgttgccagtgctggtcttgaactccagggctcaaatgatcttcccaccccagcctcccaaagtgctgggattacaggtatgagccatcatgtccagcctgtcacctttttaaatgaaaaatatttaacaaactttcagtgtcttttatggtttggggatttgttttgtttttgccactttattccatctcttggtcaatgtattatgctacaaaatt

SEQ ID NO: 696266 - DNA, 533 bp, Homo sapiens
actaatgttaaccgttttgggaagggtcagttaatcattttgggaatgactcatctgtgaaactatccagtcacctttcacattttaatttaatttaattcacttttctgagaccgggttttctctgtcccccaggcttaagtacagtggcacaaccacagctcactgcagccttgacctcccaggctcaagggttcctcctacctcagtctttcaagtagctraatagctgagaccataggcaaacaccatcatgcctggctacattttttgtcattatttgttgagataatttgttgagacagagtcttgctatgttgccagtgctggtcttgaactccagggctcaaatgatcttcccaccccagcctcccaaagtgctgggattacaggtatgagccatcatgtccagcctgtcacctttttaaatgaaaaatatttaacaaactttcagtgtcttttatggtttggggatttgttttgtttttgccactttattccatctcttggtcaatgtattatgctacaaaatt

SEQ ID NO: 696267 - DNA, 601 bp, Homo sapiens
catttactgattgtaagatcttgggcaagtttatttgggcagagggagggaggaggtctcaggttttctttattattattattgagacagggtctcactctttcgcccaggctagagtacagtgctacaatcatagctctctgccaccttgaactcctaggctcaagcaatcctcctgactcagcctcccaagaagctaggactatataggtgactgccaccatgcctggctaatttttaaaatttttttgtagagacggagtctcactttgttgcccaggctggtctcttactcctagcttcatgtgtttctctggcctcggcctcctaatgtkctgggattaccagtgtgagccaccgtgcccagcctcaggttttcattgatcaggtagtatctactttacagaatgcttatgagcattacatgaaatagcgtatctaaagcacatattcatacctgacaccatagtaagtgatcaatctattccttcatgcccgatccatggcaatggagttctggtatcccttctccttgtcttatcccatttacatacatcatacaaatgctaccaaaaaaatcttttataagtgttgctttgat

SEQ ID NO: 696268 - DNA, 601 bp, Homo sapiens
catttactgattgtaagatcttgggcaagtttatttgggcagagggagggaggaggtctcaggttttctttattattattattgagacagggtctcactctttcgcccaggctagagtacagtgctacaatcatagctctctgccaccttgaactcctaggctcaagcaatcctcctgactcagcctcccaagaagctaggactatataggtgactgccaccatgcctggctaatttttaaaatttttttgtagagacggagtctcactttgttgcccaggctggtctcttactcctagcttcatgtgtttctctggcctcggcctcctaatgtgctgggattaccagtgtgagccaccgtgcccagcctcaggttttcattgatcaggtagtatctactttacagaatgcttatgagcattacatgaaatagygtatctaaagcacatattcatacctgacaccatagtaagtgatcaatctattccttcatgcccgatccatggcaatggagttctggtatcccttctccttgtcttatcccatttacatacatcatacaaatgctaccaaaaaaatcttttataagtgttgctttgat

SEQ ID NO: 696269 - DNA, 1092 bp, Homo sapiens
agtttgagacagaaatatttgagaacatttttatcagttgcaacactttgatagtgaacattttatatcttctgtcaacttaaaatgtttgcatcttctgtcagcttaaaatgtttaatttgttatagccaaataatttggctataattgataatttaatttatcaaattaaattgctttttttccctttagactttcttcagtcacatctgaataaatcacttagaagtaagctagatgtaatataatgaaatgcttaaaagggctgtgtatcttcatattacacttacagtgattttctgttgtacgcattatattctacctgcagctagttgaggaaaagagagggcatttaactgccaagggaacctgagaggagactgtagaaatctggaaagtctctcgggtctttgagggactttgggatgcagagagtggggctgggatctctggctaggttggagccagcctgcatttgtatctttatcttggaagcaaacatagaatgcagagttagatatggyctggatgctgctaactctagccaaccactaaatcttaaggtgggagagatgcaggctttggctgggtgctaagctgctgtagctggttgaatgtagaggtcactatcttttctgaatacttgtaagtaaattaaatcattctctactcctgtatgcctgccaaccaaatgggaaatcgctatagaaaagatggtttaaattttagtctttgaagtggtttatgcacgtttctggaatcaagatttaatgccgacttggattggatattgaatattttttatttgtctacttttctctccatagggagcttatagcttcattgcactgtgtgtggcatttgggtcctgtttggcagcaatgactgcctttctgtttagtgtctgtgtgctatgaagattgcacacaggggtccaaatgcatcctgttttgagaatgtcaatggatacaccagttgctgctttggatttcactggttggtggtagttgacccactgtttggaatgcagccaatttaagtgaagacatatccatatatgtggctctgttacagtggtgaaatctgcaacca

SEQ ID NO: 696270 - DNA, 1092 bp, Homo sapiens
agtttgagacagaaatatttgagaacatttttatcagttgcaacactttgatagtgaacattttatatcttctgtcaacttaaaatgtttgcatcttctgtcagcttaaaatgtttaatttgttatagccaaataatttggctataattgataatttaatttatcaaattaaattgctttttttccctttagactttcttcagtcacatctgaataaatcacttagaagtaagctagatgtaatataatgaaatgcttaaaagggctgtgtatcttcatattacacttacagtgattttctgttgtacgcattatattctacctgcagctagttgaggaaaagagagggcatttaactgccaagggaacctgagaggagactgtagaaatctggaaagtctctcgggtctttgagggactttgggatgcagagagtggggctgggatctctggctaggttggagccagcctgcatttgtatctttatcttggaagcaaacatagaatgcagagttagatatggtctggatgctgctaactctagccaaccactaaatcttaaggtgggagagatgcaggctttggctgggtgctaagctgctgtagctggttgaatgtagargtcactatcttttctgaatacttgtaagtaaattaaatcattctctactcctgtatgcctgccaaccaaatgggaaatcgctatagaaaagatggtttaaattttagtctttgaagtggtttatgcacgtttctggaatcaagatttaatgccgacttggattggatattgaatattttttatttgtctacttttctctccatagggagcttatagcttcattgcactgtgtgtggcatttgggtcctgtttggcagcaatgactgcctttctgtttagtgtctgtgtgctatgaagattgcacacaggggtccaaatgcatcctgttttgagaatgtcaatggatacaccagttgctgctttggatttcactggttggtggtagttgacccactgtttggaatgcagccaatttaagtgaagacatatccatatatgtggctctgttacagtggtgaaatctgcaacca

SEQ ID NO: 696271 - DNA, 1092 bp, Homo sapiens
agtttgagacagaaatatttgagaacatttttatcagttgcaacactttgatagtgaacattttatatcttctgtcaacttaaaatgtttgcatcttctgtcagcttaaaatgtttaatttgttatagccaaataatttggctataattgataatttaatttatcaaattaaattgctttttttccctttagactttcttcagtcacatctgaataaatcacttagaagtaagctagatgtaatataatgaaatgcttaaaagggctgtgtatcttcatattacacttacagtgattttctgttgtacgcattatattctacctgcagctagttgaggaaaagagagggcatttaactgccaagggaacctgagaggagactgtagaaatctggaaagtctctcgggtctttgagggactttgggatgcagagagtggggctgggatctctggctaggttggagccagcctgcatttgtatctttatcttggaagcaaacatagaatgcagagttagatatggtctggatgctgctaactctagccaaccactaaatcttaaggtgggagagatgcaggctttggctgggtgctaagctgctgtagctggttgaatgtagaggtcactatcttttctgaatacttgtaagtaaattaaatcattctctactcctgtatgcctgccaaccaaatgggaaatygctatagaaaagatggtttaaattttagtctttgaagtggtttatgcacgtttctggaatcaagatttaatgccgacttggattggatattgaatattttttatttgtctacttttctctccatagggagcttatagcttcattgcactgtgtgtggcatttgggtcctgtttggcagcaatgactgcctttctgtttagtgtctgtgtgctatgaagattgcacacaggggtccaaatgcatcctgttttgagaatgtcaatggatacaccagttgctgctttggatttcactggttggtggtagttgacccactgtttggaatgcagccaatttaagtgaagacatatccatatatgtggctctgttacagtggtgaaatctgcaacca

SEQ ID NO: 696272 - DNA, 816 bp, Homo sapiens
actctaaccaagcaaaggcaagttggaagaatcagacaaatgtaagtccctaggatacataaatgccacgggattttatgtttttaactttcaaccacctaagtttcactaagagacatgttatttggagaggttgctaaagtgtatttgtatgatgtctctgtttacggttggtctggacctctttctgtccagtggttgccctcaactgatgagagttacctctctaaagatcatgcttacgtctctggagcagaccacagcactatcaatgtctgacgtccacctttttccaattaatatttctgtacttactgaattggaaaacatacaggtgttttttgcctggtcacttgtggttttacaacactccccccrcttccccaccactgccccaggtgattttgatgccagccaaagtgtgagaactactggcagctgctggcagacagcagcaaaggcccaaatcctctgtgtgatttcaagacccgtatctggttttcagccatatttccttctccttctcacagctgagtccactcctcctccctcaccacctgtaggctatgctttccagcctgtgtccaggattagtcctgatgtaaggcacgtggggtttaaggagctctctcttcagtcttatttccacaccatctctgacagatatattccagttgtaatcatggggctacctcctcttgtttccagtcccatgctcgttttctctatcacattctaccttgtaataacctaaatcttctggtgggcaaccttcttcctcaatcaaatttgtgtttatgattgtgttggggattg

SEQ ID NO: 696273 - DNA, 655 bp, Homo sapiens
agttaggttgcagtttgtccacagggactcaaatctagaagtacagagtccttcccaggccatatttagttcactgtaacagttcctattatgacctcactgacagttctttttctctgaattctcctttcttctcaacagcttatccaaatgttccattggtccctgttcatcttgccctgcagttctccttgactgattcagccctttgtggtttgcagtcctgtttctctacagcttggacctcttcagtctttccatcataggtttaactctctgttgaatgcttctttgtagctatccaaatttaccttaagctcaaaaaattcgaagtgaaagccacatcctcttctcttccttatgtgtatggcattacwaccatgcagccagtgacccaaaatgggatttcttctgggcttttcttgcttagattcaggctcatctggtgtcaagccttgttgcttttgtttccttgttcttttatttttatttttattttttgagacagagtttcgctcttgttgcccaggctagagcgcagtggtgtgatctcagctcactgcagcctccacctcctgggttcaagcaattctcctgcctcagctcctgagtagctggtattacaggcatgtgccaccacgcccggctaattttg

SEQ ID NO: 696274 - DNA, 655 bp, Homo sapiens
agttaggttgcagtttgtccacagggactcaaatctagaagtacagagtccttcccaggccatatttagttcactgtaacagttcctattatgacctcactgacagttctttttctctgaattctcctttcttctcaacagcttatccaaatgttccattggtccctgttcatcttgccctgcagttctccttgactgattcagccctttgtggtttgcagtcctgtttctctacagcttggacctcttcagtctttccatcataggtttaactctctgttgaatgcttctttgtagctatccaaatttaccttaagctcaaaaaattcgaagtgaaagccacatcctcttctcttccttatgtgtatggcattactaccatgcagccagtgacccaaaatgggatttcttctgggcttttcttgcttakattcaggctcatctggtgtcaagccttgttgcttttgtttccttgttcttttatttttatttttattttttgagacagagtttcgctcttgttgcccaggctagagcgcagtggtgtgatctcagctcactgcagcctccacctcctgggttcaagcaattctcctgcctcagctcctgagtagctggtattacaggcatgtgccaccacgcccggctaattttg

SEQ ID NO: 696275 - DNA, 655 bp, Homo sapiens
agttaggttgcagtttgtccacagggactcaaatctagaagtacagagtccttcccaggccatatttagttcactgtaacagttcctattatgacctcactgacagttctttttctctgaattctcctttcttctcaacagcttatccaaatgttccattggtccctgttcatcttgccctgcagttctccttgactgattcagccctttgtggtttgcagtcctgtttctctacagcttggacctcttcagtctttccatcataggtttaactctctgttgaatgcttctttgtagctatccaaatttaccttaagctcaaaaaattcgaagtgaaagccacatcctcttctcttccttatgtgtatggcattactaccatgcagccagtgacccaaaatgggatttcttctgggcttttcttgcttagattcaggctcatctggtgtcaagccttgttgcttttgtttccttgttcytttatttttatttttattttttgagacagagtttcgctcttgttgcccaggctagagcgcagtggtgtgatctcagctcactgcagcctccacctcctgggttcaagcaattctcctgcctcagctcctgagtagctggtattacaggcatgtgccaccacgcccggctaattttg

SEQ ID NO: 696276 - DNA, 655 bp, Homo sapiens
agttaggttgcagtttgtccacagggactcaaatctagaagtacagagtccttcccaggccatatttagttcactgtaacagttcctattatgacctcactgacagttctttttctctgaattctcctttcttctcaacagcttatccaaatgttccattggtccctgttcatcttgccctgcagttctccttgactgattcagccctttgtggtttgcagtcctgtttctctacagcttggacctcttcagtctttccatcataggtttaactctctgttgaatgcttctttgtagctatccaaatttaccttaagctcaaaaaattcgaagtgaaagccacatcctcttctcttccttatgtgtatggcattactaccatgcagccagtgacccaaaatgggatttcttctgggcttttcttgcttagattcaggctcatctggtgtcaagccttgttgcttttgtttccttgttcttttatttttatttttwttttttgagacagagtttcgctcttgttgcccaggctagagcgcagtggtgtgatctcagctcactgcagcctccacctcctgggttcaagcaattctcctgcctcagctcctgagtagctggtattacaggcatgtgccaccacgcccggctaattttg

SEQ ID NO: 696277 - DNA, 655 bp, Homo sapiens
agttaggttgcagtttgtccacagggactcaaatctagaagtacagagtccttcccaggccatatttagttcactgtaacagttcctattatgacctcactgacagttctttttctctgaattctcctttcttctcaacagcttatccaaatgttccattggtccctgttcatcttgccctgcagttctccttgactgattcagccctttgtggtttgcagtcctgtttctctacagcttggacctcttcagtctttccatcataggtttaactctctgttgaatgcttctttgtagctatccaaatttaccttaagctcaaaaaattcgaagtgaaagccacatcctcttctcttccttatgtgtatggcattactaccatgcagccagtgacccaaaatgggatttcttctgggcttttcttgcttagattcaggctcatctggtgtcaagccttgttgcttttgtttccttgttcttttatttttatttttattttttgagacagagtttcgctcttgttgcccaggctagagcgcagtggtgtgatctcagctcactgcagcctccacctcctgggttcaagcaattctcctgcctcagctcctgagtagctggtattacaggcatgtgccaccaygcccggctaattttg

SEQ ID NO: 696278 - DNA, 658 bp, Homo sapiens
ttgctccaacactgtcctatcaagaatacagattggtgacttatagctggcttggtgacttatgctggtacatttccctggagccacactcagtccccagtatgctgaattccatttatgacccagttgcaggcactatatatggcacccagatgtatattagaatgtcatgactttgagatagataggcagatggataggtagatagatagatagatacatagatagataatagacagatagataaaaaatttatttcagatgaaaggatatcttcttttctgcaagcaaagaaataagctgctagcattttagttctatctttgttggatttgtgttctaaggccacagggcattcacaagtctgcctaattacttctatactctgtgrataagtacatggaagaaacatacatgcatctgtaatgtaaaaaggtaacatgcaatgtaaggagagcatgcataagagtatttattaatagattatttacgtgaggagatgctagacagtgcacattatggaggatatacaatataatgtgaagaggtcatgccatagacagagcacatttgggtcattagcacttgtccctctgaatatgacatttaaagccacaatccattatacttatccaaggatattcttgggttgtgatga

SEQ ID NO: 696279 - DNA, 813 bp, Homo sapiens
ttttttatgggtgagctgttagttttcataaaaaaaaaaaaaacctggtacatattgtctttctcagaaagcattttcagtagcaagcagctaacttatttgctttcttggtcttgtttttttcttttttaacacagtatcagagaattttgcttaatttccattctcagtgctaacagagttttgctatttaggacaagttaatacatttttttttttctaaactgcagcttgtagacattcccaaaagttacacagggtgaagcaatgaaataaggtaattccaagatttcatcacagatagactgtaattagaggactttgctgtgagccacagacccataaatgtcaacaatcaacgggagaaatgctatagtgtaaaggattcagtgaagggggtatctgtaaagacaaaatcaagtataaataatagcctgcctcacttcctcttaatagwatataagtgatatttacatgcaaaattaagaaagaatagaaaaaaataatgcatacaagttctgtttgaagacacagagagaaaaggatcaagaaaataaatcaaggaaaatgaaaaaaaactgacaagagttttcaaaggaaataagaaaatagtttctatagcatctaaggaatttgtcagattttttgaagagaccaaggaagaaatacggaatgtcaaagacaaaaatcatttgatatccaagtgaaatgattacatgagcaaatttcaagaaaacaatgaaaacataaaaaccatattagaaatagcagaaaaatctagtaaacatgaattgtgttttacacagtacattg

SEQ ID NO: 696280 - DNA, 813 bp, Homo sapiens
ttttttatgggtgagctgttagttttcataaaaaaaaaaaaaacctggtacatattgtctttctcagaaagcattttcagtagcaagcagctaacttatttgctttcttggtcttgtttttttcttttttaacacagtatcagagaattttgcttaatttccattctcagtgctaacagagttttgctatttaggacaagttaatacatttttttttttctaaactgcagcttgtagacattcccaaaagttacacagggtgaagcaatgaaataaggtaattccaagatttcatcacagatagactgtaattagaggactttgctgtgagccacagacccataaatgtcaacaatcaacgggagaaatgctatagtgtaaaggattcagtgaagggggtatctgtaaagacaaaatcaagtataaataatagcctgcctcacttcctcttaatagaatataagtgatatttacatgcaaaattaagaaagaatagaaaaaaataatgcatacaagttctgtttgaagacacagagagaaaasgatcaagaaaataaatcaaggaaaatgaaaaaaaactgacaagagttttcaaaggaaataagaaaatagtttctatagcatctaaggaatttgtcagattttttgaagagaccaaggaagaaatacggaatgtcaaagacaaaaatcatttgatatccaagtgaaatgattacatgagcaaatttcaagaaaacaatgaaaacataaaaaccatattagaaatagcagaaaaatctagtaaacatgaattgtgttttacacagtacattg

SEQ ID NO: 696281 - DNA, 1087 bp, Homo sapiens
catcacatgaaaagcataggcaaccactgggctatcttaggctcagcagaaaatccttaatgatgtagttttactctcatattctgaacagaaactaagtgatatctggaacttttactaaaagcttgcagatttatgtagactaggcatgcagcccactggcccaagtattttctcattcactagttaggtacatggttctagcatattatctattcctccaaatgtaggaatcaattattagacatacacagaacacagatcagagaagtgtgatactatctcacctgatctccgtaatgttacattttccctcagaatcagaaaggaaaacccttgacaattttctttcctgtattttagagctcccttaatgccagacccaattttacttctattttgtaagttatgttaaaattctctaattcctgggttggccaattttctctcatgacggtaaagtatttgcaattgtaaactttttttttcccccgtctaggcaaagcctgactttagtagccattgtattctgtaggctcagaaattttatttttcatatataaaatttaaaattcttctctcttccttttaattcatttaagatatgggcctccctatracaaataattgtctcttttatataacaaacaggttatataaaagtaaaccaaaatagataagcacaatcgcatatttacaaataatagaatctgtgggttctattctttggaccacacaggtcaatgtcatgccagagcacagcagaagactgggaactcttgccttgttctttagctgtttattcttactaaatgaatagaggctttccacttttaccttcggataatcgtttccacattatcccttaatgtatcctgatcatttctggttcaaagttttcaaaagtacccaatttctgatttttcattattacttatgctcttcctctatgttaacttttctttccccactcaaattgtaatacaggtttctttatagtttacccatttagtgaggtaggggtatggagtgattttttcagaatattctgttgataattatttaagacatatatatttcaagttct

SEQ ID NO: 696282 - DNA, 623 bp, Homo sapiens
aaaaaaatggtagtagccagtccttatctatcaatacaaaaaacaattgtaaagaatgatactatacaagctatgaatctcatgtcgcactaaatacaaagacatatgatcgaacggtggagaagaaaaactgacggttgacagaaaaccttcatatagaaccaaagtttatgttagcattaaagagaaatcccctaaattgtatttgaaaacaggctcatgattgctgaaatggagaaaaacaaaaattttgatgaaataaatttattataacattttgatagactgaaaacccttaattattgtgarcaaatgaatctttatatacagaaaagcaatttagtcataaattttattgaatctttaagaaaactacatattgtaatcttaaaagaatacatattgtaatagttatctttacatagtgtaatagtaatcttgtacagttatctgtaagatttggaacttaaatatttgtggtcttaatttccattgatactactttatttatttatttttttttaagattcaggaggtacaagttcagggggtatattatgtaatgctggggtttgggcttctagtgaatccatcatgcaaatattgaacatagcacctactac

SEQ ID NO: 696283 - DNA, 2224 bp, Homo sapiens
caaaattgttgacactaatgaactgccctcccccttccccattatacttcagcagggtattggtggggcatttcccagttatattcctaagagcagaaatcgaaaacaacagttctatacaggtaggcatatgtcatatcttggagaaaagcatcctttctactcttttcagcctcttgacttcctatgacaagaaccaattacaaatactgcagagcaagaatcaatgaaataaagaaataatgggaatgatttctgaggacaggaattaaataagtgtgtctttccaaagctatgacttaatggggtcaggataacaagctccaggaatagaaatgtcctaatgggaaaataacggcaattctgaaagaggaatagtggggattttggtgtaagggactaaccatcattacagtcccatgggaagttattagatctggaaaggtaggcatcccttcatgcttctatagaccgaaaaaaaaaatggatgtaatcagccatgtcgagttacagaatttcataggcaaactaatgatggagcaccaattttttctcagacttaggacctccaatatttttctttaactctgggggctgctgtgaagttacaaatatatggtatggagccatttaagctccagatcttgaccttttttttttctgatgctgctgctaagagtccagaaatctggtcagcctttgctttacttcataagaagagaagagggctgaaaaaaatattcatagacaccaaagtgaagatggagaaagatgacactggtgttacaggaataagcctggagctgaagtgattgggaagcccaaaaggacatcaaaagttacaggatttaagaccacagccaacgtagctgtgtcaaaagaataattcaagttttaaaaactgatttttgtttaataagaaaaattatatgtctacctcagaactctttctttggccctaggtttgtaaatccaatttcccacttgacttccaaccccaaatagaaattaggatattttattgtcaccccaaatggaacatggctaaaatagaactttggggttctatgcctagcttttcctatctggggaaattgacactacttagttgctcaaggcataccatcccacatccattttatcaccaagtcccgttcattctgcctccaaaatatatttagaaactttgtcttcacttaacctccagaaaagaggttagggttagggtttgggttagggttagggttcaagttgtcatcatcctatgtggcagcaacagtctcttaactggtgccctggcttctctccttgacctccaacccccaatccattattcagatagcagtcacaagcctacccagatccaggggaggagatatagacccccaagctctcaatgaaaggagtatctgagaatctgtggccattttattctaaactgctgcattcactcttacagaaatcagtctccatcctacctgttgtagagcacttctggcactctcactgctgctgtcactggccttgaccaatatggaaaaaaaaaatccacaccaacttcatcctttacaacgtcaatattttgcatggtttacccacagaaacagggcaggcctctgttgaaaccttaaggtyttaattcagtccagttctgtatgtctttattgttagctctagtgtttcaaccatttattagtcagatggcctttggctaattatttagtctccctgggcctcagttttttcatctgaattaaatgtccttgtatctcatcatttctaagtgctttgcaagtcagccagctctatgagagttcagccattggctatgctcacaggccattgacacacagttaataataattttttagttgcattagttttaagagggcttgcttctatttcaacttttcacagaacatgatgcaaacctcctgaggatctgagctgtcttgcctccctcctccccagcatcttaaattattcttaccaacttttgatgctttgattgtttccatagccaattttctaaaagctgctttcctttttgacccagccaatttgtccctatgccagttttccaagcaaacccctatctgatttggccttctaaaaaatttctgcaaggtcttcttttctttctaactgttccaattttgttcttgagtcttcttattcaaaagaggcttctataccttttattagcgtacatttctaacaaaaa

SEQ ID NO: 696284 - DNA, 2224 bp, Homo sapiens
caaaattgttgacactaatgaactgccctcccccttccccattatacttcagcagggtattggtggggcatttcccagttatattcctaagagcagaaatcgaaaacaacagttctatacaggtaggcatatgtcatatcttggagaaaagcatcctttctactcttttcagcctcttgacttcctatgacaagaaccaattacaaatactgcagagcaagaatcaatgaaataaagaaataatgggaatgatttctgaggacaggaattaaataagtgtgtctttccaaagctatgacttaatggggtcaggataacaagctccaggaatagaaatgtcctaatgggaaaataacggcaattctgaaagaggaatagtggggattttggtgtaagggactaaccatcattacagtcccatgggaagttattagatctggaaaggtaggcatcccttcatgcttctatagaccgaaaaaaaaaatggatgtaatcagccatgtcgagttacagaatttcataggcaaactaatgatggagcaccaattttttctcagacttaggacctccaatatttttctttaactctgggggctgctgtgaagttacaaatatatggtatggagccatttaagctccagatcttgaccttttttttttctgatgctgctgctaagagtccagaaatctggtcagcctttgctttacttcataagaagagaagagggctgaaaaaaatattcatagacaccaaagtgaagatggagaaagatgacactggtgttacaggaataagcctggagctgaagtgattgggaagcccaaaaggacatcaaaagttacaggatttaagaccacagccaacgtagctgtgtcaaaagaataattcaagttttaaaaactgatttttgtttaataagaaaaattatatgtctacctcagaactctttctttggccctaggtttgtaaatccaatttcccacttgacttccaaccccaaatagaaattaggatattttattgtcaccccaaatggaacatggctaaaatagaactttggggttctatgcctagcttttcctatctggggaaattgacactacttagttgctcaaggcataccatcccacatccattttatcaccaagtcccgttcattctgcctccaaaatatatttagaaactttgtcttcacttaacctccagaaaagaggttagggttagggtttgggttagggttagggttcaagttgtcatcatcctatgtggcagcaacagtctcttaactggtgccctggcttctctccttgacctccaacccccaatccattattcagatagcagtcacaagcctacccagatccaggggaggagatatagacccccaagctctcaatgaaaggagtatctgagaatctgtggccattttattctaaactgctgcattcactcttacagaaatcagtctccatcctacctgttgtagagcacttctggcactctcactgctgctgtcactggccttgaccaatatggaaaaaaaaaatccacaccaacttcatcctttacaacgtcaatattttgcatggtttacccacagaaacagggcaggcctctgttgaaaccttaaggttttaattcagtccagttctgtatgtctttattgttagctctagtgtttcaaccatttattagtcagatggcctttggctaattatttagtctccctgggcctcagttttttcatctgaattaaatgtccttgtatctcatcatttctaagtgctttgcaagtcagccagctctatgagagttcagccattgrctatgctcacaggccattgacacacagttaataataattttttagttgcattagttttaagagggcttgcttctatttcaacttttcacagaacatgatgcaaacctcctgaggatctgagctgtcttgcctccctcctccccagcatcttaaattattcttaccaacttttgatgctttgattgtttccatagccaattttctaaaagctgctttcctttttgacccagccaatttgtccctatgccagttttccaagcaaacccctatctgatttggccttctaaaaaatttctgcaaggtcttcttttctttctaactgttccaattttgttcttgagtcttcttattcaaaagaggcttctataccttttattagcgtacatttctaacaaaaa

SEQ ID NO: 696285 - DNA, 1285 bp, Homo sapiens
tgctgtttccacacatggtggaaggggaaaacaggctccctggaacctcttttaaagggcactaatccaattcatgagagcagagccctcatacctaatcacgtcccaaagttcccaccttttaatactatccacatcaggaattcagtttcaacatgtaaattttggggggacagaaacatccagaacataacaggcccaccctaaataacctcattttagcttaattacctcttcaaagaccctgtccccaaatacagwcacattcccaggtactggggtttaggacttcatcatatgaattgggggcaatgaaattcagcacgtaatagctataagaataaaatgaactcctggttcagggcatactttacctatccttcctcttaattctcactacagtctgcaagctactcccttgagaagactaaagctcaaggagcttaagagacttgccaaaagcctcagagacagaaaattctagaagcagaatttaaatttagcttcctccctgcagctaagcctctgggaagccaatgatagaaggctggatttgagcaatcaccttgtggctacaagtcatggctgatacttggtagaccatgagataggccaggttttccctccactggcctctgtcttgcattcctaaggatgtgaagagggccacgcagtggtgaagtgcagatgtgtgcagccaagcactgccattgtccagttctttgaccctaatcaagtttttcaactcccaagttattccattttcccatttgtaaaacccttcaaggaggggagtgataattaacagagataagacacataaagtagctggcatgaggaacatcctctcttagctcctgggaaaatacatttcttcatctataggatggcaatatcaatagtcactcttcaggaactttgagatctgtgattgagacagcacgtggaagtgcctggcagacagcgttcatcaagatggcaaccatcgttgcttgtcggtctttccttcctccctcacttacactgcctttcctccatcccatttctgttctgcggtccctaatggtctgccctaaaccctttcctatcctgggttttagcttgctatcctcatggattactctgctctaacacagatggattctgagcctgtttctaggagtatcttactctaatgagcaggatgggtctctgaccaagacgatacatcatgtctgactatccgagcaaaccatcagtgatttcaaatgacagcagcaatcatccaagctggggctggcagcta

SEQ ID NO: 696286 - DNA, 926 bp, Homo sapiens
tttaaaagtaatgcatgttcaatttttacttttaaaatgaattttattgtgcatatttgaggtttataacatgatattacaggatgatatagacacacagaaacatatagaaacaagcagactgaacaatggttactatggtgaaacagatgatcacatctatcatctcacatagttccttttttttttctgataagaccagctaaaatctacttatttacaaaaatccctagtactgcttctgcgtttttgttagggacagtcagctcctcaggggytgggggcaatggtgagaacttcatctttggcagtggttctctcccgaggctacacgttgaaatttcctgatcccagatttcctcctcagaccaatcccatcagaacccctaggaactgggccctggatcacagttgtttcccagctccttggggtaatactccctgacaactgcagtgggagtgtgagaagtcagcgtgaggggcgcggccccaggtcttcctcttaataggaagagccaccttgcagggagccactgagacttcacagctgggttctactctctggggctcagaattaacccatcagctaaaatgcctttcagcaggcccccttgggtgagtggagaaagccagacctctcctctccaggggagtgagtagcagactattcaatggcctttgctagaagtcagtttcccagatggtagcaactggcattgcctcctaaggccagagcaatgggcatcctgctggcagcccctgaggagaccttcagtgttgtgggggcaggcggtgggcagtgcacctgctctacatagaatatttctgaatcgttattattaatttgtacttacatccttctaagaaaagaatagctccccatggagctttaacttttatccaaattcgctataagaaatggacat

SEQ ID NO: 696287 - DNA, 926 bp, Homo sapiens
tttaaaagtaatgcatgttcaatttttacttttaaaatgaattttattgtgcatatttgaggtttataacatgatattacaggatgatatagacacacagaaacatatagaaacaagcagactgaacaatggttactatggtgaaacagatgatcacatctatcatctcacatagttccttttttttttctgataagaccagctaaaatctacttatttacaaaaatccctagtactgcttctgcgtttttgttagggacagtcagctcctcaggggttgggggcaatggtgagaacttcatctttggcagtggttctctcccgaggctacacgttgaaatttcctgatcccagatttcctcctcagaccaatcccatcagaacccctaggaactgggccctggatcacagttgtttcccagctccttggggtaatactccctgacaactgcagtgggagtgtgagaagtcagcgtgaggggcgcrgccccaggtcttcctcttaataggaagagccaccttgcagggagccactgagacttcacagctgggttctactctctggggctcagaattaacccatcagctaaaatgcctttcagcaggcccccttgggtgagtggagaaagccagacctctcctctccaggggagtgagtagcagactattcaatggcctttgctagaagtcagtttcccagatggtagcaactggcattgcctcctaaggccagagcaatgggcatcctgctggcagcccctgaggagaccttcagtgttgtgggggcaggcggtgggcagtgcacctgctctacatagaatatttctgaatcgttattattaatttgtacttacatccttctaagaaaagaatagctccccatggagctttaacttttatccaaattcgctataagaaatggacat

SEQ ID NO: 696288 - DNA, 926 bp, Homo sapiens
tttaaaagtaatgcatgttcaatttttacttttaaaatgaattttattgtgcatatttgaggtttataacatgatattacaggatgatatagacacacagaaacatatagaaacaagcagactgaacaatggttactatggtgaaacagatgatcacatctatcatctcacatagttccttttttttttctgataagaccagctaaaatctacttatttacaaaaatccctagtactgcttctgcgtttttgttagggacagtcagctcctcaggggttgggggcaatggtgagaacttcatctttggcagtggttctctcccgaggctacacgttgaaatttcctgatcccagatttcctcctcagaccaatcccatcagaacccctaggaactgggccctggatcacagttgtttcccagctccttggggtaatactccctgacaactgcagtgggagtgtgagaagtcagcgtgaggggcgcggccccaggtcttcctcttaataggaagagccaccttgcagggagccactgagacttcacagctgggttctactctctggggctcagaaytaacccatcagctaaaatgcctttcagcaggcccccttgggtgagtggagaaagccagacctctcctctccaggggagtgagtagcagactattcaatggcctttgctagaagtcagtttcccagatggtagcaactggcattgcctcctaaggccagagcaatgggcatcctgctggcagcccctgaggagaccttcagtgttgtgggggcaggcggtgggcagtgcacctgctctacatagaatatttctgaatcgttattattaatttgtacttacatccttctaagaaaagaatagctccccatggagctttaacttttatccaaattcgctataagaaatggacat

SEQ ID NO: 696289 - DNA, 667 bp, Homo sapiens
cacacacagcaagaaagaataattaacaagtcaccttttacattttaagcaaataagctcgtggataagaaacacgttatgcctttattactaatcattagtaaataaaactgattttggattttggcagtatattttaaattttgtatatctatatggcccaaattcataacaagaatgaacacataaatcattaattaccaaaaaacatctagcttttgtgtttgaaaagacaggtattgatatatattgagcaactgtaatgtatcaaacactgttgtaagtgctttgctttatccacacagtagcgagatgggataaatgaagacctcgagggacagagaaattatgtgactkttccggggtctcacagccagcaagctgacgaccttggatttgaccatcagtctgattccacaaaccaaaccgaaacattatgtccaaaacccatcacaaaagagtatttggaaaacagtaactgctcaaggcctgtttgctactatgatagtaacattactaaaattgcaagaaaaagaattattgctgctactttggtaagcatttgtgcaaagaaacaggatactcaacctgactgaactagataatcatttattatattcgctatgtcttctggcataatttattctccccacccaaaatgtattaa

SEQ ID NO: 696290 - DNA, 667 bp, Homo sapiens
cacacacagcaagaaagaataattaacaagtcaccttttacattttaagcaaataagctcgtggataagaaacacgttatgcctttattactaatcattagtaaataaaactgattttggattttggcagtatattttaaattttgtatatctatatggcccaaattcataacaagaatgaacacataaatcattaattaccaaaaaacatctagcttttgtgtttgaaaagacaggtattgatatatattgagcaactgtaatgtatcaaacactgttgtaagtgctttgctttatccacacagtagcgagatgggataaatgaagacctcgagggacagagaaattatgtgactgttccggggtctcacagccagcaagctgacgaccttggatttgamcatcagtctgattccacaaaccaaaccgaaacattatgtccaaaacccatcacaaaagagtatttggaaaacagtaactgctcaaggcctgtttgctactatgatagtaacattactaaaattgcaagaaaaagaattattgctgctactttggtaagcatttgtgcaaagaaacaggatactcaacctgactgaactagataatcatttattatattcgctatgtcttctggcataatttattctccccacccaaaatgtattaa

SEQ ID NO: 696291 - DNA, 667 bp, Homo sapiens
cacacacagcaagaaagaataattaacaagtcaccttttacattttaagcaaataagctcgtggataagaaacacgttatgcctttattactaatcattagtaaataaaactgattttggattttggcagtatattttaaattttgtatatctatatggcccaaattcataacaagaatgaacacataaatcattaattaccaaaaaacatctagcttttgtgtttgaaaagacaggtattgatatatattgagcaactgtaatgtatcaaacactgttgtaagtgctttgctttatccacacagtagcgagatgggataaatgaagacctcgagggacagagaaattatgtgactgttccggggtctcacagccagcaagctgacgaccttggatttgaccatcagtctgattccacaaaccaaaccgaaacattatgtccaaaacccatcacaaaagagtatttggaaaacagtaactgctcaaggcctgtttgctactatgatagtaacattactaaaattgcaagaaaaagaattattgctgctactttggtaagcatttgtgcaaagaaacaggatactcaacctgactgaactagataatcatktattatattcgctatgtcttctggcataatttattctccccacccaaaatgtattaa

SEQ ID NO: 696292 - DNA, 667 bp, Homo sapiens
cacacacagcaagaaagaataattaacaagtcaccttttacattttaagcaaataagctcgtggataagaaacacgttatgcctttattactaatcattagtaaataaaactgattttggattttggcagtatattttaaattttgtatatctatatggcccaaattcataacaagaatgaacacataaatcattaattaccaaaaaacatctagcttttgtgtttgaaaagacaggtattgatatatattgagcaactgtaatgtatcaaacactgttgtaagtgctttgctttatccacacagtagcgagatgggataaatgaagacctcgagggacagagaaattatgtgactgttccggggtctcacagccagcaagctgacgaccttggatttgaccatcagtctgattccacaaaccaaaccgaaacattatgtccaaaacccatcacaaaagagtatttggaaaacagtaactgctcaaggcctgtttgctactatgatagtaacattactaaaattgcaagaaaaagaattattgctgctactttggtaagcatttgtgcaaagaaacaggatactcaacctgactgaactagataatcatttattatattcgctrtgtcttctggcataatttattctccccacccaaaatgtattaa

SEQ ID NO: 696293 - DNA, 623 bp, Homo sapiens
gtatatatggataaacaaggtgaagttcctccctttaaagcaccttatgggagagagaaaatggaagagatagatgacatatatatcttactatgtagaagagccatgcacatatacattgtgcacatatatttgtgaatataaaagttaatacatagtgaatatatgtgtgtgcatgtatatataaatttatatatgcatacttatatattttatgtacattaattagttttgatagacatttaatatttatatataacatttatatatatataataaaatatatatatatataagtatatatataaaaaatatacttatattactatataaatacatatacagacttatgggtataaatattttttatatatataattacctttatgtgaaagctaattgacagccamattctagatgcagaattccttaataagcaatgatgttttcatccaatactaaaaaaactaatactccatctctatgtatctaccaaaaagaaaaagaaataactggcaatttaggtgtaatttgatgaaatgttaattaatatctctggatttcctgacagaaatgtcgcatatgttcccactgctgtgcagagcagaagtctgcagacctgt

SEQ ID NO: 696294 - DNA, 585 bp, Homo sapiens
aaaagtacaggcagagtagattaagcataattcctaagggccccatgattttttaaatggtaaatgagtatcgattgkcttcaacttaaaagtcaccaggtgcattaacccctggaaatgttgtggctggtttcatcttctatccaggcaactgaaactccttctcatctgtcaagtctccatatagtgcttaatttctccagaaacctcaccccacccccagaatgcacttgcacacatacatccatttctgtatcttaggccaagctacatggggcatgtgtttatcttggttcttgttatattcattgccttttttagttttttaaaaaaatttgatacatgtttctgttcaagcaaatacaaagagaaagagaataaattttttaaaatctcccaaattttcataagtagaaattatcgtagtaatccaaattatggaaggagtaagtggagggtgaatgtggatgagattcatgtactgggttggagtatgcactgacgagacaacttctgaggtcctgcccataaaatattctataattctaaaataaatactacattttagtctgcttgatggtttat

SEQ ID NO: 696295 - DNA, 585 bp, Homo sapiens
aaaagtacaggcagagtagattaagcataattcctaagggccccatgattttttaaatggtaaatgagtatcgattgtcttcaacttaaaagtcaccaggtgcattaacccctggaaatgttgtggctggtttcatcttctatccaggcaactgaaactccttctcatctgtcaagtctccatatagtgcttaatttctccagaaacctcaccccacccccagaatgcacttgcacacatacatccatttctgtatcttaggccaagctacatggggcatgtgtttatcttggttcttgttatattcattgccttttttagttttttaaaaaaatttgatacatgtttctgttcaagcaaatacaaagagaaagagaataaattttttaaaatctcccaaattttcataagtagaaattatcgtagtaatccaaattatggaaggagtaagtggaggrtgaatgtggatgagattcatgtactgggttggagtatgcactgacgagacaacttctgaggtcctgcccataaaatattctataattctaaaataaatactacattttagtctgcttgatggtttat

SEQ ID NO: 696296 - DNA, 638 bp, Homo sapiens
cattttattttggacgattctgtggtttgaccaggtggttcttcagcttcatgtgatatcagctggcaggtctaaaacaaccccattcaaatggctggcagctcttgctggtcaccagatgggagctcagttattctccatgtgggctctgccctatggctacttgggcttcctcgcagtatggcaggttcagggtagcctgacttctaagagtgcaaaaatgaaagctgccacggtctcttaaggcttaaccgcaaaaccggcacagcatcacttctgccaccttctcttggtcaaaacaggtcmcaaagccagcccggtttcatgaggtggggcccacacaagggtttgaataccaggcagtgtggctttttggagtccaccaaagtacccattcatcacagactgcaagtagcagagcccaacacttactacctcaagctggaacaggatttactggggggctcaggaaaggacaggtcaggaactgaggaaattctggggaccttggcgcaggagttactagcagcctcctgaaggagagtttccatcccaatgcgacaaatgcacccctgctttttctttctgcccttgacactttatttgacagttggggacatggtaagaaagtctgattg

SEQ ID NO: 696297 - DNA, 1106 bp, Homo sapiens
tatgtttttctgtgtcatattgtgtattttagggcactgggaacttacaaactttgtttttcacatatcttgctgactagatttctcagcagaaacaatagtggttggtagcagtgagaaattactgaacttgagcacttttttgatagtttcaatgtttatcaaaaggatgcctcattagtggatccagaactactactatagcctcttctagtgtgcagtagctgatgcaggctggtggactccagcccagaggcattagcaactttaattccttggcattatgtcttctttctttttgttccttcactcccttcagccatttgtcatttttatcttttattcctctgctgcctctgtaagctttcagcctatttgaacaacctggattgatttctgattctctgactggactagggaagatacaatgataatgtacttgacatattaaaggaagagaacagtaagggaattaaaaatttgtccaaagtgtattttgccatatagctgagcaaatgtaatacaatgcatagcaacaggacatatttttctattttacgtgcagagattcccttaataatctgaactctatattataagtattaaaaatttgagctaagacattacacagatctctaggtaacctgaaatagctgtctaaaatttcatgccctaaaatgcactttactcagttggatccatctcagcattttgttttacacacaattctagtaagatattttatatctttgttcagcttaaactactttggaacaataattttatatgagagtgttagagtgactgttaaaacrtagttaccaaaaccaagaccaacaatttacagattaaccatagaggaaaagaaacaataaaaaatcaaggggctcataaaatataatcatataaaataaaatatatagtaaaataaaatatatagggagacatatttatggctttcaacatgttcacaaatgtctaaaaataatttccccatgacatggaatcattaacaaagaatattttattttaaattttaaaatattagggatacagagttgttatttaaaattatgtaaatagaacatgttttaattaagaggaaa

SEQ ID NO: 696298 - DNA, 616 bp, Homo sapiens
taaattttttttttttttgagccagagtcttgctctgtcgcccaggctggagtgcagtggcacgatctcggctcactgcaaactcagcctcctgcatagctgggaccacaggtgccygccaccacacccagctaatttttttgtatttttagtagagacggggtttcactgtgttagccaggatggtctcgatctcctgacctcatgatccgcccacctcggcctcccaaagtgctgggattacaggcgtgagccaccgcgcccggcctatgtcatattttttatcgtggtgataaacataaagttcaccacttgagctatctgaagtgtgcggttcagtggctctcccatcaccaccctccaccttcagagccggtcatcttcccagcctgaaacactaagccaacaggattctttcgcacgtgcagactcgtggccccaccgccaacacacagggtgatggtctgaggaccctggcatggcccttttgtgtccacggctacctccaccctcccgccctcctcagcccgaggaccgccaatccattctcctcatcgtttctggaacactctgtagagggaaccatcgtgtgtgacctcctggcactggctctccc

SEQ ID NO: 696299 - DNA, 619 bp, Homo sapiens
ttgcaaaagaaaatagattcttactgtacttatgcaaacaactatattgccataagttaagaatactcacaaatactttgcaaattctggagaaacaaacatgctctaaattttgttcacaagagcataccttattcaattgttaaaaaatgtattctacctttgggtccctcagagctaattttcctttccaaggcttcaacctgaagcttggaactgaatttgggacagaaaggtgcctyaagagggtgcatggacttattaagttaactcccagttgggccttacctaactgaagtgagtgcctggtggggtcactcctccattgcttccttattataggcagaatgctaaggtgaagctgtggaaccaggttctcttcaaacaagggagagaaaaggagtcgtgagaagtggggacttggcctagtaagatgctctccaaaaggaaatgacctctcacataaaaaagtttcctgtcttctcagggctatgttaactcctgatatggtggagagaagagagaaaaaaaagaaaaaaaaaaaaaaaagcttaagggcagggtgagaaaggtacctgggggagaaagcctcttgctccaggtaaatgggtttcttcaa

SEQ ID NO: 696300 - DNA, 619 bp, Homo sapiens
ttgcaaaagaaaatagattcttactgtacttatgcaaacaactatattgccataagttaagaatactcacaaatactttgcaaattctggagaaacaaacatgctctaaattttgttcacaagagcataccttattcaattgttaaaaaatgtattctacctttgggtccctcagagctaattttcctttccaaggcttcaacctgaagcttggaactgaatttgggacagaaaggtgcctcaagagggtgcatggacttattaagttaactcccagttgggccttacctaactgaagtgagtgcctggtggggtcactcctccattgcttccttattataggcagaatgctaaggtgaagctgtggaaccaggttctcttcaaacaagggagagaaaakgagtcgtgagaagtggggacttggcctagtaagatgctctccaaaaggaaatgacctctcacataaaaaagtttcctgtcttctcagggctatgttaactcctgatatggtggagagaagagagaaaaaaaagaaaaaaaaaaaaaaaagcttaagggcagggtgagaaaggtacctgggggagaaagcctcttgctccaggtaaatgggtttcttcaa

SEQ ID NO: 696301 - DNA, 1788 bp, Homo sapiens
caaaattgtaactatgtgccaagtacattaatataaaactcaataatttattaaagaatatctaaatccaaatcatttttctctggctggttaaataggttttttggttttgtttgcttgtttgtttgcttttcccagatggctaaagctttagactaatatgtgtgaaaaagtcttttaagattttttttatttgccctctgtaaagaaccttttaaagcgccagtatttgattcattcaatcttttagatgtctctytgtaccaattaaagaatgcatctcattgcttttgttgtgttttagatcttttcttttctaaagtatcttgcaagttaacaattttatttgggttaaaactttgccactgtgttcactgtaattccaccttgttcttattaaggttaactcagttttcaaacaatgaacaggttctgggaccagaatttttatgcataaacttagctgatgtctcaatctcctggagtctgaaactccttcaatttggaggaattcagtttcaaaaggtatttacctggctctaactgacagaatctaatcaagttaatttttggattcaatttaatcctggacctagtccagtaacaattgctcaaatcaagttggagacttcaaatcacaaatttgtggagctcaaatctgttagcaaactcattcatgacctccagttgatgtgagagatcaatgggcaaaatgggccctagagggtaccttcatttgctcacttggtgctcctggaggtcagtagaggtcttcagatcccactttttaatgccaaactgttaaaagaaaaactttagacacattaaattttgcataatttatttgagcgaataacgatccataaattaggaaacgcagcgaaccaggagagctagttcaaccagcaaaatgggcaggtgatattcacatagaaagaaaagatgtaacttataccaacaatttgattggttacagttcagcatttgccttatttgggtgtagtctgatcagttggaagcctgtgactagctgaagtttggctgatgtgattggccaacactcatctgctttttataagaacattgtcttaagttgtagtttatttacatactaagtcaggttgtcattcactatgtaggaattcgaagtacagaggcagttttaggccaagttgttttatttaatttgacaatatcaaatatttagcagtcttttcatccatcaatgaataatgcaatataaaatttttatattcagactataaaatgcattatcttcattaagttattttacatggattcacaagaatagaataaaatacttcgaaagtgcaaaaaaatagtgtactgagctttagttagcatttttgtttttaatatttttatttttgccccttagaaaaatgtatgcaaaactaactccatttagaagaacaacatgcatattaagtaagctacacattgaggaatctcaacataatatgaattaaagtcatagaatcatacattgagcaaggatttggggtattaattttatccatttactcatttaacagaattttactgagggtctcctgtaatcaggcattttacaaaggtgagcaaacagagcaagtccctgtcctgtcgacatagtgtctagtctatataaatatagcatatatacctattgttctctctttaataatatatatgcttatctctgtgtggcagggcatgcatatatgtaggtgttagtgcatttaatttgtcttaattttataatataatagatgttctagctaagtc

SEQ ID NO: 696302 - DNA, 1788 bp, Homo sapiens
caaaattgtaactatgtgccaagtacattaatataaaactcaataatttattaaagaatatctaaatccaaatcatttttctctggctggttaaataggttttttggttttgtttgcttgtttgtttgcttttcccagatggctaaagctttagactaatatgtgtgaaaaagtcttttaagattttttttatttgccctctgtaaagaaccttttaaagcgccagtatttgattcattcaatcttttagatgtctctttgtaccaattaaagaatgcatctcattgcttttgttgtgttttagatcttttcttttctraagtatcttgcaagttaacaattttatttgggttaaaactttgccactgtgttcactgtaattccaccttgttcttattaaggttaactcagttttcaaacaatgaacaggttctgggaccagaatttttatgcataaacttagctgatgtctcaatctcctggagtctgaaactccttcaatttggaggaattcagtttcaaaaggtatttacctggctctaactgacagaatctaatcaagttaatttttggattcaatttaatcctggacctagtccagtaacaattgctcaaatcaagttggagacttcaaatcacaaatttgtggagctcaaatctgttagcaaactcattcatgacctccagttgatgtgagagatcaatgggcaaaatgggccctagagggtaccttcatttgctcacttggtgctcctggaggtcagtagaggtcttcagatcccactttttaatgccaaactgttaaaagaaaaactttagacacattaaattttgcataatttatttgagcgaataacgatccataaattaggaaacgcagcgaaccaggagagctagttcaaccagcaaaatgggcaggtgatattcacatagaaagaaaagatgtaacttataccaacaatttgattggttacagttcagcatttgccttatttgggtgtagtctgatcagttggaagcctgtgactagctgaagtttggctgatgtgattggccaacactcatctgctttttataagaacattgtcttaagttgtagtttatttacatactaagtcaggttgtcattcactatgtaggaattcgaagtacagaggcagttttaggccaagttgttttatttaatttgacaatatcaaatatttagcagtcttttcatccatcaatgaataatgcaatataaaatttttatattcagactataaaatgcattatcttcattaagttattttacatggattcacaagaatagaataaaatacttcgaaagtgcaaaaaaatagtgtactgagctttagttagcatttttgtttttaatatttttatttttgccccttagaaaaatgtatgcaaaactaactccatttagaagaacaacatgcatattaagtaagctacacattgaggaatctcaacataatatgaattaaagtcatagaatcatacattgagcaaggatttggggtattaattttatccatttactcatttaacagaattttactgagggtctcctgtaatcaggcattttacaaaggtgagcaaacagagcaagtccctgtcctgtcgacatagtgtctagtctatataaatatagcatatatacctattgttctctctttaataatatatatgcttatctctgtgtggcagggcatgcatatatgtaggtgttagtgcatttaatttgtcttaattttataatataatagatgttctagctaagtc

SEQ ID NO: 696303 - DNA, 1788 bp, Homo sapiens
caaaattgtaactatgtgccaagtacattaatataaaactcaataatttattaaagaatatctaaatccaaatcatttttctctggctggttaaataggttttttggttttgtttgcttgtttgtttgcttttcccagatggctaaagctttagactaatatgtgtgaaaaagtcttttaagattttttttatttgccctctgtaaagaaccttttaaagcgccagtatttgattcattcaatcttttagatgtctctttgtaccaattaaagaatgcatctcattgcttttgttgtgttttagatcttttcttttctaaagtatcttgcaagttaacaattttatttgggttaaaactttgccactgtgttcactgtaattccaccttgttcttattaaggttaactcagttttcaaacaatgaacaggttctgggaccagaatttttatgcataaacttagctgatgtctcaatctcctggagtctgaaactccttcaatttggaggaattcagtttcaaaaggtatttacctggctctaactgacagaatctaatcaagttaatttttggattcaatttaatcctggacctagtccagtaacaattgctcaaatcaagttggagacttcaaatcacaaatttgtggagctcaaatctgttagcaaactcattcatgacctccagttgatgtgagagatcaatgggcaaaatgggccctagagggtaccttcatttgctcacttggtgctcctggaggtcagtagaggtcttcagatcccactttttaatgccaaactgttaaaagaaaaactttagacacattaaattttgcataatttatttgagcgaataacgatccataaattaggaaacgcagcgaaccaggagagctagttcaaccagcaaaatgggcaggtgatattcacatagaaagaaaagatgtaacttataccaacaatttgattggttacagttcagcatttgccttatttgggtgtagtctgatcagttggaagcctgtgactagctgaagtttggctgatgtgattggccaacactcatctgctttttataagaacattgtcttaagttgtagtttatttacatactaagtcaggttgtcattcactatgtaggaattcgaagtacagaggcagttttaggccaagttgttttatttaatttgacaatatcaaatatttagcagtcttttcatccatcaatgaataatgcaatataaaatttttatattcagactataaaatgcattatcttcattaagttattttacatggattcacaagaatagaataaaatacttcgaaagtgcaaaaaaatagtgtactgagctttagttagcatttttgtttttaatatttttatttttgccccttagaaaaatgtatgcaaaactaactccatttagaagaacaacatgcatattaagtaagctacacattgaggaatctcaacataatmtgaattaaagtcatagaatcatacattgagcaaggatttggggtattaattttatccatttactcatttaacagaattttactgagggtctcctgtaatcaggcattttacaaaggtgagcaaacagagcaagtccctgtcctgtcgacatagtgtctagtctatataaatatagcatatatacctattgttctctctttaataatatatatgcttatctctgtgtggcagggcatgcatatatgtaggtgttagtgcatttaatttgtcttaattttataatataatagatgttctagctaagtc

SEQ ID NO: 696304 - DNA, 1788 bp, Homo sapiens
caaaattgtaactatgtgccaagtacattaatataaaactcaataatttattaaagaatatctaaatccaaatcatttttctctggctggttaaataggttttttggttttgtttgcttgtttgtttgcttttcccagatggctaaagctttagactaatatgtgtgaaaaagtcttttaagattttttttatttgccctctgtaaagaaccttttaaagcgccagtatttgattcattcaatcttttagatgtctctttgtaccaattaaagaatgcatctcattgcttttgttgtgttttagatcttttcttttctaaagtatcttgcaagttaacaattttatttgggttaaaactttgccactgtgttcactgtaattccaccttgttcttattaaggttaactcagttttcaaacaatgaacaggttctgggaccagaatttttatgcataaacttagctgatgtctcaatctcctggagtctgaaactccttcaatttggaggaattcagtttcaaaaggtatttacctggctctaactgacagaatctaatcaagttaatttttggattcaatttaatcctggacctagtccagtaacaattgctcaaatcaagttggagacttcaaatcacaaatttgtggagctcaaatctgttagcaaactcattcatgacctccagttgatgtgagagatcaatgggcaaaatgggccctagagggtaccttcatttgctcacttggtgctcctggaggtcagtagaggtcttcagatcccactttttaatgccaaactgttaaaagaaaaactttagacacattaaattttgcataatttatttgagcgaataacgatccataaattaggaaacgcagcgaaccaggagagctagttcaaccagcaaaatgggcaggtgatattcacatagaaagaaaagatgtaacttataccaacaatttgattggttacagttcagcatttgccttatttgggtgtagtctgatcagttggaagcctgtgactagctgaagtttggctgatgtgattggccaacactcatctgctttttataagaacattgtcttaagttgtagtttatttacatactaagtcaggttgtcattcactatgtaggaattcgaagtacagaggcagttttaggccaagttgttttatttaatttgacaatatcaaatatttagcagtcttttcatccatcaatgaataatgcaatataaaatttttatattcagactataaaatgcattatcttcattaagttattttacatggattcacaagaatagaataaaatacttcgaaagtgcaaaaaaatagtgtactgagctttagttagcatttttgtttttaatatttttatttttgccccttagaaaaatgtatgcaaaactaactccatttagaagaacaacatgcatattaagtaagctacacattgaggaatctcaacataatatgaattaaagtcatagaatcatacattgagcaaggatttggggtattaattttatccatttactcatttaacagaattttactgagggtctcctgtaatcaggcattttacaaaggtgagcaaacagagcaagtccctgtcctgtcgacatagtgtctagtctatataaatatagcrtatatacctattgttctctctttaataatatatatgcttatctctgtgtggcagggcatgcatatatgtaggtgttagtgcatttaatttgtcttaattttataatataatagatgttctagctaagtc

SEQ ID NO: 696305 - DNA, 1788 bp, Homo sapiens
caaaattgtaactatgtgccaagtacattaatataaaactcaataatttattaaagaatatctaaatccaaatcatttttctctggctggttaaataggttttttggttttgtttgcttgtttgtttgcttttcccagatggctaaagctttagactaatatgtgtgaaaaagtcttttaagattttttttatttgccctctgtaaagaaccttttaaagcgccagtatttgattcattcaatcttttagatgtctctttgtaccaattaaagaatgcatctcattgcttttgttgtgttttagatcttttcttttctaaagtatcttgcaagttaacaattttatttgggttaaaactttgccactgtgttcactgtaattccaccttgttcttattaaggttaactcagttttcaaacaatgaacaggttctgggaccagaatttttatgcataaacttagctgatgtctcaatctcctggagtctgaaactccttcaatttggaggaattcagtttcaaaaggtatttacctggctctaactgacagaatctaatcaagttaatttttggattcaatttaatcctggacctagtccagtaacaattgctcaaatcaagttggagacttcaaatcacaaatttgtggagctcaaatctgttagcaaactcattcatgacctccagttgatgtgagagatcaatgggcaaaatgggccctagagggtaccttcatttgctcacttggtgctcctggaggtcagtagaggtcttcagatcccactttttaatgccaaactgttaaaagaaaaactttagacacattaaattttgcataatttatttgagcgaataacgatccataaattaggaaacgcagcgaaccaggagagctagttcaaccagcaaaatgggcaggtgatattcacatagaaagaaaagatgtaacttataccaacaatttgattggttacagttcagcatttgccttatttgggtgtagtctgatcagttggaagcctgtgactagctgaagtttggctgatgtgattggccaacactcatctgctttttataagaacattgtcttaagttgtagtttatttacatactaagtcaggttgtcattcactatgtaggaattcgaagtacagaggcagttttaggccaagttgttttatttaatttgacaatatcaaatatttagcagtcttttcatccatcaatgaataatgcaatataaaatttttatattcagactataaaatgcattatcttcattaagttattttacatggattcacaagaatagaataaaatacttcgaaagtgcaaaaaaatagtgtactgagctttagttagcatttttgtttttaatatttttatttttgccccttagaaaaatgtatgcaaaactaactccatttagaagaacaacatgcatattaagtaagctacacattgaggaatctcaacataatatgaattaaagtcatagaatcatacattgagcaaggatttggggtattaattttatccatttactcatttaacagaattttactgagggtctcctgtaatcaggcattttacaaaggtgagcaaacagagcaagtccctgtcctgtcgacatagtgtctagtctatataaatatagcatatatacctattgttctctctttaataatatatatgcttatctctgtgtggcagggcatgcatatatgtaggtrttagtgcatttaatttgtcttaattttataatataatagatgttctagctaagtc

SEQ ID NO: 696306 - DNA, 1360 bp, Homo sapiens
taaaaagacagttcttatagtaaaaacggtaaaatataattttcattttggtgtctgcctattaatttagctctcactctatgtttccatttgtatttatgcaaagaaatgtctgaaagtatattcaaatgagttgatgatggttatttctcattggaggaatttcaggcttagttttcctttgtattttgtacatggtttgaattacttaataccgtaatatttgcagaatcatggattcattattttttagaaacaaaatgtacattctaacagatggtctacttaagatacaagagccaggttctgtggctcacacctgtaatctcagcactttgggaggctgaggcaggaagatggcttgagycaagagttcataaccagcctggacaacatagtgagacctcatctctacaaaacatcaaaatgtgaggtgaaaggattgcttgaaccaaggaggttaaagttgtaatgaacagtgattattacaccactgccttcccaccaccttggtggcagagtgagaacctccgtcaaaataaaagatacaagaaatgtctaaacattttttgctgtatctttgaaattatatcttagtctaaatatttcacttctctgatttttaaaatttgttcttggacaatttttttcagaccttcacaaacatgagctctttctgtcagcatgaaataaatagcctatactcaaagttgaataaatttgcataaattgcttatcgtctttgagactgttttattctctacacaaaatgggaatgaaaacactttacagggtcacttaaaaaagtaaattattataatattttcctagagtctgcatttgaattttttgaaaccagtttatatgggattgcatatgcgttctgttataaatgcctttctgaaggaagaactgccctgaaacaatactttttcttcaggattaaggaagaaaaacaaaatcagaaatgggttgggggtgcaattcggcgtagcaacttcatgtatttgctgtctatttcacttcaaacatcaaccataacaaaacaaactaatggtaaacatgcagtgaacaaagttaaactctgatggaaatgctacccatttactctgagtgtatgtaataaatttatcttgttcataaggcacaatatgaacttacattttacatgacagtaaatataatctcatttttcatttgtcacctcatctctaaaataaacgtttgtacattgtagcactctttttttctttttcccagaaaaagagaaaataatttagaaaagtaagggaggaaaagagggagggatggtaaaagtaaagaaaagaaaaggaaggaaaaaacgaaggaaggaaggaag

SEQ ID NO: 696307 - DNA, 567 bp, Homo sapiens
ccaggtcatagccatggtagtggggctcggaaggagaagcccatggcgttatgagggcgtgtggagcggcggtcgccaaggagggcttccctgggggagtgacrgtgaagcagagcccccagacctgagcgggacttgaccagaaaggagggaggaagagtgtggccggcagagggagctgcgagtgcaaggctgacaggcaggaaggcccgggcgcttgcagggagatgcaagtctgaggacgatggcccggctacggctgttccgctggggctgttcctgctctccttccgccctgggggagatgttccaattctacccggcgctccccagtccgtggactcagtctttccttgtgggctccatttcccagcttctaatctctctgcggctcaacccctcttcccctctgtgtagccatgaggcccggagccaccccaagagcagccttggaggcctgattgagacagcatcaccccatccctgagcccagagcatggagaaagcttaggtcacggtggagcctttcttgttttttgtttgcttgttgtttgtttgtttgtttgt

SEQ ID NO: 696308 - DNA, 567 bp, Homo sapiens
ccaggtcatagccatggtagtggggctcggaaggagaagcccatggcgttatgagggcgtgtggagcggcggtcgccaaggagggcttccctgggggagtgacagtgaagcagagcccccagacctgagcgggacttgrccagaaaggagggaggaagagtgtggccggcagagggagctgcgagtgcaaggctgacaggcaggaaggcccgggcgcttgcagggagatgcaagtctgaggacgatggcccggctacggctgttccgctggggctgttcctgctctccttccgccctgggggagatgttccaattctacccggcgctccccagtccgtggactcagtctttccttgtgggctccatttcccagcttctaatctctctgcggctcaacccctcttcccctctgtgtagccatgaggcccggagccaccccaagagcagccttggaggcctgattgagacagcatcaccccatccctgagcccagagcatggagaaagcttaggtcacggtggagcctttcttgttttttgtttgcttgttgtttgtttgtttgtttgt

SEQ ID NO: 696309 - DNA, 567 bp, Homo sapiens
ccaggtcatagccatggtagtggggctcggaaggagaagcccatggcgttatgagggcgtgtggagcggcggtcgccaaggagggcttccctgggggagtgacagtgaagcagagcccccagacctgagcgggacttgaccagaaaggagggaggaagagtgtggccggcagagggagctgcgagtgcaaggctgacaggcaggaaggcccgggcgcttgcagggagatgcaagtctgaggacgatggcccggctacggctgttccgctggggctgttcctgctctccttccgccctgggggagatgttccrattctacccggcgctccccagtccgtggactcagtctttccttgtgggctccatttcccagcttctaatctctctgcggctcaacccctcttcccctctgtgtagccatgaggcccggagccaccccaagagcagccttggaggcctgattgagacagcatcaccccatccctgagcccagagcatggagaaagcttaggtcacggtggagcctttcttgttttttgtttgcttgttgtttgtttgtttgtttgt

SEQ ID NO: 696310 - DNA, 660 bp, Homo sapiens
tcacttgcttaaaatacctgcgtttctcttgggggtgaaaggagactggaatagatcttgagagattgtcatagaaaatgaatactcagtaacgtaaggatataaacaactattcaagagatgggaccactgaagaccaaatacatcttagtcaataattggaaaatgtgggaaagattattttacaaaatgaaagaatgagtagaactttctcttaaaagtatttattgaaaatgaaacaggaatgttatttctgatgagtatttgaatgtaacaaaccatttcttgttcatatttaaaatgtcaaaagcagcttacctttctatcaagtcagttgaattatttaaatgacacacaactaagctgttttgattgtctgaatagtgatactacaatgaaaacagctagtctaagaatttcatatattttagaaacttctaacygcatttgaaccattctgattctacccaaaataagacaacgttccatttgagacttgaaaaaagaattcgacatttctacgaaatttttaaatattctagaaattgtcctttctctgaggtatattctgatccatttagaaaaggggatatggaaaaagtagctctgtttataataaaaacctcttttttgggggtataaaatcagttaaatagagaa

SEQ ID NO: 696311 - DNA, 1327 bp, Homo sapiens
tctttgaagtatcatagggaatgggaaactgccagatgactggagatgccaaattccttcttaatattcaaaagaaaatggcagcagcagaattcagaaactgcatcctgggtgacaaccctgggtaaaattagagattagatttgagtccttaaaagaagaaaaaggaattacttaacaaatgcccaattagactagtcatattaacagtcttgcttcattttaacattgagttatgatacaagaaaatcaggagaattctatgtgcaaagtacaccttgatttcagcagggcatttctcagtatttccacattactttgaggctagataaaaaggctgactgaataagcactccctaagaatctagatttaatggattattaccaagttggaaggaaatttaaaattttttagctgatataaatgtatcttctcctaatctatcttgacataaaaataaacttaatagtgaaacacaggcacaggtatgtagtaggataaaaatatacctcacaccgtttatatgaggattaagagttctgtgcttgtcacatcataggaactttataaatatcactctgatcctccactccctggctcaaaacataatatttacttttcagcctgttcctgaatatgtgcttagctatcactattactaaaacagaatataagaatacaggttgagtatcctttattcaaaatgctttggaccaaacgtgtttcaaatttcacattttttttccaatttttaaaatatttgcatacatataatgaaatatcataggaatggaacgcacatttaaatgtaaaatacattatgtttcatataaaacttatacaattagcctgaaggtaattttatgcaacatttttaataattgtatgcatttgtcatatgagatcaggtatgaaattttccactagtggagtcatgtcagcactcagaaagttcataattttttagtgttttggattttggatttcagaattagagatactcaacctgtactataatttgaactttgataatatctggtgttctattagttttaaaatgatgtacgggcactctttacatattatattacatgaaattatttaaattttaaatgtagtatgtatactaattttaaaacacagataacttattgacttttaataataatatttttgacataaygagagttcaaaatatataaataattcactttaaaatacctacattttctcataaggtgaaaacagaaaatatacttagtcatgttttcaaaaaaatctacatgtttggtttatcttttctgtgaatgttaacacctaaataat

SEQ ID NO: 696312 - DNA, 643 bp, Homo sapiens
caacatggtgacaccccgtctctacaaaataaaaaattagctgggcatggtggtgcacacctgtagtcccagccacttgggaggctgaggtggaagggttgcttgagcctgggaggttgaggctgcagtgagctgtgatcatgccactgcactcagggagaaaaagaaaaaaaggaaagaaagaagtatacatctctggaccccacttcagacatactgaatcagaaactttggcactaggacccaacaatmgctgtttttaccagcctttcagattattctgatgcatgctcaagtttaagaaagacaattctaggttgcaatgatacagaggccaagaaaacaaaacgcctgttctcttggagcaacaacagacaaatagatataaataaaatttcaggcaaaggaaagtgttatcagggaaaccagcataggataaggaggcagaacacagaggatgctcaggcagggtctttctgaggggtatgagctctgaagtcacatagagtctgaaaattggctccaccagtttctagccttttaaaagtctggtttcctcatcttctaagaaagagataataatattacaagtttactctgaagattaaataagataacacttataaaatccttgcaactgttt

SEQ ID NO: 696313 - DNA, 601 bp, Homo sapiens
cacacacacacacacatacaatctacaaaataaaaaaaaattactaggatcaatcattaagtgttgccagggcagaatcggggagaaaatttagttaatataagataaatgggttggactggcaaaaatcatcaatatctcatggatgcatgctttgctattgaaaacaggataaacttggtcttagagaaggtcaggagctattttgcttctttcccactgactgattctagcccagacacccaaggtacaaagcaactagaaatcgggacacccagaacttcactacagggatgttctattttgagaccatttgcctcccacttctccagcctgcactccacgtctctctttcaccatataacaagcakaacctactgagatggaaaatgatcacaggtaaagtgctgcatgagatgatgaagtcaggaagggtctaggagtcatacagattgatgattgcagtttctcccttgctcaatggaaaatgtcaaagagctaagtatcagaagaaggagaaaattatagctctggcaacaaaatgactttataagagaatatgcatctcttaaggttaaagggaaaaacctacaaagaacca

SEQ ID NO: 696314 - DNA, 568 bp, Homo sapiens
tgcaaatagttaaattagaattctgtctgtagtttatccctttgaaacatttctgcatcagagagatctgaaaaataaatgagcagccgtattcactagttttttttttttttttatttttttgagacggagtctcgctctgtcgcccaggccggactgcggactgcagtggcgcaatctcggctcactgcaagctccgcytcccgggttcacgccattctcctgcctcagcctcccgagtagctgggactacaggcgcccgccaccgcgcccggctaacgtattcactagttttacaaaaatacacggttaggacaccaagggaaaaaaaaagtttgcctggatttttttttaaggattaagataggactggaaaaaaaagaaaatataatattaggttattaatcagtaatataaaagagctagaaactcaagtaaatgctatctgatgtgaaaacaaaaaggaggaaactgcaacttttaattcaagaaggaagaagttttaaaaataaaaattttcaaagctattttaagaaggtattaaaccttttagttacttggtctggga

SEQ ID NO: 696315 - DNA, 2193 bp, Homo sapiens
tgggatcctggaacagaaagaggatgctacagaaaaactaaggaaatctgaataaagtgtgggcttcagttaataatatatcaatattgattcattaattgtaaagaatgtaccatactaatgaaaaatgttaataataggagaaatttgatgtgggctgtatagaagtctctgtactatcttagtaattttttggtaaatctaaaactattttaaaattaaaagcttattaaaaagaaatttaaaatgtgattgataattaaagtagtataattatgcagctgatgctataattaaactaataagaatataattagattcacatgtactgatatggaagaacgtcaaggatacattatgtaaaaaaaagcaaattgcaaaaatattgcatttttgtgacccactttatgcaaaaatgtgaacacatatgcatacacccaaatatttgaagaggtacatactaaagtgtggttacattaaagatagcaataatattgagggttataggaaatggggtaaatgtgggcatagggtttttttctatacatttctcttatttgaatattttataataaacatatatttgcagatacttacaagttatttatggtttaaaatacttttctcagatatattttaacttctttttgctaccaagctttccttaatccattattccctttcattaatgtgacatcaagtgtcttctccaatgcttctttttgctaggcatgtaaagaagaataggtttctctcaggttaaagaggaaaataagaaaacaaaacaaaaaagctaccttatgccttttagttaccctgtattttttttctgccaaatttcctgatttcattatttctacttcctatgtagagaaaactatgtagttttctctgctggttcactgcaggctgtcttctgcctttacctctctactcagtctagagtgtggcaaccttcctgaccgtggtggacagggtaaagctctgggcagatttggactgtgtgtctgagattttgcatattttactttactttcctaatctcaatgtcgttacctctaaaatgaggacagtatccttcttgctaatttctagtatasaaactgatacataatacattttaataaatattgatcagatgatctaaaaagcaatctcatcatagcatcatggcaaagatgcaatcccttatcatctttcctctagattcttgcaatggtctactagtgttatagatgaactaacttccctaaaagagtctcagtgtgtctgccctcacaacccttcaaatctctgagtcaacacaatatccagcgtgggcccattgtagcctaaaaagtgtgcatctctcctctcctcagaaccttccagagcttactattgcacaagaatgtgagtttgtgtagtgtttgtatgggtgtgtgtatatgtgtgtgagagactacaatgtgtatttgctgaggtaatcctaggactcaccaacactggagtggaaaaatatgggagggaagaaagtaagccaataaaagttttgttatcaagcagcgtactgctgtgggcaccaggtgcctaggctcagcaggaaactcagaaggatagggtgaatatgacccagagcagttccaaccaaggttccaagaagctgacaatttggtccataccatctgacaattattggttgatggctgctttggggaaggaagtggaagggatgcattcgtttctagcatgcccaatctactttatctttaagcctggcaaactgtcgcagccaaagagagtgctcagttgaagagttgttgatagggagcatacccaagaatggtgaaagccaggaagatacggatgggctgcagacagcatctgctaaaatgtctttttttcaaatatctcatgtatttgtatttcctttctaaccccatgcatcacttaagattctttaggaaatagaaagcatattcaaaggggataattaaagagaatgtaacaaaatggctatttataaatatgtaagcagttttcaagaatttcacaagttacaagaaagctagatggactaaagctatttccatggtctaaaggagcaagggtaaggaacagacacttgaaccaattagatgtgtaatttctgtggccttacacataagtaagtagcagaaatcaggcactgccaagctatgcctcagcagggaa

SEQ ID NO: 696316 - DNA, 629 bp, Homo sapiens
aatttttgtatttttagtagagacggggtttcaccatgttggccaggctggtcttgaactcctgacctcaagtgatccacctgtctcggcctgccaaagtggtgggattacagacatgagccactgcgcccagcccagtctttatttttaaaacataaatctttatttttattattgaaattttacatagtagaaaattggcccaaaatgctgaagatacatgtttagaaagtaaaacatgcaaaatacagttcttagaactatgatcatgttgtataagaacaaatcaattatagtagattacattataccattgcatcatccagaacaagtgcttcaaaagtaaggctttacatattcacccagtactactagtttggaaaaaawtacgaatctttatattttggggaaaacagatgcttaattttttggtcaaactccagtgttatacatttgagaagacataatgaactggttaaactgtagagtcagactggctcagctcaaattgtgactttagcacttaccagcaatatggccttgagcaagtacttaacatctataaaatggggataacagtcactgtcgtagtatagtagcagcagaaggctgttgtaaggattaaggga

SEQ ID NO: 696317 - DNA, 1959 bp, Homo sapiens
tgaggcaaaaattcctgaccacaaatttattcttcattcaccccaagacaggtgaagcaacaaaggcaggtggcttttggagagacagtgcttccagttgcaggtagaaggctgttcatttccttatttgctttctccmtctcttctattggtggggaatttaagaatatgccatagaatttaggttaaggaaggaaggcataaatgatttgttccaagaatgcaggaggaaagtctccctaaacacagcattcattagtaagagcttccagaaccttccaaaattctgtctccttttatagcatcccgcaagtccaaagtaatgaaataaaagcatggtaataggtaaacacaagtacggcacccagatagctccttggcaggcagggggtgtttgagagcattgactggggtctcattttccataatcgagcccagccctgctgtgatcactatagtattatgacctatggggcaaagacggtaccatacgtgatatttcatttttgggtagctgggggtagtaatgaaccagttgcagtcaagtgaattaatttccctagctattcaaaaatgaaacttcatgtacagcaatttgttcttcattgctttttttccccactgtagccttttcaaaaattactcttcctacagaaaagtggagagaaagaaaaagaaaactcaatgaaaaaatattttaacctttgctgaatgttgatgtcttttctgatcatcaataataatgataaatgtatcctatagatacacagcttagaattcacattgcagttctattagcctcatactgactgattatgaatcttaaaacatgaaataaatattcaaaaagttggtatatagattccagagccaatttcaaacagtttaaattatcagttggtatttatccaaactccaaggagtgccctaatcaatctgactcagtagaattactcaattactgtacatttaataaatacaatttaatgatcaaaacacattattgagaatgaaagactttggcataggtaggtatagacatgtaacacagctgttaatcctctataaatttgtttttaataacactgatgttttggttgcatataataactatttcattaaatctaaattaaatgcatggttaagcatatttaaaacatgtaaatgtaatgtgttgctagtgtatttcatttcatgtttccatgcagttctaacaattttccaaattcaaattgactaggtgtagggaagtccttggtcgttgatatgataccttttttctgatatcattaagctgcagaaatttaatacctctgagttccaaacacatcgctagtcaatcagtgttcaggaaagacaatgtgtttatctgctggaaagaaatgcttacggactcaactgaaagggaaaaaatgcttttaaataatagtaaaacatgcgttttgcttttttaaaaaagtaaagcaaagaatctaatactaaaaaagctatgttgcaataacaatcaagagtgtgttgtgcatgatttttcatttatggatagcaagagacattaatatacttgcctatggcttgtgcattactattcccagctatgcagaaatggaacgtgatttacagcaacacattctttgttgctgttccaatatacctattgtcttccctgcattctgactggctggctggctgggaaaggggatggtgctggaccgcactcaatcattatggttgtctacaaatagagtaggtgtatgtgaactgagatttttcagctttgtatacccagcaagccaatcagagcacagaaagaacaatagctgaaggttttactgctctttaagtttccccactgattcccattgcgactgattatatcacagaagttatataaaaatcacattaaataccaactaaatcaagacttttcatgccttttttttcaaagcaatgaaattcagg

SEQ ID NO: 696318 - DNA, 623 bp, Homo sapiens
taccagccagctaacttgcaaacatgggagaaaactcaaccagatcaagggtctcttcatgcacaacatacagcaaaatacagacacgtgacttggtttagccgagcacagaatatcgtgagtcctataatcatgagcagtaataaatatttattgttttaggacactgggttttaggatctttttatcatcattacataataagcattttatagtatatttcattatttgagaaattcaaactaataacccaattaaatcccaaatattttgatttgtaccttgtgtgttgacaaaagcctgaggcttgaggattcagagatgaaattgagcckactgaattatatttttgaagttaaaaaaaggtgttgcatttatttacatcctaataatttagcttgcaaaatatagaatcacgtttttttgttttgttttgttttgttttattccacagtaatggcattcccactgcactgcacagtgagagaatttgtttcttttctatataaatcacatcctcctaatgtaactttgaagaggagaatcagtaactccattggatgtttagctcctagaaagaagaatgttctcaaagaacagaaaatgaattttgtccctgccga

SEQ ID NO: 696319 - DNA, 1523 bp, Homo sapiens
catttgagtcaattttgatctgaaaaaaatggacacaatttaaaaccacttattgagtttaggatgcagcatgaatcgcaggtttggagcaaacatctacagttggacgttcccatgctaattttgaattgagcatgagatatataaggttagaattattataattttctcatggataattttatatgacttagaaatataatttttctaatctgaagaattatgaaattttgtcacctttctttatcttcaaaatggccaaaaagacttctaaatggtaagtaacttttcagggtcatatatatacttagggacagaccatatctcctaagactatatcacttaccactacatataatgcctacctactttttttgagaaacatcaagtgtgaggagtggagataaactgaggacaacattcaatgcttatgtacacattttttgtcttagaagcttttacttttatttaggatatgttttatagcacacgagaacatactataatgaactccctaatgtttatctcccagtttcaacaatttcaactgcctgttagatatcagatagttcagtaaacactaacataatttaaatattataagaatagtgctttttacttattatttatttaaactatagtttctgaatgaggaactgatttttcctaagtcatagatttaactggttgatccagactctagcatagatctgatgccaaaaaaaaaaaaaaaatgtttccttggcaacgttttgaaataatgtgtctggcaaatataaagaaatatatgtattgtgtggttgtagatggagagaggaagaaaaagtgaaggaggaagagaaagaaggaagaggaaaatcaggatgacataacaggaagaagtttcaaaaatgttataaagattgtatagttgaaattactgtttattcaaaaatgtgccttctgatttgtttgaatataatgaaactttcgaaaaaatgtattgaaattgatatcacatttagatacggttattaaaataaattgtaaaaaatacttttaaacaratttggaattcattacaattatttgttattagattaatgaatcatagatacaagttttgttattatgtactgatgatataaagtggtttgataaaatactatctctgtgtatgtatagcaaatctaaaaagataatttgtatttttaataaataagacaaaggttcaccttctaccttgaaaaaaagatgtttaaaacatgttaaagagagcactgaaggtttttgagctattttgaaaatttatctctgcatattttcttcatttctagtttcatgttaactttcaaattacaattaatataaaataaatatattatggaaaaaaattcaaactttatgtagacagtgacctacatttttaatcataaaatggaacttaaaatttaaattttacactattgaaagaaaaattaattatagatttctatttcttctttataagatacttgaagaaacaagtcatgaaaatgttaata

SEQ ID NO: 696320 - DNA, 632 bp, Homo sapiens
gctatcctagtggatgtgaaatggtatctcattgtggttttggtctttgtttccctaatgctaatgatgttaagcatttattttcttgtgctttttggccatttgtgtgtttctttggaaaaatgtctattcgaattttttacccatttgaaatttgatgatttgtcttttcattgttgttttgtgagagtttttttaaaaatatatattctggatacaagttcttcatcagatatataatttgtacatactttctcccattctgtgggttgtcttttcattttcttgatggcatcyttgaaacacaaatgttttaaattttgatgaaatgcaattatctttttctctcttgttatgtccgatttgctgttgtagcatacgttatatttacaccatctttgtgcatgactaaaacatagccatagcctctgtttgctggagtcgatggagaaaagcagcaatgaaacatgcagtgacagtaaagcaagaagttccaggtgctgtgtatttaccccacaggaacaattaatcttgtctcatgttagtgagaggacacggaatgtttcagaagggacaatttagaagctgacaggtcaggaagtgttatttaacagtgaggaaaggaaagaatt

SEQ ID NO: 696321 - DNA, 1386 bp, Homo sapiens
ttacttctattttgggtgtattgagttttagttcctctgagatatttagatgaaaatgttaagcagacagtaggctatttgggtgtggagcccaaaagagatctccggggatacagagttggtaaaatcgagcactgatgataatgacacaaaaggttatggatgaggatatctcccacagggagaatgcagagtaaaaaggaaaaaaaaaatcatttactatctaacccctgggagcctaatcatttagaggtttagtgggagaggaacttcatagatgtttaaagagcaaaagccacggagatcaaggaaagctccaagggtatgtgatgccctaaatatgaaggaagaaagtggtgtaagaatatgagtcttagaaaacccaagaaaacccaaagaaaggtttttggggaaagggttaggttatgagagaaggagtacagacaattatcagctgagagttggataaataactgctactagcagtgccaagaactttaaacgtgacattgtatcttacatatgtaccaacaagtttacctccaacagtttcatggatgccagcagaagatatgaaactcttaggcaaagttggacaccatgattatccccacagttgcatcattccccaagccccaattcccacaggtcaatgagataagggctgggtgacaccaccaccatagtgaatttcgttagagcaaaggagtcctgagtttggattacccgaatttcagtggacagtaagcatgtttgttctttgctctgaagtgagaggctatctctgtcttccaagattagtcactaaacaaccatctttgaaaggacagtctgcaacaaaaagctctgctcacaagacattcagacacacgaaagacggtcgagaattgtctcccaatacaagacattcagaaacacgaaagatggtcgagaattgtctcccaatacaagacattcagaaacacraaagatggctgagaattttttcccaataaaggaagcccaagaaatggatcactggcagagtaaaacaggcttacagatcatttcatcttgatagtatgctaaaggtttgtggatatttgggattaatagaattcagatgtccagaatatctaatagaagttcccccaattagaatgttcactcaagtaatttagtttctgtttgttcacagggattgtcagctgtagtgaatatatcaatgactgctttctggaaatgaatacatgttgggttgtataatgtggtgctagtggttaagagcacacattttggtggaagactgcctgtaatcaatgaatggattttactgcatctaaattaagggtttatatttaataaaggttaccaaataggtgatcaactggttgaaaatgtttccaa

SEQ ID NO: 696322 - DNA, 1386 bp, Homo sapiens
ttacttctattttgggtgtattgagttttagttcctctgagatatttagatgaaaatgttaagcagacagtaggctatttgggtgtggagcccaaaagagatctccggggatacagagttggtaaaatcgagcactgatgataatgacacaaaaggttatggatgaggatatctcccacagggagaatgcagagtaaaaaggaaaaaaaaaatcatttactatctaacccctgggagcctaatcatttagaggtttagtgggagaggaacttcatagatgtttaaagagcaaaagccacggagatcaaggaaagctccaagggtatgtgatgccctaaatatgaaggaagaaagtggtgtaagaatatgagtcttagaaaacccaagaaaacccaaagaaaggtttttggggaaagggttaggttatgagagaaggagtacagacaattatcagctgagagttggataaataactgctactagcagtgccaagaactttaaacgtgacattgtatcttacatatgtaccaacaagtttacctccaacagtttcatggatgccagcagaagatatgaaactcttaggcaaagttggacaccatgattatccccacagttgcatcattccccaagccccaattcccacaggtcaatgagataagggctgggtgacaccaccaccatagtgaatttcgttagagcaaaggagtcctgagtttggattacccgaatttcagtggacagtaagcatgtttgttctttgctctgaagtgagaggctatctctgtcttccaagattagtcactaaacaaccatctttgaaaggacagtctgcaacaaaaagctctgctcacaagacattcagacacacgaaagacggtcgagaattgtctcccaatacaagacattcagaaacacgaaagatggtcgagaattgtctcccaatacaagacattcagaaacacaaaagatggctgagaattttttcccaataaaggaagcccaagaaatggatcactggcagagtaaaacaggcttacagatcatttcatcttgatagtatgctaaaggtttgtggatatttgggattaatagaattcagatgtccagaatatctaatagaagttcccccaattagaatgttcactcaagtaatttagtttctgtttgttcacagggattgtcagctrtagtgaatatatcaatgactgctttctggaaatgaatacatgttgggttgtataatgtggtgctagtggttaagagcacacattttggtggaagactgcctgtaatcaatgaatggattttactgcatctaaattaagggtttatatttaataaaggttaccaaataggtgatcaactggttgaaaatgtttccaa

SEQ ID NO: 696323 - DNA, 746 bp, Homo sapiens
tcccccctcccccaaccccacaacagtcccaggtgtgtgatgttccccttcctgtgtccatgtgttctcattgttcaattcccacctatgagatatattttaaaggaagaaaataaaccgaagaaaaccttactgtttacctcgatggcacaaattacaaattccctgaggcgaagcatcatagccatatggaattaaaagaggatttaagttatttgttatacatctgtggtaaatgtcggggggttttttggcatttatttgctgagccatacaggggtacacatttctctcctttaacttatttcattagactagagtaagcacttcycaaaaatactgacgaaaagctcatagtttttcttagggaattcaagactttcctggcaagaattaaaattgagtcaagtttctgaggaagattttagttaaaaggaaacaccctgactgacctccccaaccaacaaacgatgcaaccagtgttataatgtgttccacagtcctttgcgcaagcaaaccattcattatattgatagtaccatgttatttgaggaattcagagcaatgaatcaatgatatgatgatgaactttgtgaattatatcagtataagcgcaaaaacaattgcagggatattagatgtcttgctacaaaacgctcttcttggtaaatgtagtagaatataaatgactcctatgaagtgttgaaagctttactctttcttctgccctccccaaactgaactct

SEQ ID NO: 696324 - DNA, 593 bp, Homo sapiens
aaataaaataattttaaaagtttcattagtcgccaaacagcaaggaaagaaattgaaacacatgtctactggttcaaagttttttaaaaatatagtaagatggtacataaaactcaactatgctgtcattacattaaatgaactaaattattcaagaaaaagatcaatatttttagactagattgaaaagaaaaaccaarttatttgtttcttgcaataaataaaacttgcatacaaaacacagaaatattggaagtaaaaggatagaaatagatatgtcatgcaaagctaaccaaaacaaagctgacatgaatttgcagtaatactataaacatagtagatgttcaggccaaaaaaaaaaaaaaaaaaaaactatgagatgtaaagaaaaatatataaaggaatatatttaacatttcaaaatcaacattcacaaaaacattctttcaaaacatattaaacaaaagtttaatgtggagaaacagatgaattcacaatcaaacaaatcttcagattatggagatttcaatatatctccttcaatagctaacagaacaaagagaaaactataagaaggaacagagaagatctaa

SEQ ID NO: 696325 - DNA, 593 bp, Homo sapiens
aaataaaataattttaaaagtttcattagtcgccaaacagcaaggaaagaaattgaaacacatgtctactggttcaaagttttttaaaaatatagtaagatggtacataaaactcaactatgctgtcattacattaaatgaactaaattattcaagaaaaagatcaatatttttagactagattgaaaagaaaaaccaaattatttgtttcttgcaataaayaaaacttgcatacaaaacacagaaatattggaagtaaaaggatagaaatagatatgtcatgcaaagctaaccaaaacaaagctgacatgaatttgcagtaatactataaacatagtagatgttcaggccaaaaaaaaaaaaaaaaaaaaactatgagatgtaaagaaaaatatataaaggaatatatttaacatttcaaaatcaacattcacaaaaacattctttcaaaacatattaaacaaaagtttaatgtggagaaacagatgaattcacaatcaaacaaatcttcagattatggagatttcaatatatctccttcaatagctaacagaacaaagagaaaactataagaaggaacagagaagatctaa

SEQ ID NO: 696326 - DNA, 657 bp, Homo sapiens
tccacacagcactattataccttacctatagtaccccagtgctgaattatatcccaaacggaggtaggagaagactgcattcataaatacatctgatggagaggcgatcgcactcacatgtaaatgaccacatatacatcaaaggaggaataactgagttacagtacatccatccacacaataaatcactatagctagccattaaaaagaatgaagcaggctgggtgcagtggctcacgcctgcaatcccagcactttgggaggctgaggcaggtggatcacttgaggtcaggagtttgagaccagcccggccaacatggtgaaaccccatctctactaaaaatacaaaaattagccgagctgttatcccagctactcgggaggctaaggcaggagaatcgcttgaacctggaaggcagaggttgcagtgagccaagatcgcgccactatactccaacctaggygacagagtaagactctgtctcaaaaaaaaaaggaaaagagtagatacataatggtataattttatatgtattaaaaagatgttcaggtagatcacacacacacacacacacacacacacacacacacactctctctctctctctctctctctctctctcatcatttttttgaaaaataaattcccttctgggg

SEQ ID NO: 696327 - DNA, 621 bp, Homo sapiens
tcccaaacttaatggcttaaagtaactgccacattcattttgctcactaatctgcagtttggaagagctggaaagaaggtggcagcccatctctggttcacttggcatttgctcagccactcaaaatcatgatggcatcttatgaaaaatatctgtagaacctgtaacagagaatgggttattaagtgccttttggacacccaacaacagaaatgactctggactctgccctgagatggaatgtctgtaaccttaaattagagagagcctccactttatccttgagagggtggtggttcttttgacagtcactggcccctttttctggaggggcaattctttctcttatttaaagaatgataaatgtgaacaaacacatacaaactatggagaaccactaaattatttgattttgtgtttaaagcagctttttatcctaataaaatgtatacagtttaaaattatctaaatttaaaatttaaaatttaaatttaaaattctgtcaacaattttgttgacagaagctccacacartaggcagaataacctttgggaaaatagtatacacctatgtgagtgtgtgtatatatatgtccacataaatgtatacacatttactta

SEQ ID NO: 696328 - DNA, 622 bp, Homo sapiens
tgcccatgccatgggggccacagcagctcccacacaggtccagggttcagcccaccatcagggacagagtgcttcccaccagccaggcctctggccacccaggttgaggtgcacccaaggtctctgcatggatctccactcacattgatgatgtaggagagctccacagtgatgaggggctcagctggaggctgggtaggggggcgcacagtcactgtcatcacccgggatgtgacggccagcgggggcctgcgggacaggtaccgaagtcagctcctgccagcgggtgccagccccagtcagaaaccctgaagccgctttggatgggtgtgcagaggcttccaaggagccaaggcccaggggaaggcctaactcagtggggtccaggacttcrggtgaggtctagagctctgtccctcacccgctgggtggcagcccagcctctgagagcagtatggataaatttgagaagcatgtgtccagagccaggcaaggggttcctgaaggtggaggaggctgccatggatctctctgcagccagcactggctcagtcctccttcccttacctgggccttcctggaccctcagcagccccagccacccatccccaggactcacctg

SEQ ID NO: 696329 - DNA, 1329 bp, Homo sapiens
tttaattctgagctttctaagtctttctctaagtgaaacatggcctggggtgtttcttgatttctttggcatgattgatactatggggtcaatgaaatctcttgagttgttatccacaggcctcaaggcagccataatttacatctccctaggggagaatggtcctctctcttccctcccagaagaagagtcaggaggggaccttactatcattcattctatcctgggcccagtctggccttgtccacaaccagcatccactttccaaccctgtctggacttggcgctgggctgggctctgggggaacaagaggacaaggaattgggtcccctggaaaaaaaggaccagacaccaacatggggcccagatacaggtgacctgggctgggctctgggggatcaagaggacaaggaattgggtcccctggaaaaaaaggaccagacaccaacacggggcccagatacaggtgacctgagcttggagccataagcaaaggacaggaaagtcctgtaggggcttaaagagggagcactccccgcccactgggggacactgggaaggggacctgaaggaagggccagtggagataggcctgagatgcttcacacaggtgaacacagtggagtgagcagagcatgagcaaacccacacaattaggaaaacaagggccaagtgagtgattccaaggatgggagaaatgggaccccgagatagcctccagcattggagcaaaaaggagagaattatggatccagagagattcagacttagaaatgttaatctcacaacaggccaaccctgagctcagcacttaggtgcattagctcacctaacctcaaggcagtctgatggggtggggactgtggctatgccattttcagatgagatgactgaagctgaaggagcttaagactgcaggccttaactgcagtggttgggacttcccagctcttgytactctcaattctttttcctttaggagactggagtcagagagcctcaaatgtccagccaaggagactaaaatttatgcaacaggcaaccgggtgccttggcagattcctgaggaaggttctagctgaccattttaggaggaatcctcatttcaccccaagctgctgccctaggcagttgggtcccctttctttttcttgccaaggagagggtggaattgggtgatctggaatgtggtgcgaaggcgatagtttggcaacagcaggagacatactttcttgcagcctctcagcacttggcatgttatgccctgggcaaaatcaagctgccctgggaacagcccggggcgtcccaacagatgagcttgtgtgaat

SEQ ID NO: 696330 - DNA, 611 bp, Homo sapiens
aacctaatcactcgaatactcaacattctcaagtgctcgacacttaaagcagtgctctcaacagaaatatgacatatctgtaattttagattttctataaccacaattaaaacagtaaaaataagcaattattttcagtaatatattttattcaaagcaatatatctaaaatattgtcatttcaaaatgtaatcaatataaaayattactgagatattttgtaatgcttttttttgatactattattactctgtgaaacttggtgtacattttactatagccagtggtatactggagctaacacaaactggctgtaatcccagctacttgggaggcttaggcaggaaaattgcttgaacccaggaggcagaggttgcagtgagctgagaccgtgccactgcactccagcctgggtgacagagtgagactccatctcaaaaaagaaagaaagaaaacaaaaatgtcaaccaagattcataaggaaaaagtaagacattcccagataaacaaatgctgagggagtctgttgttagtagacctgcccaacaagaaatgctagagtaaatccttcaggcagaaagaaaagatcactacaaagtaactcaaagcca

SEQ ID NO: 696331 - DNA, 1487 bp, Homo sapiens
aaacaataccattgtcactagcttaaatagtggttaagtgatattgttcagtaaatccatatgtaaggataaagtcagaatagtaaaagcttgacatttcacaggaaatgtgtggattaaagggatttttatttgtttaaatatagtcgctttgtaatttagatagaataatactgttaaaccaatttgaagataaggtgtgctttctatgttgatgtttttaggttatattatattttgatgtctctttaccaacaaaggaaagatatacatatatagattaattctcttggatatgagttttatcacaataatgcttttatttctacctttagttttaaaaatacttaaaattgcctcttgaaaaatctatatttaaaaaaacatgaatccaggacatagtcattttaattagtgtatttgaatataatgttcactaatgagaatgatctcaaggtaattcaagaagagatcatgaagtctgtttttctaggaaatytccaattttttctgtctttaaaggtggacttatttttaaaggtggactcttttttttgccaacattgcatgcactttcgttgcccttcttgtttcctgttatgcttgctgtaactcactgtgtaaaccttgaggctccattacttgctttgaggtttggtatcctattctttagtgatattgcgactgcagaaacactgcagtgtggtctttagaatttcaagggtgtcatagtacttaaggctactttctgtcctccttttttgcttccttattccttgcaaagctttgccttggccacatgtgagttcaagtagtgtgtttccacagtttctaaattcttactctaaggaattagggacaagatgatttccccaaatcatccctatcccatgtatgggccttctaggaatagtaccataaaaatctgtctttattaataggtcctttctgacaaatcaacacttaaacattattttaacacagttttatgatgatgattatcttctacagttttatgtattttaatcattaacttattgattgtgccttgaaggcctcttacataaaggatgcaatttgaataatgccttggtaaaaccatttaatctctgtttacaactatattatgtttcatcccaaacagtaatgatgactcctttctatggataacatggcacatattgtttacatgtaaatgttattttaaaagctatattttgttagacttagattttcacattcaagatcattcctaaagatttatgtgattttttaaaagataattttaatctacctatagtgtgtataaatttattacctagagaaaaggaagaaattatactgtctggtaggggagagaattctgaataattaaggggcaactggttggaattaattttagtacattggggatgaactaggtttagtttaagcctctgttgataagagctctagaatcctttctgtttatcacagaaggcccagcc

SEQ ID NO: 696332 - DNA, 1013 bp, Homo sapiens
gatattagagagataatttgaaatccatttttttgcacagaatagttaaaaggtctcaggaaacatggacattctcaagattattgagaaacccagtttggctggattgtagggggccacgttgaggagattaattcattcaacaagactttacagggcatctttcatgtactacacawcatcctatatctggggatacaggaatggataagatgcagtcattgccctggcatgtctgatattcaagtggcagttagattgtaagttccatgaggatagagacttgggacatagtatgagctcaataaatatctgtgaaacaaatgtcaatgtgaaagacattctactgtgtatcagacattgtcataggtgccaggatggtgcagtaaataaaacaacaaaaatacttgtcctgttagaggttgtgttctagtgaaaataaagtaaaatagaaggatagggagttattgttgcgggggaagttaaatagaattgtcaaaacagacctcactgtggtgctttgagtaaagaattaatgacaaaacttgaaagataagttacaaaatgaatatggtatctttgtgaacaatggtaaaccaatgaaagtcatgctttgggggtcagcagagatagaaaatgcagtggaagtgtgtgagttcaaatagaatatttttgctagaactaagattatcaagagtttcaagataactgaccttggatttttagttctgtgggcagagtgaatcatggggaaaaggaggaggctgccctgtccctatccttctcttttcagactaggcagatgcaagccatatgatttgttcatgcttgtctgaacatagatgctatccctaacctgggtcccagtgactgatcctaagccggccacagggactctttctgtgccttgggagatgatcatgagaacctagaaagggaaaaagagtccccttccctggcataattggagccccactggtgatgagcaaagaccctacctggaaagaaggcca

SEQ ID NO: 696333 - DNA, 419 bp, Homo sapiens
gacttggctcttatgcctgtccctgaayaattcactgtcatcaaggaaatgttctatgtgaattggctaaggcttaagtcaacatagccacctgtggccctagggacaaaatcagcatcattataagtcacaagtcttctgtaacagacattaattcaagtacaaggacagactttacatcaggagttgacatcaggggtgtatttttctcacatcataaaaagtctgaagtcaggccaggcgctgtagctcacacctgtattcccagcactttgggaggccaaggcgggtggatcatttaaggtcaggaatttgagaccagcctggccaacatggtgaaaaccctgtctctactaaaaatacaaaaattagccaggcatagtggtgcacgcctgtaatccctgctacttgggaggctg

SEQ ID NO: 696334 - DNA, 619 bp, Homo sapiens
gttttaaaaaattaacatatatttcatattaatgcatagttatttttaagttaaggggtctaaatactttgcatgattctcactgtccatgaacatatagtacaaaagtagtaagaaaacactagtgaatagtaattcactagtagtgttattgttttaatagttaacaatcatcacaggtttactatgttttaggcactgttttaaatgtttttgtatgtaattattttaatctgcacagctttaaatcactggggtgacagagattactagttttccccccagtayctgttctcccctcttgctatagcgataaagttttagcaaggcatgtggcatcccttgaaactagatgtggccattgactaggttctggccaatgggattgtgagtgggagtgatgtgggaacttctggatcatactcctaaaggaaatgaggacatattcccttttttcttatcctcttctgctagctagaatgcagatatccaggtggcagctggaatagccatcatggtccatgaggtggaagccaccttttgagagagcagaataaaaagacacaaggagtcaaactccacagaatcatggtgccaccttatcagcccttgactcctg

SEQ ID NO: 696335 - DNA, 621 bp, Homo sapiens
ggtaaggttcccaaccaaacaaagtacatttttcttacatttacacagcagtttggttcctggaaaattcggtgaatgttaaaaccatgcaaaaatacttctctttgtgtgtatgtggagtgggggcgtgtatgtaaaacagaatcagctcagatcattataaacagatttttatcttacaggaatctctggtgatacagtggaaaatcctaaaagacacaaagcaattatttgctatgaagagagtgtggcatccctgccctcccccattacgtgcttatagcgtctcaatattttgtaaacattttttggggggaataattatagattcacaggaacttccaaagaaatgtccaggaagttccactgcacccttcactccattctccctcaatgttaatatcttccatggctacagtgcaatatcaaaaccaggaaatcaacattggtacaatgcacagagcctattcagataggaaaccaacattggtataatcctcatcacttgttcagacttcacccattatacytgcagtcattagtgtgtgtgtatgtgtcttgctttatataacattaccacatgcctagctttgtataattaccattataatcaagatacac

SEQ ID NO: 696336 - DNA, 655 bp, Homo sapiens
taaaagccctagaactcaggaactcaggagtagagggtgtgtctgacctacgtgctttagtagctccaaccatcactctttcctagccatcagtggctagctgtggagagggcgttatcatggacagggagaaccagaagcagaacttctgctatcacaactttacatatggaagtcccaggaggggaaaaatgtaactgtctgaatcatgacagaaaataaaatataatttataaatacacagcgaatggtgaaataygcaatagaactgtcttttctgaaagtgtaaacatgcagatctttcatctagagagaaacccagaaaacgaggatcaactatcaacatcttctcctgaagggaatcctctactgtcacatcagtgtatgcctttccaaccatgatacctctacatggcctctctgtgtgtatctctgtgcatggcatcccaggtgtgggataaattgcgtgcaatttatttaaatgttactattcatgatttgaatccacagatgacacccgattaagtgccttcttggtgcaaatggggaaggtcagttatttatgtccaatactccatgcccagcaaagcttaagggactgaattagtttgataaacaagtatatatttcaggcaatgtgctaggaaatccaaag

SEQ ID NO: 696337 - DNA, 651 bp, Homo sapiens
ggcaaataagacatgtgcttgccctcaagaagcttactgcttagaggcagggagagaaaaatcatgataagcctaaggactatgtgagtgcagaggaaggatggaggcctcagggaagtcttcacaggggaaatggcatttgagcaggaccacaaaggttaaacaaaatttaacaggcagtgcatgacagaaggctattccaaagaaaaggaaaaccaaaggcaaatgggaagtaaaatttcatgacaaacacaaagtaatacacattgaataggtatgctgattctacaaaagtcttttaagtcagacaaaggaacttgcatatatatatatgacatatatatatatakagagagagagagagagaggaactgctatcctgtgatgttttgaaatcctaattctactctgtaattttttttttaacagagccaatgctatttatgtttcctcttctcttcctttatccctacctttgtctctagatctaacttacaccttttcaaaatttgaaacaacttggaaaacatttttaaatatttctgagttttactatgttaatcatagcaccatttcataaaaagtgttcaaattcaaatgatatctgtgttaaaatacacagttaatattttcacatactcaatatttctt

SEQ ID NO: 696338 - DNA, 617 bp, Homo sapiens
gaatggggttatttagcctaggaaacaaagggttaaacagcaccttaatgatagcttgtatgtatgtgagagaccaataacaactgttttctgattttctctagatttctgattttttctgattttaactggagttaaggtctgtagaatttagataaaatataagaaaacaattccaaatggggaaattttgagacattttatcttcaggatgggtttcgtttcyaagtgtaaatatttgcctcaatgtctcaagataggaagagatgcctcctttcctccctcttactggaaatccagctcagctcatcctccgtcagtggtttccactctgacaagaaaagacagcattgctgttactttaaggaaaaacagaagcagttgatgtggatttgccattggaaatggctgtactaaattcacaaaggaattctgaataattaaaataagcataaatataaaataagaatactgaaaatagtaggtataagttggtttgtggtcgtgtaagtattaaaattaaatctcttcaggtggcttataacagaatgccacttcaaaagagctttggcagaaaagaaaggatgtttggaagggattaggggaatctcaggcca

SEQ ID NO: 696339 - DNA, 649 bp, Homo sapiens
cagcagagtgtaggcgggctcaggcccttcctcattctcttttgcgatccacctgtcaccaggaacatcctttctcagatccatagagaggttcaccttgttggctgggcctggtaaaaggtgggttggtcattctgattcaggggtaaaacattgacaagccgacttgcctacagctgttcctgtggtagttttccaatcagatgatttcatattcaaggtgatatttttaatcttcatctgtttgactcttacatctcacaattattcagaacttggacaaggaagaggaaatgacttactgggtcttcaaaacttcaagagtcagctctgctactttcctcctgtctaacctaggtcaggttactacttaagctctctgaaccaaagtattatcatctgtttaaaaaatactacacaggctactttgtgaggctataggtagttgatacacataaagtagcacagtayccggtacatagtaagtgccagtgagtggctggtattcttgtcttcgggagccgcacacttaggaggaagtcgaagtcatttgcactgaccactcaattgcctcgcaggagttcctagctgcctgagtgcccttatataactttccctccctttctcatgcaataattcattcaacaaa

SEQ ID NO: 696340 - DNA, 1693 bp, Homo sapiens
caaagataattgcgtaagtgttagaggtatatacttatccattgttaattttaatcaattttacataatacaaatgcattattacatatgcttttcacagaacttaaatgccctttgataactatgtacttgagtcataagtaattatgtaatttgtctgaaatgcttataataaatagcataagagagatttaaccataaaatgtaacatttatttacatatctatttttcaaattatgtgcacatccaattttgatatgtgtaatgttttctagtgtctatcatggttcagtgatgttttatcttcacttctgaatcattttgaagcagattctgtatatcagcttcttttccttgcctattgaactttctgccatgtagttagtcttagctaacacttacgtattttaacatttaaaaaatccttagaaatcaccttgtccacccattttcattttaaacgatgaggaaacaggtacagagaagttatagggcttatataaagttagtataagtttgtcttatgataactctaagctcaaaggtagatataggttttgtggggcttgaagctgatataacttgggaagccctttttaagaaagggaatataaaattaggtgagaaacttaatattgactaagaatgagaaaaaaaataagagcctggcagataccacaaataaaatccatccagaaaataacactgttacattgtccccgacatctttgcaatatttttctctgtatttattagctacatattccttggtctttacttcgtgacagcaattacataatgtcattttctgtggaaaacaaagacagatgatcagattctcctgtagcattgtcaatggaaacttgctttttactattgacagttaagtttctttcagcttcacaacttattattgctgttgccacatcttcgactcccatctgcctgtcctcattcaggtcacacaagccctggagcaacctgctccctggttgttttccagcaaacaagactccagaccctcactgtcaacaatgagctggctataaacctgggtctttgtgctcctcaaagcagggagcagagcagcaaccccctcagatccttctctgggattaaagatagcgtccagattctgaggcacaagccaacaggggatagtgctggccgcccattctcctgccctgggcctcaacatcagaattgaaaggtgacccaggctccaacctgctagcaggtggctgatactgggtctcctgagaagagcatttggtaggagcccatacaagtgaggggcttggagcttaagcttggttaatttcatagtcagtctgcttctgcctatggcaaatccttgcaaaaggccagacactgtttttctctttactaagaatttacagtattgtaactgacccgctaagtactcaggtaaaaatatttgtgattctcctgtgtctccctaagccacatctctctctgggtttttaataagctagcattaaaaggcataagaatgatacgttggactttggggaaagggtggcagggggatgagggataaaagactacacattgggtacagtgcacactgctcaggtgctgggtgcacctgaatctcmgaaatcaccactaaagaacttattcatgtaaccaaacaccacctgctccctaaaaacctattgaaataaaaaa

SEQ ID NO: 696341 - DNA, 597 bp, Homo sapiens
aaagttccatgtatgtgaggaccagcttctgcttctctatcattttccactgtctaggtattcctgcaccaatatgaccaatttcaatgactgtatcttaaattttatgacttttttttccctaactccccaaacttgttaattttataagacttgatatctgacagggtcaagtccaccttcttgtcatttagaactatactgactgcttttggccctttactcttctacacaaatttacaaagaatttctgagttccacaacaaattctattggaattttgattggaactacattaaatttacagattagggagtacaggcatctttgcggcatctgtaatcttatcaaccacaaacataggtatatgtctttgcttattaaagtccttcttttgtgtccttcagtgatcattagaaatattaaagctgaatagctaataagcggcccttctaatacyatgcttactgttaaacccatttctatgtaagaaagaatcttggtgaccactgaagtccacgaacaccaggaaccgtgaaaaggatacatgtctgtaccactccgaacttgagttgggtgaagagtcgcacaaaaaag

SEQ ID NO: 696342 - DNA, 1282 bp, Homo sapiens
agggacacaagagaaaacagggagctattttgagaaggtgtcaaggctgggacactaaaattagaggcttggttcctaaaaagacattggcgccaaccgaggccttgaagaggggctcttcagcacggaatgtgaccccaggaagcacgctcacaattctggacaatgaggtcagcctgcagggcgcatgggaccgcccaatggccggtgggcatgggcacctctccccccgccagccccacctgcagaatgctggaactggctccaaccgcttcccgtctgcactgagccagcgcaagggcgagcggacagagcctcatgttcccggtgctgctgcccttccaggctgccttccttttttgactgtccttttggcttcttatgcttttggctccattctggatgtgcgtcatggggtgggatgcagaagcagcagccagcttggaggctggtgttcccggaggctgagggcgggatggggggaaatatgaaccaggaaagggcctggtatccccagcccagatgggcctaggctgctgtcccccagggacagagaagctcaagactttctttttttctttttttttaggcagagtcttgctgtgtctcccaggctggagtgcagtggcacgatctcagctcactgtaacccccatctcccaggttcaagcgattctctgcctcagcctcctgagtagttggtattataggcatgcgccaccacaccccactaattttttggattttttagtagagatggggtttcgccatgttggccagactggtctcgaactcctgaccccaagtgatctgcctgccttggcctcccaaagtactgggattacaggtgtgagccactgtgcccagcccaagactttctttctttgtctcctcctctggcctcagaggaagctggggaagtccttacagagccgacttcctggggtgaggcgccaaagggctcttagtcccgctgctcrgagatggaggcgacccctctccctcctctcagggccccggcctggagtccaaggcttcatcatttgcctttcctcttagcccaaggtgttttccctggagagggagggtggcaaatttgatcctgtccccacactcctgtttaaattcccttagcgactgctcatggccctgggatggggtctgaatttatcaccgtccagaaggccccacaaattccagccctgcccagctctcactccaagccctagacccgtgaccatctctcctgttttccaacacaccaagttcacaccctctcctc

SEQ ID NO: 696343 - DNA, 1282 bp, Homo sapiens
agggacacaagagaaaacagggagctattttgagaaggtgtcaaggctgggacactaaaattagaggcttggttcctaaaaagacattggcgccaaccgaggccttgaagaggggctcttcagcacggaatgtgaccccaggaagcacgctcacaattctggacaatgaggtcagcctgcagggcgcatgggaccgcccaatggccggtgggcatgggcacctctccccccgccagccccacctgcagaatgctggaactggctccaaccgcttcccgtctgcactgagccagcgcaagggcgagcggacagagcctcatgttcccggtgctgctgcccttccaggctgccttccttttttgactgtccttttggcttcttatgcttttggctccattctggatgtgcgtcatggggtgggatgcagaagcagcagccagcttggaggctggtgttcccggaggctgagggcgggatggggggaaatatgaaccaggaaagggcctggtatccccagcccagatgggcctaggctgctgtcccccagggacagagaagctcaagactttctttttttctttttttttaggcagagtcttgctgtgtctcccaggctggagtgcagtggcacgatctcagctcactgtaacccccatctcccaggttcaagcgattctctgcctcagcctcctgagtagttggtattataggcatgcgccaccacaccccactaattttttggattttttagtagagatggggtttcgccatgttggccagactggtctcgaactcctgaccccaagtgatctgcctgccttggcctcccaaagtactgggattacaggtgtgagccactgtgcccagcccaagactttctttctttgtctcctcctctggcctcagaggaagctggggaagtccttacagagccgacttcctggggtgaggcgccaaagggctcttagtcccgctgctcggagatggaggcgacycctctccctcctctcagggccccggcctggagtccaaggcttcatcatttgcctttcctcttagcccaaggtgttttccctggagagggagggtggcaaatttgatcctgtccccacactcctgtttaaattcccttagcgactgctcatggccctgggatggggtctgaatttatcaccgtccagaaggccccacaaattccagccctgcccagctctcactccaagccctagacccgtgaccatctctcctgttttccaacacaccaagttcacaccctctcctc

SEQ ID NO: 696344 - DNA, 1282 bp, Homo sapiens
agggacacaagagaaaacagggagctattttgagaaggtgtcaaggctgggacactaaaattagaggcttggttcctaaaaagacattggcgccaaccgaggccttgaagaggggctcttcagcacggaatgtgaccccaggaagcacgctcacaattctggacaatgaggtcagcctgcagggcgcatgggaccgcccaatggccggtgggcatgggcacctctccccccgccagccccacctgcagaatgctggaactggctccaaccgcttcccgtctgcactgagccagcgcaagggcgagcggacagagcctcatgttcccggtgctgctgcccttccaggctgccttccttttttgactgtccttttggcttcttatgcttttggctccattctggatgtgcgtcatggggtgggatgcagaagcagcagccagcttggaggctggtgttcccggaggctgagggcgggatggggggaaatatgaaccaggaaagggcctggtatccccagcccagatgggcctaggctgctgtcccccagggacagagaagctcaagactttctttttttctttttttttaggcagagtcttgctgtgtctcccaggctggagtgcagtggcacgatctcagctcactgtaacccccatctcccaggttcaagcgattctctgcctcagcctcctgagtagttggtattataggcatgcgccaccacaccccactaattttttggattttttagtagagatggggtttcgccatgttggccagactggtctcgaactcctgaccccaagtgatctgcctgccttggcctcccaaagtactgggattacaggtgtgagccactgtgcccagcccaagactttctttctttgtctcctcctctggcctcagaggaagctggggaagtccttacagagccgacttcctggggtgaggcgccaaagggctcttagtcccgctgctcggagatggaggcgacccctctccctcctctcagggccccggcctrgagtccaaggcttcatcatttgcctttcctcttagcccaaggtgttttccctggagagggagggtggcaaatttgatcctgtccccacactcctgtttaaattcccttagcgactgctcatggccctgggatggggtctgaatttatcaccgtccagaaggccccacaaattccagccctgcccagctctcactccaagccctagacccgtgaccatctctcctgttttccaacacaccaagttcacaccctctcctc

SEQ ID NO: 696345 - DNA, 1282 bp, Homo sapiens
agggacacaagagaaaacagggagctattttgagaaggtgtcaaggctgggacactaaaattagaggcttggttcctaaaaagacattggcgccaaccgaggccttgaagaggggctcttcagcacggaatgtgaccccaggaagcacgctcacaattctggacaatgaggtcagcctgcagggcgcatgggaccgcccaatggccggtgggcatgggcacctctccccccgccagccccacctgcagaatgctggaactggctccaaccgcttcccgtctgcactgagccagcgcaagggcgagcggacagagcctcatgttcccggtgctgctgcccttccaggctgccttccttttttgactgtccttttggcttcttatgcttttggctccattctggatgtgcgtcatggggtgggatgcagaagcagcagccagcttggaggctggtgttcccggaggctgagggcgggatggggggaaatatgaaccaggaaagggcctggtatccccagcccagatgggcctaggctgctgtcccccagggacagagaagctcaagactttctttttttctttttttttaggcagagtcttgctgtgtctcccaggctggagtgcagtggcacgatctcagctcactgtaacccccatctcccaggttcaagcgattctctgcctcagcctcctgagtagttggtattataggcatgcgccaccacaccccactaattttttggattttttagtagagatggggtttcgccatgttggccagactggtctcgaactcctgaccccaagtgatctgcctgccttggcctcccaaagtactgggattacaggtgtgagccactgtgcccagcccaagactttctttctttgtctcctcctctggcctcagaggaagctggggaagtccttacagagccgacttcctggggtgaggcgccaaagggctcttagtcccgctgctcggagatggaggcgacccctctccctcctctcagggccccggcctggagtccaaggcttcatcatttgcctttcctcttagcccaaggtgttttccctggrgagggagggtggcaaatttgatcctgtccccacactcctgtttaaattcccttagcgactgctcatggccctgggatggggtctgaatttatcaccgtccagaaggccccacaaattccagccctgcccagctctcactccaagccctagacccgtgaccatctctcctgttttccaacacaccaagttcacaccctctcctc

SEQ ID NO: 696346 - DNA, 1282 bp, Homo sapiens
agggacacaagagaaaacagggagctattttgagaaggtgtcaaggctgggacactaaaattagaggcttggttcctaaaaagacattggcgccaaccgaggccttgaagaggggctcttcagcacggaatgtgaccccaggaagcacgctcacaattctggacaatgaggtcagcctgcagggcgcatgggaccgcccaatggccggtgggcatgggcacctctccccccgccagccccacctgcagaatgctggaactggctccaaccgcttcccgtctgcactgagccagcgcaagggcgagcggacagagcctcatgttcccggtgctgctgcccttccaggctgccttccttttttgactgtccttttggcttcttatgcttttggctccattctggatgtgcgtcatggggtgggatgcagaagcagcagccagcttggaggctggtgttcccggaggctgagggcgggatggggggaaatatgaaccaggaaagggcctggtatccccagcccagatgggcctaggctgctgtcccccagggacagagaagctcaagactttctttttttctttttttttaggcagagtcttgctgtgtctcccaggctggagtgcagtggcacgatctcagctcactgtaacccccatctcccaggttcaagcgattctctgcctcagcctcctgagtagttggtattataggcatgcgccaccacaccccactaattttttggattttttagtagagatggggtttcgccatgttggccagactggtctcgaactcctgaccccaagtgatctgcctgccttggcctcccaaagtactgggattacaggtgtgagccactgtgcccagcccaagactttctttctttgtctcctcctctggcctcagaggaagctggggaagtccttacagagccgacttcctggggtgaggcgccaaagggctcttagtcccgctgctcggagatggaggcgacccctctccctcctctcagggccccggcctggagtccaaggcttcatcatttgcctttcctcttagcccaaggtgttttccctggagagggagggtggcaaatttgatcctgtccccayactcctgtttaaattcccttagcgactgctcatggccctgggatggggtctgaatttatcaccgtccagaaggccccacaaattccagccctgcccagctctcactccaagccctagacccgtgaccatctctcctgttttccaacacaccaagttcacaccctctcctc

SEQ ID NO: 696347 - DNA, 2102 bp, Homo sapiens
gaaagtaagaaaaagatcgatacgggctccagcagaacatcacttttaagtgacttttttcaattttgcaaattaatgttaattattaggatgggggtaactccataaacggagcataacttacttcctgtgaacgagttttttttttttwaatcctcgagagacattagaaagagttcagcctctcactcagtttccatttggtgctttttcttttctaaaaataaacgaccacatgggcccaccgcacacagctaccaggcctgctctccaccaggcaagttccttgcaccttgaaatgcaagccctaagagccttaaggttcttagttaagaaaagaaaaaaaaaattaagcgagaagtggtggggttctctttctccctttcaaagggattgcctaagttctgctgcatcaccgtggcagcagtcctgagttacagacttcctgtgctccgtgtgccctccccgaggtgcagcactcaaatcctgatgagaatttgtctctgtttttttgcaggagtcagaacagagcaagatctgtatgttcgcctcatagattcaatgaccaaacaggtgagaaagtttatgcctctgcacgagttttcactgctgggcctgggttgtcctgggcttcagaggcaagggcactgacaaatggatctcgtgtatttgttttccattgagtttccttgacatgctaatgagaattccatatttattggaatgaatgaagcgattggtaaaatagtttatgttgtcattagaacaggacatatatgctttattaaatgtcttgtgattggaatcatattctgtcttaattaattatggtaattaatatttgacaaaaatttcaagatgtcccccctcttgtttatttttaaatgcttctctctctgctaggaatcagttcatttggattttttttcctataacaaaggcagctaactcctaagcccatcgagttggacttgattagttcattttttttctcctttccagtgtgatggtctagtaacacgagacgtttatttggatttaaaagttaaatgtgttggggtgaaaagtcaccttgttctcctctagtccatcttcacctcgcagccccccagctccataattcaaactccaagctccaggggtcactccaacccgtccactgctctgccccctctcccaccctctgtcataccttgtaaataacataattacaagcagttccttattaaattatttaacctgtcttggtcaacttttccgatgataactattggctatcagtaatgtgattaagtggagaaaagtgcgtcactgctttttgacattgtgcagtctctggctgctggttttgtgctgggtggtgtgttgttgttgatttggttgttttaaagatttccccccgcccccattttcttaaaatagagtgttgtggtggggaggggggcaggtccagtttgtagattaaatccactcggcacagattgttttaaaatatacttccaagctggacttcacacttagaaatgaaagtggcttcttcggttttgatgctaactttaagaattgtgagccaagtaaaggagagctcgttggggcttcctgcagcccagcacatatgcctcccactctctgcatgcaattagtttgcacattttatttcccctttaaaaagtttgtccttacctaggtagcaagggtgttagattttaatgcctgcagtggtaaaccagtgtgcttttctcttagagtaaaacagatctgacaggtaaactaaggtctttctgacaaagacagaggcggtgtgcccttctgtaattatttcactcgattcagagaagcctctggaactccggctgctggttgacagggtgattttatttcctttgtatataatggctaaatgttttcggaaatcgctatagtctaattaagaggtttatgtaggcagccctaagtttctctgttgttgcacagaggaggaggaggcttcgttttaagtacacttttattgttcatttagccttgtacctttgcagtataaacagggctgaaaataaaggcatttaatctcctctcactgacgggcatggaggggcaaaaaa

SEQ ID NO: 696348 - DNA, 591 bp, Homo sapiens
tgtgtaagagttagctgatgggaaaaatggggaatgtgcagttcagcagaaggaaacagcagggcactgtacatagactggagtggtgggaatttcaggtacatgctgtgcagtgtgggcagaagaagccagagagataggcagggaacagctcataaaatgtcrtagttcattgcaaggaaagtggactttctcctagatcagtggtccccaacctttttggcaccagggatcagtttcatggaacacaatttttccatggactgcaggaggtgggggagtatgatttcagaatgaaactgttccacctcagatcaagtattagttagattgtcataaggagcacaacctagaccccttgcatgcacaggttacaatagggttggtgctcctatgagaatctaacgctgcagctgatctgaaaagaggcggagcttaggctgtattgctcacttgcccaccgctcaccttctgctatgtggccaggttcctaacaggctgctgaccagtaccagtctgcagcctgggggacccctgtcctagatgatatctccagtcctttcaggccagctctgccagcactgtgcaaac

SEQ ID NO: 696349 - DNA, 591 bp, Homo sapiens
tgtgtaagagttagctgatgggaaaaatggggaatgtgcagttcagcagaaggaaacagcagggcactgtacatagactggagtggtgggaatttcaggtacatgctgtgcagtgtgggcagaagaagccagagagataggcagggaacagctcataaaatgtcgtagttcattgcaaggaaagtggactttctcctagatcagtggtccccaacctttttggcaccagggatcagtttcatggaacacaatttttccatggactgcaggaggtgggggagtatgatttcagaatgaaactgttccacctmagatcaagtattagttagattgtcataaggagcacaacctagaccccttgcatgcacaggttacaatagggttggtgctcctatgagaatctaacgctgcagctgatctgaaaagaggcggagcttaggctgtattgctcacttgcccaccgctcaccttctgctatgtggccaggttcctaacaggctgctgaccagtaccagtctgcagcctgggggacccctgtcctagatgatatctccagtcctttcaggccagctctgccagcactgtgcaaac

SEQ ID NO: 696350 - DNA, 655 bp, Homo sapiens
atttgaataaatgaaactacagctatttgttgtccaaggtttccaatatccttttaaatgtattatctcacttaagacttgtgaccatastatagaatagatattttgttttgttttgtttttctgagacaaagtctcactctgtcgcccaggctggagtacagtggcatgatctcggcttactgcaacctcaacctttgcatcctgggttcaagtgattctcctgcctcagcctccttagtaactgggactacaggcatgcacccccatgcttggctaacttttgtacttttagtagagacagggtttcaccatgttggccatgctggtcttgaactcctgacttcaagtgatccacctgcctcggcctcccaaagtgctgggattacaggtgtgagccatcacattgcccggcctagaatagatatattcccattttagagatgtgagacttagagtttagagagctcaagtgactcacttaaggtcactgttaatggtgatgattgctgtatacaaaattaccccaaagctttgtggttaaaagcaacaaccttttcctttggcccacagttttgtgggtcaggaattcgtaaagggcttggctgggcagttcttgcttcggggtgtctcatatagttgtagccaaacacca

SEQ ID NO: 696351 - DNA, 655 bp, Homo sapiens
atttgaataaatgaaactacagctatttgttgtccaaggtttccaatatccttttaaatgtattatctcacttaagacttgtgaccatagtatagaatagatattttgttttgttttgtttttctgagacaaagtctcactctgtcgcccaggctggagtacagtggcatgatctcggcttactgcaacctcaacctttgcatcctgggttcaagtgattctcctgcctcagcctccttagtaactgggactacaggcatgcacccccatgcttggctaacttttgtacttttagtagagacagggtttcaccatgttggccatgctggtcttgaactcctgacttcaagtgatccacctgcctcggcctcccaaagtgctgggattacaggtgtgagccatcacattgcccggcctagaatagatatattcccattttagagatgtgagacttagagtttagagagctcaagtgactcacttaaggtcactgttaatggtgatgattgctgtatacaaaattaccccaaagctttgtggttaaaagcaacaaccttttcctttggcccacagttttgtgggtcaggaattygtaaagggcttggctgggcagttcttgcttcggggtgtctcatatagttgtagccaaacacca

SEQ ID NO: 696352 - DNA, 648 bp, Homo sapiens
tgacgtggtatgaaaacttaagcctacctgagcccccagtctaaggttcttctatgctctaagcttccagagaggagaccaggataattattatttattttgaagagagcaggctagttctggaagtcctaaggaagcaaaactagacagatatatgggtaatgagtatggtcagggatgggagaagatgaagccttggtttggaaacgtcttcctctactgttgactgtgtgacttgtgctagttacttaaacattttaagcttcagttacattatctataaattggggataatagcagtacttataaagttattgctaagaataagtgaaataatgctcrtaaagcttttagctcaatacctaagacctagtaatggttcaataaattatataaatgttagaagtagtaataatattttcttaatattggaagggggtcattgcagggtaatgagttccccatcatagaaaatctcctgagaatagatgaccacatttttacaaagctgtagaagagaggggaagagaagcgtttggtttgaatcatgatattttgttttggagccatattatcaaactgtaaattttaaaaccacttaattttttaggacttttagaatatgtttctttattccttagtacttca

SEQ ID NO: 696353 - DNA, 636 bp, Homo sapiens
ttgttcaatctccacaggctagtaagtggcagagttgggattcagccaggccaactggctccattgtttgtggtcttggccaattctctaccaggcgtcagcagattgcaacccatgggccaagcccagcccccaccatctgttttgtttttcaataaagttttattgaaacacagccatgctcatttgattacttatctatggctgcttgcactttacaacagccaagtgaagcatttgctacggaaacttacatggatctctcctcgctccacaccgctgcatggcaccctctgggttacagtgatgccatcataatacaatttcattttttgttccccaaggccaaaaatatctamtatctagtcgtttaccaaaaatctttgacgagccccattactctgtcactagatttcagactcatgaagacaggagcaaaatcctgcttggtctcccactgtttcaccagctcctgcaacagagtctatcagccctcacactgcacagttgcttaaaaaaaataaaattatgtatacatagaaaagaatcaggccgggcatggtggctcatgcctgtaacctgagtactttgggacgccaaggcaggcagatcacttgaacccaggagtttgggacc

SEQ ID NO: 696354 - DNA, 651 bp, Homo sapiens
ttccacaatggctatattaatctacattcccaccaacaaggtataaggggccccttttctccacgtctttgccagcatttttttttttttttttggtcttttgtgtaatcactttctytttggttatttcttttacctctggccgagccaagatgagatgtcacttagcatttcatcatgagaactttactgggttcctggaagtaaaagacattaagactgtggctgtcataagtttctcactcttatctgagtagcctccaaggattcatcaaaattgttatttaaatgtttgtacctgtttatagcgccagtgatttctgtttcaggtaagcagatctcaactgtgactctctggatttatctgtctcactagattaggaggtggctgttcaccttatttttctgataagcccaaataaaatcattgatgttcagttttttgagcattttctcattaaaatgatagaagttgaccatttcttagcacttcatatgtcacagctgaaactagaagatcccataggcttttttgtttttttattcttcactatactttcttttttcatttaattgactttgataacagaggctttggtcttgacatttcatattcactatttacattctatatgtttgtaatttatataa

SEQ ID NO: 696355 - DNA, 651 bp, Homo sapiens
ttccacaatggctatattaatctacattcccaccaacaaggtataaggggccccttttctccacgtctttgccagcatttttttttttttttttggtcttttgtgtaatcactttctttttggttatttcttttacctctggccgagccaagatgagatgtcacttagcatttcatcatgagaactttactgggttcctggaagtaaaagacattaagactgtggctgtcataagtttctcactcttatctgagtagcytccaaggattcatcaaaattgttatttaaatgtttgtacctgtttatagcgccagtgatttctgtttcaggtaagcagatctcaactgtgactctctggatttatctgtctcactagattaggaggtggctgttcaccttatttttctgataagcccaaataaaatcattgatgttcagttttttgagcattttctcattaaaatgatagaagttgaccatttcttagcacttcatatgtcacagctgaaactagaagatcccataggcttttttgtttttttattcttcactatactttcttttttcatttaattgactttgataacagaggctttggtcttgacatttcatattcactatttacattctatatgtttgtaatttatataa

SEQ ID NO: 696356 - DNA, 651 bp, Homo sapiens
ttccacaatggctatattaatctacattcccaccaacaaggtataaggggccccttttctccacgtctttgccagcatttttttttttttttttggtcttttgtgtaatcactttctttttggttatttcttttacctctggccgagccaagatgagatgtcacttagcatttcatcatgagaactttactgggttcctggaagtaaaagacattaagactgtggctgtcataagtttctcactcttatctgagtagcctccaaggattcatcaaaattgttatttaaatgtttgtacctgtttatagcgccagtgatttctgtttcaggtaagcagatctcaactgtgactctctggatttatctgtctcactagattaggaggtggctgttcaccttatttttctgataagcccaaataaaatcattgatgttcagttttttgagcattttctcattaaaatgatagaagttgaccatttcttagcacttcatatstcacagctgaaactagaagatcccataggcttttttgtttttttattcttcactatactttcttttttcatttaattgactttgataacagaggctttggtcttgacatttcatattcactatttacattctatatgtttgtaatttatataa

SEQ ID NO: 696357 - DNA, 2327 bp, Homo sapiens
ttgttgttgatgatgatgttttcacagaaattttagaatatactagataaaactcagcatatttcacaaataaaaatataatgggacatatagaaagcaatttatttgagtttctttgcttgataagtgcgttcagacattgatgatattagtgcttttgaagtcactacaggcggagttccactaatccttatagatactcttttaactttatatatgcgttatgtgaggaagcttaatgaagaaggagggaatataagaaagaataatatgcactttaataaatcatatatccttgtgctatttaaatgtttcttcaaggttgattgaaactttaacctcagtctcaataaaaaagaaaagcttcaaatttgctagaccttgaatttttacaacactatgttgaattatgcagtgatcagtcaattattcatctccctcagcctgagatagctgtgctttgaaaagcatgcaaaaatggggctacagaatgtgatgctgtgtcagcacatttcactcaggattgcttacaagacaaatttttgtttcaacattgattctagttttcttgatgtttgcttctaataaggtacctgttacaaatcaatttcagtttgcatgctttagtttctgattcaggatgatacactgccaaaatgacattactgcctttccgcaaatttctacacctgtgtgagacatagagatctttcacatttcgaggtagtcttaacacgggaccacaaagcaagcctactttttagctaatggaataagctagaattgatgaactagttctaaactccggaagagatttatctgcaatagttgatattcttagaataatgtttcatcaataaaataaatagaaagaagaatgcagaaatataagcgtgctggcttctaataaatccattggcaatggaggaattctgtttgtgaaggagaaggagataaatattgcaggagtaatgaagggcacggactttggaatctgaatccttggttcaaatccacgattctgtcatctaccagctctttaacctagggcacttagatttacctctttgagcctcaggttcttcattattgtaacggggaaagaacacttatctcataagatagttatggaaattatacagtataatgtatgttaagaatttgaagcacaatgtttagcccaggtgagtactcaaactaattgtacccatttttttctactggtagtaagagtagagaatggagattcacagagatatttggaccacaggacacactttctaaagtcagtaaaattgataaaagattccctcctaatgcattaacaagtactagccaaagtactctttcaaactcctttagcatatttacatttaataggaagtatttggaaatacaaagagtatctggtattagctacttgctttggttccccataatgacagctctgcctttttcgtaattcccattgaatgtagttaccttgctctgcttttatggggatctttccaacataagtagaatattcagagacccatcatgttttatgaaattcaaaactcagttgatttcctatttaaagtgaatacatccaagcagcccaaagttgacaataaaattgccccacatgttcaaggaaagctggctgaataaaaaatctgggacctattcatttcaggcacacgatgtacacacagttttagttttaacatttaagactttattttacaagctaaattttttcagtttaargacaatacttaaaaggtatacattatcaaattgtatataacacagttcaaaattagcaaagaaaagtaaatatagtaaataattaatttatcccctatagtaaacaaaactagctactgcatttctaaaaatagacatatatgcttgccatagaattaaaagtactacaaaccatttttaccaaatacataaaatattgaatgttctagatacatttttattcctggttaaatattttaaaaataacataaaccaactctaatattacaaaaatatgtgagaccaaatgcataccataaattcaggtggaaagaacattcgggaacaacaaaaacaacaacaaattcaagtgtagcctttttactctatggaatatcagcttacatgcatcattgcttttaaaggtataattctctctggatagaaatgctgagtaaaaatcagtgaggcatgggttaatgaatctaggatcaaaggaatctgggcatatgctccattaatcttaaaaaagctaccgtgccatttattcaaataacatgttagaatatttaaaacttaaaaaccttcatggtcac

SEQ ID NO: 696358 - DNA, 1411 bp, Homo sapiens
ggaaaataattagtcacatgggaaccattatgacagttgctattacaggtgaaacagttctgaataaattcaaaagatgaggaacgaaagtattatattgtatattctgagttttttttttcttttatacctcagacatacctacagttgataaaatggcaaggcttactttgataagtaaagaactgcagacagataatatctacagaggtgatcaaaaaggaactagcaatagtaactaatagcagcacttggagaaattctatggtccctccaaaggaaagttggccttaatgctggaagtaagcaatatatttattgacgtgkcaaaagaaaaggcaccatataattctgataaataaataaaatttatatgttcttaatatattcttttgctcaatccttgtttatataactgaaacctcagggcttcagaactacataaaacacctatccttttcatttagcatttcctataaagaaaatcacttatagttaaaattgtatgtcacacaaagcattttcttaacaagcaaacaaataaaatgtttttctcatcctccagattttctataaaaatgtttgtgtctcctaaaaagtttggagcaatgtgatttcatatgactatatgttcttgtgccactgttgtttttacgttatttagcgtctgcagatataatattattttcatggatgaaactgaccatccacctctttattcatccttccctcaactttttccaagaataataataaaagaaaaaagatgacccttgaaaaaaaagtaattagcaaaaacgagttttgctgcaaaatttatttcatataactgaaaaaaaagaacaaaaaacctagaagaaatacagcaagtatgctatcattactgaacctaatagaggtcccataatgaactgcaaagtttgaactacaaaaccatttgaatccaaactttaaaacagaaaatatattaacatacatttccctatctggtcagaataaactttctgaaaatggataaatactgagaattagaaaaaatattaataagcctaatgtgatagatacatatttagtgtacaggatgaccaataaaaaaagccaacataaactcttcgggaagctcttttgttcataatccctggtaataaacatttcaggtgccaaaagaatgaaatgaagaagcttgaaatctatactttgcacagaaatctatttggggggaaaaaggcaaatttaagtctaaaacaagtagcaatttttaagaagataaaattagaacaaactactgaagtctagaaaccaaaacgttaagtttgtagatgaggaatcagaagcccagtgagattaaatgacttcgttaagggcatgggcagcaaattcattaaaatccaaatttctcagtccaagttca

SEQ ID NO: 696359 - DNA, 1376 bp, Homo sapiens
  misc_feature 842: n = A,T,C or G
ttttttttttttctgtagccttaccagcatctgttgcttttggttttcaactttttaatagtagccattctaactggtgtgagatagtatctcattgtggtttttgatttgcatttctctgataattagagatgatgagcatattttcatatgtttgactacttgtacttcttttgagaagtgcctgttcatgtcatatgctcactatttaatggggttgtataaaggtgatgatttgtttaagttccttatagattctggatattgaacctttgatgaatgcacagtttgcaaatattttctcacaatctgtaggttgtctactcactctattgatagtttctcttactatgcagaagctctttagtttaatttggtctcacatgtcagtttttgtttttgttgcaattcctttggggacttagccaaacacccttatcaacagaaacatattttaattctaaggaaaataactcctaacctggaaaattttttacttagaaccctgaaagtagcaatcttgggtactttctcctgcatctacttttgaagcactgaaatatttaaacactaacatccttaatgattggtaggggattattttgagtacttttctgtttatttattcagtcaacttctcttctaatgaattaaatgtgtgttgggaagggtgtgcattagggaagaatgtcaatttttttctacctacctcctttccccagtatctcctctgggaattgggacataaagttggggtccactcttttatcattaagagttttcttgttctttgcttacccaccattttagagaatgtgactgcacttcaatgagaaaaattntgcagaactccgttattgtgttcatatttgtcagaatttgggaaggaaatctgtgatcttctattctgcaacttgtacgcagaatactcaacattttaattttaaatagagaaaaaattgaagtcaaaatcattgcctactttcctcaaattttcccaggaaataaaagagtgtttctaatttacagaaatcattaaattttgtagtgaatacagttcagtgaaacttttattaatacatttaagaaaaacataaccaggtttgttttgaaaaatatataaatttactaataaatattatttaggaacttcttgactgttgcttccatacatgactgtgatttttgagagaaaaaataaacatgaatctaaatattaaaagtcaaaatataaaatttayaccaaatgaaatgtgaaaactctagacgtaatttatatttttatacctccactgagtcaattatgcccaagcactatagtctttacttggattaagcaacaataaaaaataattactagtactttactcagtact

SEQ ID NO: 696360 - DNA, 1888 bp, Homo sapiens
ttaagaaagaaaagtcagactgcctctggtagatgttagcttttttttctgtaaaatgtactaatatggaaggcgggcaaaattccttaacctcttcagatgaaaaagtcctttacgtcttaggagctatagtcatgtttaagagtcttagagtctcttactctcttttctctctctctctttttcctttctctctctctttttctgacttatctctttttctgacttaagtgttttgtttttcgtttttggtttttcagcttttactttgctcaggccatcggactaggctactatgtgccccgtttagctcccaactgagccttttattcttaaccagtggattggctagttcccaatttctttctgtttttgaatttttttttcctttctctgctttgtctcagctggtctgcaagcctttagagacgactgcctcattatttcatgtgtattggattcagcaaatattgtaactgcaactgttgcctatttagggttcctctatttcgctggcaagaagctgttgcatcatgcacagctgaaatacaaggctcacaatgtctatttactcggtctttttttgtcagggtaaaacaaactttgactacagtgctttccagtagtttttacatggctgttcctgtgttaaatagaagaatatcacaatttttaaagtaatttccatggattccaagtcacatttcacatctaactccacttaacaggattgaaacacgcaggtgaatacaaatgggggaaacttaagctataagagcagagttagcatactaagaaagtgctggaataaaatctaggtaattaacaaaatggccatactcagtgaaatagccacagctgtgaccaggaaaggtggttcttacactggtctgttcagtctcctttgtgaacagacccaactgttgctagtgagtcaccagtattcaatatatgcaatagcaacatgtctacagccacagttccttattccatgcatsaaagcacactgaagttccggcagtctgactgaaagatgactcatctaccaagactcaacttaagcaggacttcctcagtaaggcctcctctagtcttcagcaaaagtaagtgcttctgcctcagggtctatggaagctgagacataccactaacactacatctatcacatactattgtcattgtcttcacactgatgaatctcatccataggacctcagttggaggtgaatggacaataatcatgctaaaaacacctgcacaactgcaacaagaaatttttttcttggtctttctgaattttgcctgctaagacctcctacttacccctacacacaaatttgtcttttaactgccctttgcacatatattggtttaatatttttcctttgctgctgtgctacctgaactgcaaaattgaatctctggattacatgttatagtaacacaatctctaatattttcaggtgaataaattttttctctcctaaaacaatttgaggataagccggacactataaaaacacacatatattacagggcctcagtcctttatctacagttctaaaatctgaactctgaaaataaaaagtttgttttgctttgtttttgattatttttgtttatgttgcttttattttttgttaactctcatttggcagcacactgtaatgtcactggaactcatttgctggcaaaaccaaaccaaaactgatatgtgaatagttatggtctttatttattctgtggtatttgaaaagacatattttatataaagaaatagtaatgtgtttaattgtaagatgctgtccaaaccctactgagatgttttatatcataaagtacattttccttgttaccttgctaaaatccaaaggattccattttccat

SEQ ID NO: 696361 - DNA, 400 bp, Homo sapiens
taaactcaactaaatgtgcccatgcatatatgcgtatgtatgtgtgtatacatactattcattcaggagactagacatatactaatgttttcacaagtagatggaacagccataaaaaatttgatacgttaaaaaaagcactttgtaatcccttctaagaatatacagaagccttgtaattgattatgatcactcatatttaaggattcattttaagttctcagtgtgattatagtaataattgaattttttcttctgcagcataacyaaaaacatacttagacttagatctcatagatttaattaaattgataagcaagatattgtattctcattaataggaaatgccaatgctctgttagactttctcataaaaagtagtcttgtctttgttttccat

SEQ ID NO: 696362 - DNA, 690 bp, Homo sapiens
tgcctttggagataaatttattgactgcatttactggaagacagccctttcacaaagggaatgtaaattttatgctgaaaaatttatcacacatttttttccctgaggaattttagtactaaattaattctttattgattaaagtagcaaagcttttttggcatagtttctaaatatcccttacctaaaagaccattttgataaagccaaaatataaaacttaggccaarcaaccactaccacaatgccccaaattgtgcataagtggatggaaaccactcagtatttctgcatgactatgcacggcctgcccgcttggtatgcattgctccacagaggcattttaagactcaaaggctcttagcccagtgatagcctctctgtggcatgttttccagatcttgggaatgagcaggaatatttacaggcaagtcatagcataacatggcaataaaaaaacatacttaatggaaaaataccaaacacacatctggcatcttctaaacctgttttcctgacagaaaactcaaacacagtaatttttagttaaaaatcagacatttacaaaccccaaatttataaaccaacatgtcattttactaataacaggagatactaaaatgtcaaaatacttcccacatctgaattataccttccctaaactaggaagtagtactcccagatgtttgt

SEQ ID NO: 696363 - DNA, 1812 bp, Homo sapiens
tccaaaaagctgatagttttgactgaaaacttccagctgactgcccttcctgaaatattccttgtacttaacgttttgcttagctagttttttccttttctctatttttgctgaaagaacaattgggatgtggccaagctggatgattcgggagactcagggagaaatgttctccacacaaaatagtcattgcagttcttctgggaaaccactggtggttcatttcagtgtgtgtccaaattgttattgtcttgtcagacttcaaaacctttcgtattttgagatgggaaagcatctaaattggtccatggaaaattagctgaaatgggagcggattatattcccagtcaacagcaaaagcacatcatcatgataaaggaattatatataataaaaagttacagtatctaaagaagttgcaaagatagacaagtcttctcagcatagctcattgggtgggacttgacttaaccaatccactgatttttttttcctttgtttccaaaatgcgatttttctactccaatagtgagagtattgtaaacgttaaattgtgaactatcagtgagaataatacagtttgtaatagattcactaaattagggggaaaaaataaatcattcacatagccattaaatcgcaaacccaacctaaaagctattacaaataagactaagatgcattgcaaggccaggtgtggtggctcacgcctgtcatctcagcactttgggaggccaaggccggtggatcacctgaggtcaggagtttgagaccagcctggacaacatggtgaaaccccgtctctactaaaaaatacaaaaattagctgggcgtggtggcatgagcctgtaatcccagctactcaggaggctgaggcaagagaatcgcttgagcctgggaggcggaggttgcagtgagccgasatcctgccactgcactccagcctgggtgacaaaagtgagactccatctcaaaaaaaaaaaaaaagatgcattttatttgttgctgacatggtaagtagtttagagaagaaatgtgccagtgtaactgcattatatgagtagtgagtaagtaagcatctgctgtgtgtaagactatatgctagttacactatggttcattatatacacaaataaaaactgatagaaacaatacagaagttggataagcttcccaaggctttaatagctagcattgattcaatagtagtgttaactcaaattcctcaacaaactttacaaatatttcctgaaaggagagccagaaaataaccttaaaagaaaaaggataagaaactctgtaaagtaaatctataaaacctaattcaattcaatggttcagaaaagtattgttgataaaagattgaactcattcacaacttaatcaccaatattatgcaaacacctatttacattgacggattacagtcattgccttgtagatattagctgcccacttaccctctgagcttcattttccttatctatgaggtgggggaaaatcagaatgcttgccccatagaattagcttgaggactaaacaagtgatacagatcaaccagtaaatcaagtgtcttggctacaggaagttctttcgaatatggaattcagatcatttctttcctatgtcttcccaattgcattgagaataaaacccaaacaccgtatcatggcctttgatgccctaaacatctggcaattgtccatatctctgtcctcaccttatgtcatattcccttcatgcagtgtgtactagtctcaagtcttggctgtgttctgataccctgaatccagcaaagaaatgctcacctca

SEQ ID NO: 696364 - DNA, 1317 bp, Homo sapiens
cgctgtactcatattttggctccaggatttaagctacgtgtaccagtgcgtctgaatctcccagttctgtatgtagcctctgttggggcagagacatcctcaggggttaattgttgacaaggtaccactaaaaattgaggaacccacatctgcagttttacagcaaaagattctcgagtgatattgtataaaatgayctttaactctcccctgtaaccactctgaattataccaccatacattatgccgttcattgcaagacttgaatgtgttttaatccattcatccgcattcaaatttgcaagtatggtggaaattttggcctgttgatctgtctgctgattaaatagtctgtcgagaaagcagagacacatgagcatcaacatgaaaaacagtgataatgatagtgtgcaccaggattcaggtatcttcccaggagtgttttccctctttatgcctaattaaccatttgtaaagataaaatagagaatgaaggtggtgtcggtgagattggacatcaaaagacacaaaaggaatgtgacatggtgacctgagaaaggaatagagagagaaattaaaatagacaaaaaggggaatcagcaaggagatggaggaggcagaatagaagaggggactcaacaaacaggagcagttggtgcaacagagggtgcatcgcatacttgtacgacgcttctttcattttctagttacttttccttttaaatttgtgtcagatttagttaaggtgtcaacgtttttttaaatctttttatatactgaaaatattctttgctgtttagtaaataactttcagtatttcaatttgctcttgataagagtattaatttttaaatcaacagacaacattcagtaaaactagttagtctaatatgcagcagcttcttctcttccacatgtgatttgggaaattaatgcactgtgagacgaaatttccaagtctatgatgtctttaagttccctttgctctttttttttttttagcagatattgaagaatgggctggctgggcatgaaactttcttccaccaagaccatcttttcatgataaatacattgtcctgagttatttttatagctaatcctctttcttgtttccaattgtcaattattacatattttcaactttataattttggaagttcgatgtgatttctcaaaaaaaaagaaagaaaaaaagaaaatgcttgagtttaatgtgattagaataacagagaagtttctcctggtcaagagtataaaatttggtctgagacctttagccagtgctggtgactctctgctggcctgtcctcatcc

SEQ ID NO: 696365 - DNA, 1317 bp, Homo sapiens
cgctgtactcatattttggctccaggatttaagctacgtgtaccagtgcgtctgaatctcccagttctgtatgtagcctctgttggggcagagacatcctcaggggttaattgttgacaaggtaccactaaaaattgaggaacccacatctgcagttttacagcaaaagattctcgagtgatattgtataaaatgatctttaactctcccctgtaaccactctgaattataccaccatacattatgccgttcattgcaagacttgaatgtgttttaatccattcatccgcattcaaatttgcaastatggtggaaattttggcctgttgatctgtctgctgattaaatagtctgtcgagaaagcagagacacatgagcatcaacatgaaaaacagtgataatgatagtgtgcaccaggattcaggtatcttcccaggagtgttttccctctttatgcctaattaaccatttgtaaagataaaatagagaatgaaggtggtgtcggtgagattggacatcaaaagacacaaaaggaatgtgacatggtgacctgagaaaggaatagagagagaaattaaaatagacaaaaaggggaatcagcaaggagatggaggaggcagaatagaagaggggactcaacaaacaggagcagttggtgcaacagagggtgcatcgcatacttgtacgacgcttctttcattttctagttacttttccttttaaatttgtgtcagatttagttaaggtgtcaacgtttttttaaatctttttatatactgaaaatattctttgctgtttagtaaataactttcagtatttcaatttgctcttgataagagtattaatttttaaatcaacagacaacattcagtaaaactagttagtctaatatgcagcagcttcttctcttccacatgtgatttgggaaattaatgcactgtgagacgaaatttccaagtctatgatgtctttaagttccctttgctctttttttttttttagcagatattgaagaatgggctggctgggcatgaaactttcttccaccaagaccatcttttcatgataaatacattgtcctgagttatttttatagctaatcctctttcttgtttccaattgtcaattattacatattttcaactttataattttggaagttcgatgtgatttctcaaaaaaaaagaaagaaaaaaagaaaatgcttgagtttaatgtgattagaataacagagaagtttctcctggtcaagagtataaaatttggtctgagacctttagccagtgctggtgactctctgctggcctgtcctcatcc

SEQ ID NO: 696366 - DNA, 1317 bp, Homo sapiens
cgctgtactcatattttggctccaggatttaagctacgtgtaccagtgcgtctgaatctcccagttctgtatgtagcctctgttggggcagagacatcctcaggggttaattgttgacaaggtaccactaaaaattgaggaacccacatctgcagttttacagcaaaagattctcgagtgatattgtataaaatgatctttaactctcccctgtaaccactctgaattataccaccatacattatgccgttcattgcaagacttgaatgtgttttaatccattcatccgcattcaaatttgcaagtatggtggaaattttggcctgttgatctgtctrctgattaaatagtctgtcgagaaagcagagacacatgagcatcaacatgaaaaacagtgataatgatagtgtgcaccaggattcaggtatcttcccaggagtgttttccctctttatgcctaattaaccatttgtaaagataaaatagagaatgaaggtggtgtcggtgagattggacatcaaaagacacaaaaggaatgtgacatggtgacctgagaaaggaatagagagagaaattaaaatagacaaaaaggggaatcagcaaggagatggaggaggcagaatagaagaggggactcaacaaacaggagcagttggtgcaacagagggtgcatcgcatacttgtacgacgcttctttcattttctagttacttttccttttaaatttgtgtcagatttagttaaggtgtcaacgtttttttaaatctttttatatactgaaaatattctttgctgtttagtaaataactttcagtatttcaatttgctcttgataagagtattaatttttaaatcaacagacaacattcagtaaaactagttagtctaatatgcagcagcttcttctcttccacatgtgatttgggaaattaatgcactgtgagacgaaatttccaagtctatgatgtctttaagttccctttgctctttttttttttttagcagatattgaagaatgggctggctgggcatgaaactttcttccaccaagaccatcttttcatgataaatacattgtcctgagttatttttatagctaatcctctttcttgtttccaattgtcaattattacatattttcaactttataattttggaagttcgatgtgatttctcaaaaaaaaagaaagaaaaaaagaaaatgcttgagtttaatgtgattagaataacagagaagtttctcctggtcaagagtataaaatttggtctgagacctttagccagtgctggtgactctctgctggcctgtcctcatcc

SEQ ID NO: 696367 - DNA, 1422 bp, Homo sapiens
attwtattttattttattttaatttattttattttgttttattttattttaatgtgactagattttgcctcactccaggctggagtacggtagcatgattatagttcactgtaacctcaacttcctgagttcaagtatcctcctgcctcagcctttctagtagtgagaccacagttacatgctataatgtcaaaataatttttaaaacattttcagtgacaaggtcttgcttaggcttgtctcaaacttctggccttaattgatcctctggcctcagcatccctagcagctgaaatttcaagtgtgagccactgagcccagctctttatttttataaatatttatctctttagttttttctgaagcattttcaacaccttcacctgaactttcaggctttcaactcacagttgattttatccattttgctattcatcctatttattctattgcttatatacttttgtaacatatttaatattttgagttttaaattcttgatacttatatgtatgtatttttagttgtctcttttgcaaggctgcgattctctctagagaagagaatgggctctatgctttcttgagaaaagcattttataacatgggagtaaaacagaccctgtggaaaataaaataaaaggcattttaatcatgattttttataaattgctatttgggagacacaaatttagcaagaagctatatcatgttccattcagatgaggttagggagggacttataaagttttactgcaagtttacacaagtgaaagattttagcacagtctatgatggacaatgtttgattgccagcttagactgtatctaggcaatcatcagcttaattcagcacagctttctcttcaggaggtttgtgatcaggctcagtataaacaatccaagtcaaatgcagttgcctttttaggacatctgtaattttcccagttcgaacaggtaaaattccacctgggtgtgtatgagtattaattcaactcctcatgtcctcctagttgtctttagagacctctcaaataactatctccattttggatttcttttaattagaaataaagagcgcaaggattatcactggttgggaatatagaaaaatagtgcccacctgtgattcatcggaccccagtcagagagaaaaggccaagatatgcctgacagaaaggcttgaggacctttaggtaatttattcctcaaaaagaattggttcacacctgtaattccagcactttggaaggccaaggcgggcagattattggaggtcaggagttcaagaccagcctgacaaacatagtgaaactaaaaatacaaaatttactaaacatactaaacgtacaaaaattagctggacatgaagctgggtgcctgtaatctcagctacacagaagcctgaggcagcagaatctct

SEQ ID NO: 696368 - DNA, 679 bp, Homo sapiens
atgagagtgaaaacatcaaaagtggctcctttgaaaagcataataaagaattttaaaaaaagagttagargtgattataggatgaaactgagtgttcaaaagttaaggacatactgtgaattagaatagccctgttttagtgtcagatggcttgccaaaggcactatagaaaaattggccgtgtgttttaaggtggtgactagggtcagagaacagccaggacattcagacctagtctttatattgactcatggctaaatgaatgcagccctgcctagcagtttactgtagaatgctcgcagctcacggcaagagaaaatcagctgctctggcagctacagagttaaaaggagacacagaggcttgtagcacctcccagccaaaagtgaaagtaaaatcagctgccccagcagctgaagacaaatgaaaaaatctcagaaaaggcagaaaaaccggttttgtcacaaccacagaaaagaatagagaccgctcctccttacattccaatctaccccctttaccaaggtaactgtccctaaggagttaagttcaaatggatacatgctgccagtctcacccgagaaggtgaaatgagagcgaaaatcaggcaggccgtctcaggtctggtcgcgcataagatatgctcatgcctcttaagaggacaggaggacccccacta

SEQ ID NO: 696369 - DNA, 1138 bp, Homo sapiens
gggcagagtccaagggaaaaaagagcattctgacctcctaggccagggctcaacactctcatggggtttgttttgggaatgagtccctgagatcctggggatttttgccaattttctcgtcatatgaagcaaactcatgtctgcatcattagamttccacaggtttgtgcatacacacacagacttctcaggctaaaggtcataagaggagttaacgctgatggagtgatgagaagaaaaaagatagaggataggggcagctttgtcatggggtagaagcaccccatcttctggtaacatgcccaggacccataacatgggcaggggaaggcaataggctgatggcttgagaggctcaaggcttccatggatctgactgggctgcagccaacaccaggatagctttccaaggacaaaaccttactttctccattcattaatctgcataattaaaatggtaaggaatccccctacacccaatatggagaggaatacagtagtgaaaaccttcaatttttccctgtacaaattgacataattgaactgtgtgacccctaaatttgaaaggcttaaagaagtgagttgaccttgctgtctatcaattaccactgtactctcagaactttggaaattgctctgtgtcctccgaaggtctttcagagcagaaagtggcctaggggtgtgcgggactgagcactcaggctggtgtagaatgtgacagatcctcagaccactgctctgggatccaaggagaagaccttctcggtcagagctttggggatcttttttttggagggggcgatcttttttgaaagtggagacagaatcgttttccagggctccctcatttgccctcctgtttcatagtatttcttttttctgtctttctttctttctttctttctttctttctttctttctttctttctttctttcttctttctttctttcttctttctttttctttctttcttctttctttctttccttctttttctttctctttctttctttctccttcgtttcttttctttcttcctttctttcttctttctctttcttttgttcttccttcattccttccttccgtttctttctttcttctttctttctttcctcttccttcattccttccttc

SEQ ID NO: 696370 - DNA, 1906 bp, Homo sapiens
cgctacttaaagacactgcaaaagagtttaaaagaaaaatgttccaccttgtggaaatatccaaaatcatgaataagaatcacataagaatttcataaacataagcttggtaccaggagtagaggttgactagaaaatcttccttttagttgcacttgttacatctttcaaagtacatgattagattaaactccttaaagtccccacctcttataattgcattgactaatttagaattcatctctgaataaaaattaagggtagaagcattttatattccagaagatatgggtgaaattgcaaaatctttgcctatgtgtcttcatccatagaataagacaacagtagttctcacggtttctattttatagaaaaagatccaagatacgagaacccaacccgtgccagacaaataatagttttcacttttttttttttttatttctgttaaccaattgcatacacagtcaaaatcaggattacttcacgggcaggcaaactgcagtcacttacagaaccacagtcagaagggcaccatgcttgatttaatgctttactgtcactatcaaaaaatttttaacaatttttaaacaagggcctttaagtcttcatttctcatttggcctcaccaattatatagctagtgctggtcaacataactaatgtatgaactctcacttttatgtaatccagggcacatgattttaggcttgttaatgaagtttgtgattgccacttttcacatattctctataggataagaaaatatgtatacatatgaagtgtctgatggattttaaaggagtggagtctgtgctttggtctaaaagatttgaaatctccctgaagatttagggtaattttaggaaataacaatttacaatttataaacttgaacaatgtatgttgacggcactttgtaatccgaaaggtgctctgctggaaatactttatataagtaatgaagatgtaagaaaagtttatgcaatttctcatggcaaaacagaacacttgaatattagtaaaggaagtcacaatatgcacaatatgaaagttatggaatttgattttaatagtaatagaataattattcatttagtttcatcatgtagcaaatgtctactactgtgtgtatatgcttttaaaggtcccactttgtaaaaagcacagtacattagagggcacaacttcttatctacctcatttaagtcttaaaggatcaggatcagatttttgaattggatctcacaagaaattgatggcaaatacagaagagaggagtgtttcattctgtaagaaatccatagtaaatgatttttaagaggcctctttctaggtcagcactttgcacgtagtttttgaaagttctagttaaaatatgctrcaaacattaaaataataaatgacattaatttggacatatttcaaatatgttttatatattataactgtataaaacatgctatacaatatagatagcattgatatctatatccaaaatcttctttaacttatcactctatataaattataaacaagatctgatgacatttgaacaaataacctgtgacagtagttattctggcaatttccagaagtaaattgttgcagaaattaagtaaaagggtgtttattattacttttacaaaagttactactccattaaaaacagaaaatagcagaaagatttttaaaaactgccatgtatattgcagcttgttttggcctgcctgtctcagactagtaaaaggaatgttaaagcatttacaaatgaacctccaatcattgtctatagtagctctctgaatgggctagccaatgtggtaaaatgagacaggaggggaaaaaaggagaagcagaatgggcctatagttacacctcaccacaaacttacaatagaccctta

SEQ ID NO: 696371 - DNA, 1906 bp, Homo sapiens
cgctacttaaagacactgcaaaagagtttaaaagaaaaatgttccaccttgtggaaatatccaaaatcatgaataagaatcacataagaatttcataaacataagcttggtaccaggagtagaggttgactagaaaatcttccttttagttgcacttgttacatctttcaaagtacatgattagattaaactccttaaagtccccacctcttataattgcattgactaatttagaattcatctctgaataaaaattaagggtagaagcattttatattccagaagatatgggtgaaattgcaaaatctttgcctatgtgtcttcatccatagaataagacaacagtagttctcacggtttctattttatagaaaaagatccaagatacgagaacccaacccgtgccagacaaataatagttttcacttttttttttttttatttctgttaaccaattgcatacacagtcaaaatcaggattacttcacgggcaggcaaactgcagtcacttacagaaccacagtcagaagggcaccatgcttgatttaatgctttactgtcactatcaaaaaatttttaacaatttttaaacaagggcctttaagtcttcatttctcatttggcctcaccaattatatagctagtgctggtcaacataactaatgtatgaactctcacttttatgtaatccagggcacatgattttaggcttgttaatgaagtttgtgattgccacttttcacatattctctataggataagaaaatatgtatacatatgaagtgtctgatggattttaaaggagtggagtctgtgctttggtctaaaagatttgaaatctccctgaagatttagggtaattttaggaaataacaatttacaatttataaacttgaacaatgtatgttgacggcactttgtaatccgaaaggtgctctgctggaaatactttatataagtaatgaagatgtaagaaaagtttatgcaatttctcatggcaaaacagaacacttgaatattagtaaaggaagtcacaatatgcacaatatgaaagttatggaatttgattttaatagtaatagaataattattcatttagtttcatcatgtagcaaatgtctactactgtgtgtatatgcttttaaaggtcccactttgtaaaaagcacagtacattagagggcacaacttcttatctacctcatttaagtcttaaaggatcaggatcagatttttgaattggatctcacaagaaattgatggcaaatacagaagagaggagtgtttcattctgtaagaaatccatagtaaatgatttttaagaggcctctttctaggtcagcactttgcacgtagtttttgaaagttctagttaaaatatgctacaaacattaaaataataaatgacattaatttggacatatttcaaatatgttttatatattataactgtataaaacatgctatacaatatagatagcattgatatctatatccaaaatcttytttaacttatcactctatataaattataaacaagatctgatgacatttgaacaaataacctgtgacagtagttattctggcaatttccagaagtaaattgttgcagaaattaagtaaaagggtgtttattattacttttacaaaagttactactccattaaaaacagaaaatagcagaaagatttttaaaaactgccatgtatattgcagcttgttttggcctgcctgtctcagactagtaaaaggaatgttaaagcatttacaaatgaacctccaatcattgtctatagtagctctctgaatgggctagccaatgtggtaaaatgagacaggaggggaaaaaaggagaagcagaatgggcctatagttacacctcaccacaaacttacaatagaccctta

SEQ ID NO: 696372 - DNA, 759 bp, Homo sapiens
tcatcctcctgagtagctgggattacaggtgtgccacatgcctggctaatttttttgtatttttagcagacacagggttttaccatgttgcccaggctggtctcaaactcctggcctcatgtgatctacctgcctcggcctctcaaagtgctgggattacaggtgtgagccatcgtgcctgtccctttgtccactttttaatgtggttgtgcaacatttcttggggccagttccaacttcagttatgcagcctttggctcaagagccttcacaggatttcctttggcatttgctgcatttttgccaattcccacaatattgtttgaactgtaacagtttttccttgtttctttcttttttcaccaactgggatctaagattgacttacagaagcaaggtatgtctgaaacgattaatatttctctaagtctctatgtgcatcaagatttgtaacctattgtgaacttgtgtaacaaccayttaatcagtgcaattgatcaaagtagctttctacacaaaagtgggtacctggctatcatgtaatcatgaaaaagcaacaactctgaattttattatattatatttatgtgctccatttattatggtgttgccctccaaaatgaaattacatacccaaattaaaaatgcactaaaatattttagtgacaagaaaatatttttcttttttaatatctgcagaatgggcacaaacatattatactgggaatatttcatttcatttttaaaaaatcatagagg

SEQ ID NO: 696373 - DNA, 1516 bp, Homo sapiens
atgattgaaaagcccagtaattatttttgaccttcaacccaatgattccactcctagaaattaatcactaaaaaaaagaacctggatgagaggaaggatttagcttcaagaatggcataaagttgtttttayaatgacaagatcctgtacccaagagaattgtttaaataagctccgatatatttatatcatagtttattttattttacagccacaaaaatgatattacaagaaaataacatctaataacctggggaaatgttctggatatgttgctcaggaaggtatcttacaaaacagcatgtgcaaaatgattcttattttgtaacaaaaatctatatttatacctatatttgtttaatagaaggactcagataaaatatcccaatgtatcaagagtcagcaatagaatgtttggtcattaatatttttgcctttagagttttgttctattttccaaagttttgaatatgaacatgcattattcctataatgagactaaaaatattatttaaagctaaagtcttatttcctccctcaatatgcctctggggtagtccagtaagctgaggatgtaggatagcacttcaggcctttaatggtggtgacaatgaaggggacagagatagagacatagtctgaggatttatcacatatagtactttcaatcccttgggctattgtatcatcaagcacaaaatttttttcttaatggtaccttctacagtgctttataagtctcaaacattttttagacaaaggccaagttaagcaggaaaaaaggtccatgacctactcagtctgtctattcacactttccactaggaaaatgaacaccttggtcttataaaagtggaaagaaacaagatcaaacacattacagcaaacttattggcaatatataagaatcactaatcaatgtatgtgaaaagcatctgagcttatacacatgatttcacgttgtgatgctgtgtcatgtaaacctgaaactaacccagtaggatttttatttttattttttattttttatttttgagacagagtcttgctctgttacccaggctggagtccagtggcacgatctcggcacactgcaagttccacctcctgggttcacgccattctcctgcctcagcctccagagtagctgggactacaggcacccgccgccacgcccgggtaattttttttgtatttttagtagagacagggtttcaccgtgttagccaggatggtcttctcgatctcctgacctcgtgatctgcctgcctcagcctcccaaagtgctgggattacaggcgtgagccacagcacccggttgtatttttatatttatcttgttaatttgctgaaaattacttaaatggaacacatatatagatggcagatgtcacctggaagtgctataagcacatgttgggagcttatacttgtgttagtgcaagagtgtgggtgattcatatttgaaccataacacatacatatcttagtttagcccctgggaaattataggcca

SEQ ID NO: 696374 - DNA, 876 bp, Homo sapiens
cagaagacacaagactcttggctcagagatgaagaactttttgactcacagcaaaaacactaggcagagtatcagaattctccagtaccagatccaaaagtcccaattgccacagtgcagagcaaagagagctaagtgacatctgtacacacagtgggttgcattacaagaaagtaaaccaggataggtaaccagagtcttctagaatgagcagtaaacaygtttgcactgtgttccagaaggaggcaccatctctgtcttcaaagaccatttgctataaaacattgttgaaacaattgtcccaaaggcagccaatacctctgttcacaaaatgtgcagaacatgagatctgcattatgagttgttctcattcacacatatttttattaggcaaatgtccatgtcatatcaaataatataaattaaatgcaataggtccccccaaagtaacactggaatatgaatttgactttcaaatatatagtcttaattcatgtgatgcagaattcccttctcagttaatacttttagaaacataatcatacaataataataatataaataaaatatattattatataaataatataaagaaatgtcccttttttctaaagtgacaaattaatatttgaattgaggttattaagttggaaatcaagtagaaaaccagttggaggcctttgcaaaatacattcaattacaagatttagaagaaaaatagataaaatttctctttttaaagtgttgattcaaatggagacataccagaataagcgaataatcagaaggaaggttgtttgttttcctctgttgagaaagaagctcttgagctgagcattggccaattgtgagacacagctggttggtaggaggttg

SEQ ID NO: 696375 - DNA, 876 bp, Homo sapiens
cagaagacacaagactcttggctcagagatgaagaactttttgactcacagcaaaaacactaggcagagtatcagaattctccagtaccagatccaaaagtcccaattgccacagtgcagagcaaagagagctaagtgacatctgtacacacagtgggttgcattacaagaaagtaaaccaggataggtaaccagagtcttctagaatgagcagtaaacatgtttgcactgtgttccagaaggaggcaccatctctgtcttcaaagaccatttgctataaaacattgttgaaacaattgtcccaaaggcagccaatacctctgttcacaaaatgtgcagaacatgagatctgcattatgagttgttctcattcacacatatttttattaggcaaatgtccatgtcatatcaaataatataaattaaatgcaataggtccccccaaagtaacactggaatatgaatttgactttcaaatatatagtcttaattcatgtgatgcagaattcccttctcagttaatacttttagaaacataatcatacaataataataatataaataaaatatattattatataaataatataaagaaatgtcccttttttctaaagtgacaaattaatatttgaatygaggttattaagttggaaatcaagtagaaaaccagttggaggcctttgcaaaatacattcaattacaagatttagaagaaaaatagataaaatttctctttttaaagtgttgattcaaatggagacataccagaataagcgaataatcagaaggaaggttgtttgttttcctctgttgagaaagaagctcttgagctgagcattggccaattgtgagacacagctggttggtaggaggttg

SEQ ID NO: 696376 - DNA, 1002 bp, Homo sapiens
  misc_feature 898, 899, 900, 901, 902, 903, 904, 905, 906, 907, 908, 909,910, 911, 912, 913, 914, 915, 916, 917, 918, 919, 920, 921,922, 923, 924, 925, 926, 927, 928, 929, 930, 931, 932, 933,934, 935, 936, 937, 938, 939, 940, 941, 942, 943, 944: n = A,T,C or G
  misc_feature 945, 946, 947, 948, 949, 950, 951, 952, 953, 954, 955, 956,957, 958, 959, 960, 961, 962, 963, 964, 965, 966, 967, 968,969, 970, 971, 972, 973, 974, 975, 976, 977, 978, 979, 980,981, 982, 983, 984, 985, 986, 987, 988, 989, 990, 991: n = A,T,C or G
  misc_feature 992, 993, 994, 995, 996, 997: n = A,T,C or G
caccatttgcatagaaaactgtgaatggcccacctggcgctgtgctagggctggtgctgcatctatggactatttccaagagaaccaatcacgggagctttctcaaatgtagattaccagacctatatgagccccattaaaccagactctggaataggactcatacctctgcaccttaaaaggtccctattcatccttcacacagcrcgcagaggatccttctaaatcccaactctctcatctgctccgagccctgccatggctctccacttatttcagtataaaagcccaggccttaccatggtcttcgagttctggaatcacccgccctctgttacttctgtggtctctttcgtactccagacacactggcttccagctggtcctccaacaccccacatgtgttcacttctcagggccttcgcatttgctccccacagccctcacacacccaccaagatattcccatggccaactcccttatttccttcaagtctactcaaatcgaggtctaccctaaccaccctactgcagcctgccccgttgcacttctgtcacttttatctcccttaacctgctcaccttttcctttatctatagtgcttctccaatatacgctataatttacttatatctatggcttcttgtctgtctactctcgctagaataaaattcctatgaaggaaggatctttgtccttcttagtctctgctgtgtgtccagcacctggagtgatgcctgcctcatagtgggtacacatgtctgtgtactgaatgactgaatggacaggtgggtgatatgcactgatgcttgggggcctctgctggtgagagaactgccgtgtgatttccacttaccagcccaagtgcaggtgccatattaaatacctgtgctcacnnnnnnnnnnnnnnnnnnnnnnnnnnnnnnnnnnnnnnnnnnnnnnnnnnnnnnnnnnnnnnnnnnnnnnnnnnnnnnnnnnnnnnnnnnnnnnnnnnnnaccta

SEQ ID NO: 696377 - DNA, 552 bp, Homo sapiens
tcagccaacctaacgttgcctgctgctaaccaattttaatctcatatttagaaatacctttgtgcaygcacaaaaagacttggaaaaggaggtttctttattaaaagaggtggtccccttcttcagatggtttaggtttggttctggcagaggttggggatggaacccaagagaaacacaccgttctttctcttctcactcctagaaacatgttttgacagtcatccctgtgatatcttgggggtggaactgccattggtgacatgattattaaatgtggtgatggatgaatgctttgcttattttaccttgtgttaccactgatataaatcaaatcctccctgacaacatcaaaaagtgctggaatcctggaagcccacagccaaacaagaaccatagggtggcttcaatagggggttgccaggctggtaggatagcaaaatggggctgagagtttggagaacagagacagccaccacctaaggctgcagtgagctgtatgtagatacatatgcaggtatgtagattcatacctgtccactctgaactcat

SEQ ID NO: 696378 - DNA, 1132 bp, Homo sapiens
ctttgttgtgtttgtatagaagctcattacataggcatgattgattacattactggtcattggtaacttagccttcagccctgtttccttcctcagaggctgatggggtggggctataagttcccgccttctaatcctgcttggtctttctgatgactagcctccatcctgaagctacccaagggttgccagccatcagtcaagtaaaccaaagattttaggagctgcatgccaggaagctgggacaaagaccaaatatatatttcacaatagcayagttggtatttcctgggacattccccgggactgtcggactaccagggctcatagggcaaatcagacccaaggccccaggggttcagatctgtgctcccagtccccacaccagttcccaggaaccaagtagtgaacccttcctgtgctcagtcaccacagtcaggcctggattccttctgcctccctttcctagccccacccctctctcctattccccttgcctctgggcagactggactcagcagctggggatccactgaaggttctcatactggagtatacatcagttcctacctatcagaaaccccagagtgtgcacactgagagtgtgaacagcattgacactggagtcaccctgtgctgcgtgccttctgtcacctttctccttgcatctagctgatgaggtgggttcaatggcaaggccattccctgaaataagggacagagatcacaaaactattatttgtcagggatggagtttaaatccactctgaagtagggctgttcctggtgaaggagaaagagctggtttgccacataaaacacagcatgcccagttatgtttgaatttcacaaaaaagcaagggattttgtgtatttgttttttgtttgtttgtttctttttgtttttaagtatcagtgtgtcccaaacattgcatggggcatggggcatacttattaaaaagaattatcagtgtttgtttgaaattcaggtttaacggagcatcctgtattttcatttgcagagtctatgcttgtcacattgccacagccccccgccttgtggtcttctgcctgaaccttcagaacatgtggttgaggttgggaagggaagttatggagtcacttttttttt

SEQ ID NO: 696379 - DNA, 587 bp, Homo sapiens
tacaaagttttagtccctttctttataccacaccatctattcagcaacatatgtggaggttatctccatgattgaccactcaacatgaaataaatgrcaaacataacaaacagcatgcattcactcacaaattatttattgaacacctaatgttcacataggataagtactaaacttataagtaatgcatatgtgaataaaatgaatattaatgtactatatgtgtgcagataatcttgatattccctagcatatatacaacacatacaatcaataacctctactctaactttcacctgaaacaaatataattcttctataaacaacaaataaatcatccttggcaattttgtcaggcaccagtgtttgagaccattttctctctcagattgcctcgtaatgaattctttctccatcaaagttgcccttaaaggtgtgttcaaagatgtgtgaaggcataagaacatgcagaggttgctggtagggaaggaacaagaaagtttgatgaaataggacaaaattcaagattccttcatgatatcttcatgtgacgcttaattttgtgttttaacttgaaaggtgtttta

SEQ ID NO: 696380 - DNA, 569 bp, Homo sapiens
ctttgttactaaatatgttttctttaaatagctaccaaatatgtttgtatatgcaaacactatattgtttatttctgcatggtttagtactgtatttaaaygaaattatcaagtatagcaaaatcttcttgaatttggcttcattgctcctattataagattcattcatgttgtatgtggttataattcattcattttactgctatttactgtttcattgtaggaatatcccacattttatttattcagtctactattgggttgtttccaggttttgctgttaacagacagtgcttctaaagacattcttacacatattttttggtatccatatgcatgtgatttgaggaatatatagacaaaagtagaattgctaaatcataagattgatgcatcctctgctcaaatggaaaacatcaaatgtttttgaaatgatggttcaaatttacatttccaccaagaacacatagtgggcagctggttctgtataccaggcaaaatatgatgttctcagattttagtacttttgccagtctggcaaatatgagttagcttctctttgtagtctt

SEQ ID NO: 696381 - DNA, 1229 bp, Homo sapiens
caaaagtttatataaaagttacctatagacaaaaaaaatgatgtaaatttgcagtgtggatgcaaatgaaattacagaaattatttktgaaggcagaacactgacttataaatttgcttggtttttcttttccgttgcatacattaggttagttcagtctttttctgtggtttagtcatatattattaggtatttagagatataataattaaacaatccaatcctgcaacaaataccagtttgctaaagaaaaccacaagatagaaagtgagaacataactgtgacaaacttgctattgcaccactttggtagaaatacaaagaaggacataacaggttgaaagcatatgtgtcacaccgtgaaaacaatcagttatttgctttgctatcttttgtatgaaccattccttttcttaaaatacaaatttaagcacattgtaccttgtacttccaaagttaaaataatggagtgctctaaattaaaaataaaaaacaatagctgtgatagctcccattttgggaagtattacagtcctaattcctgaaagaagctcaacatgacattatctatatgtttattttgaatattgtaaattcttctcccgagtggaaagtagagggtgtggaacttacaaattccattgtgtaacttatcttgggagggccggattccgttagtgtatctcatttttcagacaattttctgaccttgtggagcaattaaggaagacctcttcttggctgctttgctaaatgttcttagtgccatctgctgcatgcttccggctactgtagggggaactactctagttaataggagcttacgaaatagaaagagctgacatcatatttatcaaatggcagtccatgtgtggaaagaaaacacactattaaagcattctgacataaaaaacactttggaaactatcttagaaatagttaataacaattagttttgtaattcttacactaaaattatatctttaatgtattccatttcctgtataaaatgtctatgtgtaataatttcatctgatacgtaatttagcattagctatagctcttctacagtcaagctattattatctttcagcttgctccttaaacaaactataaatctattgcatttggaagcagcaaaaataatataatgccactaataaagtctatcgggagacattcatattgcttttttaattaaagggcttctttttgatttaaaaaagcta

SEQ ID NO: 696382 - DNA, 641 bp, Homo sapiens
caggtcctggatttggaaaacagtctctttgctaaagatctgcctcagggaatgagggagaagctgaagaaacaatgcaccttgagttgcaggaagtagtgatctatcttcctacaaccatggcatttggggctggaattaacagtagaaatcatcagatctagtcatttcattttacaaatgaggaaactgaggcccaraaaagtcagtcaacttacccagagtcaaatagctatttttaataacttgaagaaaaagaaaaacaataaaccagtaaaaatgacataaaatttgagaactttagggatataaaacagcctcggaggagggagaagaaagagaggaattgcagggcagtgaagagtgtgcgccttggagttagctctctgattctaactaactatgccacttcttagcattgtatccttgggtactcaacttcttttaaaaaaaaattattattaaatagagatgaggtctcactatgttgcccaggctggtctcaaactcctgagctcaagggatgctctagcctccacctcccaaagtgctaggattacaggcataagctaccacatccagcctcaacttctctttattactacctttattaaattgtgtgaaggccaagtgtcctaaca

SEQ ID NO: 696383 - DNA, 957 bp, Homo sapiens
ttccccttcccagttcacaaaacccccagattcagcctcctagttggcaaccctctttcgggtcccctctccgctggggagagctttcttcttttgcatattaaacttctgttccaacctcatcctttgtgtccacattccttaacattcttggctgtgagggaaagaaggcaaagacaagagcctttatcctaacaactcaattgctggagagaagattcatgcatattctatgtggcatcacatgccatagccctgggattgaaagccatgcaatttaagggatggtgttaatctcagtccaaataggtaataagatcttgcactttgctatattttaggggtaggaatgagattgggggtttgatcaataatttgtacccataggaccagtgatttgcccagtcatctgtgagtaaatgcttgggccagtttccatgtctgtattgaattaaaaactcatacggttctgtgatttttgtcaaatacagatttggtctttgtccctatttcctggtatacaactcctaaaatccttggaatgtcctaagggcttgctttttttttttttttttttttttttgaaatggagtcttgctctgtaacccaggctgcagtgcagtggcgcaatctccactcactgcaacctctgcctccygggttcaaacaattcttctgcctcagcctcccaagtagactacaggcatgtgccaccatggtcggctaatttttgtctttgttttcttttttagtagagacggggtttcaccatattggccagtctggtctcgaactcctgacctcaagggatctgcctgcctcgggctcccaaagtgttgggattacaggcatgagccactgcacccaggctttggcttttatatgttagggattgaccgatagcttcaggatgtgggctggtcatcagaaagaccaaggcaggattagagggctggg

SEQ ID NO: 696384 - DNA, 957 bp, Homo sapiens
ttccccttcccagttcacaaaacccccagattcagcctcctagttggcaaccctctttcgggtcccctctccgctggggagagctttcttcttttgcatattaaacttctgttccaacctcatcctttgtgtccacattccttaacattcttggctgtgagggaaagaaggcaaagacaagagcctttatcctaacaactcaattgctggagagaagattcatgcatattctatgtggcatcacatgccatagccctgggattgaaagccatgcaatttaagggatggtgttaatctcagtccaaataggtaataagatcttgcactttgctatattttaggggtaggaatgagattgggggtttgatcaataatttgtacccataggaccagtgatttgcccagtcatctgtgagtaaatgcttgggccagtttccatgtctgtattgaattaaaaactcatacggttctgtgatttttgtcaaatacagatttggtctttgtccctatttcctggtatacaactcctaaaatccttggaatgtcctaagggcttgctttttttttttttttttttttttttgaaatggagtcttgctctgtaacccaggctgcagtgcagtggcgcaatctccactcactgcaacctctgcctcccgggttcaarcaattcttctgcctcagcctcccaagtagactacaggcatgtgccaccatggtcggctaatttttgtctttgttttcttttttagtagagacggggtttcaccatattggccagtctggtctcgaactcctgacctcaagggatctgcctgcctcgggctcccaaagtgttgggattacaggcatgagccactgcacccaggctttggcttttatatgttagggattgaccgatagcttcaggatgtgggctggtcatcagaaagaccaaggcaggattagagggctggg

SEQ ID NO: 696385 - DNA, 957 bp, Homo sapiens
ttccccttcccagttcacaaaacccccagattcagcctcctagttggcaaccctctttcgggtcccctctccgctggggagagctttcttcttttgcatattaaacttctgttccaacctcatcctttgtgtccacattccttaacattcttggctgtgagggaaagaaggcaaagacaagagcctttatcctaacaactcaattgctggagagaagattcatgcatattctatgtggcatcacatgccatagccctgggattgaaagccatgcaatttaagggatggtgttaatctcagtccaaataggtaataagatcttgcactttgctatattttaggggtaggaatgagattgggggtttgatcaataatttgtacccataggaccagtgatttgcccagtcatctgtgagtaaatgcttgggccagtttccatgtctgtattgaattaaaaactcatacggttctgtgatttttgtcaaatacagatttggtctttgtccctatttcctggtatacaactcctaaaatccttggaatgtcctaagggcttgctttttttttttttttttttttttttgaaatggagtcttgctctgtaacccaggctgcagtgcagtggcgcaatctccactcactgcaacctctgcctcccgggttcaaacaattcttctgcctcagcctcccaagtagactacaggcatgtgccaccatggtcggctaatttttgtctttgttttcttttttagtagagacgggktttcaccatattggccagtctggtctcgaactcctgacctcaagggatctgcctgcctcgggctcccaaagtgttgggattacaggcatgagccactgcacccaggctttggcttttatatgttagggattgaccgatagcttcaggatgtgggctggtcatcagaaagaccaaggcaggattagagggctggg

SEQ ID NO: 696386 - DNA, 957 bp, Homo sapiens
ttccccttcccagttcacaaaacccccagattcagcctcctagttggcaaccctctttcgggtcccctctccgctggggagagctttcttcttttgcatattaaacttctgttccaacctcatcctttgtgtccacattccttaacattcttggctgtgagggaaagaaggcaaagacaagagcctttatcctaacaactcaattgctggagagaagattcatgcatattctatgtggcatcacatgccatagccctgggattgaaagccatgcaatttaagggatggtgttaatctcagtccaaataggtaataagatcttgcactttgctatattttaggggtaggaatgagattgggggtttgatcaataatttgtacccataggaccagtgatttgcccagtcatctgtgagtaaatgcttgggccagtttccatgtctgtattgaattaaaaactcatacggttctgtgatttttgtcaaatacagatttggtctttgtccctatttcctggtatacaactcctaaaatccttggaatgtcctaagggcttgctttttttttttttttttttttttttgaaatggagtcttgctctgtaacccaggctgcagtgcagtggcgcaatctccactcactgcaacctctgcctcccgggttcaaacaattcttctgcctcagcctcccaagtagactacaggcatgtgccaccatggtcggctaatttttgtctttgttttcttttttagtagagacggggtttcaccatattggccagtctggtctcgaactcctgacctcaagggatctgcctgcctcgggctcccaaagtgttgggattacaggcatgagccactgcacccagrctttggcttttatatgttagggattgaccgatagcttcaggatgtgggctggtcatcagaaagaccaaggcaggattagagggctggg

SEQ ID NO: 696387 - DNA, 1457 bp, Homo sapiens
tccccacccattgcagggaactccaggccttcaaccagcagaactattttggcgtacattaagaaggtgggcctcctccagctcctctttttttttttttttttttttttttagatggagcctcgctctgtcgcccaggctggagtgcagtgacaaaatctccactcactgcaagctctgcctcccaggttcatgccattctcctgcctcagcctgccgagtagctgggactataggcgcccgccaccacacctggctaatttttttgtgtttttagtagagatggggttgctccatgttggtcaggctggtcttgaactcctgacctcaggtaatccacccaccttggcctcccaaagtgctgggattacaggtgtgggccaccatgcctagcctccagctccttatttttagtggattaccttaatttgtagtattcctttcatacatttttctcactttaataatcacagttttaaaatatgaatactttagtagcattgctaatactactttatataataatactttagtagtatcgctaataccactattacaaggataactactattgggaagcatttattgtgcaactactatatgtaaactctgttccaggtgtttcatgtgtattatttttcatccccagagcagccctgtgaggtgggtattgttcttcacattttagaagtgaggaaacaggcttagagtcgtagtgatgtgcctaagatgacacagctgataagcagtggagcaagaaaggagcctgagatgtggctcaacattcatcttttttccattgcccctttcacagacctttatagtcccatttatagacagggctgagggcctccctaaagaacctatagctagtcaaaggcagagctagacctaagcctagcttttctgacccttctcgtattagacctgcaccgtatgtatttttttttaaagactggtcaagtgcagtagtgagaagggggaaggagcagaacaaggagtttgatctgtaactgactgtgaacaatcaattgagataaggcactaccttcggaacacccccgacactctttccagatgcaccacaacagtcctttccccaggtcaccaccactcactcagccaggggcttcagccttggcctctaagagtcagcagggggtcacagttggctttgaaaccaagcagacaggtgtttgaatccccactctgccaccttacagctgtgtggccttaggcaggtggttgtgagaatttaaatggcataagcatataaaagcatttggcgtagagtctggcacatagtagtgctcactaaatggtagtcattaaagatacaacctgggacagtggcagctagtttaacaaaccaccacaccccrtagcacctctcacctgggtgcaagttccccaggccacactgcagtagctgctcgctgagggtgtccccggatata

SEQ ID NO: 696388 - DNA, 966 bp, Homo sapiens
gctgtgtcacccagactgaaccacagtgtcacaatctcggttcattgcaacctctgcctcccaggttcaagcgattctcccacctcaaccttccaagtagctgggattacaggcgcatgccatcatgcctggctaatttttgtattttcagtagagacagggtttcaccatgttggctaaactggtctcgaacttctgaccccaaatgatccgcctgctttggtctcccaaaatgctgacatagacatgagcctccttgcccggacttccctccttttccttcagggattttaaatgttttctttcctccatctatttaattatatgtgattgccttgaggatttcagcttgaattaaaattacatatatttacctgtctttattaatatttaaacatattaaaataatacatgttcataatgaaaatgaaacattacaaataaatacacaggaaaggcagtattccccctccagttccactcttgaaataaccagttaacaagatgatgagcaactttccatgatgttctccaagattcatgtaagtattggccagcaaacaacagaatatacaggccaggcgtggtggctcatgcctgtaaccscagcactttgggagactgaagcgggtggatcttttgaggttaggagttcgagactaacctggccaacgtggtgaaaccccatcactacaaaaaatacaaaaattatttgggcacggtggtgagggccttaatcccagctacttgggaggcggaggcacgagaatctcttgaacccgggaggagaagtttgcagtgagccaatatcgcattactgccctccaacctggatgacagactgagattccatctcaataaataagtaaatacataaaataaagagaaaaaaagaaaaatgaaagaaagataaagaaagaaagaaagaagaaagaaagaagaaagaaagaaagaaagaaagaaaga

SEQ ID NO: 696389 - DNA, 966 bp, Homo sapiens
gctgtgtcacccagactgaaccacagtgtcacaatctcggttcattgcaacctctgcctcccaggttcaagcgattctcccacctcaaccttccaagtagctgggattacaggcgcatgccatcatgcctggctaatttttgtattttcagtagagacagggtttcaccatgttggctaaactggtctcgaacttctgaccccaaatgatccgcctgctttggtctcccaaaatgctgacatagacatgagcctccttgcccggacttccctccttttccttcagggattttaaatgttttctttcctccatctatttaattatatgtgattgccttgaggatttcagcttgaattaaaattacatatatttacctgtctttattaatatttaaacatattaaaataatacatgttcataatgaaaatgaaacattacaaataaatacacaggaaaggcagtattccccctccagttccactcttgaaataaccagttaacaagatgatgagcaactttccatgatgttctccaagattcatgtaagtattggccagcaaacaacagaatatacaggccaggcgtggtggctcatgcctgtaaccccagcactttgggagactgaagcgggtggatcttttgaggttaggagttcgagactaacctggccaacgtggtgaaaccccatcactacaaaaaatacaaaaattatttgggcacggtggtgagggccttaatcccagctacttgggaggcggaggcacgagaatctcttgaacccgggaggagaagtttgcagtgagccaatatcgcattactgccctccaacctggatgacagactgagattccatctcaataaataagtaaatacataaaataaagagaaaaaaagaaaaatgaaagaaagawaaagaaagaaagaaagaagaaagaaagaagaaagaaagaaagaaagaaagaaaga

SEQ ID NO: 696390 - DNA, 1326 bp, Homo sapiens
tttcctgtgagacacctggtcatgggtcagatacttgagcattaggctgtggtccagaaaaaagaaatttctggtgaaaggctactctaaagacccacaggcccctcccctagagccccattagagtgaggtagagtttatagccattctcctgagagacctcaagacccaattagaagaaaactataacatttgttatatagacggcattttccaaagactagttcaaagatgaaagatatagtcttcctttggatataaaacaaaatctcaagatacaccaaaactgttttgcttttactgaataatttttgtgcatatgtgtttagctgcaagtggctaacaagctgtgattttctttcctttcctttccctttttttttttcttgagacagccttgctctgtcaaccaggctgaagtgcagtggcctgattttggctcactgcaacctcagcctcccatagctgggattacaggtgcctgccaccacacccacctaatttttgtatttttagtagagatggggtttcactgtgttgctgaggctggtctcgaaatcgtggcctcaagtgatccacccacattggctcccaaagtactaggattacaggcatgagccaccatgcctggccaactctgattttttaacttgtctcgtgtattaggttcatactaggaaaaaaacaggtcagagccattggagccacgtgtacagatgtgcagtagctctgctagcaacactgctgcttgcttcagctcttaagacagatgagtttagcacgtgtctgcccttgctctagctgtctctgattcaccccaacagatgcacaatcatgtcactcygttagattcactttggatatcccattattagattaaaaccagcaggccaaaaagataacttgaggaaatgatttcacatccacagtgttctcatagggccagtatcatttagacatgtcaggaacgtggttgcaggggaaagaatgaagtgtcattcttaactggccatctaatgtcatcagcatgaacaggaggactttataggagattatctgatgttttctgaatattaccttacaaatgctgctttatttatagcttaagagcagggaccttgtcttttaaagctttatacatcctcaagtaaaggtttttcatattaaatccattaataatatctaaaggccgacctggaaattccatttctaagtattcatccaaagtaaagattttttttctttttttgagatggagtttcgctcttgttgcccaggctggagtgcagtggtgtgatcttggctcactgcaacctctgcctcctg

SEQ ID NO: 696391 - DNA, 1902 bp, Homo sapiens
aaagtgacaaggattcgttgcatggccatagtttagtcaagcttctgaacctttttctaactctgtatatgtacttccttataaaattcagttttggtaaagaatgctactaaggtagtttgacaagaactcttcacccttgatatctgattaccctcaatgtctgaatgggattctaatcctccaccatttctcaggtgatgactgatcaccctggcctagcttcagcaagaatcctgttaggtgagtttaggcaaaatcccccttacttctgtttggtcttagtaattttccatctattgatttccacaatgctagttagctataaatttccatttgcccatgctsttttgcagctaggcccaatctctctcccacacttcaagactctgttatagttgttcctccacctatctcagtggttctgaggaaaatcttccttaccatgctttaacaagtaccattgaatattatttactttgaatgttatttactttatcaaaagcagtataaacacatgagtatggctaataacacaagtattgttttagaaaactgtcttcatcatgaattaacaattctagattctatgacataaaaataatatgtagaaagaccttttgtcatctgtacagtagcatacaggtaaattttcttcagtaaatttaattgcaataaatttattgtattcttaactatggtacattataattaatttttatcataccccaagggggtgttgctcatagactatgctaaaacttttcttaaaaatttcacagatgttttatattagaaagaaggaagtccccttggaacatcataaaatttagaaatatagctcaatacccaaatgctataaattcacacattttctttggagttcctgagctttgtaaattaagtctaatccccaatgcataatatatgttgtcagcttccagttgctattaataacacgtggttttcctcttaaaacaagtgtaggatattattctctaacatcgaggcatgacagttccaagtttttgaagctgaatgggggtgatgattataaatgaattaatagaaatttttaaaatacaggaaaattcagaaaattagaaatgtactaggaagtaggctcatttgttaattggtgctaagccaaagtcacttagcatagtaaccccgttgaagtgaaaatttccctgagtggctgaagcagtgattaaaaacctgtgattaaaaacagatgaagttatgagagcaaattttgatcacatttttaaaggcattattttgatttatttaataaatataatttctaccatttcaaacttatttcagaaaggctaaaataaatgttaattagttgtaatgatttaaaattaggctctgtgtttatattgggcctatttaatgtgacttaatttttttatgaagccagacatggtggtgcacacctggtgtcctagctacttaggagtctaaggtaggaggaccgatttgacccaggagttcaaggctgcagtgaactgtgatcatgtcaatgaaccctacttctaccctaggcatcagagtgaaaacctgccacttaaaaaaattaaattataacatctacacaaactttgtgtttatctaaccttaatctctcatcattcacacacacatgcacataatcatatatacatatatattcttatcataaatctaaatatttaaatctatgtctatattgcctaatttagcattttcttattgtttttccccattagaaaactggcaaatcacctctgtatctttttcccatttgctgatgtaacaaattaccatacatttggtgccttaaagcttaaggcttaaacaacacaagtttttcatcttacatttctggaggtcaggagtttaggatgagtttca

SEQ ID NO: 696392 - DNA, 1319 bp, Homo sapiens
tataataatcagagaactatgcattcttgaaaagctgtcaaatgtggagtcagaacacaaagaatctatgccttcccccgcaggcctattcctatcaccacctccctaccccagttgggtaggcatggagcttctactatggtgagacagtccatgagggatggcagcctccctgccatagtctaaggaagctcacttattttcaagcattgggtgatgcagcttcatccttgattgcaatgatgatctcagataagtaaggagagccaacagctttactagcctgaggtttctgtcttggttgcagcaaacatattcttcgttgagtttgctctcctgtttagagaagacagagaaggcctaagttaaccccacactcctggaaaaccctgaagctgtgcttttgcacactgaggaagggcaaaatagagcccactgaaaagtacactccagggcaaccatgaaaaccccgaaggcacttattacccacagagatccattttcagctgagggatttcttgctggatcaaggcatttgagaataacttctctccaatcactgaccactaarctacgcatatagaggagtgaaccctaggaagcccagtttaaaaatactatcaagaaaaccccacaaacagtaagaaggaacatcagctgccacacaatgcagggagacgtatttcacagaactacactaggtcctaagtaaagaaacagcacacaaaccaaaaatccagaagcagcagcaaatgtcacagcaatatatccaaaagaaagaaaatcagtatgttggagagatatctccactcctgtgtttattacatcactattcacaatagccaagatatcaacggaagaatggataatgaaaatgtggtacatatgtacaaggaaatagtattcatccataaaatgaataaaattatgtcatttggaataatgtggctggaactggaggacattatattaagtgagataagccagacacagaaagacaaatattgcatgttcttgctcatatgtggaagctcatggatatagaaagtgtaataatgtttaccagaagctgggaagagtagtgtggagaaggggatacaggggggctgattaatgggtacaaaagtatagttagttagagagtatgaataagatccagtgttcagtagcacaatagggtgactatagttaacaataatttattctatatttcaaaataaatagatgagtagatttggaatattgccaacacaaataagtgataaatatttgattaattacctgatttgatcattacacattgtatcatgtatcaaaat

SEQ ID NO: 696393 - DNA, 1490 bp, Homo sapiens
tgcctcctggaggacagcagggagacttcagagaggagatagcccttgagcagactttcacagcaattgcatatttcctccaccaaaatctccataaggcactgaactaatccattgcattgctgaacagaaagtttatgaaggggaataaaatacatctgagactggacagccacttgaattatttctaaagttcacacaactccaaggtaacactaacaaccacaacaattactattattactaacatttattcacaatattttattttaaattacctttagttaaatactaagaatctacaggacttaatgctacagaacagaaaccataagtagaaggaggcagtatctctcactgatgaaaaatgaatgaggacatgtgttgaacaatgaaatacggtttaataaggtgtctcatgtgaacctgcataagacagaaaaaagtcttgctctttaaatccattaaacaataacaaagaaattggtgtcagaaaacttagatatgcgtattcagctatattaagtaaaacaaagaccaaaagaactggaataatcttaattagatgtttattctagtcaatatctatatctagtgtgtatcatttcggacagttgtctttctttcaaaacccttcagctagaatgcctaccccactgtcacctccactgcagccttcaagaccaaagtcttacattattatgtggatcaaggagccaagctcaaacaaacataatcaacagagttatggtaaaaattatagttggttaaatagtttactggctcaacttaagcaaaaagaaagtctaattttgccagaatattgcagtagaaacttcgtgaaaggtattggggctgagtctacaaacatttagcctaactagattggaaaggaaacaaaaatttaaaacaaagaaaccaaaaaaaaaaaaaagtgtgtttgattaatcacagcttggcaatagctcctccacccaatagaascccagaagcattttcctctgctgatcccctaccatcttctcaactcattcttcttaagaggccccagtgaaagtcagttccactagatgtgtgctgactcagtcaggccagccaacctcgattgagaactcacctgaatgcaggagccatgagccagtcagctcatctctgaagtgagagaaagaacagttcacatcttcgttaattagatactagcaaactaaatgagtagattcataggagtaggctatcattttaccacctgaatgagaaaaggagaggtggcacagatatgattcttcagcaaattggctacagctgccaaattgcacattcagacagcccaagacagtaactatttaacagagtatctgtgctgggcctaaaattttcctaagacatgtttttatatatcttatcatcagttgggttgaggtataggctatgaagtatagatgagacattcgtttatctttctaactgaattaagttcttgaaagtgcaca

SEQ ID NO: 696394 - DNA, 1490 bp, Homo sapiens
tgcctcctggaggacagcagggagacttcagagaggagatagcccttgagcagactttcacagcaattgcatatttcctccaccaaaatctccataaggcactgaactaatccattgcattgctgaacagaaagtttatgaaggggaataaaatacatctgagactggacagccacttgaattatttctaaagttcacacaactccaaggtaacactaacaaccacaacaattactattattactaacatttattcacaatattttattttaaattacctttagttaaatactaagaatctacaggacttaatgctacagaacagaaaccataagtagaaggaggcagtatctctcactgatgaaaaatgaatgaggacatgtgttgaacaatgaaatacggtttaataaggtgtctcatgtgaacctgcataagacagaaaaaagtcttgctctttaaatccattaaacaataacaaagaaattggtgtcagaaaacttagatatgcgtattcagctatattaagtaaaacaaagaccaaaagaactggaataatcttaattagatgtttattctagtcaatatctatatctagtgtgtatcatttcggacagttgtctttctttcaaaacccttcagctagaatgcctaccccactgtcacctccactgcagccttcaagaccaaagtcttacattattatgtggatcaaggagccaagctcaaacaaacataatcaacagagttatggtaaaaattatagttggttaaatagtttactggctcaacttaagcaaaaagaaagtctaattttgccagaatattgcagtagaaacttcgtgaaaggtattggggctgagtctacaaacatttagcctaactagattggaaaggaaacaaaaatttaaaacaaagaaaccaaaaaaaaaaaaaagtgtgtttgattaatcacagcttggcaatagctcctccacccaatagaaccccagaagcattttcctctgctgatcccctaccatcttctcaactcattcttcttaagaggccccagtgaaagwcagttccactagatgtgtgctgactcagtcaggccagccaacctcgattgagaactcacctgaatgcaggagccatgagccagtcagctcatctctgaagtgagagaaagaacagttcacatcttcgttaattagatactagcaaactaaatgagtagattcataggagtaggctatcattttaccacctgaatgagaaaaggagaggtggcacagatatgattcttcagcaaattggctacagctgccaaattgcacattcagacagcccaagacagtaactatttaacagagtatctgtgctgggcctaaaattttcctaagacatgtttttatatatcttatcatcagttgggttgaggtataggctatgaagtatagatgagacattcgtttatctttctaactgaattaagttcttgaaagtgcaca

SEQ ID NO: 696395 - DNA, 444 bp, Homo sapiens
tattctttgtagtcataaacgaaagaatacatttctaaaaattgagcagggtcatggcaaagcactagtaactgactattagactgatacataacaactttcagtgtggtgcttacacagccatgagccaccctgactccacaaatcatgctcacaggataatcaagagagagtttgtggaattcctctcagaatcaacttcattttgattaccaggaaccaactgaggccattttagcttaagactggttgtcggtattcataaatttctttttaaataacaatctcttttaatatatggggtctccaacataataataatarccataattcatttaaacctctactatgtgctttatatacattatctcatgtaattctcacaaccatctcctgtcttttggtcttgtgctctttccactgtatccatgtaatcaactacaa

SEQ ID NO: 696396 - DNA, 1008 bp, Homo sapiens
gtatttgtttgcaaacctgttggtaccattggtccatgtttagctttgtttaatatacataaacaaaaaagtgtaactggaagctatggtattttatttttcaattagctatggaaagtacaagaaaatcaagttgctaagcaatttctgttgaattggatgtgggtggaaccattatcaaaggttggaagaaatcgtaaaaatggaggagcattttatattcacgttgtttttcctatgtcttcaagttctttaaaggaactgaaactggaaattgcagaaaatgcattatgggtgtgatttatgaggtaaagaagagtacacagtgcatggtgtgttgttatggcaaccctaggaaactaacatcaagatcttaactcaagatattgatcytcatgtatgttaacgtgagagacatgtgtgtcttgtgtggagggcctctccaggtgagagggtggctgtgctttcactcatggtcagctccagtctgctcagggagctctgggcatccatgtgcccatgtgtcatccttgtgacatcccttcagtgtcagctacttttatcctttgatcaattgctccagggctcataatacatgatgtaattggttggaaacgtggatgtccaaaaagtgcatcaacgctcaaggtcatgtgtcctttgttttgaggtgtcactctgggcagagctgtccggtgcaactcaggggaagtggtgtcctggtgagaaccaagtcagaatgtggcttgaaatgagctcttgtatgaagctggcaaattatggcttatctttcctttagtaggttttcttcatttatttccttaatttaatggaatgccttagtgctatttcaattaaaaaatattgatggtaaatgtttgggaggacattctgcatcctttgatgctcaagattttctgttctccaaagcagtagagacattagcctcactcaaaggagagtaaaattatgttcaatgtgtaaacttgcttgctgcgtaacaaagta

SEQ ID NO: 696397 - DNA, 426 bp, Homo sapiens
  misc_feature 2, 3, 4, 5, 6, 7, 8, 9, 10, 11, 12, 13, 14, 15, 16, 17, 18,19, 20, 21, 22, 23, 24, 25, 26, 27, 28, 29, 30, 31, 32,33, 34, 35, 36, 37, 38, 39, 40, 41, 42, 43, 44, 45, 46,47, 48, 49, 50, 51, 52, 53, 54, 55, 56, 57, 58, 59, 60,61: n = A,T,C or G
  misc_feature 62, 63, 64, 65, 66, 67, 68, 69, 70, 71, 72, 73, 74, 75, 76,77, 78, 79, 80, 81, 82, 83, 84, 85, 86, 87, 88, 89, 90,91, 92, 93, 94, 95, 96, 97, 98, 99, 100, 101: n = A,T,C or G
gnnnnnnnnnnnnnnnnnnnnnnnnnnnnnnnnnnnnnnnnnnnnnnnnnnnnnnnnnnnnnnnnnnnnnnnnnnnnnnnnnnnnnnnnnnnnnnnnnnnntgtgtgtgtatatatatatatgtatgtatgagtatatatatccacaggcagagtcactcaaaaattctattttctgtgtmctcaagtattaaaatgaaagggcaagactgctgccactcagctgccacatgcttcttctacgaaccctggtccttctctgcccattactcagaagacaggctgaatgacacaaacaaaaatcagatgtaagttgaaaaatcaaattggattttattgaaatgtatataaataaccctcatttttctttatttcatcagtattgggaaattaagtgaaaagtaattaaaaagtagtagtcctgaga

SEQ ID NO: 696398 - DNA, 602 bp, Homo sapiens
tttaaaatggactatattaacataaatacataactccttccagaagtactgtggtcatgacctctcccatgggttgcagttcctcttgtccttgtgccggttgcctttggattctgcatgatcccaggaataaccctcccctgcattttctatctgcagcatagactccatgactatgtccttgcctgcttcctgtcctgggcctggaatgtagggtctcctataaatctactttgatttatgtttggtgggtctagttgctcaggctttcttctgattggataatgactatgacaaacattcctggagcactaaaggtttcacatgcattcattcactcaatccttacaacaggcttatggatcaactactgacacttttatgcctgttttgcaaatgaggaaattgaggttcagagaagctcaaggccccacagctggtgagttgcagagctgggattggaaggcagatacacctgactctaaggcttttccccttgctcacctgttagactattctrgctggccagcctatatcatccctacccagggctgggggattccctgtctccttccctctcaatcaaggttgggttctgtcca

SEQ ID NO: 696399 - DNA, 1257 bp, Homo sapiens
atgggagatggttggataaattatagtcctccacaccaggggatactgtatagctgtaaagaagaatgctcaatctatttgttgagaaaggtctascagacatttaaagtgaaataaaggcaaaatgctgaatagattgtacagtgtgctgtcctttgtggaaaagggaacaaataagaatgtgtgtgtatatgcatatagaatacatttttatccttgcttgtgtatatttggtgaaactctggaaagatgcataagaaccaatatcagcagttttatatgcaggtaggagggagacttttacagtatcacttttgtttattttttatttctgagccatgttaatatattaactatgggaaataaagagcttgggttttcccaccagcctgaccacaggagaggctcaaaattgaaattagcttgtataggcaatgaataattttacaggttcttgcaagaaaaacaaatctctgttacaggctattcagaatttattttctagtcaaggaagccaacttcttcttcccgtctcaatcctgtagattctcaagaagcgacagggagggtgatgcactcaaagcctcacttggcagccaatcctaagtgctttggagaaaggagaacgtttggtccggggcagggggtctggagttgggcaggggaggaaatcaaggccagaatggactggactgggttttactcgggttcttgcctgtctctgacactgccctgggtgaactaggtgggagctgggaggccctccccagtgcaattgcaaaccttggcttgtatggctagacccagaagttggcttgctcaaaatcttacaatctccagtaactcttaagtaagcaggcaaatgaacacactgattgatcgagtacccacttctactagaccagaacctctaccactgttcactccacagggtccccaggcaagatttgcttgagcctggaaggccttcgtagaggttctctgccttctcacccccagctcacctggagaagaataaacactaggctctttcctctctaccaaggagccgtcagtacccgagggataggtaatcttaagggaataatggagagctccgaggaacaattagaaggcatctgaggagcagaagccctgtgaaagaaaggtaactgtcaaaactcagacagtctcgatgggctaaatgaggggatcctgggacccagcaacatatgatctaccgagtcactcttacaagaaaagaatatacgtaaatgg

SEQ ID NO: 696400 - DNA, 1257 bp, Homo sapiens
atgggagatggttggataaattatagtcctccacaccaggggatactgtatagctgtaaagaagaatgctcaatctatttgttgagaaaggtctaccagacatttaaagtgaaataaaggcaaaatgctgaatagattgtacagtgtgctgtcctttgtggaaaagggaacaaataagaatgtgtgtgtatatgcatatagaatacatttttatccttgcttgtgtatatttggtgaaactctggaaagatgcataagaaccaatatcagcagttttatatgcaggtaggagggagacttttacagtatcacttttgtttattttttatttctgagccatgttaatatattaactatgggaaataaagagcttgggttttcccaccagcctgaccacaggagaggctcaaaattgaaattagcttgtataggcaatgaataattttacaggttcttgcaagaaaaacaaatctctgttacaggctattcagaatttattttctagtcaaggaagccaacttcttcttcccgtctcaatcctgtagattctcaagaagcgacagggagggtgatgcactcaaagcctcacttggcagccaatcctaagtgctttggagaaaggagaacgtttggtccggggcagggggtctggagttgggcaggggaggaaatcaaggccagaatggactggactgggttttactcgggttcttgcctgtctctgacactgccctgggtgaactaggtgggagctgggaggccctccccagtgcaattgcaaaccttggcttgtatggctagacccagaagttggcttgctcaaaatcttacaatctccagtaactcttaagtaagcaggcaaatgaacacactgattgatcgagtacccacttctactagaccagaacctctaccactgttcactccacagggtccccaggcaagatttgcttgagcctggaaggccttcgtagaggttctctgccttctcacccccagctcacctggagaagaataaacactaggctctttcctctctaccaaggarccgtcagtacccgagggataggtaatcttaagggaataatggagagctccgaggaacaattagaaggcatctgaggagcagaagccctgtgaaagaaaggtaactgtcaaaactcagacagtctcgatgggctaaatgaggggatcctgggacccagcaacatatgatctaccgagtcactcttacaagaaaagaatatacgtaaatgg

SEQ ID NO: 696401 - DNA, 1466 bp, Homo sapiens
tcactaacgaaacctcctcctatttaaaggttctgggctggtcagtccagtagacctgggcaaagggctcacaagtcccatctgggccagttaacgtctctaaaacgagccaccagaggcagcccctggcagctgatgggctggaaggacaggaggcatctcactcttggatgrtgctctgatgggagaattttctcaagggtacaggtgggaagggcatggaggtggcttgctcccctagggatcagaatcagagagaacccacggtgaaagaaacccgacccctgaggcactccagcagttcagagggcacgtgagggcagactcaagacactccaggttccagcggcgaccagggtccaggccagacaaagaggctttgggtcccgggaggcctttgttcctcagcccatttaagacattccttaaatgcaatctaccagaagagtggcttcattcagagccagcgggggccagttatgcgggtgggaggcacaaaggtttgcctgggtatctccctgcgcggcaagtcccacaaccagcacaaaccactttagcctcagaacaagaggctgatgggggtcactcgagttcacattggaaaggctgtgttggataggaaaaaagaaggctggaaaatgataacagcaattatcttttggtggaggggctatgggaaattttcactccttctttatagcctcccctgttcctcaacacagaagagcatggagtttttacgcagagaaaagaagttgtgcagtggccgctatgttttcatttggagccgtaaatctaaggttgtccctgtttacttgatatttgtatcagagaaaaaagacatattaaagatggatggaagggggaaaatcaccgtatgtccagatttactgtttccttccagcatttggcaaaagtaatgagacagcattggacaggtgtgctggtcgggaccttttcatcctgtccaggcccctgcctccaagcaggtcaaaatcagccccagcaatccaaagtgaccaccactctgaggttggagtcaaccggggggaggcacgcgaggctgattaggtgcccactggaccaccaggcaaaagcccttccttggggcttcaaggaacctgggcaggagaaacgaaggcctcctgggccacccccctgccccaagcctctttggcccctggtggctgctggaaactgcagtgcctctcacttgaacttatgcgccctctgaaccggaagtgccctaagagtcaagttccccttgccctgggttcttgatcttgcaagaagcagccacctccgcccttcccacaggtaccacactccagattcaaattgcctaaatattagttccacatcttggctcactcttggctgcaccatatactggctgtgtggccttggggagcttaatgagcctctctatgcttcagtttcctggtgtgtaaaatagggctaataat

SEQ ID NO: 696402 - DNA, 624 bp, Homo sapiens
gatattctttaatcacttgagagtttagagatggtctttcataacttttggaaacttatcaartattttacatattgcctctacaccctactgtgtgatatacttggctattccaagttgacaattatgcaatctaagaataaacattttctacttctttggtaggtttttgaattccagttgacatcagaggatatgaaagttctagatggtctaaacagaaattatcgatatgttgtcatggatttgtaagtaactttggaaaatgggtttcccagtttatttttagaggaggaatgtcagatgggtgttgaaagtgacctcaataccagggagacagaggccagtgcaagtgagaggtgagacaggaactctctggaactctccttctggattcactccagagctctgttctctgacagggtgagtggacccagggtcagcatcggtcaacctgtgcctctgctctcctgactccatggaaatttccagagcagccaatattattgctaaatctgcaactttcatgtaggcctggcatttctgccgtggcctagtggacagtagatattgcccatatggcttgattaatgtttttccaaatctgtacttatagctttttct

SEQ ID NO: 696403 - DNA, 624 bp, Homo sapiens
gatattctttaatcacttgagagtttagagatggtctttcataacttttggaaacttatcaagtattttacatattgcctctacaccctactgtgtgatatacttggctattccaagttgacaattatgcaatctaagaataaacattttctacttctttggtaggtttttgaattccagttgacatcagaggatatgaaagttctagatggtctaaacagaaattatcgatatgttgtcatggatttgtaagtaactttggaaaatgggtttcccagtttatttttagaggaggaatgtcagatgggtgttgaaagtgacctcaataccagggagacagaggccagtgcaagtgagaggtgagacaggaactctctggaactctccttctggattcactccagagctctgttctctgacagggtgagtggacccagggtcagcatsggtcaacctgtgcctctgctctcctgactccatggaaatttccagagcagccaatattattgctaaatctgcaactttcatgtaggcctggcatttctgccgtggcctagtggacagtagatattgcccatatggcttgattaatgtttttccaaatctgtacttatagctttttct

SEQ ID NO: 696404 - DNA, 970 bp, Homo sapiens
tttgcagatgcagttgtatatttaccttcatacagcagtcccaccttatctatggtttcactttcctcactttcacttaccaacagtacagtataatgaggtattttgagagagagagagaccacattcacataatctttattatagtatattactataattattctattttattgttacttagtgtttttaatttcttactgggcctaatttctaaattaaactttatcatagctatgtatgtataagagaaaacatagtacatagggggttcagtactacctgtggtttcacacatttatgggggtcttggaatgtgtaccccacagataccaggggactactgtgtatgaattcatgttttaatacagctatttctgtgtctctctctttcacacgcacacaccatcttaaaatttttatatatgacttctcatagtgttttcgttaaagataaatgtttttacatggcctcacataatttatcatccaaactgggacactgtgagagaagggattacaccaagtcaacaggagtaagccaarttgaatagtcagcctccctgcaaggccctccatggtgtggctgctgaccttggcagcctcatcttgcaatgtgctcttcctcgctctgtgcgcctcagactcacaggccctctttgcttactgcttacttttgctcaaaagcctttgacatgctttctcctctacctggacagagctttgcctctgctctcttattcacctaataaactccccttgttcatttttcggatttctctcaattctgacttcctcaagaatgccttccaggctgggcatggtggctcatgcctgtagtcccagctacctgggaggctgaggcaggaggatggcttgagactaggagttcaaggctgcagtgagccgtgactgtaccactgcactccaatctgggtgacagagtaagaccctgtctcttaaaaagaaa

SEQ ID NO: 696405 - DNA, 623 bp, Homo sapiens
acatgtggtaattatttctgtaaaggatcaaaccaattcatgaaaaagataactgcaaatacagtgggcaaaatgtcaggatttttggtgaaatttgtaattaagctttacttaaaagcatgttttataaagatatagatgcagaaagcaatttgtgttgttttcctaaagtttatttggaaagcaagtaaggctgtatttctttggactgattaaatattactgcttggggactacgagttaaagaagagaaatcattatttgaaggagaaagtgaataaaatagaagattaggcggcattttataagatagttggtggtactgtttacggcttataaagttgtgttaaaatttactaaacagcttgttattgtgggagcttatttaaaacagctttctgtggttatgtctgttgaggaagcttaaacttcaactctccagccacttaactgcagcaygttgacttcaggtctcttgtaagaaagtctaaatgtaggctgttgaataatccctttgagggccctgtaactatttttatgcctggatatgcgtcatcagtgggtattttctctggtgactcgcttccatcaggtctcctaccatacattctatcagtgagtga

SEQ ID NO: 696406 - DNA, 903 bp, Homo sapiens
tacaagttaagcctgaaatatcttgttacacaaaatagcaatgaggcactcaaagactactagggtggtatcaaaaggactcagtggccaacctggagagtctttcacatgaaggtaacaagtgaaatggattaagatgcaagaaatatgtttaaatccatgaattagtaatgaattttaaaataacagcaacaacaacaatcaccaccagggaaatattttttaaaaatccaaaccctaattggtcaccattggaagatgttagtaaaccaacttattattttgaaaattggtaaatgaaaataattaagttttttttctgggattcttataggaactatacctgtaggtggtagatgaggggaaatttgtctttatggtaatatttttataccccccaataaattagtgaaaataggccttgaaggtcaagttactagcattacaaagaaagagacaaccaagcattatgttttatgtggttccaaaaagaaaaaaaaaaagcacctaaatttgatcaagtctttgtactcaactaccaatatgggaaatgtaaaggtcagaggaacatgttaaaatacrctagaaagattcagtcagcaaaatccagattgtgggatatgctataagctggatactcaaagtttggtctgtcgaatggcagcaaaagcattgcctgagatagactgagagctttttaaaatgcagaatctcaggcccaccccagactttctgactcaaaacctgcattagaacaaattcccaggggatatgtgtgcattaaaccactgatcatataggccaaatgattatttcttcaacaaaaaaatgaataaaaataagagaaatgcataggttaaaagaacttaagaaaaacatcaaccacctgtaatgtgcagacca

SEQ ID NO: 696407 - DNA, 903 bp, Homo sapiens
tacaagttaagcctgaaatatcttgttacacaaaatagcaatgaggcactcaaagactactagggtggtatcaaaaggactcagtggccaacctggagagtctttcacatgaaggtaacaagtgaaatggattaagatgcaagaaatatgtttaaatccatgaattagtaatgaattttaaaataacagcaacaacaacaatcaccaccagggaaatattttttaaaaatccaaaccctaattggtcaccattggaagatgttagtaaaccaacttattattttgaaaattggtaaatgaaaataattaagttttttttctgggattcttataggaactatacctgtaggtggtagatgaggggaaatttgtctttatggtaatatttttataccccccaataaattagtgaaaataggccttgaaggtcaagttactagcattacaaagaaagagacaaccaagcattatgttttatgtggttccaaaaagaaaaaaaaaaagcacctaaatttgatcaagtctttgtactcaactaccaatatgggaaatgtaaaggtcagaggaacatgttaaaatacgctagaaagattcagtcagcaaaatccagattgtgggatatgctataagctggatactcaaagtttggtctgtcgaatggcagcaaaagcattgcctgagatagactgagagctttttaaaatgcagaatctcaggcccaccccagactttctgactcaaaacctgcattagaacaaattcccaggggatatgtgtgcattaaascactgatcatataggccaaatgattatttcttcaacaaaaaaatgaataaaaataagagaaatgcataggttaaaagaacttaagaaaaacatcaaccacctgtaatgtgcagacca

SEQ ID NO: 696408 - DNA, 903 bp, Homo sapiens
tacaagttaagcctgaaatatcttgttacacaaaatagcaatgaggcactcaaagactactagggtggtatcaaaaggactcagtggccaacctggagagtctttcacatgaaggtaacaagtgaaatggattaagatgcaagaaatatgtttaaatccatgaattagtaatgaattttaaaataacagcaacaacaacaatcaccaccagggaaatattttttaaaaatccaaaccctaattggtcaccattggaagatgttagtaaaccaacttattattttgaaaattggtaaatgaaaataattaagttttttttctgggattcttataggaactatacctgtaggtggtagatgaggggaaatttgtctttatggtaatatttttataccccccaataaattagtgaaaataggccttgaaggtcaagttactagcattacaaagaaagagacaaccaagcattatgttttatgtggttccaaaaagaaaaaaaaaaagcacctaaatttgatcaagtctttgtactcaactaccaatatgggaaatgtaaaggtcagaggaacatgttaaaatacgctagaaagattcagtcagcaaaatccagattgtgggatatgctataagctggatactcaaagtttggtctgtcgaatggcagcaaaagcattgcctgagatagactgagagctttttaaaatgcagaatctcaggcccaccccagactttctgactcaaaacctgcattagaacaaattcccaggggatatgtgtgcattaaaccactgatcatataggccaaatgattatttcttcaacaaaaaaatgaataaaaataagagaaatgyataggttaaaagaacttaagaaaaacatcaaccacctgtaatgtgcagacca

SEQ ID NO: 696409 - DNA, 662 bp, Homo sapiens
tccatatgggaagtaactttgaaacaaccaatctgcctttgttttattgttgttttccaggattaattcttcatttatgcttcctttagcccttttctgactataaagccaatcttctctgctcagctcatgggagcacttactttattttaaagcatgggatgcttccccaagtcataaaaacatgtatataagattcagttctctctttcctcactcccaaaatatgtttatgatttttaaatatattcatgaaacatgtttctatagtattattttatgtgttttaaattttctattaacaatataatatttatgaggacttrcatcttggtttgtccaggatagtctgctttatgctcattgttcaacatatgtattaatagcacttctcaagtaatattactcatatctttttgcagctagcatttttcactcaacattttttaaaagttcatgttactactcataaatcaacatttaaatgaaataggtacattttctgttttgtagtagttcagtaattcaaaaattttaaatattatgactctacatttgtattcacatatgacacacacttcttatattatacctttgtagttagtcatgagaatgcttggacttagacttgatatgcttatttaaaaccgctttcttggaga

SEQ ID NO: 696410 - DNA, 748 bp, Homo sapiens
aatttactgccatccagtattttagttccacattgtttttattctcattagttactattatagacctttacattctgtgctgtttaagttaactcatatagttaccaatttatttcatttcttcttgatacttttagttcatttttgattcaatttcctggtgtgtrtcttatagaagatcttttaatatggtttttttcataatcaattgtctcagattttgtgtgaataaaatattttatattggcttttgataattctttttaaaattttgggttacatctattatgcttctgcccttgtgacatattatatcttcacaagcttgccacagaaatatctcccatctcacaaagtcttctacaatgtgacatcacctctcccacattgagatatgaaatttatgctacatttctccccacaataaaactttgtagtttgttactggcttttaaccaattgattgtggcaaatatgcagctgcctatatttcaatgcagccaaaaagagtaatgtaatttttaaccttacagacacactgacttatgagctctgaatgaccatttactaagtctgactatcatgaggtcacttgaggaaatatagtcttctaaaaaagaccacatgaggttctggtcacagcctcaattgagatcccagttagcatccagaatcagccaacacacacatgagtaaagacacttctaatgactccagtccccagctgtcaagtaatccaggctgtctt

SEQ ID NO: 696411 - DNA, 1997 bp, Homo sapiens
tcaatgtaatagaatgtcaaatggtcagcattctgcagaggacaatatccagactagttcatttaagcagaaaggaatttttttaaatagaatattaaataggtaatagaatcattaggagagctggaaaaacagtcttcaggctgactgtccagcagtgactcccaaaatcctaccacagagctgagcttcagaagctgttgttccagcatgctcagcaagctgcctgtgaatgttgggagagcagagggcaagcatggagccctgggttagggagtgatcagaactgaagcccaggagggcttctgcaatgaatgactgggggaacttggatagaaaaggaggccaaggaagcaggggttttcaaacagccaaagtggccagcatggccagatacagtaagagggccagttaaacatggatttttttttttttttttgagatggagtcttgctctgtcagcagattggaatgcagtgggtgatcttggcwcactacaacctctgtctcccagttttaagcgattctcctgcctcagcctcccgagtacctgggactacaggcgcacgccaccatgcccagctgatttttgtatttttagtagagatggggtctcaccatgttggccaagatggtctccatctcctgacctcatcatccgcccgccttggcctcccaaagtgctgggattacaggcatgagccaccgtgcccaaccaagcatggattttttaaaaatagtattgttggtcttgacacctaggagacttttgctaggtcagttagtgagttttgccagcactgtttcagggggatggtggggaaagcagctacattgggtgggcgaagactaaatgggaagtgagcaaacagaaacagcaagcacggcacagccaggcctttcagggagccaagtggagatgggaaggaagcggggctgtggctggtgagcccttagagctcagggaattttttttatttgttgttttgtttgtttcttaggatgagagaaacttgagcatagtaatagcagagccatttgaaagagaaatgagtcgatgtgtcagtgttctaaaggtcctagaaagaaagggggcaaggactagaaggaggggttggcctggaacacaggagggacagcttctccctgctggctgtcagaaggaagtgacagtgggtacaggtagggtaccaggaggaggtgggtggtggagccctagtcatggtcctgattttctccctgaagctgatgagtccccctgctgagacggcagggcctggatcctgagcgtgaggctggggatgaggtgcaggtttggagcagcaactgctgcagacaagtgaagggattgtcagtcaaggccttggccacctaaataaactagaacttatgagttcaaggtgggccagctgccaacagtgtgtgatgtagttcagcagcctcgggccggagtgcagaggcaggtcctggggctgctctgaggacatggactttcggttgaggatggtgttgggctcggagctcaagtctgctgctcgacgtgatgtgtcccatctgtgtggcaggtgcctcaatcaggaaccctgaagctgtcccacctacaggagggaacctacaccttccagctgaccgtgacggacactgccgggcagagaagctctgacaacgtgtcagtgacagtgcttcgcgcagcctactccacaggaggtgagaagaaagtccttccctcgcttcccactgcttgtggaaggcaatgtcgggttggcgctttgtcctctggctctgcgctccatgggctcttccattttatttttggttattgctgaatgagagagtctttgctaaaaacacaataacaaaagcaggctctcttctgttttgggcttagccgatgctactgggttggggtggaggaagcactccaggggatgagaagagatgctcccgcttctcttgactcgacttcatcaaagacaattgcttggctattctgggag

SEQ ID NO: 696412 - DNA, 1545 bp, Homo sapiens
caatatctttattttccaaattactatgaactctaatttcagttaaatgtcaataataaatatctaagatcatarttactttcacttatctttaatagctcttaattgcttacaccactaattaatattactaaaattaattgtcaagatgtatttccagattaattttaagccctaactcttgtataaaccttctactgcagtatagatttttgtataagtattcaaacatttcctgtgtcttctcattagttcatatcaaagtgttctctagaaaaacaaaaacaaaaacaaaaacaaaaaacttgccttcagaaaagtttccaatgcaagtcagaacattgtaaagccctgaaattagctcttatgacaaactcctatttgttaatacgctacaaaacatagtttgacatgcttgaaattaaaaatattttgtctaatttaagaactaaagcactaaagtgcatattttgatttgaattttcctagtatttctcagtaaataattttgtttccaaaaggaactcatttaaatgtatgcattatatctatgtatttattttctgaatgataaaacagaaaatatttgttgaattatgttgtatgtaagatacaatacagatataaaaataacagtataatatgaaaatattacctgatgtaatgtttttcattagtaatagcctctattattcattattgtatgctgttaccatttgatatgtatttgggtgaatttttttcttttcattctagttgttgagaaaaattctacttcttcgtttttttatatgatgagaaatgaagcttagaaaagctaaattacttcctaaagtcacatagtcagttatggatgtactggtaattaaacctaaatgtcttaactttagaattttttattttaaacactttaccaaattttaaatgacatatttacagtttttgtctttgagacctcatttacaatatgtgagcactttttagttatttttaaaaataatgaaatatatccaacatattttcaaataattaactttatttttagagcagttttagatttatagcaaaattgagatttctcatgtaacacctgccccacatttgcatagcttttcctattatcaacattcctcacctgagtggtgcttttaatttttttttaattttacaattgatgaatctacaattatatgtcattagcatccggaatgcatagtttacgttagggttgacatttggtgttctaaattctataggttcaaacaaaggtataacatgtattcatcattatagtcatacagagttgtttccctgccctaaaaatactctgtcctccacctactcattccttgcttttgcctaagtcccctgatccttttacattctgtatagttttgtctattctagaagtcacacagttggaatcatagagtatgtagccttctcagattggcttctttggataaataccaaggtccttggtcgcggaatcatacagtaaaaatatatttagttatgtaaacagttgccagagaatctccaaca

SEQ ID NO: 696413 - DNA, 1545 bp, Homo sapiens
caatatctttattttccaaattactatgaactctaatttcagttaaatgtcaataataaatatctaagatcatagttactttcacttatctttaatagctcttaattgcttacaccactaattaatattactaaaattaattgtcaagatgtatttccagattaattttaagccctaactcttgtataaaccttctactgcagtatagatttttgtataagtattcaaacatttcctgtgtcttctcattagttcatatcaaagtgttctctagaaaaacaaaaacaaaaacaaaaacaaaaaacttgccttcagaaaagtttccaatgcaagtcagaacattgtaaagccctgaaattagctcttatgacaaactcctatttgttaatackctacaaaacatagtttgacatgcttgaaattaaaaatattttgtctaatttaagaactaaagcactaaagtgcatattttgatttgaattttcctagtatttctcagtaaataattttgtttccaaaaggaactcatttaaatgtatgcattatatctatgtatttattttctgaatgataaaacagaaaatatttgttgaattatgttgtatgtaagatacaatacagatataaaaataacagtataatatgaaaatattacctgatgtaatgtttttcattagtaatagcctctattattcattattgtatgctgttaccatttgatatgtatttgggtgaatttttttcttttcattctagttgttgagaaaaattctacttcttcgtttttttatatgatgagaaatgaagcttagaaaagctaaattacttcctaaagtcacatagtcagttatggatgtactggtaattaaacctaaatgtcttaactttagaattttttattttaaacactttaccaaattttaaatgacatatttacagtttttgtctttgagacctcatttacaatatgtgagcactttttagttatttttaaaaataatgaaatatatccaacatattttcaaataattaactttatttttagagcagttttagatttatagcaaaattgagatttctcatgtaacacctgccccacatttgcatagcttttcctattatcaacattcctcacctgagtggtgcttttaatttttttttaattttacaattgatgaatctacaattatatgtcattagcatccggaatgcatagtttacgttagggttgacatttggtgttctaaattctataggttcaaacaaaggtataacatgtattcatcattatagtcatacagagttgtttccctgccctaaaaatactctgtcctccacctactcattccttgcttttgcctaagtcccctgatccttttacattctgtatagttttgtctattctagaagtcacacagttggaatcatagagtatgtagccttctcagattggcttctttggataaataccaaggtccttggtcgcggaatcatacagtaaaaatatatttagttatgtaaacagttgccagagaatctccaaca

SEQ ID NO: 696414 - DNA, 1545 bp, Homo sapiens
caatatctttattttccaaattactatgaactctaatttcagttaaatgtcaataataaatatctaagatcatagttactttcacttatctttaatagctcttaattgcttacaccactaattaatattactaaaattaattgtcaagatgtatttccagattaattttaagccctaactcttgtataaaccttctactgcagtatagatttttgtataagtattcaaacatttcctgtgtcttctcattagttcatatcaaagtgttctctagaaaaacaaaaacaaaaacaaaaacaaaaaacttgccttcagaaaagtttccaatgcaagtcagaacattgtaaagccctgaaattagctcttatgacaaactcctatttgttaatacgctacaaaacatagtttgacatgcttgaaattaaaaatattttgtctaatttaagaactaaagcactaaagtgcatattttgatttgaattttcctagtatttctcagtaaataattttgtttccaaaaggaactcatttaaatgtatgcattatatctatgtatttattttctgaatgataaaacagaaaatatttgttgaattatgttgtatgtaagatacaatacagatataaaaataacagtataatatgaaaatattacctgatgtaatgtttttcattagtaatagcctctattattcattattgtatgctgttaccatttgatatgtatttgggtgaatttttttcttttcattctagttgttgagaaaaattctacttcttcgtttttttatatgatgagaaatgaagcttagaaaagctaaattacttcctaaagtcacatagtcagttatggatgtactggtaattaaacctaaatgtcttaactttagaattttttattttaaacactttaccaaattttaaatgacatatttacagtttttgtctttgagacctcatttacaatatgtgagcactttttagttatttttaaaaataatgaaatatatccaacatattttcaaataattaactttatttttagagcagttttagatttatagcaaaattgagatttctcatgtaacacctgccccacatttgcatagcttttcctattatcaacattcctcacctgagtggtgcttttaatttttttttaattttacaattgatgaatctacaattatatgtcattagcatccggaatgcatagtttacrttagggttgacatttggtgttctaaattctataggttcaaacaaaggtataacatgtattcatcattatagtcatacagagttgtttccctgccctaaaaatactctgtcctccacctactcattccttgcttttgcctaagtcccctgatccttttacattctgtatagttttgtctattctagaagtcacacagttggaatcatagagtatgtagccttctcagattggcttctttggataaataccaaggtccttggtcgcggaatcatacagtaaaaatatatttagttatgtaaacagttgccagagaatctccaaca

SEQ ID NO: 696415 - DNA, 1545 bp, Homo sapiens
caatatctttattttccaaattactatgaactctaatttcagttaaatgtcaataataaatatctaagatcatagttactttcacttatctttaatagctcttaattgcttacaccactaattaatattactaaaattaattgtcaagatgtatttccagattaattttaagccctaactcttgtataaaccttctactgcagtatagatttttgtataagtattcaaacatttcctgtgtcttctcattagttcatatcaaagtgttctctagaaaaacaaaaacaaaaacaaaaacaaaaaacttgccttcagaaaagtttccaatgcaagtcagaacattgtaaagccctgaaattagctcttatgacaaactcctatttgttaatacgctacaaaacatagtttgacatgcttgaaattaaaaatattttgtctaatttaagaactaaagcactaaagtgcatattttgatttgaattttcctagtatttctcagtaaataattttgtttccaaaaggaactcatttaaatgtatgcattatatctatgtatttattttctgaatgataaaacagaaaatatttgttgaattatgttgtatgtaagatacaatacagatataaaaataacagtataatatgaaaatattacctgatgtaatgtttttcattagtaatagcctctattattcattattgtatgctgttaccatttgatatgtatttgggtgaatttttttcttttcattctagttgttgagaaaaattctacttcttcgtttttttatatgatgagaaatgaagcttagaaaagctaaattacttcctaaagtcacatagtcagttatggatgtactggtaattaaacctaaatgtcttaactttagaattttttattttaaacactttaccaaattttaaatgacatatttacagtttttgtctttgagacctcatttacaatatgtgagcactttttagttatttttaaaaataatgaaatatatccaacatattttcaaataattaactttatttttagagcagttttagatttatagcaaaattgagatttctcatgtaacacctgccccacatttgcatagcttttcctattatcaacattcctcacctgagtggtgcttttaatttttttttaattttacaattgatgaatctacaattatatgtcattagcatccggaatgcatagtttacgttagggttgacatttggtgttctaaattctataggttcaaacaaaggtataacatgtattcatcattatagtcatacagagttgtttccctgccctaaaaayactctgtcctccacctactcattccttgcttttgcctaagtcccctgatccttttacattctgtatagttttgtctattctagaagtcacacagttggaatcatagagtatgtagccttctcagattggcttctttggataaataccaaggtccttggtcgcggaatcatacagtaaaaatatatttagttatgtaaacagttgccagagaatctccaaca

SEQ ID NO: 696416 - DNA, 1849 bp, Homo sapiens
  misc_feature 627, 628, 629, 630, 631, 632, 633, 634, 635, 636, 637, 638,639, 640, 641, 642, 643, 644, 645, 646, 647, 648, 649, 650,651, 652, 653, 654, 655, 656, 657, 658, 659, 660, 661, 662,663, 664, 665, 666, 667, 668, 669, 670, 671, 672, 673: n = A,T,C or G
  misc_feature 674, 675, 676, 677, 678, 679, 680, 681, 682, 683, 684, 685,686, 687, 688, 689, 690, 691, 692, 693, 694, 695, 696, 697,698, 699, 700, 701, 702, 703, 704, 705, 706, 707, 708, 709,710, 711, 712, 713, 714, 715, 716, 717, 718, 719, 720: n = A,T,C or G
  misc_feature 721, 722, 723, 724, 725, 726, 735, 736, 737, 738, 739, 740,741, 748: n = A,T,C or G
ctaataggaaaaataaaaataaagcacttagcatagtgttttgtacataaagagcactcaacatatggtagctttttgaaaaaaaatcactgctgatgttactgttgatgttgtttttgtttttatgcttaaagtcaccagcagactagaggtatgggctttcacgaatcatggccagtcacatagtcaccaatatttcataatcattctttcttgaatcaaattattgccactgctaactagaaataccaaattgaaagcactattgtttaattatatgtatgggaatgtcttaaacatttttggccagacaaaccattctaaacaaaagtcgtacagaaggttaaattgcccctttcagttataatacatgcacttccttttcctatctagacctcaataatcaactgatgcctggctcttgtggcccagggtctgtagccacatagataatcttttggtatcattcatctcatttagcccataagcttcaaattatggtaaaggaaaggtcccagatttagagttctccctggaattctgagttttttctccacagaaacccctcagagtcttttattttatctaaaaaaattttttggcagcacagtggctcacgccctgtannnnnnnnnnnnnnnnnnnnnnnnnnnnnnnnnnnnnnnnnnnnnnnnnnnnnnnnnnnnnnnnnnnnnnnnnnnnnnnnnnnnnnnnnnnnnnnnnnnnaggtggggnnnnnnnctcctgngacgaataaaacccgtcccctgtgtgttggaaacccagacccaggaggtaaaggtaatgtgcccatggtcattcagctggtaaatggcagagccggatccaaatccaggcagactgtttccatgctcttaacactatgttgattcttattaaatatccctatgaaatatgtctcatatttaccccttttctttcatctccactgatgctacatgaaacttccaggatgtgttagttgcattattacaataacttctgagtttgttactttgcttccaatctctcactggtcatctctgagtgtcactgtcagattaattttcataaaatactgcttgtagtgtgtcattcccctggccaagaaactacattttatttatttatttatttatttatttatttatttatttatttatttatgttttgagacagggtctctgttaaccaggctcaagcagttctcttgccttaacctcccgagtgctggcaccacaggcacttgtcaccacactcagctaattataaaggccataagagtaacaatcatggcttttcaagcctgacagaacctagcatcatgctgtactcacattgtttaagaaataaacatatggatacacagattgatgtgagtggtatttgggaagatttgctccaatcttggcactatattttatttatttatttatttatctagtgaaccagaaataaaattataagccccccaatcaaatgaatggcctcctcttctgggccaagggcattcctaaattaacctgaaaaactatttgaggccatgatgagaagtgggagtcagacatgcctcattattttctcctgcttttggaattcaggaccagcatttaacattaaagcagagatcttaaggttgacacagcagactctttgtagcaatgataccaacattgacagatagcaggccccatctgtcatgatagcaggcaaaggtgtcttttrtggtgaaaatctacattctgtagaaaatccccttccctttccaggtctttttcctgatccaggggagaactaactaagagtctgatacctttctaaatctgataataaacactggccagccttg

SEQ ID NO: 696417 - DNA, 1728 bp, Homo sapiens
aaaaagcatattttcagggagaggaggcagcacccagcattgcttgcttcagggaatatggctgtacctggattccaggccatgcagaacattaggcacattaggcatgggtagtcacttccatggggcgattaggaaatcctggggcaatgttacagctaaatatatccaccaaaacctcataaggacacatttatttctaaatttcaatatggttcacatatttcttgctaggtgcaagttttatgccagttttctagcctgcaaaaatatagcaaaatgcaaaatatagcacttgcaatggattttttcatacactgtattctcaatttttattatatgtccttataataaccatgtcccaaacatggttcctataaatacataaatgtcttaacatagtttttagtggcaagccaatataaatacattacataaaatgttttttgaaaactgtaattaaagatgataaaataatataaggagatgcttcttctattatgtaactattagaacttgggaaataagctttgtgaagtggaatttccatattaatgtaaatataactaatgtgccaagaggaccagtgaagttttcataccaaactgatggaaaccaaaatctaatcttccccccaaataatgacatccaaaacaattacttttctctgtgagaattttttgacatgttaatgggatccttacactgcataagagaacttcaaaaaagagttcaaagtgacagcaaacactaaagaaatagccagtcagaaaaacatatgctatgccaaattttaataatcagtttagagaatgactactagaatttaagctccactagaacaggaaataaggtccctgtgcacaagacatatttgtctaattccctgttgctatttctgtacttaacacagtgactggaaaataataaatacttactgattaaacgaataaattatttacttacttaaaccttgctttaagaagtgactaactaggaataagtagaactaaaaaatatctaaggaatcacaatggattgtaaactgcacttaagcacaaattaaaagttaagatgattcttaatgaaaaagaggagtcacttcyatttatgtttaatggtgccttaatggagtacttgaaaatgtgcataaggaaatcattgattagctgtctttcatcatcatggaaaatgggacaagagaaaatgagtttaaacattaatacatattagaggtagatataaacaaatgatttctcatgacttcaactgttaaagggaaatcttggctgactttccactaaaggtggaagatagaacatatacatctatgtttatagcctccagaagctccactaaaataataataaaaggatgtttaaaacaagaataaacctaaaggataaggagaatgaggcaggaaacaacagcaataaaattttgaaaggaacaaaaaagatagaaaaggggtaaattacctatcagatcctggaaaacttaatcctaaactggcaatggaaaaaactgagaattaagatgatttggccagacatggtggttcatgcctgtaatcccagtattttgggaggccaaggtaggtggatcacttgaggccgggagttcaagaccagcctggccaacatggcaaaacccgtctcttccaaaaatacaaaaattagctgggagttgtggcacctgcctgtaatcctagttactcaggaggctgag

SEQ ID NO: 696418 - DNA, 1728 bp, Homo sapiens
aaaaagcatattttcagggagaggaggcagcacccagcattgcttgcttcagggaatatggctgtacctggattccaggccatgcagaacattaggcacattaggcatgggtagtcacttccatggggcgattaggaaatcctggggcaatgttacagctaaatatatccaccaaaacctcataaggacacatttatttctaaatttcaatatggttcacatatttcttgctaggtgcaagttttatgccagttttctagcctgcaaaaatatagcaaaatgcaaaatatagcacttgcaatggattttttcatacactgtattctcaatttttattatatgtccttataataaccatgtcccaaacatggttcctataaatacataaatgtcttaacatagtttttagtggcaagccaatataaatacattacataaaatgttttttgaaaactgtaattaaagatgataaaataatataaggagatgcttcttctattatgtaactattagaacttgggaaataagctttgtgaagtggaatttccatattaatgtaaatataactaatgtgccaagaggaccagtgaagttttcataccaaactgatggaaaccaaaatctaatcttccccccaaataatgacatccaaaacaattacttttctctgtgagaattttttgacatgttaatgggatccttacactgcataagagaacttcaaaaaagagttcaaagtgacagcaaacactaaagaaatagccagtcagaaaaacatatgctatgccaaattttaataatcagtttagagaatgactactagaatttaagctccactagaacaggaaataaggtccctgtgcacaagacatatttgtctaattccctgttgctatttctgtacttaacacagtgactggaaaataataaatacttactgattaaacgaataaattatttacttacttaaaccttgctttaagaagtgactaactaggaataagtagaactaaaaaatatctaaggaatcacaatggattgtaaactgcacttaagcacaaattaaaagttaagatgattcttaatgaaaaagaggagtcacttctatttatgtttaatggtgccttaatggagtacttgaaaatgtgcataaggaaatcattgattagctgtctttcatcatcatggaaaatgggacaagagaaaatgagtttaaacattaatacatattagaggtagatataaacaaatgatttctcatgacttcaactgttaaagggaaatcttggctgactttccactaaaggtggaagatagaacatatacatctatgtttatagcctccagaagctccactaaaataataataaaaggatgtttaaaacaagaataaacctaaaggataaggagaatgaggcaggaaacaacagcaataaaattttgaaaggracaaaaaagatagaaaaggggtaaattacctatcagatcctggaaaacttaatcctaaactggcaatggaaaaaactgagaattaagatgatttggccagacatggtggttcatgcctgtaatcccagtattttgggaggccaaggtaggtggatcacttgaggccgggagttcaagaccagcctggccaacatggcaaaacccgtctcttccaaaaatacaaaaattagctgggagttgtggcacctgcctgtaatcctagttactcaggaggctgag

SEQ ID NO: 696419 - DNA, 620 bp, Homo sapiens
gagacgcctcgatggggaaccggtcctggaggaggcaccaggttcccctgtgaagagggctttctggcaggctggaatggtttgttgcaccacagaaatggaagccggaccttccccggccatttctaactacttgtgaragtaaaaggagattcgggggggtctaacaagaatattgggttgcttggagtattgtttccctaacagcttcgttaattggtcacattctcttctctctattttattgcaaaggcaggaatgttccccctagtctccctacactagtaaactgaaaattctaaacttagaattacagccaattcctcttcttgttacaaatcaactccggggtaacattttattgtctcaatttcttggatacaccattgtgggttactgatgccacatacagttgattaagtaagggataacatggattagctctctctcaattgataaagggcgtgtgaattcaattagattaatgacccaggtgtctttggtctttgtttcttgtttaatttacttgcagcctgagtgcatgctcaggtgacacgctggtggttagtatgtcatcattaggcagaagcggttgcatttcctggggtgcctccctttgc

SEQ ID NO: 696420 - DNA, 620 bp, Homo sapiens
gagacgcctcgatggggaaccggtcctggaggaggcaccaggttcccctgtgaagagggctttctggcaggctggaatggtttgttgcaccacagaaatggaagccggaccttccccggccatttctaactacttgtgagagtaaaaggagattcgggggggtctaacaagaatattgggttgcttggagtattgtttccctaacagcttcgttaattggtcacattctcwtctctctattttattgcaaaggcaggaatgttccccctagtctccctacactagtaaactgaaaattctaaacttagaattacagccaattcctcttcttgttacaaatcaactccggggtaacattttattgtctcaatttcttggatacaccattgtgggttactgatgccacatacagttgattaagtaagggataacatggattagctctctctcaattgataaagggcgtgtgaattcaattagattaatgacccaggtgtctttggtctttgtttcttgtttaatttacttgcagcctgagtgcatgctcaggtgacacgctggtggttagtatgtcatcattaggcagaagcggttgcatttcctggggtgcctccctttgc

SEQ ID NO: 696421 - DNA, 1272 bp, Homo sapiens
tgcaacctttgcctcctgcgttcaagtgattctcttgtttcagcatcccgagtagctgggaccacaagtgagtgccaccatgaccagctaatttttgtatttttagtasagacagagtttcaccatgttggccaggctggtctcaaattcttggcctcgggtgatccatccgccttggcctcccaaagtgctgggattacaggcgtgagtgactgcgcccggcttaggacatatttttaaataatgaaagaagcaggtccatggactctcaaagccttgagagcttggtttagggaaaaagacccatgacacaggcttttggagtttgggattttgtgacttggaagcaaggagacaaaaggatgtgacgccatcccatcagctctcccctctaaaaatttccctccaccctagttttctggcaatatttttttttacagagtgagaaaggcatgaatatggggtagatataattatgcccataatgcataatagctatcagactgatccaatgtaaatgggttatgtttataattgtagtgaactgtaattttaagtaaaatgaaatttggggttatacaacacatttcaaaatatctaattaccagaaagcaattttgtatacaaatgctctaatctattattcaacacaaacacaattttaaagtataactactagtcaatcacaattgctctgacattaccatacaagtctcttgcaaagactattcaaagcatttcaacagtgttggaagcttccagtattaagtggttagaaataggaagtctggcaaatgaggccattaacaagtgtgaaggcctcgaaactatcaaggtcatcaaaaacatgggaagtctgagaaattgccgcagccaagaggagcctgaggagacgtgaggactaaatgtgatatggggtctttgatggggtcccggaagagaaaaaggacattaggtaaccactaaagcagtctgaataaagtatagactccagataataataatatatcaatattgatttattaactggaacgaatgtaccataaagtgtgaaatgttaacaacaggggaaactggatgtgagctatatgggaattctgtccaattctcccaatttttctgtaaatctgaaactgttatttcttaaaaatctattttaaaaaagagattcacaaaactactggaagcctggaagccatgtatagctgcattaaagtggttttagcttgccagttttattatttaattacctttgttgcttgaattgtgttt

SEQ ID NO: 696422 - DNA, 1272 bp, Homo sapiens
tgcaacctttgcctcctgcgttcaagtgattctcttgtttcagcatcccgagtagctgggaccacaagtgagtgccaccatgaccagctaatttttgtatttttagtacagacagagtttcaccatgttggccaggctggtctcaaattcttggcctcgggtgatccatccgccttggcctcccaaagtgctgggattacaggcgtgagtgactgcgcccggcttaggacatatttttaaataatgaaagaagcaggtccatggactctcaaagccytgagagcttggtttagggaaaaagacccatgacacaggcttttggagtttgggattttgtgacttggaagcaaggagacaaaaggatgtgacgccatcccatcagctctcccctctaaaaatttccctccaccctagttttctggcaatatttttttttacagagtgagaaaggcatgaatatggggtagatataattatgcccataatgcataatagctatcagactgatccaatgtaaatgggttatgtttataattgtagtgaactgtaattttaagtaaaatgaaatttggggttatacaacacatttcaaaatatctaattaccagaaagcaattttgtatacaaatgctctaatctattattcaacacaaacacaattttaaagtataactactagtcaatcacaattgctctgacattaccatacaagtctcttgcaaagactattcaaagcatttcaacagtgttggaagcttccagtattaagtggttagaaataggaagtctggcaaatgaggccattaacaagtgtgaaggcctcgaaactatcaaggtcatcaaaaacatgggaagtctgagaaattgccgcagccaagaggagcctgaggagacgtgaggactaaatgtgatatggggtctttgatggggtcccggaagagaaaaaggacattaggtaaccactaaagcagtctgaataaagtatagactccagataataataatatatcaatattgatttattaactggaacgaatgtaccataaagtgtgaaatgttaacaacaggggaaactggatgtgagctatatgggaattctgtccaattctcccaatttttctgtaaatctgaaactgttatttcttaaaaatctattttaaaaaagagattcacaaaactactggaagcctggaagccatgtatagctgcattaaagtggttttagcttgccagttttattatttaattacctttgttgcttgaattgtgttt

SEQ ID NO: 696423 - DNA, 665 bp, Homo sapiens
tttttaactgctggaagtgttaaaacacacacacacacacacacacattttttttttsagaactccaaagtcctgaaaattttggtggacaatgatttttaaaaaactaactttgtataacctaatatttgtattctctcatctatatttttttattcactataatcatgatactcttctaatagacttaaaagttaatcattgacaacgaaaaataaaatgttattttaaaagactcacagtgtctgaccaattatgttttcatccttgattgtaaaatacagacgctgctgtttctgttctgctatgttaaagtgcttggtgacacacatttatatatgcacctcttcctccaacattgtttttaatcctctctgttaattgtgtctgatctggagcccagatgggaagtgcccgtgtcccgtgcatggctgcatgtcctgatagacaggagctaagcagagaccagctgagtgcttccccatcaccaaagccagagggctgtggggctgcagatcatgtgggcctcttttcagctgctaatttaagaaagggctttggttaatgggtgtgtgatttagctgtagaggtctggacatggagagctttctccagggcctatctggctggatctggggtggcaagaaacaaggaaggcagggggt

SEQ ID NO: 696424 - DNA, 665 bp, Homo sapiens
tttttaactgctggaagtgttaaaacacacacacacacacacacacattttttttttgagaactccaaagtcctgaaaattttggtggacaatgatttttaaaaaactaactttgtataacctaatatttgtattctctcatctatatttttttattcactataatcatgatactcttctaatagacttaaaagttaatcattgacaacgaaaaataaaatgttattttaaaagactcacagtgtctgaccaattatgttttcatccttgattgtaaaatacagacgctgctgtttctrttctgctatgttaaagtgcttggtgacacacatttatatatgcacctcttcctccaacattgtttttaatcctctctgttaattgtgtctgatctggagcccagatgggaagtgcccgtgtcccgtgcatggctgcatgtcctgatagacaggagctaagcagagaccagctgagtgcttccccatcaccaaagccagagggctgtggggctgcagatcatgtgggcctcttttcagctgctaatttaagaaagggctttggttaatgggtgtgtgatttagctgtagaggtctggacatggagagctttctccagggcctatctggctggatctggggtggcaagaaacaaggaaggcagggggt

SEQ ID NO: 696425 - DNA, 665 bp, Homo sapiens
tttttaactgctggaagtgttaaaacacacacacacacacacacacattttttttttgagaactccaaagtcctgaaaattttggtggacaatgatttttaaaaaactaactttgtataacctaatatttgtattctctcatctatatttttttattcactataatcatgatactcttctaatagacttaaaagttaatcattgacaacgaaaaataaaatgttattttaaaagactcacagtgtctgaccaattatgttttcatccttgattgtaaaatacagacgctgctgtttctgttctgctatgttaaagtgcttggtgacacacatttatatatgcacctcttcctccaacattgtttttaatcctctctgttaattrtgtctgatctggagcccagatgggaagtgcccgtgtcccgtgcatggctgcatgtcctgatagacaggagctaagcagagaccagctgagtgcttccccatcaccaaagccagagggctgtggggctgcagatcatgtgggcctcttttcagctgctaatttaagaaagggctttggttaatgggtgtgtgatttagctgtagaggtctggacatggagagctttctccagggcctatctggctggatctggggtggcaagaaacaaggaaggcagggggt

SEQ ID NO: 696426 - DNA, 665 bp, Homo sapiens
tttttaactgctggaagtgttaaaacacacacacacacacacacacattttttttttgagaactccaaagtcctgaaaattttggtggacaatgatttttaaaaaactaactttgtataacctaatatttgtattctctcatctatatttttttattcactataatcatgatactcttctaatagacttaaaagttaatcattgacaacgaaaaataaaatgttattttaaaagactcacagtgtctgaccaattatgttttcatccttgattgtaaaatacagacgctgctgtttctgttctgctatgttaaagtgcttggtgacacacatttatatatgcacctcttcctccaacattgtttttaatcctctctgttaattgtgtctgatctggagcccagatgggaagtgcccgtgtcccgtgcatggctgcaygtcctgatagacaggagctaagcagagaccagctgagtgcttccccatcaccaaagccagagggctgtggggctgcagatcatgtgggcctcttttcagctgctaatttaagaaagggctttggttaatgggtgtgtgatttagctgtagaggtctggacatggagagctttctccagggcctatctggctggatctggggtggcaagaaacaaggaaggcagggggt

SEQ ID NO: 696427 - DNA, 1168 bp, Homo sapiens
ccttctggatgtttccgtagtgcaacaaacatcaaccgtgatttcttctcacataggcatggcctccctgagccctcgcatgtgactgatgatctaaggccctcaaggcacagttctctgggtctttcagatgggcagtgactgaccagaggtgccttcagattcttctcctagcccacggagccacataattcatatctcagcagagatgccattcttcatcaaaccacatttcctccccttccccaggaaggagagagagacaggggagtggcaagaaagccaaagctcagtttcacacatatgaattcagatctcccaggaatattcttgtagacatgccaaacagtttgaaatatgagtctggaattcaaaggggaagctttcgttttagatgcacttttgagatgatcaagtttggagtggaacgttatgaaagccactatcaaagttctaataacagctcagccaccagaaagtgatttcaaattaacccaattcctttcttgtcttttgcactcttgttgaatggcatgagtcatgcagggcggtatttctcccaagccttcctcttcctctgtctgcctttctcccaggctccagttccccaacatcccttccctacacgcctctcccatgacttctgcatgtacctatgccatctttttccagctctgcaacacaatgcaaaaccctacaagagctttttggcaattcctcaaggagaggaaagaaacctaactcataaaaccagaatcttttaagagtaakaaaagctgtcccagcaaatgagcaacagaacttctgatgccaaagtttcttctgggtagaaaagagcaccttttccttacacaagatagaaggaagttttcagaggcagcaggacaaccggcttcctaatctggctaagggtcccattgagatgatgaaccgaccctacgatttacaacttgttcatctgtgtcggatgaaatggttgtaagagaatccacattcacaatagaaagccaaataaaatgtatgagaaggtatctttgcatctttttggcatattttggaaaagccgcttcctgtttcaagccatcattgttttcatgagaggaagtgatcagcatggggctgtggtgtggagccaggatgttcacagccagccaagctctatcgagag

SEQ ID NO: 696428 - DNA, 678 bp, Homo sapiens
gtgtgtgtgtgtgtgtgtgtgtgtgtgtgtgtgatcaaccactttgctatggaaatagggagttagagaggtcctaggtccttattagagattgccagaatgtttggataaactgcaattttgtggatttagttgactttgaaaagtacatcacattttcaaagaactgtcagattgtcatcacatgacagagctcagagatttaacaagattttattacaatgggatgagaatgtgatttttaatataaccctcaactgatgcatttttggaagtgccatmccctttcaaaatcatcattttttgagtctactcatgttttccagggcttctatgatcactcaaacagccgtttgatctggtgttcagagctacattatttgaaactctggaaactccagaaaatcattctcatctcttcccagccgtgcctctatttttagcctaatcatactgtattggtcggtttgatcccccactgaattcacagccctgattcggaatgacttttcctctttctgaaagtcagcaccatcctaggcgagatggttgaaagccacaagggaaattcaaaggtatcgtgtttctcattttcccaaacttggaattaagctctaggtttttttcagataattgttttttggttaaaatattgtctgtagactttaatttatcaca

SEQ ID NO: 696429 - DNA, 678 bp, Homo sapiens
gtgtgtgtgtgtgtgtgtgtgtgtgtgtgtgtgatcaaccactttgctatggaaatagggagttagagaggtcctaggtccttattagagattgccagaatgtttggataaactgcaattttgtggatttagttgactttgaaaagtacatcacattttcaaagaactgtcagattgtcatcacatgacagagctcagagatttaacaagattttattacaatgggatgagaatgtgatttttaatataaccctcaactgatgcatttttggaagtgccatcccctttcaaaatcatcattttttgagtctactcatgttttccagggcttctatgatcactcaaacagccgtttgatctggtgttcagagctacattatttgaaactctggaaactccagaaaatcattctcatctcttcccagccgtgcctctatttttagcctaatcatactgtattggtcggtttgatcccccactgaattcacagccctgattcggaatgacttttcctctttctgaaagtcagcaccatcctaggcgagatggttgaaagccacaaggraaattcaaaggtatcgtgtttctcattttcccaaacttggaattaagctctaggtttttttcagataattgttttttggttaaaatattgtctgtagactttaatttatcaca

SEQ ID NO: 696430 - DNA, 3347 bp, Homo sapiens
  misc_feature 562, 563, 564, 565, 566, 567, 568, 569, 570, 571, 572, 573,574, 575, 576, 577, 578, 579, 580, 581, 582, 583, 584, 585,586, 587, 588, 589, 590, 591, 592, 593, 594, 595, 596, 597,598, 599, 600, 601, 602, 603, 604, 605, 606, 607, 608: n = A,T,C or G
  misc_feature 609, 610, 611, 612, 613, 614, 615, 616, 617, 618, 619, 620,621, 622, 623, 624, 625, 626, 627, 628, 629, 630, 631, 632,633, 634, 635, 636, 637, 638, 639, 640, 641, 642, 643, 644,645, 646, 647, 648, 649, 650, 651, 652, 653, 654, 655: n = A,T,C or G
  misc_feature 656, 657, 658, 659, 660, 661: n = A,T,C or G
cccatgtcgagcctggcccccaccatggctggaagagagtgggggtgggtgatgggtggcacatcaggcaggcaagggaagggaggaggaagaagacaatccctgttgctctcatcgtttaggcttcctcttcgtccaccctgtggctggtgagaacagggcacggccccgagagaagctctaaaagtacttgttgcataaataaacacacactttctctagagtaaaactgaacatatgatctcccttgtgaaacaaaactttgccataatccttttgctgtttacgatgcactcattctcttctctttatttcattaatgaattcatttgacaaatgactattgagatatttctgatctggtatgcagaataaaacagtgaacaagatggtaaactacctgttttctggttggaatagggcaggataccaaaaataaacaaacagaagaaatgaagacatcaatgatgagggtgaagtgtgtggggcaggagagcatgaggggtgggtgactgggagcacttcaggtggaaagggactgagttgacttaaaaaggggcannnnnnnnnnnnnnnnnnnnnnnnnnnnnnnnnnnnnnnnnnnnnnnnnnnnnnnnnnnnnnnnnnnnnnnnnnnnnnnnnnnnnnnnnnnnnnnnnnnntggtgggggcaggtttttgagtggctgcagtgagctggtgataaagatctcctcatcacacccacacatccaattagtaacagtgtcagtttgctcctgtgcccatctcattgccaccgccctggtccacggccccatatgctcacctgggttcctaccacagcctgtagggtgggccctctgctcagtcgctgaccctcccatcccacttgcttctggcagagcgcgcttccaaaacacagatctgttctggccccgcccctgcttacggccctttttggcctctgtggccctcagaatcaagtccagatgctctggcctggcgcatatgcacgatggggacctgctggggccacccaaatcggcccttgcagcagtgagactgagccacatgcaggtcctcagatcactgtgggctccgtccctgccctggctgtagcacatgctgctcctgccccctcctgtgttctgctccaccccagtctcaccctgacattcccatatctcctgcttttacccctctttggtgtttgcttatcactgcaccccagaacctcatccagtccctggcacgtagaggaccctcactggttctttgagaaatgcataaattcagtgttggttcctgcgaagagtcttccttgaaaatgctttcaggaggctgtgctgtccctggcagggcaaggtgctttgtagcaggattttcccctcttatggtggttctttagaaaggccattacttggctatgcctgtaatctcagcactttgggaggctgaggcgggtgaatcacgaggtcaggagatagataccatcctggttaacatggtgaaaccccatctctactaaaaatacaaaaaaaaaaaaaaaagccaggcatggtggcacgggcctgtagtcccagctactcgagaggctgagcagaagaatcgctggaaccagggaggcagaggttgcaatgagccaagatgatgccactgccttcagcctgggcgacagagcaagacttcgtcaaaaaaaaaaaaaaaaaaaaggctattgcaagatccaggcatatacatagtaaaccatagataccacatcaatgattgatgggaatttactaaacagaatgccatttaggatacgatgaaatcatgcctagtgtaacatctgccttcttaaaaacaaattcagagtatcattaaaaaaaaaagtacaagaaaaataagaccatatgtagaagtttgtaactaagaacatatgtcagtgaaaagaaaacctaatagcatattttattactaattgtttaaatcaatatgtaatacataagccttttgtcccaaatgctgttgccttccatagcatctaaaaataaataccatctttcattgaatctaagactccatcaatcataagatgagctgttattttatgttcagcactgccccgctcattcaccctcctattcttttctgcctgcttctggcagccagatcattcttccaaaacacagatctgattaggcccaatccctgcttgtggccctttggtggcttctggggtcctcagaattaagtccagatgctgtggcctggcacccatgccctgcactgtgggaatcctctgtgtcctcccactcggcccttgtggcagtgagacccagccatctgcaggtcctcagatcgccatgcgcccctttccttattttatgcactatcaataaagaaaaatatgctgccaattaactgtgacccctgattgtaaagcattatgactgccctgcctcttcacctccaccaggagagtctgaacatagagtttctctctagaatagtggttctcaactgggggtgcttttgcttcccccttgcccgaggggatgtgggcaacgtctagagacattttcacttgtcacaactggggtactggtggtactggcatctcgtgggtagagctcagggttgctgccaaatctcctccaatgcacagggcaactttcaacaaccgagagtcatcagcccaaaatgccagtagcaccagtgttgagaaatggtgctctagaacgtacaagaattgcttgcacatctcctccaatgcacagggcaactttcaacaaccaagagtcatcagcccaaaatgccagtagcaccagtgttgagaaacggtgctctagaacgtacaagaattgcttgcactttttgtattctgctgccatgagtactatcatcttctggattttctttgcttttttttctgtagagcattgatcttaagcactgggcccattcagaatgcatatatgaaaactctaacaaagcattttaggagcctccgtgagttggagccatgatttatttcaataaattaaactaagctctgcacaagcctttatttctcccactctagtataaaaccagaaaatgcacttagacacattctgcattttaattatactttcagaggatataacagttgyatgaattaagaagcagtaaaattaaatcgatttttccatacatgcagaaagatgcaggacttaatgtgcattataattagggacaatgaaatcaattgtagaatttgtttcaaagtcactaaaaccctaaattatattgaactgccaacctcttccagcttgtcacttgtttccttaaaatcagtctaacacctgtttaagtcctgcttttggcaagctgctaaaccca

SEQ ID NO: 696431 - DNA, 622 bp, Homo sapiens
gagatggtccagtgccaggcaaaccctcatgatcttgtaccagacagaatccttttgaggttcctgacactccgttcccatttctrccctccatcgtgtgtgacaggtagtcacctatgattttaaacatccagagcacagttttctttctctcctccccacaattaaaacctggttgaaagaaatatcttgcattagtcatttgcagcagagggtgacgctgctgatggttgggacgttctgatcctagaccctaattagagtggtgaaagtctctgcttctcattgaggaagccaagcctctattaatgatttgggaaggaagctgagatgctgaggtcttggccttgcctcagaagtcagggccatttacgtaacctgagccccatccctgctctctcccaaaggtatgcacagctgcttcctgggtgctgcttttaataagctcagaattaaaaagcaaatcctgctatttgagccttcactgagtgctccaggaagacaagagataggggtcgagggcatcttgttcactccaagtcccctgcatctggcacaggtcctagtatgtgggtgatgaccaaacaatatggatccaatgagtaaatggtagactgaacgc

SEQ ID NO: 696432 - DNA, 622 bp, Homo sapiens
gagatggtccagtgccaggcaaaccctcatgatcttgtaccagacagaatccttttgaggttcctgacactccgttcccatttctaccctccatcgtgtgtgacaggtagtcacctatgattttaaacatccagagcacagttttctttctctcctccccacaattaaaacctggttgaaagaaatatcttgcattagtcatttgcagcagagggtgacgctgctgatggttgggacgttctgatcctagaccctaattagagtggtgaaagtctctgcttctcattgaggaagycaagcctctattaatgatttgggaaggaagctgagatgctgaggtcttggccttgcctcagaagtcagggccatttacgtaacctgagccccatccctgctctctcccaaaggtatgcacagctgcttcctgggtgctgcttttaataagctcagaattaaaaagcaaatcctgctatttgagccttcactgagtgctccaggaagacaagagataggggtcgagggcatcttgttcactccaagtcccctgcatctggcacaggtcctagtatgtgggtgatgaccaaacaatatggatccaatgagtaaatggtagactgaacgc

SEQ ID NO: 696433 - DNA, 622 bp, Homo sapiens
gagatggtccagtgccaggcaaaccctcatgatcttgtaccagacagaatccttttgaggttcctgacactccgttcccatttctaccctccatcgtgtgtgacaggtagtcacctatgattttaaacatccagagcacagttttctttctctcctccccacaattaaaacctggttgaaagaaatatcttgcattagtcatttgcagcagagggtgacgctgctgatggttgggacgttctgatcctagaccctaattagagtggtgaaagtctctgcttctcattgaggaagccaagcctctattaatgatttgggaaggaagctgagatgctgaggtcttggccytgcctcagaagtcagggccatttacgtaacctgagccccatccctgctctctcccaaaggtatgcacagctgcttcctgggtgctgcttttaataagctcagaattaaaaagcaaatcctgctatttgagccttcactgagtgctccaggaagacaagagataggggtcgagggcatcttgttcactccaagtcccctgcatctggcacaggtcctagtatgtgggtgatgaccaaacaatatggatccaatgagtaaatggtagactgaacgc

SEQ ID NO: 696434 - DNA, 1198 bp, Homo sapiens
aataaatgtccactcctgctctgatacttgcttccatcattttttctgccttatgcccctcagtcaaattctttcttctgaggaaggcaagaattgaggttgctgtagacccacacagatttgccaccagtagcagatacctcccactggtaacaggacaacacatgtagagagtgaaagaaagcactggtrataatatactgagaaaacaggcatagaatgtgactacccacagccggtcatcctaagcagaagacaggctgctgaagcagggagtgattttagaggggctgcatactggggaaccatcacaaggagcaggaagtggcctctgtgctggttaccttctccatttaaactatcttcactgtttttcaaaagaaggaagaaaagtaggcaggatggaaggaaggagggatgaaggaagagagagtaggaaggtggtaagaaaaggaaagaaggaaagaaatgatttttaaacaaaatatatcaaaactattaaaagtaaaaaatacagaaaagtacaaaaatttactgaaatattaccagtgtggggcagaagagatagtgtcatcttgtgttgaaaatcatttttttccacatttccatacttgaagaataaatagataaatggaaggagggtagaaagacaaaataattttatgaaaaaaaaatcttacattatgtacttttaataaaaggagttgaattaaattttacatagtacccacaaaaaggaaactgaaatgaaactaagggaaatgttacacttcacataaacgcttcttcattaccaaaaaatatgagttcctatttccaaactccccagttctctacaatactgcataccctaatcccccgtctgacctgactccagtcacctgttggcctaacttggattaaagcaaagtccattttcagatcaagagagcaggcagctttggcaatgagtctggggagtataaagacagtccttctgcccctaagaactctttcatgatcctgctatgggcttttccatttccaccttcagtcacttgcctggcggaaggttcctgttgtgttacttggggaggtgtcagggctgcaggtgtagctgtgcatcctcctttaatgaggggagtacagtcaggaaacgcaggactcagagcacaagggcagaagaagccacacccaggccccactcctgccatttctt

SEQ ID NO: 696435 - DNA, 1198 bp, Homo sapiens
aataaatgtccactcctgctctgatacttgcttccatcattttttctgccttatgcccctcagtcaaattctttcttctgaggaaggcaagaattgaggttgctgtagacccacacagatttgccaccagtagcagatacctcccactggtaacaggacaacacatgtagagagtgaaagaaagcactggtgataatatactgagaaaacaggcatagaatgtgactacccacagccggtcatcctaagcagaagacaggctgctgaagcagggagtgattttagaggggctgcatactggggaaccatcacaaggagcaggaagtggcctctgtgctggttaccttctccatttaaactatcttcactgtttttcaaaagaaggaagaaaagtaggcaggatggaaggaaggagggatgaaggaagagagagtaggaaggtggtaagaaaaggaaagaaggaaagaaatgatttttaaacaaaawatatcaaaactattaaaagtaaaaaatacagaaaagtacaaaaatttactgaaatattaccagtgtggggcagaagagatagtgtcatcttgtgttgaaaatcatttttttccacatttccatacttgaagaataaatagataaatggaaggagggtagaaagacaaaataattttatgaaaaaaaaatcttacattatgtacttttaataaaaggagttgaattaaattttacatagtacccacaaaaaggaaactgaaatgaaactaagggaaatgttacacttcacataaacgcttcttcattaccaaaaaatatgagttcctatttccaaactccccagttctctacaatactgcataccctaatcccccgtctgacctgactccagtcacctgttggcctaacttggattaaagcaaagtccattttcagatcaagagagcaggcagctttggcaatgagtctggggagtataaagacagtccttctgcccctaagaactctttcatgatcctgctatgggcttttccatttccaccttcagtcacttgcctggcggaaggttcctgttgtgttacttggggaggtgtcagggctgcaggtgtagctgtgcatcctcctttaatgaggggagtacagtcaggaaacgcaggactcagagcacaagggcagaagaagccacacccaggccccactcctgccatttctt

SEQ ID NO: 696436 - DNA, 1198 bp, Homo sapiens
aataaatgtccactcctgctctgatacttgcttccatcattttttctgccttatgcccctcagtcaaattctttcttctgaggaaggcaagaattgaggttgctgtagacccacacagatttgccaccagtagcagatacctcccactggtaacaggacaacacatgtagagagtgaaagaaagcactggtgataatatactgagaaaacaggcatagaatgtgactacccacagccggtcatcctaagcagaagacaggctgctgaagcagggagtgattttagaggggctgcatactggggaaccatcacaaggagcaggaagtggcctctgtgctggttaccttctccatttaaactatcttcactgtttttcaaaagaaggaagaaaagtaggcaggatggaaggaaggagggatgaaggaagagagagtaggaaggtggtaagaaaaggaaagaaggaaagaaatgatttttaaacaaaatatatcaaaactattaaaagtaaaaaatacagaaaagtacaaaaatttactgaaawattaccagtgtggggcagaagagatagtgtcatcttgtgttgaaaatcatttttttccacatttccatacttgaagaataaatagataaatggaaggagggtagaaagacaaaataattttatgaaaaaaaaatcttacattatgtacttttaataaaaggagttgaattaaattttacatagtacccacaaaaaggaaactgaaatgaaactaagggaaatgttacacttcacataaacgcttcttcattaccaaaaaatatgagttcctatttccaaactccccagttctctacaatactgcataccctaatcccccgtctgacctgactccagtcacctgttggcctaacttggattaaagcaaagtccattttcagatcaagagagcaggcagctttggcaatgagtctggggagtataaagacagtccttctgcccctaagaactctttcatgatcctgctatgggcttttccatttccaccttcagtcacttgcctggcggaaggttcctgttgtgttacttggggaggtgtcagggctgcaggtgtagctgtgcatcctcctttaatgaggggagtacagtcaggaaacgcaggactcagagcacaagggcagaagaagccacacccaggccccactcctgccatttctt

SEQ ID NO: 696437 - DNA, 647 bp, Homo sapiens
ttgtcttcaccatcaggtctagcccagagctggtgacatgtcccttgtaatgtcttggaataaaactaaatgaagttaggtaacttcaactctagcactgaagttaggtaaccaactaaatgaagttagttggttacctaaatgaagttaggtaaccaactctagcactctgccactagtttgtagaggatccttgctcaagtatctctcagcggaactgtaaaacgaaggagttggttaaatgagaaagtccgcttcggtacttaaaattctgaatcatatgataatatctatccagcccctccactgctacgtaaaaagttcaggtgaagatctatggtgggtgagttttaaattactaggtttttctttaaaagccaaacctttttcctccagatttattaagrtataattgacacataaaattttagatagttgtgatgtacaaagtgatgttttgacacatgcaggcattgtaaatgattacatcaaactaacacatgcattacctcccaaacttttttttgtgtgtgtggtaagagcgtttatggtttacttctttagcaattttcaagtaggcaatacattattattaatgacagacaccatgctgtacaatagatctccagaatttagtcatcctgtcc

SEQ ID NO: 696438 - DNA, 1566 bp, Homo sapiens
tgagaactacacaaccgactgacttgttttgttttgttttgcttttaaagaaaaagcaatgacaacaaaaaacacctagttaacagaccagcatctgcatcctctttgtccttcaagaagtacaagccaagagggttcagaaatacacataagaatttccatttgataaaatacaaagttcaaggcagcctttgcttttaaaagttgwtttcatgttatgaaagatctaaggctattaaatctagtggcaatatgcaagggaaaggaaaccacttaaatattgttatcgttctagtaatggaagagttgttcaaagcaagtgcagtgggtagtgctcctgattctcctcccaaagcagcatttaccagagagaaaaaaacattggtggttatctgtagtgggcaaatgctacagtgcattttagcaaaactttactgaaaatttctcgttttcttttcttattgcctaaggcatgttgtttgtcaggattatttttctattttagctgtgtggtgattttaaaacactgtcgatgtattataatgatctactataagcataatgtgtaaagtaacccaggtataatataatttataaagacttcatcaagttattatctgagttactcatattacttttagcatcaactgtcttgtattctaaatatttatgtatttttctggaatatctatttctctgtatgtcctactctatccatattttacattgactggaaatataaccataagtttagtgaataaattactaattttcaaaaaagtctgctaaaaaaaacctaataaaattgttttgtgctttctttaaaacttcaaggaagaaatcttagacaggaaggaaaagaatttcctagtagtttccacagaaattgcacaattttccctgccaaatactactcttactctaagattgtctccccatttgtctgtttatataattgtgatttttccttgtctttctcaagttgcagtcttagaaagagtttaacatctagtgtaaattttagatcaaggataattgtctaatggcaaccacatctgccatgggttgagccccactttatctcaggaaaagcctgcccactaaatgcaatgctttggggcctgccttgtagctgccaccttttactataaacagcatgagaaattcaaggtctgcaattgaggtaagtgcttctaacaattctggacagcttaaataaggagaacagcaaaccatcttttcaattcaagaaacagagtgagatctaaggaatttccatgttcatgacttaaaaaaaaacaaaaaactcatcttttcattacatatggctataggagcaaaaacaaaaatccaaattttaacctgggtgtcatcaggcatatcccatacacctgatgaaacttacactggtttccctcacatgctattttgctacacttgaatgtggataataaaccatttggttttcaggcaggaaacgaatggcacaaactaagtaatttgagaatttaataaagggattattgacaaaagcatgtgcagggaaaaccacaataccacagcatt

SEQ ID NO: 696439 - DNA, 1566 bp, Homo sapiens
tgagaactacacaaccgactgacttgttttgttttgttttgcttttaaagaaaaagcaatgacaacaaaaaacacctagttaacagaccagcatctgcatcctctttgtccttcaagaagtacaagccaagagggttcagaaatacacataagaatttccatttgataaaatacaaagttcaaggcagcctttgcttttaaaagttgttttcatgttatgaaagatctaaggctattaaatctagtggcaatatgcaagggaaaggaaaccacttaaatattgttatcgttctagtaatggaagagttgttcaaagcaagtgcagtgggtagtgctcctgattctcctcccaaagcagcatttaccagagagaaaaaaacattggtggttatctgtagtgggcaaatgctacagtgcattttagcaaaactttactgaaaatttctcgttttcttttcttattgcctaaggcatgttgtttgtcaggattatttttctattttagctgtgtggtgattttaaaacactgtcgatgtattataatgatctactataagcataatgtgtaaagtaacccaggtataatataatttataaagacttcrtcaagttattatctgagttactcatattacttttagcatcaactgtcttgtattctaaatatttatgtatttttctggaatatctatttctctgtatgtcctactctatccatattttacattgactggaaatataaccataagtttagtgaataaattactaattttcaaaaaagtctgctaaaaaaaacctaataaaattgttttgtgctttctttaaaacttcaaggaagaaatcttagacaggaaggaaaagaatttcctagtagtttccacagaaattgcacaattttccctgccaaatactactcttactctaagattgtctccccatttgtctgtttatataattgtgatttttccttgtctttctcaagttgcagtcttagaaagagtttaacatctagtgtaaattttagatcaaggataattgtctaatggcaaccacatctgccatgggttgagccccactttatctcaggaaaagcctgcccactaaatgcaatgctttggggcctgccttgtagctgccaccttttactataaacagcatgagaaattcaaggtctgcaattgaggtaagtgcttctaacaattctggacagcttaaataaggagaacagcaaaccatcttttcaattcaagaaacagagtgagatctaaggaatttccatgttcatgacttaaaaaaaaacaaaaaactcatcttttcattacatatggctataggagcaaaaacaaaaatccaaattttaacctgggtgtcatcaggcatatcccatacacctgatgaaacttacactggtttccctcacatgctattttgctacacttgaatgtggataataaaccatttggttttcaggcaggaaacgaatggcacaaactaagtaatttgagaatttaataaagggattattgacaaaagcatgtgcagggaaaaccacaataccacagcatt

SEQ ID NO: 696440 - DNA, 600 bp, Homo sapiens
taatcaaacccatttccagaggatgggcagaaattttagtaaccataagggagaaggcacagaattaggaaaaacagttggcagttcacttatgcttcacccaccaaaaagagtcacccgtagrtagatgaacacaggaatggagacttttatgtctctccctgactgtcaggacctgcagtctaatactgcagccaccagtcacatgtgactattgagcacattttaaatgtggctaccagaaaatgtaaaactacatatgtggcttgcatttgtggctcacattctatatggacagtgctggtctatagcatgagagaaccatattctatactaactgtaaaactggccagcttggtggagtttctgtttgaagtggctggaatattttatttcctactacatgggtaaaaaaaaaaaagtattttatttacttttatttgctcatgtagtgagtgacttagtccaagaaaacatggcagaaattggaggtggagtaggggtggtgattaactacaggttgttacagaaagtttgtataaaagggtggtatggtttggctgtgtttccactcaaatctcatctggaattataattccc

SEQ ID NO: 696441 - DNA, 445 bp, Homo sapiens
atgagtacaataataatagatttttgcatttcacagggcattttttggggcaaatgggctgatttgttggttgttgctttgtgatttttcgagaactttattaaagtggcctgtggactgctgttgctgtggtaaagctactcctagagaatggcagtgccccaggacacacagtaaccctcagggccagtaagagaggaaatcgtctatacattttaatcccgcgtatcttgttcctgccgcattccacttaccacctgttccaggctcactcagggctcatccttcactggggcaggcgtgcaggaaaagcactgggtgtagacgcattaacagcactgacagsttatgttcaaggtgtcggccatggcatctcttattccatacactgggagcattttgaagagcagggaaaatgagttattttctccagccacgtctcgta

SEQ ID NO: 696442 - DNA, 1764 bp, Homo sapiens
gtaacccactcaggataatgtaatttggaggagaaagatcaccagtttgcttcttgaaagctaggaagagatgaccagatgcaaaaaaaatgtgagaaacatgacgttattggctactcaaagataaaatttgaattaaccaatatgataaaaattaagttttgagtatttctctattaatgctttttttgactctttccatttaataatacagtcatgtgtcacttagcaaaggggttacgttttgagaatgtctcactgggctattttgttatttgaacatcacagactgtactctcacaattctaggtggtatttatgcttatttatgtatattttttatatgaaaaaccaactgtcccagcaccatgactgaatatcaatcatttcctctacttgacctgcactgccaatatcaagtattatataccaggtttccatatgtgctccattataattatgggccagctgttgtccatgcagtccatcattgacagaaatattgtcatcagcatgactgtagtctaggcccaagcaatgccacatttcatacagggccagttctccaaaaactatgaagcccgcaaaatgcccttaatctccacttccaacattcttttacctctttgggcatcctgtcaaggtcccaagttacttatgagctcatcgttctgacctgctgtcagagaaaaattcgataagttaatgtaaataaaggttaagtaactgttcaatcttaaagccttacttctgctaggaaggagtaaaagagatctgaaaaggtgaaattcaaatatgaagaaggggatggggtgcagccctgaaatcagacagaaatcagctccagccacacttctacaaggtttaagatttttttccgattcctccaagagccaacaagggtatcttctggaataatgaaaatgtttcccaggattagactttagaaaaagctttgaggtctcagggaggtggggtaagcctgagtgctggctcttgaagtccgtcaccccgttaccagcttccatggtttcgctgcctgatctcctgacggaaaaaccagggggcgcggccaggatcattaggaagaactgctcccgggtcagagcacgtagccacttcctccccggaaatatgccccagcggccattctctccatgagtctgggcattccctaaaattgtgcatggctgctggtaatcccacggcagggctcatcagtttaataactttcaaagccctaatcacagcacagaggggaaattttcttctttggagctaagttgggcagtggagggcacagctttgaactgcarggcagaatgtggccattcgctggggctcatcctctgctccggtagctccggagaccaagtctaattgagtagataaatcatccacactctctatgaaaagcgactgcaccttttatattttcgtggaagttgttgaaaaaaatctgaaaaatatatgctcaccttggctacagttcacagaaattttgcctccaattcttcttttgacaatgtggagattttttttttcaactcatgctgatgcaaagagaatttgagcatttccctcttttctcttttgccctcagtttaatgtgtgatcatgtttccctccaccctgaacgatgacttggtcttctgcacaacgatgcttgctgacatttcagaaagaagctgtcaagagagccaggattatttttcatatttaaaatattctctagatgattctgaacttgcctttcatgtttga

SEQ ID NO: 696443 - DNA, 1764 bp, Homo sapiens
gtaacccactcaggataatgtaatttggaggagaaagatcaccagtttgcttcttgaaagctaggaagagatgaccagatgcaaaaaaaatgtgagaaacatgacgttattggctactcaaagataaaatttgaattaaccaatatgataaaaattaagttttgagtatttctctattaatgctttttttgactctttccatttaataatacagtcatgtgtcacttagcaaaggggttacgttttgagaatgtctcactgggctattttgttatttgaacatcacagactgtactctcacaattctaggtggtatttatgcttatttatgtatattttttatatgaaaaaccaactgtcccagcaccatgactgaatatcaatcatttcctctacttgacctgcactgccaatatcaagtattatataccaggtttccatatgtgctccattataattatgggccagctgttgtccatgcagtccatcattgacagaaatattgtcatcagcatgactgtagtctaggcccaagcaatgccacatttcatacagggccagttctccaaaaactatgaagcccgcaaaatgcccttaatctccacttccaacattcttttacctctttgggcatcctgtcaaggtcccaagttacttatgagctcatcgttctgacctgctgtcagagaaaaattcgataagttaatgtaaataaaggttaagtaactgttcaatcttaaagccttacttctgctaggaaggagtaaaagagatctgaaaaggtgaaattcaaatatgaagaaggggatggggtgcagccctgaaatcagacagaaatcagctccagccacacttctacaaggtttaagatttttttccgattcctccaagagccaacaagggtatcttctggaataatgaaaatgtttcccaggattagactttagaaaaagctttgaggtctcagggaggtggggtaagcctgagtgctggctcttgaagtccgtcaccccgttaccagcttccatggtttcgctgcctgatctcctgacggaaaaaccagggggcgcggccaggatcattaggaagaactgctcccgggtcagagcacgtagccacttcctccccggaaatatgccccagcggccattctctccatgagtctgggcattccctaaaattgtgcatggctgctggtaatcccacggcagggctcatcagtttaataactttcaaagccctaatcacagcacagaggggaaattttcttctttggagctaagttgggcagtggagggcacagctttgaactgcaaggcagaatgtggccattcgctggggctcatcctctgctccggtagctccggagaccaagtctaattgagtagataaatcatccacactctctatgaaaagcgactgcacctyttatattttcgtggaagttgttgaaaaaaatctgaaaaatatatgctcaccttggctacagttcacagaaattttgcctccaattcttcttttgacaatgtggagattttttttttcaactcatgctgatgcaaagagaatttgagcatttccctcttttctcttttgccctcagtttaatgtgtgatcatgtttccctccaccctgaacgatgacttggtcttctgcacaacgatgcttgctgacatttcagaaagaagctgtcaagagagccaggattatttttcatatttaaaatattctctagatgattctgaacttgcctttcatgtttga

SEQ ID NO: 696444 - DNA, 1249 bp, Homo sapiens
ggatcctaagctaagccaagactatatgctctggtctgagttgtgcaggacccttggttttatgtaatcctgcgctttcctcaagactaaggatttgagagcctgtgcccttgcagctttcccaggggagctgagatgtgaatgttaacacctctcaagagacctcctagtctatccaggcctctctcatgattcaggcaggaaacaagcctctgattattgtgtgttccttgaatgctgcaggaaccccacgttctgaggaggtggctgccatttgggaccagcagggctgggttccccaggcgctcacaggtccctggtgcagggccaggactcagcaccacaggccatcacggcaaaccacaggaaagaggcagaaaataacagagacatcctagcccgagattcacatgtaaaggaggggagaaatcactgaagaaaatgtcaaaaagagctgaggtgggcagatcacttgaggtcaggagttcgagaccagcttggccaacatagtgaagcctcatctctactaaaaatacaaaaattagtcaagcatggtggcatgtgcctgtaatcccaactactcaggaggccaaggcgagagaatcacctgaaccctggaggtggaggttgcagtgagccaagatcacaccactgcacttcagcctgggagacagagtgaaactccgtctcaaaaaaataaataaataaaataaaatagaataaaaataataaaaaactgccaataacaacaacaacaacaataaccagaagagtgaagtgttcacagaccaaacctagaaatatgttttctaaaagaataccaggtaaaaataggccaaattgtgccaggttaaccrgcaaaacttctgaatgagcaagataatttttttttaatccagtggtgtcaataaccctcctcatctagctctaagagcaatgggaagaaaacaaaggaaaagaattttatttcaaaattcctcccataaccacatgctgaaaagaacttatttcccataatacttgaaatatatatttcaaaaacaaaaaggatagagatgaaatctactatgagtgctttataaggattaattaatgatgtaatttctagaaaaccaggaattacaacaatagattaactatagaaacctaaagatattttcttcaaaattacttagaatacaatttccatttttatcaaactttgagacatttaatactctcactcttcatttcctaatggcatcagttt

SEQ ID NO: 696445 - DNA, 1249 bp, Homo sapiens
ggatcctaagctaagccaagactatatgctctggtctgagttgtgcaggacccttggttttatgtaatcctgcgctttcctcaagactaaggatttgagagcctgtgcccttgcagctttcccaggggagctgagatgtgaatgttaacacctctcaagagacctcctagtctatccaggcctctctcatgattcaggcaggaaacaagcctctgattattgtgtgttccttgaatgctgcaggaaccccacgttctgaggaggtggctgccatttgggaccagcagggctgggttccccaggcgctcacaggtccctggtgcagggccaggactcagcaccacaggccatcacggcaaaccacaggaaagaggcagaaaataacagagacatcctagcccgagattcacatgtaaaggaggggagaaatcactgaagaaaatgtcaaaaagagctgaggtgggcagatcacttgaggtcaggagttcgagaccagcttggccaacatagtgaagcctcatctctactaaaaatacaaaaattagtcaagcatggtggcatgtgcctgtaatcccaactactcaggaggccaaggcgagagaatcacctgaaccctggaggtggaggttgcagtgagccaagatcacaccactgcacttcagcctgggagacagagtgaaactccgtctcaaaaaaataaataaataaaataaaatagaataaaaataataaaaaactgccaataacaacaacaacaacaataaccagaagagtgaagtgttcacagaccaaacctagaaatatgttttctaaaagaataccaggtaaaaataggccaaattgtgccaggttaaccagcaaaacttctgaatgagcaagataatttttttttaatccagtggtgtcaataaccctcctcatctagctctaagagcaatgggaagaaaacaaaggwaaagaattttatttcaaaattcctcccataaccacatgctgaaaagaacttatttcccataatacttgaaatatatatttcaaaaacaaaaaggatagagatgaaatctactatgagtgctttataaggattaattaatgatgtaatttctagaaaaccaggaattacaacaatagattaactatagaaacctaaagatattttcttcaaaattacttagaatacaatttccatttttatcaaactttgagacatttaatactctcactcttcatttcctaatggcatcagttt

SEQ ID NO: 696446 - DNA, 1870 bp, Homo sapiens
tctctagaggcctcggagaaagcacaaccttgccaacacctcgattgcagacttccggcctccagactgtgagatgatcaatttctgctcttttcagcctctgcgtttgtggtactttgttttggcagccctgggaagctaatgtaacataggatggatatgttttttcttgtttgggtctggttgactattcctctgttttaatgatctgttttaatgatcaataagtccagttcaaatgtaggagacattgaaccttcccattattcccaatagaaaatttttgagataaaattagacactttgataccaaaagtgccaaatcaggaactgtgactggccactgtaaaaactcatattttcctgaaagtctgtgtccatgaggaccctggcagctccacttcccactccacggcctcagacactgagatgctttccaccatgacactcagagaaggatgtaacgtctcagctgccacagctctcatgaattgtagaggtttataaaacttagtgggatgcagctgcacttattaataagcgctatccatggctagaaccaaagactgtgttagtggaagatgaagtcttcattccttggcttatgacaacgttaactgttttttaaggaccactggtggaagtggtgaaagaaagcaccaatgccaggttctattttacttgagtaaagaaaatcagattaaaataatgagtgacaatccaggacctcggacgcttcctgggggggctgtccacagggcctcactgtgaggcctcctcagtggcataaatagggctgcatttcatagcagccaagtgtcaggaaatatgcttttaattatcatttaagatgtaacctgtcagaggtattagtatcacttgtgtttaatgagaattgattttcagattgcattacccaggaagcccaggataatggaaacccccagttctttcctgagacctcaagtcaccaccacatcgctctgtgccagtgctcaccacatcagcagcyaccggacatctgatctgcccacatgcagcccaggcagaggcctgcttagccttagagtgattgctgatgaatgagattccacagagctgagcctggctcagagttttattgcaaagtgagggaatccgagggaaagctaatgaggggttgaggttttcagtgtggcccacagactggcctcatcagtgcaaggatgcggtgtagaaacgatgtgttgatggggagagcatccgtttgagccatgcccacctctggcttggtcttctgctggtgtcctgacctttctgaaatagtcaggcaagtcctggagagggaggccagcgtgggagagcagcgggtggcgtcgggaagggaaagatcttgcccaagtgtttcccagtctgaagtcatccctctaccacccttgaggttttattgccataaacttatactaccctgacaatgattgacaatattttcctcgaagtggatttagtaaactttgtaagtttgttatgcaaaaaagacttaaatcattactgtaagcctgttggtctcactggtttgtaaaacgaaacgtttctcagttgcagatggatatcgtggcctgctgatggttttggagcccaggtccagacatttcttgattgaagtagacattcaagaagtgtgaaatgcacagtcagaaaatctgggacttctctttttccttgtcagaatcaggattgaaaaatgattcagcggggaatagcttctttacagtgagagcccgtgttattgatttttgtgtctgtatacaacctaaaagaatggaggcgtgtgtccctctctttcggaaataatgatatcatccatgtgtaattaattatgtggggccca

SEQ ID NO: 696447 - DNA, 607 bp, Homo sapiens
tatttactaaaagcaggcagcagcagggcccctgagcccagtttgctgacacctgtctagagcaaggactcatcaaaatgaccttgagttacatgccagttgattgtgtttattctcgtctactgggctgcccttgtcaagacgttgctaccagcagatgcatgtttcaggaaaacattgcaaaacagagatttgagacttgaggcaggaagcagaagacagtggggaaaactggtttttgtctctgactcagaatatgaggtaataaatgatggacagagggcaaaatattttttccctaggccatgagtgaaagcttgaatttttagtttcaagaaaaaaaattgctctccaacaatgataatacagataatttaaaataaattagaggcacccattgaaaaatktattgctgttgttgaggtagttaagatttacccggatgaagtatatcttagaggtaaaatgaggtcctattttatttatttttcctttaaacttttattttaggtttaagaggcacatatacaggtttgttatatggataaattgtgtgttgagggggtttggtgtacagattatttcatcacccagctaataagcacag

SEQ ID NO: 696448 - DNA, 607 bp, Homo sapiens
tatttactaaaagcaggcagcagcagggcccctgagcccagtttgctgacacctgtctagagcaaggactcatcaaaatgaccttgagttacatgccagttgattgtgtttattctcgtctactgggctgcccttgtcaagacgttgctaccagcagatgcatgtttcaggaaaacattgcaaaacagagatttgagacttgaggcaggaagcagaagacagtggggaaaactggtttttgtctctgactcagaatatgaggtaataaatgatggacagagggcaaaatattttttccctaggccatgagtgaaagcttgaatttttagtttcaagaaaaaaaattgctctccaacaatgataatacagataatttaaaataaattagaggcacccattgaaaaatttattgctsttgttgaggtagttaagatttacccggatgaagtatatcttagaggtaaaatgaggtcctattttatttatttttcctttaaacttttattttaggtttaagaggcacatatacaggtttgttatatggataaattgtgtgttgagggggtttggtgtacagattatttcatcacccagctaataagcacag

SEQ ID NO: 696449 - DNA, 607 bp, Homo sapiens
tatttactaaaagcaggcagcagcagggcccctgagcccagtttgctgacacctgtctagagcaaggactcatcaaaatgaccttgagttacatgccagttgattgtgtttattctcgtctactgggctgcccttgtcaagacgttgctaccagcagatgcatgtttcaggaaaacattgcaaaacagagatttgagacttgaggcaggaagcagaagacagtggggaaaactggtttttgtctctgactcagaatatgaggtaataaatgatggacagagggcaaaatattttttccctaggccatgagtgaaagcttgaatttttagtttcaagaaaaaaaattgctctccaacaatgataatacagataatttaaaataaattagaggcacccattgaaaaatttattgctgttgttgaggtagttaagatttacccggatgaagtwtatcttagaggtaaaatgaggtcctattttatttatttttcctttaaacttttattttaggtttaagaggcacatatacaggtttgttatatggataaattgtgtgttgagggggtttggtgtacagattatttcatcacccagctaataagcacag

SEQ ID NO: 696450 - DNA, 607 bp, Homo sapiens
tatttactaaaagcaggcagcagcagggcccctgagcccagtttgctgacacctgtctagagcaaggactcatcaaaatgaccttgagttacatgccagttgattgtgtttattctcgtctactgggctgcccttgtcaagacgttgctaccagcagatgcatgtttcaggaaaacattgcaaaacagagatttgagacttgaggcaggaagcagaagacagtggggaaaactggtttttgtctctgactcagaatatgaggtaataaatgatggacagagggcaaaatattttttccctaggccatgagtgaaagcttgaatttttagtttcaagaaaaaaaattgctctccaacaatgataatacagataatttaaaataaattagaggcacccattgaaaaatttattgctgttgttgaggtagttaagatttacccggatgaagtatatcttagaggtaaaatgaggtcctrttttatttatttttcctttaaacttttattttaggtttaagaggcacatatacaggtttgttatatggataaattgtgtgttgagggggtttggtgtacagattatttcatcacccagctaataagcacag

SEQ ID NO: 696451 - DNA, 475 bp, Homo sapiens
atcaggacacacgattcaattaaatgttgaatgttactccctagagaaacacagaggtgcccactccgattcccagtccccggcctcctcagcacagctgtggcaccgagggaatcttgtgatggtttctcctcccaacatcccctccctttagcctgaagttgtaaagcattaaaaagtcaaatggaggaagatggtgcacctagcatggggccgtsgggggtcaggggaggatagagaacaatgttccttcattttgaaaggcagagatgctgacttgttcaaggtcccagttagtcagtgatcatgacacattaactattgtgataacaaggagatttatctcctctaattatgacatatttcttcatctcattcaattactcattttggaacaaccctcgccctggtttataaatgctcaaggaaaataaatgattgcccagatggtgaaacagggtcaaagcaaacaaaa

SEQ ID NO: 696452 - DNA, 596 bp, Homo sapiens
tggagacatccttgtgaaattagaatagctcttctcagtttatttatggaatcttcttgaagatcaaagatgcagcaccgctgttggttttggtttcccctattatracggagtctgaatgaaaggtgagcaattctatttaggttctagcctagatgtggggggaaagatgtctatgctaagcatgaccattgaggtttacaaaaacaaaagtagggtcgcaagctaacaaagaaaaactagagaaaagattctcctggccatgcccacagctgttcccagaagcttcctgaaactggtgattttatgttcctacctttcctcttagactcctgatgtacgtccatttccctgagttaatataaagtgaccaactgccaaggttttcagtttctctcaaaatttcagccaaacgccttggagggagggcctgaagtcctcccactagaattcagcagatcaactctcgaagctgctctcttgaccactgaatagtttcaggttccttaggcagtaatgaaaatatataataatcattaacgtttggagggtgctctatatttggaattattttcatatctcttgtgttctttggt

SEQ ID NO: 696453 - DNA, 598 bp, Homo sapiens
cagcttttcctcccagtgctaagcatgccttctcatttcacgcgggggctgctctggtgtcaagccccgtggaagaagcctcttgtgaggccagccccagagccttgaactctggcctgcatcgaagcattccacttccccgaccacagtctttctttctctgctgtttygcccaagcgctcccggtatccgtccgctgaagggtgacgttcattgactctggaagtcccctctcatcttaaccttttccttaaggcatcaggtttgtccaagttttggaaccaaagcccctgtccacgagctggtttcctgactttttttctatctgacatgagggaagctggaagtcctagatttcctaagcaccgacacgcttcctgctataggtgggctggtggacctgctctgagccggctctgcctcccgtcctagcactgtgcacatgtaattgatcacctcctggatgaccacaaggaaaaaaggtctgggaactatgacaaaggctggagagctccaagtaaaagatgcatcattcacttggccaactcttcgtcaccaagacatgccagtaaaatcaaccacatggagttgtcctgtg

SEQ ID NO: 696454 - DNA, 598 bp, Homo sapiens
cagcttttcctcccagtgctaagcatgccttctcatttcacgcgggggctgctctggtgtcaagccccgtggaagaagcctcttgtgaggccagccccagagccttgaactctggcctgcatcgaagcattccacttccccgaccacagtctttctttctctgctgtttcgcccaagcgctcccggtatccgtcsgctgaagggtgacgttcattgactctggaagtcccctctcatcttaaccttttccttaaggcatcaggtttgtccaagttttggaaccaaagcccctgtccacgagctggtttcctgactttttttctatctgacatgagggaagctggaagtcctagatttcctaagcaccgacacgcttcctgctataggtgggctggtggacctgctctgagccggctctgcctcccgtcctagcactgtgcacatgtaattgatcacctcctggatgaccacaaggaaaaaaggtctgggaactatgacaaaggctggagagctccaagtaaaagatgcatcattcacttggccaactcttcgtcaccaagacatgccagtaaaatcaaccacatggagttgtcctgtg

SEQ ID NO: 696455 - DNA, 598 bp, Homo sapiens
cagcttttcctcccagtgctaagcatgccttctcatttcacgcgggggctgctctggtgtcaagccccgtggaagaagcctcttgtgaggccagccccagagccttgaactctggcctgcatcgaagcattccacttccccgaccacagtctttctttctctgctgtttcgcccaagcgctcccggtatccgtccgctgaagggtgacgttcattgactctggaagycccctctcatcttaaccttttccttaaggcatcaggtttgtccaagttttggaaccaaagcccctgtccacgagctggtttcctgactttttttctatctgacatgagggaagctggaagtcctagatttcctaagcaccgacacgcttcctgctataggtgggctggtggacctgctctgagccggctctgcctcccgtcctagcactgtgcacatgtaattgatcacctcctggatgaccacaaggaaaaaaggtctgggaactatgacaaaggctggagagctccaagtaaaagatgcatcattcacttggccaactcttcgtcaccaagacatgccagtaaaatcaaccacatggagttgtcctgtg

SEQ ID NO: 696456 - DNA, 2388 bp, Homo sapiens
tgaggtcaggagatcgagaccatcctggctaatacggtgaaatcccatctctactaaaaatacaaaaaaaaaaaaaaaaaaaaaaaaaaaaaagccgggcgtggtggcgggcgcctgtagtcccagttacttggaagctgagacaggagaatggcgtgaacccgggaggcggagcttgcagtgagccaagatcgcgccactgcactccagcctaggcaacagagcaagactccgtctcaaaaaaaaaaaaaaaaaaacacatataatgtagcataagatactaaaacaaaacaaaagaaaacaaaagaaaacaaaacgaaacatggtattaacagcaggcactaggcaatagcgtttgagttactttgcctgattcacagcggtgcaaggggctgctgcataaacctttccaggactgagaaaagaggtcagagacaattggtaactaaaagtagaatctataaagagtttggtaatgatctaattctatactgaagatgtgaaaaaatatgtaaacagctaaaccatataaattagggggaaaaaaactatgttttcagaatcaaaagcatttgaatcttgctccttgtaagtggcactataatgagcaagatgacagtttttattttataatgagaagttaggtgtttgtaatttgaaatctatgagataaaaaggatgtttttttattagaaaaccttactgaataagtttcaattatgtgtaagaaaaaaatatgaaaatattcttctcatttcttctccacaggatattttattgagtcatgatctgtaataacaagttaatagtaagttaataacagttttacgtgagctaattgggaatctttcttatttaaaataatattggtaaaatagaaattggttatagaatctactaacacagaataacatagaaatagtcaaacataaagaaattgtgacatgataagcacatacacagagtaatatgtggacatacacattactctgagttaaaaagacagcctgagaragctgttacataagaatgcaatagttttgataaaacaaatcaatatctcaatgccatgtttgttacatgagaagatgtgtaatgttacaatctctaggaatgtataaagtgagtgtttgagtcaatttttaattgctattagctaagttatttctgaacatattagccttataggttagcaaagtgaatgtcaattcttggattcatgaagttgaaagcacaaggacttcggtcagatatttaaaacctagctccactgcagccgagttgtgtgaccatggagaaaatactgtattttcctgtgcctgcattgccttatctacaaagtttctttcaaaaattgttttaagaattaggtaaaataatgtttgaaagggttcattatttatatctctgttacctcctgtattgtgaataatgatatataattaaaaagtgtttgtgtttttgagagcatatataaggacttaaaagtattggaatgtttatcaatcaagaagcttgttttgggagttaaaacaagatttgcttaagttttagtcttaaaactcagagttgctgaggaagaagtactaaacatcattatggttaactctactgactaaatttatttcctcaacacttttctttaacggcatacatgcatttttttctgattttccaaggctactgggcaatgaaggaactgtagctgtgcctggggcagcattggaagaagaggttgagagttgggttttgagcctgttggttctcaagcagcttgaagatgttcaagtcaagatgtcagatagacagttatgtatgtggatccacatctcagaaaaaaagatttggattgatgagctgaacttggaaatcattaccatatggttacaattacaaccacaattacagataagttgcctataaagaagagtatgcagagaagagaagagaaaattgatcaatattcattcttgtcagacccacaatctaggggaaaatagagcagaggacatgcagtggagtctggactgagaaagagtaacaggaaaaaatgagggcaatcaggagagaacagggtcaaagaccccaccactacataaagacatctgaaactaaagttattgtggacctcaggcatcctcttttacaagttaataaaaacatatctcctacacaatccttgatttcattccctggtgctgcagtccacaagctaaatttcttcctcagagtgctttcaactggttggaagagacccccgccaatttattaagggtaatctttatttaaagtcaactgatgattgaggaggggcttcaagatgaccaactagaggaatctggtgctccttttatctaaaaaggagaaacaaaatagtgatgagataat

SEQ ID NO: 696457 - DNA, 2388 bp, Homo sapiens
tgaggtcaggagatcgagaccatcctggctaatacggtgaaatcccatctctactaaaaatacaaaaaaaaaaaaaaaaaaaaaaaaaaaaaagccgggcgtggtggcgggcgcctgtagtcccagttacttggaagctgagacaggagaatggcgtgaacccgggaggcggagcttgcagtgagccaagatcgcgccactgcactccagcctaggcaacagagcaagactccgtctcaaaaaaaaaaaaaaaaaaacacatataatgtagcataagatactaaaacaaaacaaaagaaaacaaaagaaaacaaaacgaaacatggtattaacagcaggcactaggcaatagcgtttgagttactttgcctgattcacagcggtgcaaggggctgctgcataaacctttccaggactgagaaaagaggtcagagacaattggtaactaaaagtagaatctataaagagtttggtaatgatctaattctatactgaagatgtgaaaaaatatgtaaacagctaaaccatataaattagggggaaaaaaactatgttttcagaatcaaaagcatttgaatcttgctccttgtaagtggcactataatgagcaagatgacagtttttattttataatgagaagttaggtgtttgtaatttgaaatctatgagataaaaaggatgtttttttattagaaaaccttactgaataagtttcaattatgtgtaagaaaaaaatatgaaaatattcttctcatttcttctccacaggatattttattgagtcatgatctgtaataacaagttaatagtaagttaataacagttttacgtgagctaattgggaatctttcttatttaaaataatattggtaaaatagaaattggttatagaatctactaacacagaataacatagaaatagtcaaacataaagaaattgtgacatgataagcacatacacagagtaatatgtggacatacacattactctgagttaaaaagacagcctgagagagctgttacataagaatgcaatagttttgataaaacaaatcaatatctcaatgccatgtttgttacatgagaagatgtgtaatgttacartctctaggaatgtataaagtgagtgtttgagtcaatttttaattgctattagctaagttatttctgaacatattagccttataggttagcaaagtgaatgtcaattcttggattcatgaagttgaaagcacaaggacttcggtcagatatttaaaacctagctccactgcagccgagttgtgtgaccatggagaaaatactgtattttcctgtgcctgcattgccttatctacaaagtttctttcaaaaattgttttaagaattaggtaaaataatgtttgaaagggttcattatttatatctctgttacctcctgtattgtgaataatgatatataattaaaaagtgtttgtgtttttgagagcatatataaggacttaaaagtattggaatgtttatcaatcaagaagcttgttttgggagttaaaacaagatttgcttaagttttagtcttaaaactcagagttgctgaggaagaagtactaaacatcattatggttaactctactgactaaatttatttcctcaacacttttctttaacggcatacatgcatttttttctgattttccaaggctactgggcaatgaaggaactgtagctgtgcctggggcagcattggaagaagaggttgagagttgggttttgagcctgttggttctcaagcagcttgaagatgttcaagtcaagatgtcagatagacagttatgtatgtggatccacatctcagaaaaaaagatttggattgatgagctgaacttggaaatcattaccatatggttacaattacaaccacaattacagataagttgcctataaagaagagtatgcagagaagagaagagaaaattgatcaatattcattcttgtcagacccacaatctaggggaaaatagagcagaggacatgcagtggagtctggactgagaaagagtaacaggaaaaaatgagggcaatcaggagagaacagggtcaaagaccccaccactacataaagacatctgaaactaaagttattgtggacctcaggcatcctcttttacaagttaataaaaacatatctcctacacaatccttgatttcattccctggtgctgcagtccacaagctaaatttcttcctcagagtgctttcaactggttggaagagacccccgccaatttattaagggtaatctttatttaaagtcaactgatgattgaggaggggcttcaagatgaccaactagaggaatctggtgctccttttatctaaaaaggagaaacaaaatagtgatgagataat

SEQ ID NO: 696458 - DNA, 590 bp, Homo sapiens
cagcacccactagtgggactgaggacatgcctgcacgtcccagctctgtaatccccagtgtacaagcatgctgtccatgggctgggarggttctcagccccatccgccactattggcacctgagcgctcctcctgggggcctgagattgggcccacccaacctgcagctaccattacatcatgcacccacccacaagtgtcacatctgggcctggggactggccttctcagactgttgcagtcaacaccaacatcagcagaaactgcctgagatccagaaggttgttcctccactaccactgccatcacccatgccacatccaccacctagagtcccaagaacccactcacctggttggcccaccacctccattgctagaaccaaggaagctgttctaaaaataattcttactagttactagtgtaacaatttcctactgacagattaagacaattcacatgagtaactagctgcaaaacaccagaaataaactaccccattcctctcacatcccttgaaactcaatacaaaaagcaaaacaactatattttagactcaacactgctttctgaaaaatctcaccatgtaa

SEQ ID NO: 696459 - DNA, 590 bp, Homo sapiens
cagcacccactagtgggactgaggacatgcctgcacgtcccagctctgtaatccccagtgtacaagcatgctgtccatgggctgggaaggttctcagccccatccgccactattggcacctgagcgctcctcctgggggcctgagattgggcccacccaacctgcagctaccattacatcatgcacccacccacaagtgtcacatctgggcctggggactggccttctcagactgttgcagtcaacaccaacatcagcagaaactgcctgagatccagaaggttgttcctccactaccactgccatcacccatgccacatccaccacctagagtcccaagaacccactcacctggttggcccaccacctccattgctagaaccaaggaagctgttctaaaaataattcttactagttactagtgtaacaatttcctactgacagattaagacaattcacatgagtaactagctgcaaaacaccagaaataaactaccccattcctctcacatcccttgaaactcaatacaaaaagcaaaacaactatattttagactsaacactgctttctgaaaaatctcaccatgtaa

SEQ ID NO: 696460 - DNA, 628 bp, Homo sapiens
gtttagaaactagcttttgttgttatttccttcagaattttttttaattttctttttctgttttatttatactttttacaaatcaagagctgactttcaatagatcacagcgagggagctgctctgccctgtataaagccctgacccagaagtaggttgtctacaaatgatttaggttcaccatgaacatgcactgtgtgacaggccagattttcgattattgttagagaattcttaaacatctgtgtcacwatctcatgtttatttacagaactttctttcgtatcttcaccagaatctccctgagaagaaagcaagcctctcactcaagttctcgagatagataatttctctcttcctcagttagaactataacaaaccggctctcttgggctgttcttgggctgtttttggaaaacaatttccccagggagtccaaatagactctccctctattgttctggccatttaatgtttttaacagggtcccccttctctgctaacatgagtgatcaaggcaagaatagcttggaaagtgtttaagtttggggtaacactccacctgactaacagttgttttcttgttactgttggggttgttttttatgtttttgtttttgtgttttgt

SEQ ID NO: 696461 - DNA, 504 bp, Homo sapiens
tctagctcaaattttttttgcctaattttgacctgccctcgtaactcatttatcagacagttataaaacagtttaaagctcaactgaaaagtgcaaaaaaatcaaaaagcggaaaaaaaggaggggtagtatctcgtttcttaggmtgcgtaacattatgaggttactctttaacagcactagagagtgttgaattttttagagcttaaaatgattggctgagatattaagctgctttgccagctgttcaaaaatggattgctcccagcatataaataactactgttatgtctctataaaattctagaccttgaatggcatatttgattagagtgaaatgaaaaagaaagaattgttacaaacaagaagctgagattaaaaaggtgtattcagtaactacctatggtgagttaaaatcatctttccatgagtgaacatagaaaattaaataaaatacctgcaatcttgaaggaactgaaacatagaccttagtgaagtttaatc

SEQ ID NO: 696462 - DNA, 1234 bp, Homo sapiens
ctcaaaaatttcacttctccacttattctaggtttccttcatcctcagtcggcacttcaactactttggaccctaagtcaccatgcccttgttaggctgtgttaactgcccagtcaccattattactgggtacagaagtgcctagtaaattctatgggtctcatgcatactgtttcacaaatcaacatataaaagcaatgctagtttgtcgtaatgatccgagtagatttccccttccccaccacacagaaattttaaaatgttggtccatagtcatgagtaacccataattatcaagaggaaattacagtttcaagtgtagtggaagatttttctctttaccctcataggactctaatggccctgggaactaggaccactaacctgaaagaccccaagtttgggggtgggatgagagcattagtacataaagctctatgaaagtaaccagtttgtttctggacctgtgcattctattagaaacacaacactgtaatatgttagttgtttactcagtgcatctactgcatcataattgggcatttcaacattattttaggatttagttagatgcatctgtgcaataaagtatgtggtaagacaatggatcatgttttcttctgtcctcattttcactgtagactccctccgaaatgagccagttgrtctgagacaatattgtaggggatatcaagctcatagatcaggtatcctgtaaattgaatagaccaagcattgtaattagggaagtcacactcatatttgtaatagctgtatattccagcaaggagtgaattactaccttccccaggatagaaatcatatgtgtgtgtgtatatatatatataccctccccaccaacttactgagtgatctcctttagaaatagtgtcaaactgagggcaagatgtctctttcctcaataggtaattatttaggattttcagtaaataaatcagccttaacgagaagcccatactgtctggatcgcaaagagcatccatctccaccattatggtaactttgttcatgagccccttgtgaaaacaatgatgtgagtaaggaaagagactggttgaatttcacaggacaagtcatactttctacctagttacagaggtttctctgtagtagacaccctctggagggatatacaaagctctactggccttttgcctcttcacttgtattagtccattttcatgctgctgataaaaacatacctgagactggg

SEQ ID NO: 696463 - DNA, 612 bp, Homo sapiens
atggagcatgatgaatgtggctgaaacattctgcatctcgtactttgataaatttacctgtatatcaggcagaatgttctctggtcagaccagtacttggagcaaaagagggaagaggaaaggcccacctgggccctgatatcctgggacacacagcttggtggcctggtggcctggcttatacctgattcctccccagaggtaatttgtcattgtgtctggtctcgttctcaagaaatgtmagtgctgtagtgaaaagctgctgtcaaatgcacacctgtgtgtgtgctttcaggctgacgctggacacactaagggcatgaagtgccttgtggaatagaagagtgttcagtacagcaccgagaagccagagacttggtctccaacaagacttctgaacatttggaacatggttcccttccctcttatggcataaatgggactacaaaatgcttctcaatgaatacatgccacttttcctcctttgctttgtgatggcagtatttcatggaaaagaatcctgtcatatcatatatctatgtggatctttccagtgaattaattgtgcaaattccttctctgctagagaaataaatacttctgcaaaacatt

SEQ ID NO: 696464 - DNA, 612 bp, Homo sapiens
atggagcatgatgaatgtggctgaaacattctgcatctcgtactttgataaatttacctgtatatcaggcagaatgttctctggtcagaccagtacttggagcaaaagagggaagaggaaaggcccacctgggccctgatatcctgggacacacagcttggtggcctggtggcctggcttatacctgattcctccccagaggtaatttgtcattgtgtctggtctcgttctcaagaaatgtaagtgctgtagtgaaaagctgctgycaaatgcacacctgtgtgtgtgctttcaggctgacgctggacacactaagggcatgaagtgccttgtggaatagaagagtgttcagtacagcaccgagaagccagagacttggtctccaacaagacttctgaacatttggaacatggttcccttccctcttatggcataaatgggactacaaaatgcttctcaatgaatacatgccacttttcctcctttgctttgtgatggcagtatttcatggaaaagaatcctgtcatatcatatatctatgtggatctttccagtgaattaattgtgcaaattccttctctgctagagaaataaatacttctgcaaaacatt

SEQ ID NO: 696465 - DNA, 3009 bp, Homo sapiens
gggagttacctgtgtgcttctccttctgccctcagggagaattctctctcagggacctcattgtcctgttaagcccatcagatatatttaaatgattttgaatagcaaggggaaaagatctctttctctgcaagagtcttcctgttcctatgtaaattcctggggcaaataggtgagtgggcagaagaattctgtccaactccactcacagcactcatagtccaaatcccagtaggttggggtagtggctgttgaagaaccccacctcacccctagagctgctgcccatgtatcctcttgcacctacattatttcatttaagcttcatgatgattttgcaaggtagtaatttcaatccccattttcacagacagatacaggtgcttaagaagataaaacaacttacatgtgtttacacagcaagtgccagaaatgggattcaaactcaggcctgctttcaaatatggacctcttccactctaccaggatgccgtcccaaatttttttttttttttttggttttgagacggagtttcactcttgttgcccaggctggagtggtttgatcttggctcagtgcaacctctgcctctcggtttcaagcgattctcctgccttagcctcctgagtagctgggactacaggtgtgcatcaccacccctggctaatttttgtatttttaatagagacggggtttcaccatgttgaccaggctggtattgaactcctgacctcaggagatctgcctgccttggcctcccaaagtgctgggattacaggcgtgagccaccgcacccagccaaccttcccaaaagttttaatactcatgcttcagttatgcaattgtgtcaggaagtgatgcatcctttctaaattatgttttgagataatcaaagcttagccttttaagcaccaacattttgtaaacttttgtagacaaaaatattcgtagaatgtgttacatatttttcactttcttaaacagagcatgctggacagattttaaactttgcttgatgattcatgtcatgtttaagagcatcaattattatgtaatgccatattatagggagtttaagtatcttgcccaaggctagacagctgttaaatggggaaactgttcaaatgcaggcagtctggctacagagcccatgttcttagcaactatgctatcatgcctcaccaagtgctcaaaagaattagagatcgctgtgggctggagatgagtcgtcccaatagtattggttgctctggcaaagagcagggaggcagaatctgaagccatccagcaaacttagcaggggtggagatcagggtccactttgctgacatttcagaatagagaaatgccatgtcatagcaaaagtccaggaagaaccagatcagagatagaggggtgaaacaaaaagtggatattggccaagtgtgactcatgcctctaatcccagtgctttgggaggctgaactgggaggattgcttgaagccaggagttcgagaccagcctgggcaacatgatgagaccctgtctctataaacaatttttacaaagaaaatattagccaggcatgctggcatgcacctgttgtcccaactactcaggatcctgaggcaggaggatcgcttgagcccaggagtttgaggctgtaggaagccatgattgtgccactgcactccaacctgtgtgacagagtgagaccctgtctctaaaacaaaacaaaacaaaacaaacagacaaacaaacaaaacccaaaacatgactatcaaggaatctatgcataagaacctgagatgaaaatcacatgttagagtttcttgtgggaggaggagtgctgataaatggcacctgtttttcctgctcaagttctgaaaaacctgacaggtccagagtagcagatgggccacagttctcctttatttttgttcaaggttaaattggaagccatagctcactgcaagaaccaaatggacctgtgaagtaattccaaaattcaacatacttaccccacactcatgtaggcactggaccaggtaaaacttacagcatggagaaacagaggactcttggtgcttgcagttaagttcacttccaagagggaaaagggtgtagctgatccaagaatgcctatgaccataagaagtacattgcccgatgtgcagcaagtcagtataccaacactgagggttgcagcagagaaagaggtttaatcgtaaggccgctgaacaaggagacaggaggaaacctcaaatccacctccccaaggagtttggggctaggaatatacataaatgcaagtataggacttgcatttatatatatttctatattcctatatttgcatatatgtataatatatatattatatatataaaaatggaagttaggactctctctctctctctccgtaggtcttgccttcctcccacctcagtctcccgagtagctgggactacaggtgtgtaccaccatgtctggctaattttttattttttgtagagataggggtctcactatgctggcgtggctggggggccagggattttaatgggtttagagtggattgagstgtagggatttttcatgggttgaagagtgcagggtgaagtcataggatggggtgatgaagaagctattttcatgcggactcggttcctctgtggggtcttcaaactggtttgtgtcagccgtttcactagaatgcagggtctgaaaagcatcttaagtaattcttaaacaaaagctttatgattctatcatcagagatcctatctacaggaacagtggggatgcaaaaggtctgtatctggtgctatgtgactttcagttacatggaagtgggcaaagtgcagcctgatgaatgcttaattgtaaccttatttctgtccagaacctgccatggaattcttgttaaccctgtgatgatggtttcatgcccagtatattcttctcagaaaagtgtttctacctcctcttagacagagtgaataagagacggtgagaggccagatgt

SEQ ID NO: 696466 - DNA, 3009 bp, Homo sapiens
gggagttacctgtgtgcttctccttctgccctcagggagaattctctctcagggacctcattgtcctgttaagcccatcagatatatttaaatgattttgaatagcaaggggaaaagatctctttctctgcaagagtcttcctgttcctatgtaaattcctggggcaaataggtgagtgggcagaagaattctgtccaactccactcacagcactcatagtccaaatcccagtaggttggggtagtggctgttgaagaaccccacctcacccctagagctgctgcccatgtatcctcttgcacctacattatttcatttaagcttcatgatgattttgcaaggtagtaatttcaatccccattttcacagacagatacaggtgcttaagaagataaaacaacttacatgtgtttacacagcaagtgccagaaatgggattcaaactcaggcctgctttcaaatatggacctcttccactctaccaggatgccgtcccaaatttttttttttttttttggttttgagacggagtttcactcttgttgcccaggctggagtggtttgatcttggctcagtgcaacctctgcctctcggtttcaagcgattctcctgccttagcctcctgagtagctgggactacaggtgtgcatcaccacccctggctaatttttgtatttttaatagagacggggtttcaccatgttgaccaggctggtattgaactcctgacctcaggagatctgcctgccttggcctcccaaagtgctgggattacaggcgtgagccaccgcacccagccaaccttcccaaaagttttaatactcatgcttcagttatgcaattgtgtcaggaagtgatgcatcctttctaaattatgttttgagataatcaaagcttagccttttaagcaccaacattttgtaaacttttgtagacaaaaatattcgtagaatgtgttacatatttttcactttcttaaacagagcatgctggacagattttaaactttgcttgatgattcatgtcatgtttaagagcatcaattattatgtaatgccatattatagggagtttaagtatcttgcccaaggctagacagctgttaaatggggaaactgttcaaatgcaggcagtctggctacagagcccatgttcttagcaactatgctatcatgcctcaccaagtgctcaaaagaattagagatcgctgtgggctggagatgagtcgtcccaatagtattggttgctctggcaaagagcagggaggcagaatctgaagccatccagcaaacttagcaggggtggagatcagggtccactttgctgacatttcagaatagagaaatgccatgtcatagcaaaagtccaggaagaaccagatcagagatagaggggtgaaacaaaaagtggatattggccaagtgtgactcatgcctctaatcccagtgctttgggaggctgaactgggaggattgcttgaagccaggagttcgagaccagcctgggcaacatgatgagaccctgtctctataaacaatttttacaaagaaaatattagccaggcatgctggcatgcacctgttgtcccaactactcaggatcctgaggcaggaggatcgcttgagcccaggagtttgaggctgtaggaagccatgattgtgccactgcactccaacctgtgtgacagagtgagaccctgtctctaaaacaaaacaaaacaaaacaaacagacaaacaaacaaaacccaaaacatgactatcaaggaatctatgcataagaacctgagatgaaaatcacatgttagagtttcttgtgggaggaggagtgctgataaatggcacctgtttttcctgctcaagttctgaaaaacctgacaggtccagagtagcagatgggccacagttctcctttatttttgttcaaggttaaattggaagccatagctcactgcaagaaccaaatggacctgtgaagtaattccaaaattcaacatacttaccccacactcatgtaggcactggaccaggtaaaacttacagcatggagaaacagaggactcttggtgcttgcagttaagttcacttccaagagggaaaagggtgtagctgatccaagaatgcctatgaccataagaagtacattgcccgatgtgcagcaagtcagtataccaacactgagggttgcagcagagaaagaggtttaatcgtaaggccgctgaacaaggagacaggaggaaacctcaaatccacctccccaaggagtttggggctaggaatatacataaatgcaagtataggacttgcatttatatatatttctatattcctatatttgcatatatgtataatatatatattatatatataaaaatggaagttaggactctctctctctctctccgtaggtcttgccttcctcccacctcagtctcccgagtagctgggactacaggtgtgtaccaccatgtctggctaattttttattttttgtagagataggggtctcactatgctggcgtggctggggggccagggattttaatgggtttagagtggattgagctgtagggatttttcatgggttgaagagtgcagggtgaagtcataggatggggtgatgaagaagctattttcatgcggactcggttcctctgtggggtcttcaaactggtttgtgtcagccgtttcactagaatgcagggtctgaaaagcatcttaagtaattcttaaacaaaagctttatgattctatcatcagagatcctatctacaggaacagtggggatgcaaaaggtctgtatctggtgctatgtgactttcagttacatggaagtgggcaaagtgcagcctgatgaatgcttaattgtaaccttatttctgtccagaacctgccatggaattcttgttaaccctgtgatgatrgtttcatgcccagtatattcttctcagaaaagtgtttctacctcctcttagacagagtgaataagagacggtgagaggccagatgt

SEQ ID NO: 696467 - DNA, 2447 bp, Homo sapiens
tcagggggctctgtagactgtgccctaagaggctgagctggagatggctttcctgtaattgctaattttcctcatacaggaaaagcaccctgctttggaccgaagattctgtttgttgcagtgtatccattcttcttgctttttgagttgctcctgaagtttccttttctctaggagcaggatatcagtttgcgcagtgatctggttctggaatgtcttcttcttttctggttgttgttgcctttaaacatatttttttgtcgtttgttttttcttaagacagggtctcactctgttgtctaggctggagtgcagtggtgtgatcatagctcattgcagcctcaaactcctgagcttaagcgatcttcctgcctccacctcctgagcagctggaactacatgaatgcaccaccatgccaggctaatgtttttattttgaatttttgtagacacaaggtcttgctgtgttgcccaagctggtcctgaactccaggcttcaagtgatcttcttgccgtggccttctaacgtgctgggattacaagtgtgagccactgtgcctggcctaaacagatttttgacaaagcttcaccccaaagaaagaagtcaggatgtgtcttcctgggggtaagagggcgctgcagtgtcatcttgaaagtggcatttctgggtcaggcacggtggctgactcctgtaatcccagcacactgggaggccaaggtgggtggatgcccaaggtcaggagttcgagaccagactggctaacatggtgaaaccctgtctctactaaaaatacaaaaattagctgggcatggtggtgcacgcctctagtcccagctactgtggaggctgaggcaggagaattgcttgaacccaggaggtggaggttgcagtgagccgagatcggatcattgcactgcagcctgggcaacaagagtgagactccgtctcaggaagaaaaaaaaaatgcagcatttctacagtagtcagtcagggccactaggcaacaagaaggcttgcctcacttgcttggagtgagtttcataggaactccatattcccttcgagtgggacccctctggatcctcccacctagagatccttccctcaggcagaaagacaaaacaaaaacctgccagccacaaaggctggcacctgtaatcccagcacttttggaagctgaggtgggaggatcacttgarcccaggagattgagacccgcctgggcaatataggaagatgctgttactacaaaaaataaaaaaaattagctgggtgtggtggtgcatgcctgtaatcccagctacttgtgggggctgaagggggaggattgcttgagcctgggaggatgaggctgcagtgagccttgattacagcactgtgctccagcctgggtgaaagagcaagacactgtctcaaaaaaaaaaacaaaaaaccaaaaacaacagaacaaaatgtaacaaaacaaaaacctgaaaaccaaaccaaaatataaaaacccctacaacctccaaaaagaagccattaaaatactgtccaatctctctgcttttagtcccaaagtcagaaaagaaatgcattccggcatgggatgggttgtcactggtggcctaaggcctcagggcaattttaagatataactcttctagcagaaaagctgctgagaaaagagaggagaagaattggcaaaaggggaaaataaatcagacagctgaccgtgagcgtgaagggaatgtagctattttcctccttgttccaagcctaggattgaaaaaacagtcgtctcgggaataaataatttatcactggaattgatgaagtggaggtggtttggggaggagggagagtgcaaagccagatgcctccacgcagataataaaatgttaataataaaatgttctcccttgctgttgtctaagtggtgaatgaaaaagaatccagggataagaaaaacccctgaaggggttaggggaaattagtgctgatacttcccattaaagtcgcagtaataacgataacaaccgaacatttatagaatgtacttcatgcctgggattccactgggctttgaaacaggaggatctgattcacacccactcccaagaaaatgaattaggttccagcgctcaggggtgggtgagggacttcccaaaagagcttaaattcattagatgagagagttaagtgtggtcagaggtgatctagtccagcgtccttttcggaggagtccagagaagttgaaggattggctccggatcacatcactccttaatggagttgctgtggatagtactcaagtctatttcctttgggtcccagctgtcactttgcagctgtgtgcctttgggaaagtcaccaaacctctctcagcctcagtttcctaataaaatgtggacagtcgtagcatctgcgtcaaaggattgctgtaatgattaaataggttaatgca

SEQ ID NO: 696468 - DNA, 704 bp, Homo sapiens
ctcagggcacagtaggtaaagagagcaaggagcattcagctttcactacggtacactcactcttagctgtgcctggtccaggtgagtccagggtctctctgcattaatttttctggagcataaacctttaggctttgtccttttgtgggagaaggagtgttaaaagtttgtgaggagcagaagaggagatttaggtgtctattcttatactttcaaccccactttcagaggtagctgccaccaaatcctgagcctttagagttatttggctttattcttgtatagtcacttcacagatatttagccttgtcctttctcaggtctcctaaatcaattactactagtctatctgtttttcagcttgcaaaattttgttgacaatttttatttactgtcatctccctcttcctccatctgctttcccattttctttaatatcatgggttttttccttcttaaaaaaatattttatgtcattatagcagggtaaattaatgtgtttaaatttacctggaaatgtaagtctcaacaggatataggtagatatagcatttattaaaagttaagtttgcttggaaaacagtaagttccttcaatatataatctaagctctttttttccactcaggaacrttttattctcttgtaccttgcattattacttctttttttgttggttttcctccccattcctacaataaaagt

SEQ ID NO: 696469 - DNA, 1493 bp, Homo sapiens
tgttataaaattctaatgaatctaaaaaccctaatggaacttttaaataatagatatgagaaatggtatactaaaacagcattgaattagaaggtaaaaatggataatgctgtaaaaatattttctgtctactacaaagaaaatagtgaggcatatttttaaattattttaccattttaatattttaaaatgccctccctttgctcctgtcccaacaagatgtccatataattggttatgttttraaagagagataatttcctcaaattgtctaggctctgaaatgccatactgctcaaaatgcattatacagtatgttcctatgggtgtcttggtctaggtgaaacttcagaatctatctgagcaagtcaggaaatcaaatggtaattatcagccctggataaattttgatagcaaaattatagcccatgataagcagagttgtcgctatctcttcctagcaagactactaccgtctgtatggctcatcacagcaacaaacctttgccctgagcaattcttcagaggtaagcacaataaaaacctagctataagaatagccgctgaaaagctatgatcagcaaataatgaccagggagtccccttcatcatgtctctctctattaacagagaaactgcaccagctccccatcagcccagctgggagtcaacggatggtttcaggagtcaacggatggtttagcaacaggactcttttctgaaactctgaaaaccccagggtaaaattatgctactgtacagtctcctaatgttgctttacaatgcagctcaaatttgtgattttaaaagcacctcagcccactgtgagttcacagttatctttaatgatttgcaaatctcagtgttttttaacagctcatttttgtgctgcggctactgtagtaacacctgcgcctaaatagttattgcttataataccctgggctgtcaggacgtgcagtaaatgagaggcagtacagtatctttcaccttttctagcctaattcactcctccatctgaacacaagcatactgagtctgatggagctgctatgtcagctcccaaggccctcttccccctcggctcatgggacgtctgtcatcagcagctgctgatcaccctgctctgttacatggagagacacaggaaggagacggcagccagaaaccaccagggtctttccctcctgtgaacagaggaaggctgaaagctctgactttgaagatggaggatcaacttgttcccagatggcaactataaaaaaaaaatacagaagttttcatgaggcatgcaatgtggcatttctacaagatattctatttatatcacattactaaatccagcttcattttagtgtcattcaccctttaaatgattagagtcacctttacagttaacaaatattatgtaacaacttttcttctctaattctaaaatatttgttatctcttacgtaatagtaataatggcacatgtttactgaacaatacta

SEQ ID NO: 696470 - DNA, 1182 bp, Homo sapiens
ttcaacctccacatcttgtcccgctgggaggctttcagaggcaataacatgcatgaaattgtcatcttctatgataacaatgccttcttctgggatactgaagaagtatcccagaagaaggcactgcctgaggctcttttacagttaacttttttaataagtagaagatgtacattctaaaataatgacaaaaagcataataaatacacaaaccaaatacatagttgtttattattataaaatattgtagactatagataatagtatgtgctatacttttatacaattggcagtaggtttgtttacatcagcatcaccacgaccatgtgagtaatgtgtcgtaatatgacattaagacagttatagtgccactaagagatagggattttcatctccattataatcttagggtccattgctggccaaatgtcgttacatagcacacggctatattggcattagcctgcaaatttttraagtgtgctatatagaatgtaaatttttgtttatcccttaataaacatcaaaggtcttcaaataaatttttaaatatcaaattatacaagtaaaatatcaaaatggtcccaagggccaatgataagttctcaatttcattatgtataagggaaatacaaattaaaaccaaaaagtatacaaaccaaatagaatgactagtgaaaaaaatgatgatttcaagttttgtcaaggaattttaaataaccggaattcttattctgtgtgggcagcagcacaaattctttgaaactctttgtaaagtatttgggaacatcaacaaaaagctgaacttttcatatcctatgaacagcgatatcacttctatgtatataaacctgtcatatatatgtatgtaccaaaagacatgtaaaagaaagtttctagcaggactgtaagtagtagccaaaaagtggatattatatatataagactgcataagtgaatcatggtgtgctctatgagcagtgggcagacaaggtgggttctattagtattaaagtcttcaactctattagtaactttttattattgaatttgttaatgggtacatgaacattcatggtgttttttcaaacgactttgtatttaaaactgcaaataattttttactaaggcttaccaaaaatgcaaataaaatgtatatttatagcttcaaaaatagcaagc

SEQ ID NO: 696471 - DNA, 1182 bp, Homo sapiens
ttcaacctccacatcttgtcccgctgggaggctttcagaggcaataacatgcatgaaattgtcatcttctatgataacaatgccttcttctgggatactgaagaagtatcccagaagaaggcactgcctgaggctcttttacagttaacttttttaataagtagaagatgtacattctaaaataatgacaaaaagcataataaatacacaaaccaaatacatagttgtttattattataaaatattgtagactatagataatagtatgtgctatacttttatacaattggcagtaggtttgtttacatcagcatcaccacgaccatgtgagtaatgtgtcgtaatatgacattaagacagttatagtgccactaagagatagggattttcatctccattataatcttagggtccattgctggccaaatgtcgttacatagcacacggctatattggcattagcctgcaaatttttgaagtgtgctatatagaatgtaaatttttgtttatcccttaataaacatcaaaggtcttcaaataaatttttaaatatcaaattatacaagtaaaatatcaaaatggtcccaagggccaatgataagttctcaatttcattatgtataagggaaatacaaattaaaaccaaaaagtatacaaaccaaatagaatgactagtgaaaaaaatgatgatttcaagttttgtcaaggaattttaaataacyggaattcttattctgtgtgggcagcagcacaaattctttgaaactctttgtaaagtatttgggaacatcaacaaaaagctgaacttttcatatcctatgaacagcgatatcacttctatgtatataaacctgtcatatatatgtatgtaccaaaagacatgtaaaagaaagtttctagcaggactgtaagtagtagccaaaaagtggatattatatatataagactgcataagtgaatcatggtgtgctctatgagcagtgggcagacaaggtgggttctattagtattaaagtcttcaactctattagtaactttttattattgaatttgttaatgggtacatgaacattcatggtgttttttcaaacgactttgtatttaaaactgcaaataattttttactaaggcttaccaaaaatgcaaataaaatgtatatttatagcttcaaaaatagcaagc

SEQ ID NO: 696472 - DNA, 641 bp, Homo sapiens
atatcgaccttctacaatagaacaccacctccactgggagttagaaagacactcataactaccccattccaaaaaaaaaaaaaaagttttctgtagcaaaaaaaaacgttgaaaaaagacgatttatttagaatgttagacaaccaacaatttttaggtcaatttatacatcccaatattccagtatgacttctagaaatagttaataataactgtatttttatatgctaatagatggactatgattaagcatgttattgctttggtttgtctcaaataaaaagtaaaatagagtgaggttccaaggctttatctgaagtacccctgcccgtgttggttcagtatyattctcaccaaatcatctttttaacttttttcaaaaaaatattttagtaactgaacaaaaagccttatcctaagagtttctatttttggtctttgatctctcacaacactgtacagatgaggtatatgagaaggtagcaacaaccttatgactgcatttttttaataatttaaagactatttttagagcagttttaggttcgtagcaaaattaagaggaatgtatagagattttacatttacccctgcccatacacagcatagcttccccattaacaacatcctccaccagagcc

SEQ ID NO: 696473 - DNA, 629 bp, Homo sapiens
tggagtgaaaaagaaacacacatcttgtagatattagagaacatatgaaagtgggaattattaataaggtacttcggtcttgctattggcttggaactaattagattatattatccacaatgagaaagttttcawtttacacctgttttgcggagctggtgatatcccaggggcttttttgcagggatagcttcttattttcgaatttcccgatgcccctggatctgaatgatctgaagctccttttagaacacacaaagagcctttagtctgaggctacttttagagtacacaaggttgtgattgcttttctgatgctttataagatacacccaatctgtttgaagcggtttaaggagcctgtgtagcactggcacagactggaaaagaagtgtggctggttctgttcatgacaccccagtgcagctccagatgggggagtcaagggtgtggggatcaacaagaatatcaatgactccttccaaattaaaaatgtattaaagctagagacagaattgttttcttatctctaacccctttaaaactcccacaacagtaggcacaaagtaggctagcgattattaatattttctgagcttcagaagcaaggagacgcttgtaaatagaac

SEQ ID NO: 696474 - DNA, 629 bp, Homo sapiens
tggagtgaaaaagaaacacacatcttgtagatattagagaacatatgaaagtgggaattattaataaggtacttcggtcttgctattggcttggaactaattagattatattatccacaatgagaaagttttcattttacacctgttttgcggagctggtgatatcccaggggcttttttgcagggatagcttcttattttcgaatttcccgatgcccctggatctgaatgatctgaagctccttttagaacacacaaagagcctttagtctgaggctacttttagagtacacaaggttgtgattgcttttctgatgctttataagatacacccaatctgtttgaagcggtttaaggagcctgtgtagcactggcacagactggaaaagaagtgtggctggttctgttcatgacaccccagtgcagctccagatgggggagtcaarggtgtggggatcaacaagaatatcaatgactccttccaaattaaaaatgtattaaagctagagacagaattgttttcttatctctaacccctttaaaactcccacaacagtaggcacaaagtaggctagcgattattaatattttctgagcttcagaagcaaggagacgcttgtaaatagaac

SEQ ID NO: 696475 - DNA, 629 bp, Homo sapiens
tggagtgaaaaagaaacacacatcttgtagatattagagaacatatgaaagtgggaattattaataaggtacttcggtcttgctattggcttggaactaattagattatattatccacaatgagaaagttttcattttacacctgttttgcggagctggtgatatcccaggggcttttttgcagggatagcttcttattttcgaatttcccgatgcccctggatctgaatgatctgaagctccttttagaacacacaaagagcctttagtctgaggctacttttagagtacacaaggttgtgattgcttttctgatgctttataagatacacccaatctgtttgaagcggtttaaggagcctgtgtagcactggcacagactggaaaagaagtgtggctggttctgttcatgacaccccagtgcagctccagatgggggagtcaagggtgtggggatcaacaagaatatcaatgactccttccaaaytaaaaatgtattaaagctagagacagaattgttttcttatctctaacccctttaaaactcccacaacagtaggcacaaagtaggctagcgattattaatattttctgagcttcagaagcaaggagacgcttgtaaatagaac

SEQ ID NO: 696476 - DNA, 1482 bp, Homo sapiens
ctaaaagtaagggtgtcgtgctgatggccctgtgcgcactgacccgcgctctgcgctctctgaacctggcgcccccgaccgtcgccgcccctgccccgagtctgttccccgccgcccaggtaatccatcttacccgggaagaaggctgcttccattcgggctgccggagatggggtctgcgggcatgcgaggcgggagttgcgagtctggtcaggagtcatgcaggtccgtgaccttggataaggcacacttagcctcagctttttcctctacaagtgttgctttctcatagggcgaaattcttcagacgagatacttaaggtgaaagygctttgcagatcaccggttgtgcaggtttcagtaataacgtttcgagtgcctatgataagccaggtataggtaatagacgtttcaaataaatgaactcctttcaaatactctataaggcagttactattcccattttatagatgaggaaaataaggagtccaaggtcacacaccaactatcagagctaaacagtctgtctttcagagcctgtgctcttaaccattatgatatgatgcctgcaaggatgagttactgctgatattagagaatgcagggcaagataccaagaacagtggcctcaggggaaggtatcctgaggtcctagtgggtgactggtgagtcacacaaaagagaagtaagtcctgctcctctggagctttcaggctgcttatggtacagtttgggagatgcatgtttaaaattcaaatccaaatcaacctactccgaaatgctgggaatacatcaaggaacaagagtgaaatgacccctcccctccattcatatgtgaagaattcccagaaacaatgcagagggcaaaaggaattggcactgatggtggtacatggatgtgtggaagctaccagctctggagaagggaattgtttaggtaaaaacagattcctggagatggagagttctgagccaaatttggaaggagatcaccaaggagagaacattactgtgcaagctgtgaagggtggagtttttggatagctggtttgggatacatccaggaggaagtgggctacaagctaaaattgatctgtgccctctgccttggttctctgatgctttgccttcaattagctttcaaatgaaagagatgtctttttatccctagatgatgaacaatggcctcctccaacagccctctgccttgatgttgctcccctgccgcccagttcttacttctgtggcccttaatgccaactttgtgtcctggaagagtcgtaccaagtacaccattacaccagtgaagatgaggaagtctgggggccgagaccacacaggtgggaacaaggacagggggatttaagcagtcaaaaggaaaaacatgttaagaccctagacttgtatattgacacacttgtaccttgtaaggcagaggaatgtaattaaaaagcacttatttggctccttttgcatgtagta

SEQ ID NO: 696477 - DNA, 2725 bp, Homo sapiens
cccccactagacaaggagctacccaagggtgtctcaggccatctctcccccatcacttccaagaaacagaatgattttttttggagtcaataatatatttcattgattctaagatgggatttttttttcacattttcatatctctgacatcagctcgtgtctcacatgtcatgtctaagtttacttgcagaattttttctttcttggcactccaagaaagaatggcatgtcttgggtctgatgaaatgtggtggatctatttttgaacgtgagtccaatgtgtacttgctgtgtgaccttggggaagtcaccgcacctctgagcttccatttcctcatctataaaatagaagtattaacgttaggttgaaccacgtgcagctattgttgacctacaaaaatcttgtggttgacccttacagtattgtctgcatagcgttattgtgaggattaaaggagataaagtacgtaaagctctttgcatagtgcccgatgcttaataaattttaggagaaaaaagagagttccccaagggtggggccacatctccaccgactctgagctctgaggctgtctgcatctcatgtgcccttggctttgtgctaacccctagtgccccatactccatgcagccttgtatgtggcatatgcccatcgctcacatacccatgggccctgcactggagttggtgggcctagcagtctgtaccaattattcactgtgatagggagcaacagaggtaccctttcttggatgctcataatgtcagctcccagacaccgcctggcccattatttatggggtgcttgttcttccctgattttgcagcattttgattaaaatgcattttgcatatgttcagagctgggaagaccctggttatgggatgttcttaaggggctggtccagagagtcttgatcagcccttctcagatggggagtacaatctcacctcctgggcaggccactggagactggagagggtctgaggctagaggccctaggggatagacactttagctctcctagaagacagcaggtaatgaggacagaggcaaaaggcagggaggagagagtccccatggtgatcatacagatcggagatgatgaaatggagtgagatcctgggggagtggtggtttcaactccaaattctttggtgccatgctgaatggtagttaaggatagcagagcagggaaaagcagcaagaaggaactaagattctggtttgtattaaaagggttccaattcataggagacaattaagtcttgtgctattaaagggactgatgcagacaggctgccgatggaagggggtttatagagttctcagaacaactgcagggatgagctctttaaatatgggaatgagggagacttctgcaaagcctttctgcatctgctttgcagaactgaaatatgctattccaaaaagctgcccaattgggcggaaaagcaggagcggggagccaaggactttccagggctccaggcatcacatttcctgtctatggtgaagaatcaaataatctaggctgaaaagaccccgggggtcattctaggcctctggttctcaaatattagcatgtgccagaatcacccaaagcactcattaagatgcagatgctgggccccatccgcagagcttctgattccgtgggtgtggggtgaggcctgagtgcttgcctttttaacagtttcccagatcatgatgatgccgctcatctgggagccacactttaagaactgctgttctaggtcaatggaggaccccactacatacaggtggatagccagtctctgattgaatgccacctgtaatgggaagctcaccaattgtaggccccatccatgctttactgcagatgttttgcccatgctaatytttgttgcaaattttcctctaaaaagctaacatgtgtctccctgcagttctaggagggcaatataactggggtctgagtgtgggtttgaaattcctctgtctgagtttcaactcttgatcccttccctcctggctgtgtgactttgggtaagtcacttactttctctaagtctagatttccttacctgtaaaatgagaataatagcagatttcacctcatgaaattattgtgagaattaacatgcctggcaaaaacgaagctctcaatgcatttagctctcaatctaatcttgaggataagctcatggattctaagatctaacagcctgagattgaaggctgcctccctcacttcccacctgtgtaatcttgagcaaactctttttttttttttttttttttgagatggagtcttgctctgttgcccaggctggagtgcagtggcacaatctcacctcactgcaacctccacttcctgggttcaagcaattctcctgcctcagcctcctgaggagctggcactacaggcacctgccaccatgcctggctaatttttctatttttagtagagatggggtttcaccatattggccaggctggtcgaactcctgaccttgtgatctgcccgcttcagcctcccaagagcaaagtatttaatatctcaaaataataataataataataataataataataatagttgtacctgcctcacagggtttttgtgaggattgaatgagttaatgcatatgaagtgcttagaacacagccgtggtaagcactcaatacatgttgtctattattcctactattatgatcaccatgcccactgactctgg

SEQ ID NO: 696478 - DNA, 594 bp, Homo sapiens
tactaaaaaatatctacttctgagagcctaagtgatggttgatatcccacactccatgtactttaatgggcagtatcatctcaaattcctcttatctayatcaattcaaagactgaatcacaaaaacatttttcagatgagtctacattgttagaccaaatctgagtcagaagggcataacctcaaaactctatttgaggagccaaatgaacaataaggaaaggtaaggagtcaagaatggaaatccctcccctccaaaaaaagtgacattttcccttcttctttgggggtcagtggtgggtataaacataagggagagaataaggaaccactgaagggtcacttctcattaggttacatttatataacagtttggacaaaaatctcagaaatctcagtaatatcaaggactttatgatttatataattatgcaaaaccaattattttctgacatccttcagaacagaggcttcctcttaaacattcgtatgatacaaacctcttacaaacttcatttttcttaaaatggaactttctcacatcaggaatttgtgttagttcttagaactggctgtctctcgagtattaagagg

SEQ ID NO: 696479 - DNA, 581 bp, Homo sapiens
tataaatacctctaaacatgcyttgggtatttgtttttctaattgcaaatattataccataacttagtttgaaggctttgtaaagaatatgccagaaacatctaatattagccctaaaaactagggcaatcttttttttaacagaagagtgttcatataaacatcaaaagatgtgatgagagtagtttcaacttctaatcatagaaattatagggctatttcatgaaagaggtgctttatcagctcatcttgagtgaatgttaaagatgaagatatggctagtatctccagagtctactgtctcagagaggtagcccaaagttgtaagactgagtgccttgaggtagggaacaggaagcaacagggtctccaggttcactgaggagtactgacctgcaatgcgattcctacatcagcaaaggtcttccttccatcgttagaggactcctggatttgctatgcctatcctgatggcttcctacatgagaccatccattcacacttggcccttacccaggcctgaaattctccccagttgcactccacccacttatgtctatcacttagctcaaagccagtaa

SEQ ID NO: 696480 - DNA, 581 bp, Homo sapiens
tataaatacctctaaacatgccttgggtatttgtttttctaattgcaaatattataccataacttagtttgaaggctttgtaaagaatatgccagaaacatctaatattagccctaaaaactagggcaatcttttttttaacagaagagtgttcatataaacatcaaaagatgtgatgagagtagtttcaacttctaatcatagaaattatagggctatttcatgaaagaggtgctttatcagctcatcttgagtgaatgttaaagatgaagatatggctagtatctccagagtctactgtctcagagakgtagcccaaagttgtaagactgagtgccttgaggtagggaacaggaagcaacagggtctccaggttcactgaggagtactgacctgcaatgcgattcctacatcagcaaaggtcttccttccatcgttagaggactcctggatttgctatgcctatcctgatggcttcctacatgagaccatccattcacacttggcccttacccaggcctgaaattctccccagttgcactccacccacttatgtctatcacttagctcaaagccagtaa

SEQ ID NO: 696481 - DNA, 581 bp, Homo sapiens
tataaatacctctaaacatgccttgggtatttgtttttctaattgcaaatattataccataacttagtttgaaggctttgtaaagaatatgccagaaacatctaatattagccctaaaaactagggcaatcttttttttaacagaagagtgttcatataaacatcaaaagatgtgatgagagtagtttcaacttctaatcatagaaattatagggctatttcatgaaagaggtgctttatcagctcatcttgagtgaatgttaaagatgaagatatggctagtatctccagagtctactgtctcagagaggtagcccaaagttgtaagactgagtgccttgaggtagggaacaggaagcaacagggtytccaggttcactgaggagtactgacctgcaatgcgattcctacatcagcaaaggtcttccttccatcgttagaggactcctggatttgctatgcctatcctgatggcttcctacatgagaccatccattcacacttggcccttacccaggcctgaaattctccccagttgcactccacccacttatgtctatcacttagctcaaagccagtaa

SEQ ID NO: 696482 - DNA, 556 bp, Homo sapiens
aagtgagattacgtagcaatccaaaagaatgagtcagctatctagatagctgttgttccaaagagtttcatgatgcaatgttaagttagggaagccaaattgcagatgaataaatattttacatacatagtatttttaaaaggcataatcaagttaaaaagccctcacttgtgtatctgagcacagttaaggtggagcctacatctcaggctggaaggaggggrcaggacgggggaaaatgggtggggaggaaagaaaacaaagagtaggcagggcgtggtggctcacacctgtaatcccagcactttgggaggccgaggcaggtggatcacctgatgtcaggagttcgagaccagcctggccaacatggcaaaacactgtctctactaaaaatacaaaaaaatttgcagggcttggtggtgggcacctgtaatcccacctacttgggaggatgaggcatgagaatcgcttaagcctggaaggtggaggttgtagtgagccaagatcacgccactgcactccagcctgggcaacagaatgagactctgcctcaaaa

SEQ ID NO: 696483 - DNA, 556 bp, Homo sapiens
aagtgagattacgtagcaatccaaaagaatgagtcagctatctagatagctgttgttccaaagagtttcatgatgcaatgttaagttagggaagccaaattgcagatgaataaatattttacatacatagtatttttaaaaggcataatcaagttaaaaagccctcacttgtgtatctgagcacagttaaggtggagcctacatctcaggctggaaggaggggacaggacgggggaaaatgggtggggaggaaagaaaacaaagagtaggcagggcgtggtggctcacrcctgtaatcccagcactttgggaggccgaggcaggtggatcacctgatgtcaggagttcgagaccagcctggccaacatggcaaaacactgtctctactaaaaatacaaaaaaatttgcagggcttggtggtgggcacctgtaatcccacctacttgggaggatgaggcatgagaatcgcttaagcctggaaggtggaggttgtagtgagccaagatcacgccactgcactccagcctgggcaacagaatgagactctgcctcaaaa

SEQ ID NO: 696484 - DNA, 636 bp, Homo sapiens
ttttctcctctgctttaatctacagtaaatggatatagttaatattgggattgggatgtttgggctcttaattttacataagaaaaaaattaaaaaatgtattattcgtatagttgaacttattttgttttacaaattactagtttaaatgtgtactgaagtatgtgctgttgaattttgacctctttaaataargccagtaagttttttttaaaattacattcgtaagtagaaagctaaagataaaatatcaaacaataatatttaacagaaagtatttaaaaaatatttggtaaaaaggaattttgaggagatgaaaaaaagaaaaagtatttcagtaaatataaacttctttaaaagcatcttcatttatagttttttttttttgagctggagtctcgctctgtcacccaggctggagtgcagtggtgcgatctcggctcactgcaacctctgccttctggattcaagcgattctcgtgtcttagcctcctaagtagctgggattaaaggtgtgcgccattactctcgactgatttttgtatttttagtagagacgggattgcaccatgttggccaggctggtctcaaactcctgacctcaggtgacctacccgcctcaatctctcaaagttg

SEQ ID NO: 696485 - DNA, 1482 bp, Homo sapiens
ctgacactgtattaaattgaaaagaaaaattaattttctcaagaagcggtcttaggaagcagcaaaaaaaaccttagactttggggtctcctagttccaattccatctgtattgttagctgtgaccttgggcaagttacatagatcttctgagcctcaccccatttacatccaaggatttggagagtttcaaatgatgtaacatatttgaagtactacacacattcaatgcattttggagcccaatcccaagattctgatgtggcagctttgaraccggaccctgagtgggggtgcgtgtgtgttaaagctccatcagtgattcttaaatgcaattaggttttaggtgtagaggatgctctgtgactgtagctgtcttctctgtctctagactgtacataatttgttcttttgggacatctaaacaagcttttccccttaaagaataccttgaaaataccagttcttatatgaatgtcttaattttttgtttgtttgtttaaaatctctagggacaaatgttgaaatgatttgaatgcttacattgccaataaaataagaaagcattcttactttaagaacttttatttaaatacccaattaaatattaatacatttgtttgacagcttacacaggtatgaaaatataaaaatacaagtattcaactgaaagacttgagattttattatagaaaggcaaggaagctattatgaaaatctctttggagtggggaatatttatctatatcttccttaatttttatcaagcaatcattaatatgaattctagtacacctacatttttaggaaggcatttatttatttttaatttttgtgggtacagaatcagtgtatgtatttaaccaagaagtcatttaaatatctaagtaactttaaaatttaagttttgctccaataccactttttatcctcagtattatttttacctgtttgtatggaaaatttccaaacatatacaaaagaagtttaatgaccctcccttatgcttatatgatgacccattatataacatgtttttgtttgtttggattttgaagctaaaaacagagggagagcttgatgttactttatcttttagatgcaaagattttaaaaagtaattccatatatgatagttttaagttgttttgaaaaagccattctttaataaattaattagaattctcacttaagttacgtttgtttagtagcttagagtttaataaaattctcttcccacactttcccctgtcagcagtgtgctggtcagtgtttaatgactgactctctaggggaaaaaagagcctgcctctgtagtatttaccaatttccacggccgatttcagcctaccaatgtgaggccactgagttggaaagagatatgatcttcggtctttgcgatgctggctgggtctgctgctacgccgctgcctgtcttagttcacagaggaaatagtggctgtcaggctggaatgctctcaat

SEQ ID NO: 696486 - DNA, 941 bp, Homo sapiens
tgggattacaggcgtgagtcaccgcgcctgaccctgttaaagtattttctaagcttctttgaaaacggaatctctttgtggttgctgctgataaaactcctttgacctgacgattgctctaagtcctaattgccatatttatattcccatagtaagagtgtttggagatagtgtttgagcttttttgctggtgttaaaaatgcataatgaaagatggcagagagaggcatattatatccaattcatgagttgtttgtgttaacagaaagcttattttaatcacttaacattgttgatttgtctaatcacagtagcgctattgattaggagcctgacctttagatggttgacttgtgagtgtattcaatatggtgaaatatggtgttgatatatggctgcagattttagaggtgtcattagcaaaggtataggagtaaaataggggttatagtattccttactcaaattctgtatgtgctagagctggctggagtctgtggcatgctcattggtgtaagtcggtaaggactatgctttttgctccacatctctgttgtgggaaagctagtctcttgagcattcttgatcagaatggactggaataatttaactttcgtactttcccaggctattagtattatctaatgagtggcttaaagataccagaaacactgactgaggtctccacctgcttctggctgaatgaatgggagcttctagccattgaataagaggcagtagccaatgtttcttattctgaatggtccaggttgacttttataagagaaacactcagccttttaattgctgaaggtctgrcccatagactaagattgcacattcttagtctaggttacacttgaactagactgcacccactgacgatatattcagttcaggtgttaactcacttggattagcatctggcctgtcctatctga

SEQ ID NO: 696487 - DNA, 612 bp, Homo sapiens
gaaaatgaactccatgagagttaggcttccaaatacataaatgtatacattcagacatacctctaataattaaatattctttgccaggcacagtttgaaagcttttccacagtttgaagcctytttcaatcctcaaaatgaatttatgaggttttttttttcttttcaacttttattttaggttcagggggtacatgtgcaggcttgttacatgggaaaactctgtatgtcatggggttttgtcacccaattaatgagcatattacccggtgggtagttttttaatcctcaccctcctcccaccctctgcccacaagtagccctgggtatctattgtttccttctttatgtccctgtgtactcattgtttagctcccacttttaagtgagaacatgtggtatttgtttttctgctcctgcattaattcacttagaataatggcctctaattccatccatgttgccactaaggacatgatgtcattctttttcatggctaggtagtattccatggtgtatatgtaccacttttttttttttttctcttgagatggaatctcactctgtcaccagcctggagtgcagtagtgcaatctcggctcactgcaacct

SEQ ID NO: 696488 - DNA, 612 bp, Homo sapiens
gaaaatgaactccatgagagttaggcttccaaatacataaatgtatacattcagacatacctctaataattaaatattctttgccaggcacagtttgaaagcttttccacagtttgaagcctctttcaatcctcaaaatgaatttwtgaggttttttttttcttttcaacttttattttaggttcagggggtacatgtgcaggcttgttacatgggaaaactctgtatgtcatggggttttgtcacccaattaatgagcatattacccggtgggtagttttttaatcctcaccctcctcccaccctctgcccacaagtagccctgggtatctattgtttccttctttatgtccctgtgtactcattgtttagctcccacttttaagtgagaacatgtggtatttgtttttctgctcctgcattaattcacttagaataatggcctctaattccatccatgttgccactaaggacatgatgtcattctttttcatggctaggtagtattccatggtgtatatgtaccacttttttttttttttctcttgagatggaatctcactctgtcaccagcctggagtgcagtagtgcaatctcggctcactgcaacct

SEQ ID NO: 696489 - DNA, 673 bp, Homo sapiens
gttccagttgtttccttctgctcaggttatcagaagctgcacaaagtggtctggtacttgggacactttgttgtcccaaaaagacgatattcaaagtctggttctactaactctattctccttcctataagatccttcctaagagaccgtcagctgttctgcaaggagttcagaattactaatgatggatgactgaagaaaatgaaaaaggttgagaatgctaggataggcagattaataaaaattaaaaacttcaaataaygttttgtatcttttgccccatgtcctccaggttgttaattacctgtttcagtgtacaagaaaaataggacctatctcccggtggatgagcatcctttaaacctttatgatgcacttgaattacagctattaatagcgagctcatggaagaatgagtaagacattcctactcattaaagttctcccaaatgatacatcctaaactttaagttccttaagtggctgtaactttccattaattaaaaaggaacaaagtttcctttttaaaaaatttctaggaaatggggccttgaaattcatcttctctgaaaaaaatggtcaattcctttgtgactaattatctaaggtatttttctcttttcttttcttctctgtctcccattattggagtggaagaaagagtgtgagtaga

SEQ ID NO: 696490 - DNA, 1102 bp, Homo sapiens
taagaaaatggctgaaagaagaaatacccagggcagatttatttacttagtaaatatgctctacttagctattttttaacatttagtaaaatctgagttgattttagccaaaatcacagccccgcctgatgatttttattttgaaggtacccaccccaatcaattcaaatgatttatcagtataatatttacatttaaagaaatacattatggtttgatatggagtcagataatactataattacatttttctaaagtcaaaaacatacaaaaaatcttgacgtagcgcatttacttgtaatgtgagtcttgttactttctcatagtaacagattagaaaaccatttttgttattttcttgaaatctaattttatttaaaacatgaatttcagagtgcttttataaagataggaattttttttcttatagctaaatgacaaaactacattttaatgtgtttcatatttaaactagaccggctctcttttctcttccagaaacatgatcaagtccttctatactgcaagtcttttgatagatgtcataacagtatttggagaactcactgatgaagtgagtgtacattctttattgtcttrttagctgaagatcagtaatgtttctgtttatcaatattgttattgcattgtttatttacagcagaatgtctgtcagaaattaatgcaagcaaaaaatgtaattttgcattttttattagccatttttaaaaagtaaattatttccaataatatattttaattttgtactaagttctttatttttatttttgtatttgttttttgagacaggatattgctctgttgcccaggctggagtgcagtggtgtgatctcagctcactgcagcctcagcctgcccgggctcaagcaattctcctgcctcagcctcctgagtatctgggactacaggcacaaggcaccatagctggctaattttgtatttttttgtagagacatggttttaccaagctggtgtcgaactcttgagctcaagcaatcttgcctgcctcagcctcccaaagtgctggaattacaggtgtgaaccccattgcacctggcctgtaataagttctttaaatcca

SEQ ID NO: 696491 - DNA, 642 bp, Homo sapiens
aaatatcatatgtatatatatgaataagcaagaataatattctgagtacattagtattatattgaacgttaaatactgattgatccaactactagtcattgagctcctggaagccagggacaacattttaaacatttctgtgtctctaatgtatttgctggaagacaaaatatatttctcttcctacccttcctctcccccaactcctccaatctaaaattgaccctgttttcagtacaacaagattccagatggaagtcaaggtatatagtgattttattaaccccggtagcaaaaatattgtttcaataaagataaaaattttacattccatytatggtttccttaatttaaaaatatattggtaatacagttatatagttcaaaatcaaagtgatataaaatgatattcattaagccatcttgctcccacccttgtctctatcaggtttgtacctgtttttccctgcagagttcatgcattcaacaaatatttattaaatatttattgagtacttaggtgctcattgtgtgccagacactgttctaagtgctaagggcacagcaatggaaacaacaacaacaacaaaaaaaaaccaggaaaaataattgtggccgcaagatgcttacgtctagtaggag

SEQ ID NO: 696492 - DNA, 642 bp, Homo sapiens
aaatatcatatgtatatatatgaataagcaagaataatattctgagtacattagtattatattgaacgttaaatactgattgatccaactactagtcattgagctcctggaagccagggacaacattttaaacatttctgtgtctctaatgtatttgctggaagacaaaatatatttctcttcctacccttcctctcccccaactcctccaatctaaaattgaccctgttttcagtacaacaagattccagatggaagtcaaggtatatagtgattttattaaccccggtagcaaaaatattgtttcaataaagataaaaattttacattccatctatggtttccttaatttaaaaatatattggtaatacagttatatagttcaaaatcaaagtgatataaaatgatattcattaagccatcttgctcccacccttgtctctatcaggtttgtacctgtttttccctgcagagttcatgcattcaacaaatatttattaaatatttattgagtacttaggtgctcattgtgtgccagacactgttctaagtgctaagggcacagcaatggaaacaacaacaacaacaaaaaaaaaccaggaaaaataattgtggccscaagatgcttacgtctagtaggag

SEQ ID NO: 696493 - DNA, 647 bp, Homo sapiens
gaccagctttttacaagtgttttatctatctgcagtgaaaagagatgtaagactgcagatttgcatattaaatgcctgcactataaatctcaaaacattcagttctccaatactaattatttcattatgaaaccatagcataattcctaaaactttgaatattcacaaagatgtttaagttttgcagagttgagctggatatcaattagtcaacaaataccacttgagaataataggtagaagtctctttcttagaaaccaggatgaattaaagaggcacaagacaagataaacctttaaatgkctttcaaagtacttggggaaataagacacattaaaagaaataatgataaaaagcagcaaatatttattaaattaaccatttagaaatctagttacaatgtccatacattttaaacatgggcttttatattatttatgatttgtgaaagatgtattaaaactcaaaagatttgtttttgagttttcaaaaggtcatagagcagtacagacctggattcaaattctggctgtactacttagtagctatatcttatagggaaagtagcttaacattgtttaatgttggttttcttaactgtacaaggggataataacataaggtttagggttaattagataaatta

SEQ ID NO: 696494 - DNA, 1454 bp, Homo sapiens
tgagattgtaccctttactctcttcctgtagtaaagctttactatcttattaataaaattggtaaggcatttaaaatggatgaggaaagaattgygttgatggtttagtcttaggaaaggctattatcctttaaactgtaaactaaattttccccaaaattagcttggcccacacccaggaataaccaagagcaatttggaggttaaaggcaagatgcaattgttaggtcaatttctttcactgtcataattttctcatggttataatgtttgcaaaggaagtttcactattcggtagggtaactgcttaccaaaatatccaggcaagtgagtgaaatatttaacagactgaaaatcaatgcagtcgtttttattatacaaaactaatgattgtggtcatgatattcaaaataagaattatctaataatttgtttaagtacaaatacccataatgtatgaaattaataatgtttcttacatgaattatcttctaataattttcttctgcaaaaactttaactttctttaaaaattggaaacaaaataatcaaattgtggtccgacgtactcaactaacttgtaaataacagagatggagtgtacaacagtggaatagccaatacagtggacatcaacctaggttctaatctagatcctgttagaacctggttgtacaaattttagcaaacactttcatctctcagatttttaactgggtaataaaattttgaaagaattgaactcaaaagtctgtttcagatctaaaattctaagattctacttgatggtaaatattctcaaacattcttttcaagaacaacaacaaaaaagtcaccctgaaaaaattcaagtgctagagagaaatggttgcccaatttttttttctttttgtaaacagcttctctatttaatgttttacagaattaactaactatataatatagactttaaaagatcaattacgagaaataagacgtagaagttttttaattatccgtggtgttaacctcaaggctcaactgcttagaaacgttaacatggtatttgcacaagcatgttagctgcagctgttacatgacactagggggagctctaatactgttttgttttatgttcactgtggctttagcgtttatttttaatttagttgtcataaattaatatctaaatgtaataatcctccaaatacaatagtaccaccaaaatgagcgtgcccaaagtgtcgatgtaacgttaaaactgatagggaaatttgtcagccattttcacaaatgtgtctttagaaaactatgattccatgattattcaaaacttccatgaactatatacgaacacagatgtgtgtgaggttgaatatatgtgtatgtatgcattttcaattgacatgtgacatatcctgaagacggttctgtgtgcctttgagaagaatatatattctgctactgttgaattt

SEQ ID NO: 696495 - DNA, 1454 bp, Homo sapiens
tgagattgtaccctttactctcttcctgtagtaaagctttactatcttattaataaaattggtaaggcatttaaaatggatgaggaaagaattgcgttgatggtttagtcttaggaaaggctattatcctttaaactgtaaactaaattttccccaaaattagcttggcccacacccaggaataaccaagagcaatttggaggttaaaggcaagatgcaattgttaggtcaatttctttcactgtcataattttctcatggttataatgtttgcaaaggaagtttcactattcggtagggtaactgcttaccaaaatatccagkcaagtgagtgaaatatttaacagactgaaaatcaatgcagtcgtttttattatacaaaactaatgattgtggtcatgatattcaaaataagaattatctaataatttgtttaagtacaaatacccataatgtatgaaattaataatgtttcttacatgaattatcttctaataattttcttctgcaaaaactttaactttctttaaaaattggaaacaaaataatcaaattgtggtccgacgtactcaactaacttgtaaataacagagatggagtgtacaacagtggaatagccaatacagtggacatcaacctaggttctaatctagatcctgttagaacctggttgtacaaattttagcaaacactttcatctctcagatttttaactgggtaataaaattttgaaagaattgaactcaaaagtctgtttcagatctaaaattctaagattctacttgatggtaaatattctcaaacattcttttcaagaacaacaacaaaaaagtcaccctgaaaaaattcaagtgctagagagaaatggttgcccaatttttttttctttttgtaaacagcttctctatttaatgttttacagaattaactaactatataatatagactttaaaagatcaattacgagaaataagacgtagaagttttttaattatccgtggtgttaacctcaaggctcaactgcttagaaacgttaacatggtatttgcacaagcatgttagctgcagctgttacatgacactagggggagctctaatactgttttgttttatgttcactgtggctttagcgtttatttttaatttagttgtcataaattaatatctaaatgtaataatcctccaaatacaatagtaccaccaaaatgagcgtgcccaaagtgtcgatgtaacgttaaaactgatagggaaatttgtcagccattttcacaaatgtgtctttagaaaactatgattccatgattattcaaaacttccatgaactatatacgaacacagatgtgtgtgaggttgaatatatgtgtatgtatgcattttcaattgacatgtgacatatcctgaagacggttctgtgtgcctttgagaagaatatatattctgctactgttgaattt

SEQ ID NO: 696496 - DNA, 1558 bp, Homo sapiens
tgatcaggtgtttccaggtaagcatcctcctctatagggtaaaggtaattgagttcttcagatccccagccctctccattcatctagtttaaatttcatttcttccaagctctttgtcagaaccagcatttgaagtttaaatctagaagttaaaaatccaccagcaaatcctactggctctacttgagaaacaaatccagaatctgatctcttgtcaccacctccaccacaaccttcccaatgccagtctcttccttccactaccacctcccatcagtccattctgcacactgtattcagggagatcctttcagaatcaaggtcatgtggtgtcagccctctctgtcaaatgcttgcactggcttttcctctctttcagagtaaaacccagtgtctcaaccctggcctccaagctgcttcattatccggcctccaactctcttcttcatcttacgattttccctactcctccatgttcctctgctccagccacgtcggcctccttactgactgtttaatacaccgagcgcatttcctcttcagggcctttccacctgctgttctcatgccagaagcacatttctctccccacaacctgcaaccygcccctcatatctgcaggcttgcttccttactttgttaaggtctctgttcaaatgtcccattatcacagggatctttccagactgaagagatctacataactatggctctgtaaacaacattcctccagggttcctgtccccttaccctactttattttggggaacattcttcaccatctgatacaatgatgtatcttatgcatgtatttactgactctctgcccttagtagaatatgagcccagagagcatgcatgtggtctattttgttaactgtgacagtcccagtgcccagaatagtgcctgacctttggtgggcactgaataaatatctaagtaatctgtagcatggaaaatcagcttctgaaaattggctgtttgcacggtcgtgtatttgcttggtagaaaatcaaattttccttcaaattagcattttctggtaactagagctgccccatcttcctctgagtggtctccaagtcagccaatagccttgtgctgtggcagccatgcctggctcttgatgctgtagccaaaagcaggcaggggatggtgaggctggtccagtccatggggagggacaaactcacagctctcagatcatctcagggcagcctttgttggcagaaataggtaggcagccaccctgaataggaggaaggcttctagactgggtcaggaggcctgggtttgcatcctagtggcaagcgtgcattcatttactagggctgccataacaaaataccactaactggacagcttagacaacagccatttatatctcacagctctgaaggctggaagtccaaaatcaaggggttgcagggccatgctccctctgaaacctgttagtgcttgggcactggttgacttgtagatgcttcctgctgatccttcgtctgcacatggcattctgcctgtcttacatggccatcttataaggataccaactgg

SEQ ID NO: 696497 - DNA, 627 bp, Homo sapiens
atgaaggagagaaaaaccaacctctgtgagtttgaaaaggactctggattcctgataactgtgtcctgggtccccgtggttgctggaggaggtgcataattgctagatcatagccattacagtcacctggctgcttccattcccagcttccgtgggcctgagtctggtggccagragcctgcagcaggggtgaggcaggagggcccaggtgtgcagagatgcccctcctcctgtcacctggctgtgctgcccaggactctcctgccagctttttgtcttcttcctgttcccccagtcactggcccaggtcacccagcctcggggtgggggctgccagggcctttcccactggcctcctcccaggactaacccgggctcctgtcctcagccctatgcatgggaggctcttctcacacacagatcccgggacccaccaagctctgcccctcccaagtctgagaactgcccacccccgtgtgtctgttgttctccagaccacccttcatgtggcctctcctggacagaggctctagtgcatcaggcgagaaccttctaggctcctatgtccctgcacagtcacagaggtagctgccatcctatgcccctgtccggaagcagagacaggcc

SEQ ID NO: 696498 - DNA, 627 bp, Homo sapiens
atgaaggagagaaaaaccaacctctgtgagtttgaaaaggactctggattcctgataactgtgtcctgggtccccgtggttgctggaggaggtgcataattgctagatcatagccattacagtcacctggctgcttccattcccagcttccgtgggcctgagtctggtggccaggagcctgcagcaggggtgaggcaggagrgcccaggtgtgcagagatgcccctcctcctgtcacctggctgtgctgcccaggactctcctgccagctttttgtcttcttcctgttcccccagtcactggcccaggtcacccagcctcggggtgggggctgccagggcctttcccactggcctcctcccaggactaacccgggctcctgtcctcagccctatgcatgggaggctcttctcacacacagatcccgggacccaccaagctctgcccctcccaagtctgagaactgcccacccccgtgtgtctgttgttctccagaccacccttcatgtggcctctcctggacagaggctctagtgcatcaggcgagaaccttctaggctcctatgtccctgcacagtcacagaggtagctgccatcctatgcccctgtccggaagcagagacaggcc

SEQ ID NO: 696499 - DNA, 653 bp, Homo sapiens
acaggcaacacaaggtctcattcacctgtctcatgttaggatgagaaggtcccagccacggggaggggcgggactccgggaattctctttccccatcctgcctcctcacccacctgctccttgctccacttccaattctgcccacagtacctgtcactctaaaggactctcctcagatgccagggaggatgaagcaggggaggatgatgaggaggcagcaaaggatgagggtggtggctgtggccctgagttgggttgtgcctgaggacatggcgagtggtgctgaaatggaaacacaaaagtgacaacccttgtccaggccccaaatctgaggagacacctcctcagttcctgccaccctaggtcatcctggaaggcaaaagttttgtccyctcccccctggtgtggggcagccagtatgacaggtcctggcttaggaagggagacggggtgtgtcttgtcctcagggagctcacacagctgctgagggaagcaaggtgacaacacaccccaccctcctgctgtgggggaagaggaggtgatgccccagagttggggaggggaggatctctggctggtgttggaagtggttttgatggatttccagaaccagaccagggaaaggaaaggaaaagtgattctcaaaagaggaa

SEQ ID NO: 696500 - DNA, 653 bp, Homo sapiens
acaggcaacacaaggtctcattcacctgtctcatgttaggatgagaaggtcccagccacggggaggggcgggactccgggaattctctttccccatcctgcctcctcacccacctgctccttgctccacttccaattctgcccacagtacctgtcactctaaaggactctcctcagatgccagggaggatgaagcaggggaggatgatgaggaggcagcaaaggatgagggtggtggctgtggccctgagttgggttgtgcctgaggacatggcgagtggtgctgaaatggaaacacaaaagtgacaacccttgtccaggccccaaatctgaggagacacctcctcagttcctgccaccctaggtcatcctggaaggcaaaagttttgtcccctcccccctggtgtggggcagccagtatgacaggtcctggcttaggaagggagacggggtgwgtcttgtcctcagggagctcacacagctgctgagggaagcaaggtgacaacacaccccaccctcctgctgtgggggaagaggaggtgatgccccagagttggggaggggaggatctctggctggtgttggaagtggttttgatggatttccagaaccagaccagggaaaggaaaggaaaagtgattctcaaaagaggaa

SEQ ID NO: 696501 - DNA, 687 bp, Homo sapiens
gggatcctgttgtgattctgcggttggcaattgccatgaaatccacatagcaccttttccaaccacatatgcctctgggatcttagggagtccagggtcaaatagcygtattggtaggtccagcgtcacccctcatcacagggtgtgtatggctgcatcccagctacaagagcagagttaagtagtgacaggggaggtcatatgaccagcacaacctataatagttactacattaactacaaacactatccattcccggtagaaatccaggaaatgtgaaattaccatcgaatgggtctatgaacccagcccatccctctaagctggacctgacagaggtgtccatctgttactttgccctaaatgcacctcatgagtaataggggagcaagttaatgctttaggtccctgggaggaggttggatcacacactgtgtctactaggagtgtctgggtatttgccatttcatggcatacagttaccagagtgaatgcccatctggctctctgggggaggctgagggagtcattgcagttgctgtggggttgaaggagcccaccagggcctctgggctctccttctagcaatggactctgggtctgagatgtggctcagttctcaaagctgggcaaaggagctcagttatttcctagggtgactcctttcagccttcaggtcatccatcc

SEQ ID NO: 696502 - DNA, 687 bp, Homo sapiens
gggatcctgttgtgattctgcggttggcaattgccatgaaatccacatagcaccttttccaaccacatatgcctctgggatcttagggagtccagggtcaaatagctrtattggtaggtccagcgtcacccctcatcacagggtgtgtatggctgcatcccagctacaagagcagagttaagtagtgacaggggaggtcatatgaccagcacaacctataatagttactacattaactacaaacactatccattcccggtagaaatccaggaaatgtgaaattaccatcgaatgggtctatgaacccagcccatccctctaagctggacctgacagaggtgtccatctgttactttgccctaaatgcacctcatgagtaataggggagcaagttaatgctttaggtccctgggaggaggttggatcacacactgtgtctactaggagtgtctgggtatttgccatttcatggcatacagttaccagagtgaatgcccatctggctctctgggggaggctgagggagtcattgcagttgctgtggggttgaaggagcccaccagggcctctgggctctccttctagcaatggactctgggtctgagatgtggctcagttctcaaagctgggcaaaggagctcagttatttcctagggtgactcctttcagccttcaggtcatccatcc

SEQ ID NO: 696503 - DNA, 687 bp, Homo sapiens
gggatcctgttgtgattctgcggttggcaattgccatgaaatccacatagcaccttttccaaccacatatgcctctgggatcttagggagtccagggtcaaatagctgtattggtaggtccagcgtcacccctcatcacagggtgtgtatggctgcatcccagctacaagagcagagttaagtagtgacaggggaggtcatatgaccagcacaacctataatagttactacattaactacaaacactrtccattcccggtagaaatccaggaaatgtgaaattaccatcgaatgggtctatgaacccagcccatccctctaagctggacctgacagaggtgtccatctgttactttgccctaaatgcacctcatgagtaataggggagcaagttaatgctttaggtccctgggaggaggttggatcacacactgtgtctactaggagtgtctgggtatttgccatttcatggcatacagttaccagagtgaatgcccatctggctctctgggggaggctgagggagtcattgcagttgctgtggggttgaaggagcccaccagggcctctgggctctccttctagcaatggactctgggtctgagatgtggctcagttctcaaagctgggcaaaggagctcagttatttcctagggtgactcctttcagccttcaggtcatccatcc

SEQ ID NO: 696504 - DNA, 687 bp, Homo sapiens
gggatcctgttgtgattctgcggttggcaattgccatgaaatccacatagcaccttttccaaccacatatgcctctgggatcttagggagtccagggtcaaatagctgtattggtaggtccagcgtcacccctcatcacagggtgtgtatggctgcatcccagctacaagagcagagttaagtagtgacaggggaggtcatatgaccagcacaacctataatagttactacattaactacaaacactatccattcccggtasaaatccaggaaatgtgaaattaccatcgaatgggtctatgaacccagcccatccctctaagctggacctgacagaggtgtccatctgttactttgccctaaatgcacctcatgagtaataggggagcaagttaatgctttaggtccctgggaggaggttggatcacacactgtgtctactaggagtgtctgggtatttgccatttcatggcatacagttaccagagtgaatgcccatctggctctctgggggaggctgagggagtcattgcagttgctgtggggttgaaggagcccaccagggcctctgggctctccttctagcaatggactctgggtctgagatgtggctcagttctcaaagctgggcaaaggagctcagttatttcctagggtgactcctttcagccttcaggtcatccatcc

SEQ ID NO: 696505 - DNA, 687 bp, Homo sapiens
gggatcctgttgtgattctgcggttggcaattgccatgaaatccacatagcaccttttccaaccacatatgcctctgggatcttagggagtccagggtcaaatagctgtattggtaggtccagcgtcacccctcatcacagggtgtgtatggctgcatcccagctacaagagcagagttaagtagtgacaggggaggtcatatgaccagcacaacctataatagttactacattaactacaaacactatccattcccggtagraatccaggaaatgtgaaattaccatcgaatgggtctatgaacccagcccatccctctaagctggacctgacagaggtgtccatctgttactttgccctaaatgcacctcatgagtaataggggagcaagttaatgctttaggtccctgggaggaggttggatcacacactgtgtctactaggagtgtctgggtatttgccatttcatggcatacagttaccagagtgaatgcccatctggctctctgggggaggctgagggagtcattgcagttgctgtggggttgaaggagcccaccagggcctctgggctctccttctagcaatggactctgggtctgagatgtggctcagttctcaaagctgggcaaaggagctcagttatttcctagggtgactcctttcagccttcaggtcatccatcc

SEQ ID NO: 696506 - DNA, 479 bp, Homo sapiens
aaaagaaagaaaaaaaattaagactggacattgaccgataggcaaaaaaaaaattcttcattatagaataataaaggaataagatattgttatataattgtgtaaataagtgaatatctcatgccaccaagaaagcctgttaattaaaaataaaaaaaaaacttaagagtactgtattaggctgttctgcattgctataaagatatacctgaggctgagtaatttatacagaaaagagtttaattggctcacgattctgcagacagtacaagaagcatgctgctggcatctgcttctggtgagggtctcaggaagcttccactcayggcagaaggtggaggagaagcaggcacttcacatggcaagagccagagggagagagacgaaggaggtgctacacacttttaaaaaccaggtctagagataactcactcgctattcctaggacagcaccaagccattcgggaaggatccacccc

SEQ ID NO: 696507 - DNA, 479 bp, Homo sapiens
aaaagaaagaaaaaaaattaagactggacattgaccgataggcaaaaaaaaaattcttcattatagaataataaaggaataagatattgttatataattgtgtaaataagtgaatatctcatgccaccaagaaagcctgttaattaaaaataaaaaaaaaacttaagagtactgtattaggctgttctgcattgctataaagatatacctgaggctgagtaatttatacagaaaagagtttaattggctcacgattctgcagacagtacaagaagcatgctgctggcatctgcttctggtgagggtctcaggaagcttccactcatggcagaaggtggaggagaagcaggcacttcacatggcaagagccagaggragagagacgaaggaggtgctacacacttttaaaaaccaggtctagagataactcactcgctattcctaggacagcaccaagccattcgggaaggatccacccc

SEQ ID NO: 696508 - DNA, 675 bp, Homo sapiens
  misc_feature 294, 295, 296, 297, 298, 299, 300, 301, 302, 303, 304, 305,306, 307, 308, 309, 310, 311, 312, 313, 314, 315, 316, 317,318, 319, 320, 321, 322, 323, 324, 325, 326, 327, 328, 329,330, 331, 332, 333, 334, 335, 336, 337, 338, 339, 340: n = A,T,C or G
  misc_feature 341, 342, 343, 344, 345, 346, 347, 348, 349, 350, 351, 352,353, 354, 355, 356, 357, 358, 359, 360, 361, 362, 363, 364,365, 366, 367, 368, 369, 370, 371, 372, 373, 374, 375, 376,377, 378, 379, 380, 381, 382, 383, 384, 385, 386, 387: n = A,T,C or G
  misc_feature 388, 389, 390, 391, 392, 393: n = A,T,C or G
atgctttttcttggacttaatgaaattcagaggtatttattgatcatctaatcatctaatacattcctagctcctgaagaattcatcaattactaaaagtcactaggaaaaccagttaggcgtgtgaccagaatacagctctccagaattccagcccagggccacttgtcaagaaaagtacgtaagtagttctatttattatttatacctgcagacttcctaaatggatttgaggtggcaattttctaattaaaatgtgtttctaatcccttcctaatctcgttttattgggknnnnnnnnnnnnnnnnnnnnnnnnnnnnnnnnnnnnnnnnnnnnnnnnnnnnnnnnnnnnnnnnnnnnnnnnnnnnnnnnnnnnnnnnnnnnnnnnnnnngtataaaaatatgaattagctgagtgcagtggcacatgcctataatcccagctacttgggaggctaaggtgggggaactgcttgaaccctagagttcaagataagcctgagcaacatagcgagacctcatctaaaaaatatatatatgtgtataaattagcattaaaattaagatgtacatccatttaatatacatgtaatatatatgaacacatatatttttatttgtaagcctgttgaaagaagctaataataatggttcatccttggaccaattcaaac

SEQ ID NO: 696509 - DNA, 1097 bp, Homo sapiens
ctcttttaaaaccagcttcaactcaccgctagtctcaacagctgatcattaggatgatatttcaagaattagttcatcctaatgaagaaaacagctcaaagaaagaagtcctacatatttttgcctttgggaatgagaagaaattaaggaaaatatttctgcatttggtttgaaacgtcacaatttttgtttgctgaatggaaggaaattctacttctggcagaaggaaaatgaaagagctgagatgcaagaaggaatagtgcgacagaaattagattagtggttgccaagggctgggagggaaaaatggagaaatggggtagactgctaaagggtacagtgtttttttgggggatgatgaaaacgtaaatgtaaagttaattatggtgatgattgcacaatactgtgaatatattaaaatgtaggtacacttttaaataggkgagttgcatgtgaattatatctcaataaagctgagaccaataaaaaaggaatagtgagcgatggtattgataaatgtggataaatctaaaacaaatattatctaaaacagcaataaaaataatgtcccatatagggagatttggagaatcagtctataatgaaatttctgactaaaaaatgtacctattagtgtggaggagatattggaactggtgtactaattctactgttgtcattctcagaaattattcaagcaactagtttatctcctcttttgctagccttgatgaatctactataatccttctcatcccagcatgatattttatgagaggaaccgttgctccatccagagagagtaagactattaacaactgtaagtttcaaattatttgacacctctttcatttcttctaagttctgtacttttacaaaaattacttcagctctcttttaaaatttgtgcgtaccttgttttactgtgcctcactttattctgcttcacagatactgctttttttttttaattaaagatgtgttgcaaccctgcattgagcaagtctgccagcagcatttctccaaaggcatgtgctcatttcgtgtctctgtgccacatttgggtaattccctcagtattttaaactttttcatta

SEQ ID NO: 696510 - DNA, 2296 bp, Homo sapiens
ctaaattttctctattaagctgttaaattttacatttaattaagcatgagttaaaattgtaagtttccaaaaccataactcaaataataaatgaagtgccaccttcatcatattaaaccaatgttctgaatattcattgttcagggttttatgatattaaaagtgaacatcttagttcactagtggtatggaagctagagctagtttttgttgttgttttgacacggagtctcgctctgttgctaggctggagttcagtggcgcgatctcagctcactgcaacctccgcctcctgggtccaagtgatgctcctgcctcaacctcccaggtagctaggactacaggcatatgccaccacgtccagctaatatttgtatttttagtagagacagtgtttcatcatgttggccaggatggtctcgatctcttgacctcgtgatccgcccgcctcagcctcccaaagtgctgggactgcaggcgtgagccactgtgcccagccattgttgtttttaattacacttgaattctatctttttttgcatgttaatgaatcttagcctggcaaagtgccagacacagtccagtggactcaaagagaagcaggcagttcataggacacaatgcctctggagagtaataggggtctacatatacacaacttcccagtcatagattaggagaaacactcacttttatttactttgacatatttaggaaatcactattagacattaattaaagaatgattgagactaattatttgcacaaggctctgtgtgtacaaatgaaataatcagaccatggatgatccacttatttctactctctaatggcggaaatagctgcaaactgaaattgtcattctctgagtctagttattattgcacctcagttgattggttacatcatatagacacaggcaaatcttttaggaacatactttaatgcatgaataactttggaaaattcaccaaatgaagaggcagcagctgtgaatagatgaaaaattcttggcctggatatccacttaagtcaatagcgatagttctgtctaggtacgatggataataaggttaacatctaccctccaaactgattatttcagcatctcacaggtaattctggcagagactcaaaataaatgtttatgtcacttcccaccctcatatggcagaggagaaaactgggatgcagaaaggttcaatgacctgcctaagctcatacaacaggtaattacaaagctgggagcagatcccagggattcagattcccaccagtctaggaacccagctgttcttatcatatttagtccattgttattattacacttgggaagagtggctgtttgtggcaattcatgagtttaaaaaacaaggtagagagtaggaaggagagctatgtccacatcctgaaagtaccaggtagaacccttcaaaatctgggattacagcacacaggcagggaacggggcttctcaaaccttttcatgccacagcacacatacttatatgtgataatatttgtttgcaacctaaagtacatacaaagctattattcctgaccctggagactctttagctatccagaccctgtccagatgctcagagggcatcaatttatcctctgaggacaacaatttatcttggcacatttctaacccattcacaactcacccagataccttggaccataaataggaaaccctaccagatcgtaattattcttttaattattagaattaaatgtaacaactgaaattactgtggcttcttggcttccattattcttyactaaagatcatatcaagtaaaaaaaaaaaaagtttacagaagctaaaaatataaggctgtacctggtttacaaaaaattatcaagaatctctgaagttcattatttgctgaaaaatagcttctgatgcaaaataactcccagagaacaccatggatggtcttacatataggcatttagttcagagcccatcatgagaatgcaagaaggcccatttgttccaagcctcacattgacagagtcccaactttacagccgtgacattatacctccaaatgagattatactgttctctttgaaaagctctgacacataccacgtattttgactttttttaaaaatgtgcctggaatctcagaaaatattggtggccctgggcctctgagcatcaacaatcctcatacatatgggactaaactcattcataacaggattgttaatagagaagttgccctttaggtattcattttgctcttccttgtcaattcgatagagaaacaaaagcatg

SEQ ID NO: 696511 - DNA, 887 bp, Homo sapiens
gttgcaagttttctcagtattatttctcaaataaccagtttgtttaaagtgggatttttttttagtattctgttttttatrgaatatgaaaatacaataaaatatgggttggagtagtaaatattctgattaatagataaattgtatcaattcttcttaccagaatggatgtaatctttgggcatatgaacatttttcatgctgaaggtatgtgaagtgtggctccaagaagaatagaatacattctaatgacatgaataatctctgtatatgctacacaatacattactttaacaaaaaagtcattgatgataactatgcatactgagaacttagctaggcactgtggatacattatggagacatgatttataccaagttaacatgctagttggagaaacaaaaatccaattatggtcatttaaatgataatataagacaataagtcaagagaagttaaaagatagtatttgtaagagtgagttgtgaattcagaggagggcaaggtcattgggtgagattggtcagagatgtctccataaaagagttgacactacagctgagttttgaatgatgggaaagattcaaataggcaaaggataggcagaaggcattttggatggaaacagtggttggagtgaagcttacagtcaagaaagcaagaagacatgctaggaaccttatagtgctatttttgtcagttaggagtaggacctaattttgaaaggtatttagaaccagattgtggagggccctgattgaaatcctaagggacctggagtttatctttagaataatacaaaactattacacgaattagtaatctctttgttcttcagttaactataaagttagggtaataaaatagttcctgtttcataggcttg

SEQ ID NO: 696512 - DNA, 618 bp, Homo sapiens
tgacaatattcacagcaaaaggggttaacgttatccctgtccctgcayacacctgccgtgtacggcatcctacctgatccttctcttttcaaagctatatctagaccgggagacttttctccccaactcaagtactcaatttgagcagtacagctctatgtgtattcaagtttgcctatttctaataaggcctttttttgttgttaaagggatggaagaaagagtatgagaaataagtatattcaagcacctaccataatctgaaatcttccataagccaaataactctctgaagctattcactcgcatactcaagtcattaattttataaatttcaggtttctacttattccaaaaatttaaaacataaaattgaagattaaggagtacttagtccaagcttggaccacaggagagctataaacctgtcttaaaatgcttaatgacctgattaaggtcatcaaaggtaaagaaaactctaggaagcagccttttaatctgcctggctacttacaaccacccaccttttccatgcccacgctctcctaagggctgaaggcactgccaagaatgaccttcctagaagggctgaatcctatttattttctctctcccaaa

SEQ ID NO: 696513 - DNA, 659 bp, Homo sapiens
gttttgcttccattctgttatgtgctgtcccttttctgtgtgatgattacaaaatttattatccctgtagagataaagaatttaaggctgggctggttgccatggctcactcctgtaatcccagcacttagggaggtcaaartgggtggatcacctgaggttaggagttcgagaccagcttggccaacatggccaaaccttgtctctactaaaaatacaaaaaaaattagccaggtgtggtggctcatgcctgcagtcccagctactcgggagactgaggcaggataatctcttgaagccaggaggtggaggctacagtgaaccaagactgtgccactgcactccagcctgcatgacaaagtaagactccgtcttaacaacaaccaaaaataatttaaggctgcaaaagtctagactgctcacccatggcaagaagatctcattatactaagctcaagctttggaactgctttggtgaaaaagatgtaagtgtttaaggacaaaagctggagcgagtatgccccggggcggggtttgaactgaagctcctcagtgcttgctgaatgcctggcagggaaagtgctgtaggaatcactagtggaaatgtccttttgatggaggtgcatacacagtaaagctttctagcctaggtcggcagc

SEQ ID NO: 696514 - DNA, 659 bp, Homo sapiens
gttttgcttccattctgttatgtgctgtcccttttctgtgtgatgattacaaaatttattatccctgtagagataaagaatttaaggctgggctggttgccatggctcactcctgtaatcccagcacttagggaggtcaaaatgggtggatcacctgaggttaggagttcgagaccagcttggccaacatggccaaaccttgtctctactaaaaatacaaaaaaaattagccaggtgtggtggctcatgcctgcagtcccagctactcgggagactgaggcaggataatctcttgaagccaggaggtggaggctacagtgaaccaagactgtgccactgcactccagcctgcatgacaaagtaagactccgtcttaacaacaaccaaaaataatttaaggctgcaaaagtctagactgctcacccatggcaagaagatctyattatactaagctcaagctttggaactgctttggtgaaaaagatgtaagtgtttaaggacaaaagctggagcgagtatgccccggggcggggtttgaactgaagctcctcagtgcttgctgaatgcctggcagggaaagtgctgtaggaatcactagtggaaatgtccttttgatggaggtgcatacacagtaaagctttctagcctaggtcggcagc

SEQ ID NO: 696515 - DNA, 617 bp, Homo sapiens
tacagtaggaactcaacatgtgttccattgtaaacccgcagggtctgtttgggctgtttactattgaatctccagtgctgagcacagtgcctagcaagtaataggcatttaagaaatatttacggaaaggaggaatgaatgaatgactccttagagygatcctcatggttcagattcttagcattaattttaggttgttgcagcatccttcttaggggtcttcttgatgctaatcttgcccttctctaatctattttccaaaatgcccatagagttttggaaaatgcaaatctgatcgtgtaatttttttggctaattcttaagaggttttccattgcaccccagagaaaacctaatcttcttagcatggtttaggatgtctttcagctttggccaatgttcacttctctttctccagaaaatcctctaagagcctggggctccttaacatgtgatatttcttccttctcaaggtctattgactgaattgaattttgctgcctgtaacacaaacctagttacataggcttagtcaatttttttcccctcacttaacaagaaatctggaggtgagcagttcagagcttgttgagctgggtctttaaaattttttttat

SEQ ID NO: 696516 - DNA, 617 bp, Homo sapiens
tacagtaggaactcaacatgtgttccattgtaaacccgcagggtctgtttgggctgtttactattgaatctccagtgctgagcacagtgcctagcaagtaataggcatttaagaaatatttacggaaaggaggaatgaatgaatgactccttagagtgatcctcatggttcagattcttagcattaattttaggttgttgcagcatccttcttaggggtcttctygatgctaatcttgcccttctctaatctattttccaaaatgcccatagagttttggaaaatgcaaatctgatcgtgtaatttttttggctaattcttaagaggttttccattgcaccccagagaaaacctaatcttcttagcatggtttaggatgtctttcagctttggccaatgttcacttctctttctccagaaaatcctctaagagcctggggctccttaacatgtgatatttcttccttctcaaggtctattgactgaattgaattttgctgcctgtaacacaaacctagttacataggcttagtcaatttttttcccctcacttaacaagaaatctggaggtgagcagttcagagcttgttgagctgggtctttaaaattttttttat

SEQ ID NO: 696517 - DNA, 1585 bp, Homo sapiens
caggaatagctgaaatgttcaagaccccagtgaaggagcaaccgcagttgacaagcacatgtcacatcgctatttcaaattcagagaatttgcttggaaaacagtttcaaggaactgattcaggagaagaacctctgctccccacctcagagagttttggttggtttccttgtttcctaacactgtgatgttttgggataggaacatacagtattatttttttacaagcagtatgatattacttctctaaaacaaatgttcctggcacaaaataccatttccgtcttctctgttctaattgaaagggagatttcaatcagcagttgaactaacattggcattcattgacttatatagaaagaaagactccgttaatgtgtgtaaatgacctgtgtacacttttggcttctttattgtaagtaaccagggtgacatagcaaaaaaatacaatggtgtctcaccatatttacatataaattactcatattcaaaattactgccaattacaaaacagaaagataacagtttgtatactgtgcaattattcctgctaaccttttaggtgggagcaggcccggggtaagtgtgagatgggagatgagaatctgtctaatctctcatttggcactggtcactgtattcctgtcacagagggaacagcttgctaccctgaagatgtttgcggtaggtaaatatttcctgtgtaatatggaccctaaccacataaggataatccatgttattttattggcgatttaaggcaagaaacagctgtttgtttctaatgtttgaaggaaaaaatgcctatatttacgtcaatgacacagggcatggcaacctttggaggaaccttctgaagcagtatttttaccttctatgatcatttcagcatctaactttgcttaatgatgaccccactatagcaccaaataacattattcttaattgtgcatggctcttataagacagatttatagacacataagtagcctcatgtcgttcagtgaatacgaagctaaatatttagttttttaccatattttatgaggctgtaatactcgattgacatgagacactaatagaatgtttttattgtgtatgtttttatttcaggaggaaatgtgttcttcagtgcacagaatgcagcaaaacagccatctgataaatgctctgcaagccctcccttaagacggcagtgtattagagaaaatggaaacgtagcaaaaacgcccaggaacacctacaaaatgacttctstggagacaaaaacttcagatactgagacagagccttcaaaaacagtatccactgcaaacaggtcaggaaggtctacagagttcaggaatatacagaagctacctgtggaaagtaagagtgaagaaacaaatacagaaattgttgagtgcatcctaaaaagaggtcagaaggcaacactactacaacaaaggagagaaggagagatgaaggaaatagaaagaccttttgagacatataaggaaaatattgaattaaaagaaaacgatgaaaagatgaaagcaatgaagagatcaagaacttgggggcagaaatgtgcaccaatgtctga

SEQ ID NO: 696518 - DNA, 607 bp, Homo sapiens
tgataactatagatataatctaatatattgtgtataatataaattaaatatatttaatgtaatgtatataacttaagtatattatatattcataactatataaaatatataaatatactaaatattattcactaggttttcatcattggcaacctaagttctatataaatatataaatattatctatgaaaatttatacacaaatatgtatataaaaygttataaatatatacatacatatttaagtaaaaataatatatacataaaatatattatatgtttatatagatttaggttggcaatgataaaaacttaatgaagaatttttagtgtaataaaaactagtctcgtggtagctctttgtgtttcagaatccagctatttggctctgggcccgccctctgttactccgagaaagcactgctttggaggtaacacaacgctaggtggcccctgaggctccctgagcaccgtccgatacccctctcagaacacctctgccccctcctctgtacagcccgctttgctcgcctgcctctttctttggattcccagttggtccgggaagcatgggccctgtgtgtgcaccgtctgtgcctgccttcac

SEQ ID NO: 696519 - DNA, 1689 bp, Homo sapiens
gagggaagcagtgcttctttattgtccacacatttgtcaaagtttctgtgggaaagagctcatcctggacctcaggtcttgaccagagatgaccaatccttgggtggaaagatgcaaacatgggctctttacttcaacacgtaagtgcttggaataagatttctatacagagatgacatcccagccaccccggtgatggggttcaggatgtgctatcctacaatatggcacattggcatttgagaaaatgacagaggcaggaaggtcactctcaccttcctcccacttttctcccccaaacaggtcatacaacccaggaaagatttcctgaccctcctctaaaccaggtcataagactttcatgtgaaaggataaagaaaatgtggttcattaacacagtgaaatactactcagtctttaaaaagaaggaaatcctgtcatctgtgacaacatggatgagccaggaggaccttatgttaagtgaaataagccaggcacagaaagagaaatatagccgacaaagacctatccaactagaaaggagaccagtattataggccagaaacagcactgagctgaaagccaaagaactttagttctagtactgaatcttttctagttagcaagtttcgccccttagtctcagttacctcagcttgaaattatgaagttgaattctatgatttctaaattcctttcgagttctaagatcctattataagcagcattatttttccactccaaaacaaaactaggtaagagactatccattggcagagggtaattcctgataagtttcatatattctgttgagagatatctccctttcctgttaatggagggaaaaaactcaaacaatgaagtggttcaggaaatgtttaccagaacaagatggactagattcttcagtgggcagccgtgaaatgaaacagaaacattttaagtgctttattactctagcagaaggaagaaaactattctgtccttttaaagccttgacccaggagaaattatcagcaattaaaagttattgttttccaaaagggaaagaaaaaagccatctcctaccaaaaaataaattctaagaaggttatgtttccagttactaggaaaagaagcctcattcttactccttctttctcatcttttaagtgtaagtatttccaaatctccttaaagtcaagcaacatttctccctacaaactcattaagttggttgttatttttggaattagttaatgaatattttcctatgattatacaaaaccagaatctcaccctcttggattcttcttaatattcatagccctctcttttcaggaagtgaatggccattatcactaaaagaagtaaaaggaatataaaaactgaaatctgtktttagatgctatgtctcatgcatactggtaatgctcagtgcaacttatcaaaggctcagaagggaattctttcagaatgctgccaccaaatgggttgtaaagggtttccttatttggggttcctggggaagcagttttgtggattgttgtgaaaggaaaaaaaggtgtaagcctcaacatcttcaacctccttaagctctctgttatgagcggaatgtttatgtccctcccaaaggtcatgtgttgaaaccctaacccatagtgcaatgatataagatggtgaggcctttgggaggtaattaggtttaga

SEQ ID NO: 696520 - DNA, 1516 bp, Homo sapiens
tcactccagcctgggcgaaatagcaagactctgtcatacatacacagaaataaccagaacttggcatttcctgtgtcagtttaaattaggaaagtgttgttataaacatacatgtgcttatttaaggattttttggaaatatgtttttgttcaagattataatagctttgctagtaaaaatattaaaaataaaatacaataaaaaatacaagtactcttacattcatcagattcataaaaccttctttgactactttctgcattcatgagctcttctcttaccttttgtttctttgatatcttttcacactacaccttgctttataattctttgtgtgtgtgttttattcctcaactcaatctgagaggagttaggaagagtgtgttagacttttttgcatgtcttatggcactatgtatgatatcccatgcacgatagggactaaaattatttgctaatgaatgaataaaagttacttacrgctaggcgtggtggctcacgcctgtaatcccagcactttgggaggccaaggtgggcggatcacctgaggtcaggagttcaaggccagcctggccaatgtggtgaaaccccgtctctacaaagataacaaaaattagccgggcatgatggcgggtgcctgtaatcccagctcttcaggaggctgaggcaggagaatcgcttgaacccaggaggcggaggttgtagtgagccgagattgcgccactacactccagcctgggcgacagagcaagactaaaaaagaaggaaagttatttactaactgaaatgtagattttaatgttcataaattttttagtgtgtgtaaaagttggttacatgtgaaatatgtcacctgacttatcacaaagatcatgttagcacaaaatcctaaactaaaatctgcctttggtctttccttcagttttgctttttcttacagggttctgtatcttagaggacttaggtaataaaagtaagaattagtgcctaagtcttgagtactgctttctgttatctgaatgattgctgtggacagtgtgcttaacttctgttttttctttattagatgatttgctaataaacagatagtgctataggaatagcacacattaataggaagtatttatggatctaactgtctgtgaacagtttttctagtttttatttatttaatagaggacagtcatttttgagaatatctttcctttgctcataataagtataattttcatctaaattttccctaaaggcagtgttttatttctgtactgagtccattgtgattcttcgtggcttgcatttttggtcagtcaggttaggctagttgatgctttggtaacaaacaactcccatatctcaaagatctcagtggcttaacacatcacctatttatctgttgctgaggttatatgtcacagcaggtcagcatgggcactctagacattgtagtagctcaagcacccaggctgaccagtgtttcatctccacctgcgctaccatcactgaatagtggaa

SEQ ID NO: 696521 - DNA, 591 bp, Homo sapiens
atgtaatattattcagccatagaaaggaataaagtactaaacacactataacatggatgaactttgaaactattatgctaaatgaaagatgctaatcatgaaagaccacatatggtatgatttcaattatatgagatgtccaaaataggcaattccatagagacagagagtagataagcagttgctcagggctggagggaatggggtcattgtgggtgggtggtaacagctaaaggacacagggtttcttttggagttgttgaaaatgtcttaaaaatgattgtggtggtttttgcacaactctgaatatactaaaaaccactgaatgtagtacacctggggaccctggttctctgccctttctctggccactccttccctgtgtgccatccctccygcagtctgcagcctctgctgctccttagtccactgttcttggccatctcttccacctgtgaccactctctcctcattccctctgggatgagctcactccttcctttggtaccaattactatctatggcagtgggtcttgactttggacagaccctctagagactctgagtgattgatctgggtgcagcctggcc

SEQ ID NO: 696522 - DNA, 940 bp, Homo sapiens
caatcgatgtgccatttctagaaataagtgcatttcttagaaatatttggaaaacctcattgtttcctgtgataccagcagaggttgtcccatatattatacattgcaatttgaggcttagcacttttcctagagaaactattctttgtgtctaatagtgaaaatctggatgtacaaaagaaatagagggttatgtcacatcttcttgcagtgctcagctccagttaggcctgttaccactatgtgcctggactattgcgggagctagagagcttgtttctctgactctagtagaatgtagtcaatgaatattcagagtgcataccatgtatgtggtaatgcatcaggcactgcagagttaaagatagaaagacaagttctaaaggaacctctagtctggtagggaatggacaagtagtttggagatatgaaaaagagactaacttaggagtcaggcacctagacttgatctctgctcgcctgttgccttgaacgaactgcctgagctcatgtgcattacctccataggggcatgaccttgggcaattaacaggtcctcatacttatgcactcagaaacctgcttggtaggagtgtgtttctctgagtcagctcctgaagttgatacataaaaatcaaaaaggtcagccgggcgcagtggctcacgtctgtaatcccagcactttgggaggctgaggcaggctgaaggcttgagtcygggagtttgagaccaacctgagcaatatggcaaaaccctgtctctacaaaaaatacaaaaactagccagatgtggtggtacgtgcctgtagtcccagctacttgggaggctgaggtgggaggatcacttgagcctgggaggcagaggttgcagtgagccaagatcacaccactgcactccagcctgggtgacagagtgagacgctgtctcaaaaaaaaaaaaa

SEQ ID NO: 696523 - DNA, 940 bp, Homo sapiens
caatcgatgtgccatttctagaaataagtgcatttcttagaaatatttggaaaacctcattgtttcctgtgataccagcagaggttgtcccatatattatacattgcaatttgaggcttagcacttttcctagagaaactattctttgtgtctaatagtgaaaatctggatgtacaaaagaaatagagggttatgtcacatcttcttgcagtgctcagctccagttaggcctgttaccactatgtgcctggactattgcgggagctagagagcttgtttctctgactctagtagaatgtagtcaatgaatattcagagtgcataccatgtatgtggtaatgcatcaggcactgcagagttaaagatagaaagacaagttctaaaggaacctctagtctggtagggaatggacaagtagtttggagatatgaaaaagagactaacttaggagtcaggcacctagacttgatctctgctcgcctgttgccttgaacgaactgcctgagctcatgtgcattacctccataggggcatgaccttgggcaattaacaggtcctcatacttatgcactcagaaacctgcttggtaggagtgtgtttctctgagtcagctcctgaagttgatacataaaaatcaaaaaggtcagccgggcgcagtggctcacgtctgtaatcccagcactttgggaggctgaggcaggctgaaggcttgagtccgggagtttgagaccaacctgagcaatatggcaaaaccctgtctctacaaaaaatacaaaaactagccagatgtggtggtaygtgcctgtagtcccagctacttgggaggctgaggtgggaggatcacttgagcctgggaggcagaggttgcagtgagccaagatcacaccactgcactccagcctgggtgacagagtgagacgctgtctcaaaaaaaaaaaaa

SEQ ID NO: 696524 - DNA, 654 bp, Homo sapiens
cactccagccggggtgacagagcgagaccccatctcaaagaaacaaatataacatttgtttgtccctttaggtatattaacaatcaaaaggtttgaagagagttgtaaacatgtgccctttcgggagggggttttaattcgttgcctggtcctagaaaaatgttatgtttttaaaaaatattatatattttataatttataaaacataaattacctataatggaatttacatttttaaaatgtatattgtctgttttgtcccatgcttacaggatgctttttacagtactgtaaagatttactaatcttcatgttatacttcttcactttgcacaatattttcttctgatcttcagagctttgtgactctggtgactgaaaaaagttactagcatgattccaggaatgatgacatgttgatgacatcagaccaggtctgaacttaatattttgtatcatgttgtgctctttcttgtctctagctagaaggaatccctgttactggaaatgattcccgagtgaacaacagaaagaatgaatggatttgaagttgtttataaagcaaatggaattattgagtgcatagaaagctgaggagagggtgtcrcagttttacatgtatatcatcaagagggttttttgtttgtttgtttg

SEQ ID NO: 696525 - DNA, 673 bp, Homo sapiens
tataatgctcacaggtccttctagcattggaataagaacagcgcccgtaacgaacatcatgttcgttgatggtcatcaatatgaccaagctcatatccttaccttgcaaggagagaccgacttccacagctgtccaggtcaaaagcaaaaagtaatgtttttcaagtttatataaaatcaagcagttttaaccactttctcttacataaatgcaaacatatgaatttgctttaggcccaaacctcagcatcagtatgttaaaactggggagtgatttgtttattcaccccctgcccatgatttatcagctgattttccaacttggggaggttgaggaggagtggccaggaaacaagaggcgttagaaaggggaggaaggagactacaccccaagttatccaagtcactgmaagcctgagactcctggcttctttctttttatttttttgagacagagtttcacttttgttgcccaggctggagttcagtggcgtgatcttggcccactgcaacctctgcctcccgggttcaagtgattctcctgcctcagcctgtcaagtagctgggattacaggcgtgtgccgccacacacggctaattttgtatttttagtggagatggcgttttaccatgttggtcaggctggtctcgaactcctgacctcaggtgatcc

SEQ ID NO: 696526 - DNA, 649 bp, Homo sapiens
ccatcacatagatccctttccgggacagggcctggatgacagactggtgtccctgtaaggcggccacctggtcccctttcaggatgaggctgcagacacggcagtacagctcgctggacaggagaagcttgataacaggcggcttaatgtgctcctgctcatactggtcaacgtagaaagggtctctgaggtcctcagggatgttatctaagacagggaggggatgaccaggtgagtgccacacacaagacccaaaggaaggagttcaaggctgcagtgaactatgactgtgccactgtactccagcctgggcaacacagggagaccaagtgtcaaaaaaaataattgattgattgattaaatgagcaactaacaacgtgaaaaggctctaggcttttcaataattytactgtcttctgtacttacaaaggcaactaactgtagcatctcagactactctgtgaacacagacaactgaaatcatttcgtgacctccaccgtgacctcaaaggatgactgtcctaacttaacagcagtaagaaggtagacatgggagccctgagtgtgttaatggggctgaggggaaaccagcacaggctaggaccatgtagtgcctggggacaccagcggagacagcatgtgggcaggg

SEQ ID NO: 696527 - DNA, 614 bp, Homo sapiens
tataaaaaaaggatgagctcatgtcctttgtagggacatggatgaagctggaaaccatcattctcaacaaactatcgcaaggacagaaaaccaaacaccgcatgttctcacttrtaggtgggaattgaacaatgagagcacttggacacaggatggggaacatcacacactggggcctgtcaggggatgggaggctggggaagggttagcattaggagaaatacctaatgtaaatgacgagttaatgggtgcagcacaccaacatggcacatgtatacatatgtaacaaacctgcacgttgtgcacatgtaccctagaacttaaagtattaaaaaaaaagcaagtaactaatacacataatttctaaaattatgtaaacttactagtaatcaaataaatgtaaattaaattaaacattaaacatattttttaaatattaaaaaaaaagtggtgttcctgggtggaacattctgctccatttcattagttaaattcagccctggaataagagaaagaagaggaaatattcctttcttagctcttggtgtggctcaatctttacaagttcaagtttgactttttttacaggaagcaaaagagctatttttccttca

SEQ ID NO: 696528 - DNA, 614 bp, Homo sapiens
tataaaaaaaggatgagctcatgtcctttgtagggacatggatgaagctggaaaccatcattctcaacaaactatcgcaaggacagaaaaccaaacaccgcatgttctcacttataggtgggaattgaacaatgagarcacttggacacaggatggggaacatcacacactggggcctgtcaggggatgggaggctggggaagggttagcattaggagaaatacctaatgtaaatgacgagttaatgggtgcagcacaccaacatggcacatgtatacatatgtaacaaacctgcacgttgtgcacatgtaccctagaacttaaagtattaaaaaaaaagcaagtaactaatacacataatttctaaaattatgtaaacttactagtaatcaaataaatgtaaattaaattaaacattaaacatattttttaaatattaaaaaaaaagtggtgttcctgggtggaacattctgctccatttcattagttaaattcagccctggaataagagaaagaagaggaaatattcctttcttagctcttggtgtggctcaatctttacaagttcaagtttgactttttttacaggaagcaaaagagctatttttccttca

SEQ ID NO: 696529 - DNA, 1205 bp, Homo sapiens
gggcagtctttgaaaggaatctgcagagatgatgcaaaacactaagcatgtgacccaaatcatggcagggcatattggagggagaggggaatgggaatgagacattttctaatctgattagtctgaagtttcccctgagtgtggagaagggtcactgcacaattagaggcaaagttagactgaacatggtctgcttagcagctgagcgggatgacctcctcaaagctaagctgggcttggagacagatgtgttcagagactgagatracttcgaagcaagttctgaaacaatctttttgcatttaatgtcaaatcgtaaaggcaaagacaaaacagtctgctgagagaatgagaggatgatgacttggtggcctcagcactggataagaaacatgtaggtcctccagaggccaggctcccacattactggactttccaggacaactcatccttaagaccatcaaaagataatctaataaacatccacagcttcctgactagaagacagcttaatgtgtgaaaggcattcagatccaattgttgaaaaacatggcttcctctacatagaaagacacaggtttcttccagttcatttctaagtctgagtgtgtggtctatggtccctgacttaaatttctctcctagtcctcaatcaattctttgcaccaggtactgtgctgggtactttatgtatgttatctcaattaatcctctgaaccactaggaaataggtactgttacgtcattcgagagataaggaatctgaggttcaggcaggtcaaaacccttgcacaagatcacacagctaataagtggactcaaagaatttaagagatgggagtggaggaggggggtaaaattgtcaggatgtgacaacccattggttatttataggtggtaaatcacacagaagcagtgtctgcatctgaatgaatcgaagttcaagtcacaactcttcattccaaggtaagggataaagagacacataaatagcactgtgagaattctgagcaggagataatcactctgattatcagccaaacgaatgcaacagagcttcatggatatggtgccacttgaaatgggtcttgaaggaagagcaagctttcagcaagtgaaaaccattgggagctattgcctactgatgaaatagcaagggaaaaggccaaaaaaaaaagggggggggagggggaaggcaggaggta

SEQ ID NO: 696530 - DNA, 1205 bp, Homo sapiens
gggcagtctttgaaaggaatctgcagagatgatgcaaaacactaagcatgtgacccaaatcatggcagggcatattggagggagaggggaatgggaatgagacattttctaatctgattagtctgaagtttcccctgagtgtggagaagggtcactgcacaattagaggcaaagttagactgaacatggtctgcttagcagctgagcgggatgacctcctcaaagctaagctgggcttggagacagatgtgttcagagactgagatgacttcgaagcaagttctgaaacaatctttttgcatttaatgtcaaatcgtaaaggcaaagacaaaacagtctgctgagagaatgagaggatgatgacttggtggcctcagcactggataagaaacatgtaggtcctccagaggccaggctcccacattactggactttccaggacaactcatcctyaagaccatcaaaagataatctaataaacatccacagcttcctgactagaagacagcttaatgtgtgaaaggcattcagatccaattgttgaaaaacatggcttcctctacatagaaagacacaggtttcttccagttcatttctaagtctgagtgtgtggtctatggtccctgacttaaatttctctcctagtcctcaatcaattctttgcaccaggtactgtgctgggtactttatgtatgttatctcaattaatcctctgaaccactaggaaataggtactgttacgtcattcgagagataaggaatctgaggttcaggcaggtcaaaacccttgcacaagatcacacagctaataagtggactcaaagaatttaagagatgggagtggaggaggggggtaaaattgtcaggatgtgacaacccattggttatttataggtggtaaatcacacagaagcagtgtctgcatctgaatgaatcgaagttcaagtcacaactcttcattccaaggtaagggataaagagacacataaatagcactgtgagaattctgagcaggagataatcactctgattatcagccaaacgaatgcaacagagcttcatggatatggtgccacttgaaatgggtcttgaaggaagagcaagctttcagcaagtgaaaaccattgggagctattgcctactgatgaaatagcaagggaaaaggccaaaaaaaaaagggggggggagggggaaggcaggaggta

SEQ ID NO: 696531 - DNA, 685 bp, Homo sapiens
gaagtaactcaagatggattaaagatttaaatgtaaaatgtgaaactataaaaatactgcagaaaaacatagggaaaactcttcttgacagcggtctaggaaaagaatttatgactaaaacctcaaaagcacagtcaacaataacaaatatagacaaatgggacttaactaaactaagcaaattcttcatggctagagaaataatcaacagagtgaagagacaacctgttgaatgggagaaaatattcgcacactattcatctgacaggagatgaatatccagaatatactaggaactcaaaacagctaaacaacaacaaaagcataaataattccattaaaattgggcacaggatatgaatagacatttttcaaaagaagacatgaaaatggccaacaggtatatgaaaaaatggataacatcactaatcatcagagaaaggcaagtcaaaaccacaatgaaatattaacttaccccagtcagaatgactattattaaaaagtcaaaaaaataacagatgttggcgagaatgtggagaaaagggaactcttatacactgttcrtgggaatataaattagtacttactcaaaggaaatgaaattttctaatataataatttttttgctattatccttgaccagtcagacatattttatataactattacattagaaagatacctg

SEQ ID NO: 696532 - DNA, 1125 bp, Homo sapiens
ctcatttaattaagaattcatgggatccttagtgtgcctagatatttgctaatacagaaatgcaaacttggtttcctttatattacttaatttttgacacagtttccagaaatgttttcaggtgaaagtgaaaactttctatgtgcaaataatcaatattaaagtttcacttcaatgcaaaagatttaaatattttttcctagcttaattcaataatagcttatctgcccacttcaccttgatatgatctctttgatgcaataaattaaaattaatgtgaatcaatatattacagtagtaaacaaaattagcaactactcattttggtgattacacatattctctggcagtaatgtatgttcaaatttggaatatttttttaatttttaaaaggtcatatgctagatacaaaatcctcaaattaatcacatcctttgcagcaacatggaaacagctagaaaccattatcctaagcaaagtaaarcagaagcagaaaaccaaataccacatgttctcacttataactgggagctaaaatattctacacaaagagtagaataatagacactggggactactagagaggagagggaggggacaagggttgaaaaattacctattggctactatgctcactatctgcatgacaagatcaattgtactcctaatctccgctcacacattacacacatgaaacaaacctgcaatgtacctcttgaatctaaaataaaagctgaaatttttttaaaaccttcaaaattataaaagggaattaaatatggcatttcagaaacattttgccctgtaattatctaattcttatagaagtattgttgcttggatgcatggtaagacaatgatatccatgttaggaaatatactcttaacccattgttattaatttttaaaaggcaagcaagactaatgttacaacccccatctcagtggaggttaagcctttaacatgggaattggggaagtggcacaattcagtccagaccacttgcttatccattttaatgttacgtattgtttgaattcataacttaccaaaaaagcatatataagtactataatctttcaactcatattaataggactaaatctgaactatattgaaattag

SEQ ID NO: 696533 - DNA, 1264 bp, Homo sapiens
atcaatgatagactggataaagaaaatgtggcacatatacaccatataatattatgcagccatgaaaaacgatgarttcatgtcctttgcaaggacatggatgaagctgcaaaccatcattctcagcaaactaacacagtaacagaaaaccaaacaccaaatgttctcacgcataagtgacagttgaacaatgagaacacatagacacagggaggggaacatcacacactggggcctgtggggagtgggggcctaggggagggacagcattaggagaaacacctaatgtagatgatgggttgatgggtgcagcctaccaccatggcacatatatacctatgtaacaaacctgcacattctgcacatgtatcacagaacttaaagtacaatacaaaaaaaaaaagtacattttcaaatctaaatattgattgttgtgctgccaacattttaaacatagccaaattatatcttcatcatgaaaacagttgtaagaattgcttataatttctctttagtgtatcaaaatgtgtcacactcaaacttgacttaatttcccacacaatttcaataaactttgtaaaggattcatgactttgtaaacccaagatacaaaagtgtagtttctcctctattctgccctccagatcttttagaacaatgtgaatgcatgggtttcataaaattcatcattaggaagtgctgtctggcaagcactctcattttttttttccagtagccaaagggagctctagaaatctgcaagccagcaacagcttaatcttatggtggactcttgatgctataaatccataactaagcaggggcggctgaaaatgaatgcagcttttcttgaataatgcttgttctggaaaaagaaagtgtctgatatgttgtttttccaactgcttctttaccaaatagattcaaactatattgacacctgtaacaactaataatataaaggcaaaacaataatagtagctaaaattgatttagcacctacaatgtgctagaaagtgtattatgtattttacatgaattatctcaactaatcctcttacaaaagtaggttttaatattttaaacatattttagatgaggaaacaaagatatttatttcaataaataacattttaaatctactaagaggcagaaataggattgaaatcataaggaatgtttgcacatacctatgtttttaatcactgcactatctgtgcaaaagtccatatagtaaaaagcaatgaaacaatcaaaaggactc

SEQ ID NO: 696534 - DNA, 1264 bp, Homo sapiens
atcaatgatagactggataaagaaaatgtggcacatatacaccatataatattatgcagccatgaaaaacgatgaattcatgtcctttgcaaggacatggatgaagytgcaaaccatcattctcagcaaactaacacagtaacagaaaaccaaacaccaaatgttctcacgcataagtgacagttgaacaatgagaacacatagacacagggaggggaacatcacacactggggcctgtggggagtgggggcctaggggagggacagcattaggagaaacacctaatgtagatgatgggttgatgggtgcagcctaccaccatggcacatatatacctatgtaacaaacctgcacattctgcacatgtatcacagaacttaaagtacaatacaaaaaaaaaaagtacattttcaaatctaaatattgattgttgtgctgccaacattttaaacatagccaaattatatcttcatcatgaaaacagttgtaagaattgcttataatttctctttagtgtatcaaaatgtgtcacactcaaacttgacttaatttcccacacaatttcaataaactttgtaaaggattcatgactttgtaaacccaagatacaaaagtgtagtttctcctctattctgccctccagatcttttagaacaatgtgaatgcatgggtttcataaaattcatcattaggaagtgctgtctggcaagcactctcattttttttttccagtagccaaagggagctctagaaatctgcaagccagcaacagcttaatcttatggtggactcttgatgctataaatccataactaagcaggggcggctgaaaatgaatgcagcttttcttgaataatgcttgttctggaaaaagaaagtgtctgatatgttgtttttccaactgcttctttaccaaatagattcaaactatattgacacctgtaacaactaataatataaaggcaaaacaataatagtagctaaaattgatttagcacctacaatgtgctagaaagtgtattatgtattttacatgaattatctcaactaatcctcttacaaaagtaggttttaatattttaaacatattttagatgaggaaacaaagatatttatttcaataaataacattttaaatctactaagaggcagaaataggattgaaatcataaggaatgtttgcacatacctatgtttttaatcactgcactatctgtgcaaaagtccatatagtaaaaagcaatgaaacaatcaaaaggactc

SEQ ID NO: 696535 - DNA, 1375 bp, Homo sapiens
gttcctcaaactcactgaacctcggtttcatatctgtaaagtgcgaataaaggcacctaatgcacccggtttttcaacacattaagtgatataacatatgtgaaatgcttagtccagtgtctggtayatagttaggactttaaaaatggttgcctggtgtggtagattgttttatcaatggcccttgatgaaacagtcttcctggtatggggcatgactcaccttgactttattttttttttaatttttaattttttttgagacagagtctcgctctgtcgcccaggttggaatgcagtggcacgatctcggctaactgtagcctccacctcccgggttcaagcgattcccctgcctcgaactcctgacctcaggtgatccacccacttcggcttcccgaagtgctaggattataggagtgagccaccacgcctgacctcatcttgatcagatccttaagatagttgctaaagaagatgtgcatggtgcaaagcatatttatacactgttcttaggggaacagtgttctactcagatggaaccctatgttggcctcttgatacttgttagcttttctaatgtgcattcaagaaatcattgagctgaggaaatgagtttacgaaccaatccagctcttctttcctgccttagatggagatttgtgggtgttctaggtcatcagagggataaaagcttctggaatctcctgttcctgagagcttagatagagggcaatcttgttgatgccttcttactccctcagggctgactttgtctcccagtggagtaagttaccacacacccgaaatggtccccaagtttccatcattagaaatatatttattggccaggcatgatggctcacgcctataatcccagcactttgggagaccaaggcaggtggatcacctgaggtcaggagttcaagaccagcctggccaacatggtaaaacctcgtctctactaaaaatacaaaaattagctggacatgttggtgtgtggctgtaatcccagctacttgagagtcagaggcagaagaatcacttgaacccaagaagcagaggttgcagtgagccgagatcactctattgtactccaggctgagcaacagagcaagactctgtctcaaaaaaatataaaaaacaaaaaaactccactcacatttgtttaggttaaactttgtagactctaaaagcctcctagaaaattcagatatcctcaaaggatgtcacattcatccagttaactcctcactgtgagacaggacatttatattgttgggcggccaacatggaggcattgctctagggcagtgctatccaacagaactgtaatgcgagccccaggtgtaattttaaattttctagtagctgca

SEQ ID NO: 696536 - DNA, 1249 bp, Homo sapiens
ttattggtctccatcccttctcttattctcttttctctttaagggtattttttggaatcaacttctaaatatatttcttgcactagaattctgcctctgggttgacttctaggggaactacacaaaacaattgtgtgacttttactaaaggtagattggcaccatgggatgactatttactaacagccttagcaaagtaagcttattgaagtgaggacttggtctcatttatccttgaactccttggcccataaaaggcacacaacacacatttgttacataaatgaatcaaacttgtcggataactttaaggtaaacgttagacaaccccagttcagaaatgacgctggacagggactttctcaccagctgactttctttgtaaactcctctgccatcctccctcaggctacctgttccatcttgaagaccctacttatctttcgcctcctcaggctattaagattctccaaattcctctccctttatgttcagaactattatccagctctctgtttatctacgttaaccaattctatcatgaggcctctcattctcagaagcctcaaggtattttttccaaacaaaaactgcctctcccagaggttatttcttaaaattgagtatgttattccctaatcttgtggtgagttaggcaaagcagatgaagaaaggtttagcaggttttggcctgggtgttgtttctataatcccttgctactagagagtcatgtggccaaaggtctcaagatttgtgactttcccaatttcttccttagataacatcactatttggctaggaacagtggctaacacctatcataccaacacattgggagggtgaggtgggaggatggcttgagcccaggggtttgagaccagactgggcaacatagtagaaacccatctctccaaaacgttttttgaaacctgggcacagtggtgtgtacctgcggtcccagctactcaagaggctgaggcgggaggactgctggagcccaggagctcgaggctacagtgagccactgcactccagcctgggtgacagagtgagaccctgtctctataaaaaacaaacaaataaaaatcactaatgtaaaatctaagattgttttctttttgagatggttttcagactgaccccccacrccaagactcgtgactcatgactcaactggtcctgtggccccacccagaggtggacttagtgcatgaggactgtttttcacactcctgtgatttcatcccc

SEQ ID NO: 696537 - DNA, 1432 bp, Homo sapiens
ttatgaacatggacctcagttttctcatctgtaaaatgaggataataataggacatctatcttaaaaggttgttatgaagattaaattagttaatatatgtaaagcactgatagagaataagtagcacctaactgctaattattattgctgttatttttctcagctctggcccatcctgcttagctacatgatgccaaaatttgcagaaagacaaagttgagaggacacttcttggattccaaacaataaatcttaaagtcttttagtttgcatcttctatcttttttttttttttttttgagatggagttttgagcccacgctggagtgtaatggtgtgatctcagctcaccacaacctccgcctcccaggttcaagcaattctcctgtcagcctcccgagtagctgggattacaggcatgtgccaccatgcctggctaattttgtatttttagtagaggtggggtttctctatgttggtaaggctggtctcgaactcctgacctcaggtgacccgcccacctcggcctctcaaagtgctgggattacaggcgtgagccaccacgcctggtcacatcttctatcttttcaaatcactgcaccatagatttgtcttaaagccatttcatatataatgcaatgcccatccttactttgcaaaagtccaattttaaagacaacatttgaacttcagtgattaaagacagcttttgaattgttatagattcccatctccatccaaacaatatgcttttaataggaacacagcttgtgatttataccacttcactctgctctgcagtgtggtctgcatcatcaacattaagatgaaattaccctgcaatcacaaacatggaactcatacttgtagtaattgcacaaagaaaaacctcattatcctgcaatatgcacttcaaaaacaaacatacaaccttttctccctctagtggcacatttaaaaagcaacctcaactatcacagaggccagttttgcctattacaatcgagagaaacaaatagtttacacttgggagattcatagtatttgtttatcgtcgattgtagtaaaaattttgcagtttgtttatgtaaaatgatattgctgacaagataacaggctagatcatagccataggaattctgtggtttatcctcacttggcgctttatttttcatcaaaaacaataaagggaaatctayaagcactaggtagtcagctgttccgattcctggttacctcttggaagaatgacaccacttccagttcctcgcccttgccctttatgtgtttatgggctctagagctgaacaataatgccttactgcagaggttgaatagtgcgccaaaatttatgtctacctggatcctcagaatgtgaccttatttggaaatagggtctttgctgaagcaattagttaagttgaggtcata

SEQ ID NO: 696538 - DNA, 638 bp, Homo sapiens
taacattattttcatgttgctattaataaaaacaaaaattatagaagcataatgagatggtaatgggggaaacctaagtacatatttttattagatttgagaagctgtatcagtgtaagtgtaaaatacagggcttagtaaaacagacgtcagcttgaataacaaaaattaatgaaccttcctctgtgtcatgttgggtatgttacttaatttctctggcccaagtttcattcattgtataatgggacaataatattacctattggttagttggttgtgagaattaaatattacagaataaaaaaggtaatgtttaaaatggcaccaggcccatgggaaacattgattaatgttgaaaattattactatctgttaaaagtaaatcccaacaactacctcattaggtggttgggtatatatatatatatacaagataatgttttaaagctgtcacacagcctgacaagtgttatgtgctcttttttttacaaacagtagctgtagttattataggcgtcaagatatctacatggaaacagagttgacatgtstatatgaagtctttaaaaagatccatgatagaaatacagattaaaattctgtaggtagttgttagaggaaagagtgcctagattata

SEQ ID NO: 696539 - DNA, 638 bp, Homo sapiens
taacattattttcatgttgctattaataaaaacaaaaattatagaagcataatgagatggtaatgggggaaacctaagtacatatttttattagatttgagaagctgtatcagtgtaagtgtaaaatacagggcttagtaaaacagacgtcagcttgaataacaaaaattaatgaaccttcctctgtgtcatgttgggtatgttacttaatttctctggcccaagtttcattcattgtataatgggacaataatattacctattggttagttggttgtgagaattaaatattacagaataaaaaaggtaatgtttaaaatggcaccaggcccatgggaaacattgattaatgttgaaaattattactatctgttaaaagtaaatcccaacaactacctcattaggtggttgggtatatatatatatatacaagataatgttttaaagctgtcacacagcctgacaagtgttatgtgctcttttttttacaaacagtagctgtagttattataggcgtcaagatatctacatggaaacagagttgacatgtgtrtatgaagtctttaaaaagatccatgatagaaatacagattaaaattctgtaggtagttgttagaggaaagagtgcctagattata

SEQ ID NO: 696540 - DNA, 671 bp, Homo sapiens
ccagccttgtaatcccagcactttgggaggcccaggcagggagaatcacctgaactcaggagttcgagatcagcctgaccaacatgaagaaagcccatctctactaaaaatacaaaaattagccgggtgtggtgctgtgcacctgcaatcccagctactcgggaggccgaggcatgagaatcgcctgaacccaggaggtggaggttgcagtgagctgagatcrtgccactgtactccagcctgggtgacaggacgagcctgtctcaaaaaaaaaataaaaataaaaataaaaataaaaataaaaataaaaataaagcacaatagtgtgcagatgccatagggttgctgtagtgattaactgagatggtgctgtagaatcacatagaagaaagccatagaatgatgctgggcccctagtgatccctcagtaaatgtttgccatttttgcttacaagacattttctaggggaacattgaaaagaagattgttaggacgcatgcatggaaagcagtattgtgactgaagtgttctgatgtgctcgtgggctgtatgaattcttatacatggtgaactctgtaaaagtcaacaaattcatttgaattaggagtgttctggatgcatatctatgaatgttctaggaaaatgtaccacaagacattggaactacagc

SEQ ID NO: 696541 - DNA, 1008 bp, Homo sapiens
tgagatgaagtcctgctcttgtcccccaggctggagtgcaatgacacgatcttggctcactgcaacctccgcctcccgggttcaactgattctcctgcctcagtctcccgagtagctgggattacaggcgcctgccaccatgcctggctaatttttgtatttttagtagagacgaggtttcaccatgttggccaggctggtctcgaactcctgacctcaggtgatctgcctgcctccacctctcaaagtgctgggattacaggcatgagccaccaagcctggcctcacacgaattctttatttacatgaaccattacttgcaagcaaaggcatttaaactgattcagaatttgataaacaaagggaaataaagattgacaataagagatcttgaaatttgaataaagtaaactaagggggtagaacaaagggtagtaaggattttccacactccccaactcccaacgctaccctatacccttgcaaactgaaactggaaatccttactacatgttagtgaaacagctgtgaatctgtaatctatagtacaccaagatgcagatcttgcatctactyggcctgcaaaagtagttgaagcaggaaaatgtcataaagtctgtgttagctaatcatgcagctttcagtaaatcctaaaataaacaagcttttctgaagccaactcatctgaaggaaaacaataaaaataatagaggtttgctaaaaagaaaccacttttgcctgtgggttgcaaataaaagaaaataaccggccatatgcagaaaactgaaactggaccccttcgttacaccttataaaaaaataactcaagatgaattaaaggcttaaacgtaagaccaaaaaccataaaaaccctagaagaaagcctaggcagtaccattcaggacataggcatgggcaaagacttcacgactaattttggcaacaaaagctgaaattgacaaatgggatctaattaaactaaagagcttctgcacagcaaaagaaact

SEQ ID NO: 696542 - DNA, 1008 bp, Homo sapiens
tgagatgaagtcctgctcttgtcccccaggctggagtgcaatgacacgatcttggctcactgcaacctccgcctcccgggttcaactgattctcctgcctcagtctcccgagtagctgggattacaggcgcctgccaccatgcctggctaatttttgtatttttagtagagacgaggtttcaccatgttggccaggctggtctcgaactcctgacctcaggtgatctgcctgcctccacctctcaaagtgctgggattacaggcatgagccaccaagcctggcctcacacgaattctttatttacatgaaccattacttgcaagcaaaggcatttaaactgattcagaatttgataaacaaagggaaataaagattgacaataagagatcttgaaatttgaataaagtaaactaagggggtagaacaaagggtagtaaggattttccacactccccaactcccaacgctaccctatacccttgcaaactgaaactggaaatccttactacatgttagtgaaacagctgtgaatctgtaatctatagtacaccaagatgcagatcttgcatctactcggcctgcaaaagtagttgaagcaggaaaatgtcataaagtctgtgttagctaatcatgcagctttcagtaaatcctaaaataaacaagcttttctgaagccaactcatctgaaggaaaacaataaaaataatagagrtttgctaaaaagaaaccacttttgcctgtgggttgcaaataaaagaaaataaccggccatatgcagaaaactgaaactggaccccttcgttacaccttataaaaaaataactcaagatgaattaaaggcttaaacgtaagaccaaaaaccataaaaaccctagaagaaagcctaggcagtaccattcaggacataggcatgggcaaagacttcacgactaattttggcaacaaaagctgaaattgacaaatgggatctaattaaactaaagagcttctgcacagcaaaagaaact

SEQ ID NO: 696543 - DNA, 603 bp, Homo sapiens
ctaaagcctggctaccttccatggtgaacactaaatctataagaatttcacagattgttgacaaaccgaagtatgaaactacagggtattccactgctacttcttctctaagcccacttgtctccagttttcctttatctgtttaggtaaaacacacacacacaaatgagcatatataatgtctaattagatgcccagcccagaaaagaaatgtcactctacttctctttyagatattcccttctaatttttccctctcacttggattttggaaggcggtgggtgatatcttccttttttttttacctggagaacttttcaccacaaagataacaggtcaactgtctttccgttagctcctgtccaccatgtatacacaaaggagatttgtagggtagtcaggttgaatcagatatggcttagcaaaagctctttgtgaaatcctggcagctagttaattgtttccttgaaaatgtaaaaatattttctccctttgtgttttagccacaaatccaaaacagtagaaaaaattccactcaacctgttaatacaataatttttttaagttctccactcaaatattattgagtttcatatgggtac

SEQ ID NO: 696544 - DNA, 643 bp, Homo sapiens
gatattgctgaaagaacagattttaaatattttcaccaaaaaacaacataagcatgtaaggtaaatggatttaatcattccacaatataaacatttatcaaaacatattattgtacctcacaaatatacaatacatgaaattattatttgtcaattaggataaagtttgaaaatttwaaaaataggcatatccaagagagagtaaattaagggttcaagatatgtggagaatggccagacacggtgtctcatgcctgtaatcccagcatattgggaggccgagacaggcagattgcctgagctcaggagtttgagaccagcctggccaacatggcgaaaccctacttctattaaaaatcaaaaaatatatccgggcatggtgatgcatgcctgtaatcccagctacttgggcggctgaggcacgaaatcacttgagcctgggaggtggagtttgcagtgagcctagattgtgccactgcactccagcttgggtgacagagcaagattttctcccactcttgatttcacagcacccatctctggtcctactctctttccttatacccttacctgtccaaatagatggctatagccagatgttcgggacttttcccaaaatacacttgactatccaagaatgtta

SEQ ID NO: 696545 - DNA, 643 bp, Homo sapiens
gatattgctgaaagaacagattttaaatattttcaccaaaaaacaacataagcatgtaaggtaaatggatttaatcattccacaatataaacatttatcaaaacatattattgtacctcacaaatatacaatacatgaaattattatttgtcaattaggataaagtttgaaaatttaaaaaataggcatatccaagagagagtaaattaagggttcaagatatgtggagaatggccagacacggtgtctcatgcctgtawtcccagcatattgggaggccgagacaggcagattgcctgagctcaggagtttgagaccagcctggccaacatggcgaaaccctacttctattaaaaatcaaaaaatatatccgggcatggtgatgcatgcctgtaatcccagctacttgggcggctgaggcacgaaatcacttgagcctgggaggtggagtttgcagtgagcctagattgtgccactgcactccagcttgggtgacagagcaagattttctcccactcttgatttcacagcacccatctctggtcctactctctttccttatacccttacctgtccaaatagatggctatagccagatgttcgggacttttcccaaaatacacttgactatccaagaatgtta

SEQ ID NO: 696546 - DNA, 643 bp, Homo sapiens
gatattgctgaaagaacagattttaaatattttcaccaaaaaacaacataagcatgtaaggtaaatggatttaatcattccacaatataaacatttatcaaaacatattattgtacctcacaaatatacaatacatgaaattattatttgtcaattaggataaagtttgaaaatttaaaaaataggcatatccaagagagagtaaattaagggttcaagatatgtggagaatggccagacacggtgtctcatgcctgtaatcccagcatattgggaggcygagacaggcagattgcctgagctcaggagtttgagaccagcctggccaacatggcgaaaccctacttctattaaaaatcaaaaaatatatccgggcatggtgatgcatgcctgtaatcccagctacttgggcggctgaggcacgaaatcacttgagcctgggaggtggagtttgcagtgagcctagattgtgccactgcactccagcttgggtgacagagcaagattttctcccactcttgatttcacagcacccatctctggtcctactctctttccttatacccttacctgtccaaatagatggctatagccagatgttcgggacttttcccaaaatacacttgactatccaagaatgtta

SEQ ID NO: 696547 - DNA, 590 bp, Homo sapiens
  misc_feature 490, 491, 492, 493, 494, 495, 496, 497, 498, 499, 500, 501,502, 503, 504, 505, 506, 507, 508, 509, 510, 511, 512, 513,514, 515, 516, 517, 518, 519, 520, 521, 522, 523, 524, 525,526, 527, 528, 529, 530, 531, 532, 533, 534, 535, 536: n = A,T,C or G
  misc_feature 537, 538, 539, 540, 541, 542, 543, 544, 545, 546, 547, 548,549, 550, 551, 552, 553, 554, 555, 556, 557, 558, 559, 560,561, 562, 563, 564, 565, 566, 567, 568, 569, 570, 571, 572,573, 574, 575, 576, 577, 578, 579, 580, 581, 582, 583: n = A,T,C or G
  misc_feature 584, 585, 586, 587, 588, 589: n = A,T,C or G
gcactgaagcctgccctggttacactggagtccaaggtgaagcggatgamcatgtactctcagtagaccggatgggcccagggatctctctgccacagagaactgctagcttctgggccaagtcattttctcctacattgaaagaaaggaaacagcatgaaaatacagtcttgagaatctgctctatcatcatttgcaacttagccgaagcatctcacacatttttttcagaacatcaggattcacaggagataatgggattctcaaaaagaaggacccctcaggggtgatatcattctggctccagcttgcaatggtgctgcctgcccttttctttatcaccctgccttttttttttattttatgagatggagtctccctctgttacccagcttgcccaggctggtctcgaactccagagcacccacctcagactcccaaagtgctgggattccagacatgagccactgtgcctgctctcagaccacannnnnnnnnnnnnnnnnnnnnnnnnnnnnnnnnnnnnnnnnnnnnnnnnnnnnnnnnnnnnnnnnnnnnnnnnnnnnnnnnnnnnnnnnnnnnnnnnnnnt

SEQ ID NO: 696548 - DNA, 590 bp, Homo sapiens
  misc_feature 490, 491, 492, 493, 494, 495, 496, 497, 498, 499, 500, 501,502, 503, 504, 505, 506, 507, 508, 509, 510, 511, 512, 513,514, 515, 516, 517, 518, 519, 520, 521, 522, 523, 524, 525,526, 527, 528, 529, 530, 531, 532, 533, 534, 535, 536: n = A,T,C or G
  misc_feature 537, 538, 539, 540, 541, 542, 543, 544, 545, 546, 547, 548,549, 550, 551, 552, 553, 554, 555, 556, 557, 558, 559, 560,561, 562, 563, 564, 565, 566, 567, 568, 569, 570, 571, 572,573, 574, 575, 576, 577, 578, 579, 580, 581, 582, 583: n = A,T,C or G
  misc_feature 584, 585, 586, 587, 588, 589: n = A,T,C or G
gcactgaagcctgccctggttacactggagtccaaggtgaagcggatgacyatgtactctcagtagaccggatgggcccagggatctctctgccacagagaactgctagcttctgggccaagtcattttctcctacattgaaagaaaggaaacagcatgaaaatacagtcttgagaatctgctctatcatcatttgcaacttagccgaagcatctcacacatttttttcagaacatcaggattcacaggagataatgggattctcaaaaagaaggacccctcaggggtgatatcattctggctccagcttgcaatggtgctgcctgcccttttctttatcaccctgccttttttttttattttatgagatggagtctccctctgttacccagcttgcccaggctggtctcgaactccagagcacccacctcagactcccaaagtgctgggattccagacatgagccactgtgcctgctctcagaccacannnnnnnnnnnnnnnnnnnnnnnnnnnnnnnnnnnnnnnnnnnnnnnnnnnnnnnnnnnnnnnnnnnnnnnnnnnnnnnnnnnnnnnnnnnnnnnnnnnnt

SEQ ID NO: 696549 - DNA, 1736 bp, Homo sapiens
gaatttgatgtgaatgcaaccaggaattgaggaagaaataaaagtgattatgagaagcagctgggagctgctgcctggagcagtagcaatcatcatatttctgggagttttcattataaggagaagctgacagacctcttgaaatcctctattgagcagttctactagaagcagatggagtgtcaacctgggagcaccatgaaagtcccttttcctttttgtatccgggtgagtcactactaaaacgtactgtgggaatgaataaaatcggagcagaataaaaggtgattgggaaagtagaaactacaggtctttcaatattcaccttcctaaaaagagaataatcataattccaccagaatatctggaacatragaaaccagacacttaacaagtgcataactcaaggctgagagtattcataaaagtagttgtattaaactaaaaacactaagagggctatatataaaaaactcaactgaatttagacccaaatttttgtgatgggaaatgcagtttaaaacccaggatcaaagtagaagtgagcgtaatttgacaaaatcttaacacactgagggaagggcaacagcttcacttagtcggcttaggaaagcaagagtggcattaccgacgaggcttaccattgaccttgtcacacctgggaagaattctgtgccttaataatttccttaaatgattttccttcatcacaccaacctcaaacttgtgtggcagaaaatgttttgaactgtgcattctcttcatccatgtcatcttaaaaaatttcctccggctttaatcagcactgattattaccattccatattctgccccttctaatttcatgaaggaactttgaaaccatgaatttttttcagtcatttcttttcaccgttactacttccatatacattattgatttttaaggaaattcaaattatgttttattgaaacctgtgtacaattatttgatggtattttaagatacccattccttaaaatttcacaacgaattgctgataactacaatatggtttattctatttcacatgtttattttttgtgatttattttttgctaactgttcttttacacattttaattgagagatatttttggtataaaaataatttctaaaataaatgggaacttgtggatattagctcctgcttcttggctgaagcagtaataggtgaaatgaactcaagcacagttagtgtgatttcaagatactgaagaaaactaatagaggacaagggtataatgaaatcagaattgtctgtgtttctgaatctttttcctgctgaggaaatgcagttagctgttctatacaacatgggcataagatagtctcatatacaaatgaaagttctaataatgtttttttattagcagttaaaagcacataagcatttatcaaattgtgaagaaaaaagatgaaaagacaaataaaaaatattactaatttcagttcaaggatagaaacaatgaatagacaatgaatatacaaacccatgagatttcctatgagagaggaataagagaaacaatagatttaaagaactagtgagagaattatgcaaatgtgaactaagttttcttcggaatacttacaataagatacagattataagagatagtcaacaatcacacaagactagcaactggtaactcagaccaataatcacaacactgttgaatttatttttctattgctacaaaaattattggctaca

SEQ ID NO: 696550 - DNA, 1736 bp, Homo sapiens
gaatttgatgtgaatgcaaccaggaattgaggaagaaataaaagtgattatgagaagcagctgggagctgctgcctggagcagtagcaatcatcatatttctgggagttttcattataaggagaagctgacagacctcttgaaatcctctattgagcagttctactagaagcagatggagtgtcaacctgggagcaccatgaaagtcccttttcctttttgtatccgggtgagtcactactaaaacgtactgtgggaatgaataaaatcggagcagaataaaaggtgattgggaaagtagaaactacaggtctttcaatattcaccttcctaaaaagagaataatcataattccaccagaatatctggaacatgagaaaccagacacttaacaagtgcataactcaaggctgagagtattcataaaagtagttgtattaaactaaaaacactaagagggctatatataaaaaactcaactgaatttagacccaaatttttgtgatgggaaatgcagtttaaaacccaggatcaaagtagaagtgagcgtaatttgacaaaatcttaacacactgagggaagggcaacagcttcacttagtcggcttaggaaagcaagagtggcattaccgacgaggcttaccattgaccttgtcacacctgggaagaattctgtgccttaataatttccttaaatgattttccttcatcacaccaacctcaaacttgtgtggcagaaaatgttttgaactgtgcattctcttcatccatgtcatcttaaaaaatttcctccggctttaatcagcactgattattaccattccatattctgccccttctaatttcatgaaggaactttgaaaccatgaatttttttcagtcatttcttttcaccgttactacttccatatacattattgatttttaaggaaattcaaattatgttttattgaaacctgtgtacaattatttgatggtattttaagatacccattccttaaaatttcacaacgaattgctgataactacaatatggtttattctatttcacatgtttattttttgtgatttattttttgctaactgttcttttacacattttaattgagagatatttttggtataaaaataatttctaaaataaatgggaacttgtggatattagctcctgcttcttggctgaagcagtaataggtgaaatgarctcaagcacagttagtgtgatttcaagatactgaagaaaactaatagaggacaagggtataatgaaatcagaattgtctgtgtttctgaatctttttcctgctgaggaaatgcagttagctgttctatacaacatgggcataagatagtctcatatacaaatgaaagttctaataatgtttttttattagcagttaaaagcacataagcatttatcaaattgtgaagaaaaaagatgaaaagacaaataaaaaatattactaatttcagttcaaggatagaaacaatgaatagacaatgaatatacaaacccatgagatttcctatgagagaggaataagagaaacaatagatttaaagaactagtgagagaattatgcaaatgtgaactaagttttcttcggaatacttacaataagatacagattataagagatagtcaacaatcacacaagactagcaactggtaactcagaccaataatcacaacactgttgaatttatttttctattgctacaaaaattattggctaca

SEQ ID NO: 696551 - DNA, 1685 bp, Homo sapiens
aatttaaatccttcatttcaacagtacttctactctttcagaaaagaaatcactagaaagctgcctatggctgacaactccaatcctctccagaaggattttttttcttttaatctctattgggcatctataatgtgccccattatgccagcccaaccccctgatctaacttataccagtctcaatgcattttgattgctagattgtttttctaaatagatcagagatgggctaactgttcaccaaactattccctctccttcctgggcacctgactacatttcctggcatccctcgcacttagctgtggccatgtgactaagttccagccaatggaatgggactgacagtgtgtgtccctctaagcctaaccatataaccttcccatgcacactcctccatgctcctgcccctttgctccagcctgacaaagataaatcctgcaagcctgataaaggaaaccacatggaagatggcggggccacaagagggaaagggtctatgtccctgaccactgcttataagagacccaactgcagctcaagtaccctggttttgagctgggtacacatgaggaatgcttctatcatgtttaggccatcctataattttggatgttttttacagtagctggtgtctgaagcatctggaagtcctgagatttttgcagaacattatgagattatttataaaaataataaatcgaattactgtgtgccaagtccgagactcaggcactaactcataaaataactaaataatctaaaactaaggtatcattataaactaggttctactctaagtaaaccatcagagatgccaaaagtttaataaaaatattgctgaaggttgaattttctatgtttcaaccttaaagtatagaaaattcatttcatttatttagtttttctgtgacacaagaaaggctagcattgcttgactccagtagcagggacatcttgattcaccctgttaaacactactgtttcatgggtgtatagtttgtgtcggagaattggtgcagatagacatttctgagtttttgtttttaaatcaaattagaattggcattgtcagctctaggctctcatctacatttagtaaataatagattaggatcactttttttcacttcacaattatatrattatattccattatgatttgactgtagttatccatggtttaaatcaatcatgaaaaacattattttatctaaatatcataatgtataggaatatgcatttgttctatgtacacacaggaaagtacatcaggggatactctaagaaatttaagcctcaggccaaacctgggaaattcaagcctcaacctcaacctaagaccaattaagtaaattatttatatcattggctaaagtataagggagctaacctagtttaaggccatccagtgaaagatcaaatgctaaatgagattatttactgattaccaaaaaactatcatgttaattcagtaaagatctcataatcaaatacattatcaatggtacttctggaaaactgcctttggtgatcacagatattaacctgaacccaaatataccctaagtaacgtactaacaacctacttcataccagtcttattttttccatctctactgctcccaccttaatctaggtcaccataactctccccaggcctactgaaatatctgccctcaa

SEQ ID NO: 696552 - DNA, 615 bp, Homo sapiens
cttttcctgactttgagaaaagtcctagctttataccgtaccgttgtttactttgaggaatgcctagatatgatgtggctctctgctacctgcattaggaaacctttccttgcagaaaataactatttagaatcaggtgcacttgtaaattcaacaaacataccaaaatgtcaagccacgtattcccttgtgtttattagctactcactacctctcattgtgatcagcttaactttctagcaggcaaacattggcaaatgttggaagcttagataaaattcattaaaaacataaaattgaggaaacacattaagctaattcttgctggagatgatgaccatttgtagttgttagcagtgggcactcagggtcacaagggaggacccagattctgcctcagaactttgttattattattattatttttgagacggagtcttgttctgtcgcccaggctggagtgcaktggtacaatctcagctcactgcaagctctgcctcccaggttcctgccattctcctgcctcagcctcccaagtagctgggagtacaggcacccgccaccacgcccggctaattttttgtatctttggtagagacggggtttcaccatgtt

SEQ ID NO: 696553 - DNA, 1515 bp, Homo sapiens
cctgtgtttttttattagtattcatcaacttaatatgaaacacatagtttttacttccatgagagcagaaacgtacctacattttttttccactgatttctcttaagtgtgaaaacagtatcaatagataagcagtagacacttggtatatccacaaatatttatgaaaagaatgtatgaagaaaatatccagtattaaaggcaagaagaatataaaccctggtaagcattttgggagttcctaggagaaatgtactgtattaactgaggatcaagataacattttataaaacttgcttcatcaataaagtgagtctagataaagtgtaagttatttttgtgattattgaatgcaaataattccatgctatttatgtgaaacatgacacatcattaatggggaggaaacgagagaaaaagggaactggaaaatattttacccagaggactttttatggaaatcttcttccaaagaaaagagctgaaatatgtgtccctgaagagaagcaagattcaagattgaaagtaagaagtatgagtccagttggagagctgtgctaactctatattatattaagatctttcacataatcaatattaaaggagttccagagaaatgaataaaaatcaaactgtgggatgaaggtctcttaaatttartctcttgagtgtataatagagacctcatggtaaatagaagttttaattttaaaaggccgttagtagctacttaatagaagaggagaagtaacaatagcagtctcttggtgctcaactctctcctgccatattacccacaaatgtgctatacaaataaggagcactgcctcgaaataatgtttgaaaatagttacaaaaatagttgttgacctttgctgctttcaaggtggtctattttgcagcccaattataatagtaaaaaaaaaaaatgaaagaattggcacagggcttttatattagttgcagattttttcatgctggaaataaataaagggctggcatatttattgagtgtgttgactagaactcacaaaccagattaatgatctgtattttaaatgaacatgtgccccaagttctgttgtgtcctgtgtctgtgtttggtcactattaatgcaatatggatgattaaactcacttgttgaatagaaagttatatatgaaatcagtgagatgagcttttgcatttactgacagtatcaagtaaatctgtaaagctgaaaattttgagaaattttgaatatgaccaaagataattgtagaaaaattgtcaaccccatacatgattctagcactaagcttagcaaacataaattttaaactttcttccaaactggaaaatatatggttaagaggtttttacattcatcaacatatttttataccaaataatcattgtattttgtatcttatgggcagatgggttatcacaattaaagctgaaataacaaactacaaggttggcatgaaatttttaaaatttactaacaaataatgagcatttttaatatggta

SEQ ID NO: 696554 - DNA, 608 bp, Homo sapiens
aaaaaataaagtgctagatatcatttaagacctggttttaaaattacctggatcccagaaaaaaaaaaaggacaaattattccctgcactttgcacacataacatttaattaatttgttatttattatttctgtctttttatattaataaagagatacataatatcttgaagacagaaagcttcattgagtcaatgaccacatcccttttatggttgttttctcccaccaccccattctcaccctacacakggctgtactccagtagaaaatttaggcctgatacctagaacagtacaggtctgacaacagttgctaaactgactagggacaagagacttgaaactccatcttgaggtccatgtttagaaatcactaggatcttttctgatgactgcatagcaaattggatttaacttttcaattttgcattattcttatgttattgggattatgatgaataatgagataataacagcaattagcctctgaatgactaatagtccatctaattgattttgaacaatttgaacatcttccctcagccaaagtagaatagggtggggcagagagtattccatgaatattcctgagaatgaaaacgggaaa

SEQ ID NO: 696555 - DNA, 3785 bp, Homo sapiens
  misc_feature 3108, 3109, 3110, 3111, 3112, 3113, 3114, 3115, 3116, 3117,3118, 3119, 3120, 3121, 3122, 3123, 3124, 3125, 3126, 3127,3128, 3129, 3130, 3131, 3132, 3133, 3134, 3135, 3136, 3137,3138, 3139, 3140, 3141, 3142, 3143, 3144, 3145, 3146: n = A,T,C or G
  misc_feature 3147, 3148, 3149, 3150, 3151, 3152, 3153, 3154, 3155, 3156,3157, 3158, 3159, 3160, 3161, 3162, 3163, 3164, 3165, 3166,3167, 3168, 3169, 3170, 3171, 3172, 3173, 3174, 3175, 3176,3177, 3178, 3179, 3180, 3181, 3182, 3183, 3184, 3185: n = A,T,C or G
  misc_feature 3186, 3187, 3188, 3189, 3190, 3191, 3192, 3193, 3194, 3195,3196, 3197, 3198, 3199, 3200, 3201, 3202, 3203, 3204, 3205,3206, 3207: n = A,T,C or G
tcaatcaagggaaaaatgaattggcccacctttcaaaggttttgtaaatcttgtcaatttgaggaatctaattttttttttttttttttttttgagacggagtctcgctctgtcgcccaggctggagtgcagtggcgggatcttggctcactgcaagctccgcctcccgggttcacgccattctcctgcctcagcctcccaagtagctgggaccacaggcgcccgccaccacgcccggctaattttttgtatttttagtagagacggggtttcaccgttttagccgggatggtctcgatctcctgacctcgtgatccgcccgcctcggcctcccaaagtgctgggattacaggcgtgagccaccgcgcccggcctgaggaatctaattttaagcaaacaagatatgtgaaaatccagacttacaaaagaaatcagttaggagttgattattcacattatataaggactctcctttatgaaaggatccatcacaggctttctttaaatacagaattccactgctgtgattagcatggggtctaatttacaaaacaaacaccctttggctgaccagcttttcaggaacacaactaccatcgaaagtatacccgcaggtcctcctagagagtcctgtcaggtttttcattatgtgacagaaaacgcttggaagctgcaccagaggaactactgtgaagcaaaatggaggcttgtttggccgcaaatgttgtgtgcctgggtaagtcatttgccttttccattttcattactgtagagtggaaacactggtccattctgacacctcttctagaaatgctgtggagctgtgtggtcctaaccaatatgcctaatgataacaagtaaggtttctgcacaggagctcaagctcccggagttggcagagttgctgtccccacagctgcaggaatgttcctcatcattcccctggggggcacagggaggtgctagcagcctgggtacacccactagaagctgagtgaccccactatgcagcccacacaaaaactactctaaatacacaacagccaaataggaaatgtaacttgaagagcatttccctctgcaaacaactgatcctctgggattttcacttcaagcctctcaattgttcgaagtaaatgaggctcacatcaaaggccagccagtcacgcatcaagaaatcaagcctcttctccgtgggggaaaatggctgctccagagccatcctcccacctctcacacacaggcctcttgtaaaaacggctttatttacccaaatctgagacactcgattcaaccaagcttggcctcccctaaatcctggaagctgaggtacacatgcaraggggccaacatctgaaactcgaggcagacgcctaagagccacagcactgccacaattgaaagactccagctttgccaggaggtgacttcatcctttttcagtcccctaattcctaacaagcaatcccctaagcccttagcttctgcgctgggcacaataagcccaagccacagcacaagctggggcaaggttagggagagagaggtctgcagctcatcctaccttgtaagtctgactgacaatcagagaaaaaaccaggtggagccacctggacccaaaacaagtggtcctctgataagaggaattccaaagccttagagccctctgtggaaaatgtcctgcctccagccccttggggagaaaaatctcaggatgattagcaagagctctggctgagctcaacttcagtgaaggtgtacggggagagaggtgatctctaaggtaaccagttaattgccgataaggaatgataataataaattagcagatactaatgtaaactaactcagttctgcagttctgtggcagttgcatggagacaacagaggaacagtttattctggaacacatcttgcaagcccatccccactgggaaaccggctgtctcagctagaggtgaaacatgccaataagatacaatgtaggcaatgggtggccctagaatgactgctggtagaaattgagcccttgatttttgaagaaaactgaaatgagaatgctcgaaaagatgtgggctgcattgtttctcattgctttctccttcagggttacttttgacccttagggataggacttaaatgattccaagaccctactgtaataaggagacaaacaaacaagacgcgcactaaagggtttgttggtttcttttaattagaggtgatgctttgtgtcatttccatgctatccaaaccagccttatcatacctattattttttagtgccttctgaatctactacctgataggtttgtggctgtctaatttagcccagaatttcattcaagtcactgcaaatctctaactttaaaactctgttttaggaactaaagtgtactgggctattttttttcaaagcctaactgatgttttattttcattatttccactaagatgaccatgcattcagactttttgtaggataattggaagcattcaatttggctgccacacacattcttgttctgcaagctcttccacggctacgtcactacttatgaagactgttgcatgagtggctatagcagagcatgcacacacaccccttagatgcctcatatcaaagaaactacagtttgctgatgaaaggtagaaaatagaattcaagattgagactgaaaccaaaatttaaatccctacggacctatgactggaattctctaagtttttgcctactatcactcccttacagctgtcagctcagaaacattcaacatcagaaaactaaaatttaaaaatactgcacaaagacactgggtgtttgggccatttcacccctcctggaggcaagaagaagcctcacccaagtctccatttccagtagaagcaatgagttgcattttcttcctccaataatgactgcagccaggtgacaaaaatggtaatgcagcaatgctgctgtacaaaggaataacactttccagcatccagagacaccagtaggcatgtctccattccataagaccggaagaaaaatcatttgccttactaaggagcctctcaaaaaatttggactatttttagaaagatcttagcaaactgacaaannnnnnnnnnnnnnnnnnnnnnnnnnnnnnnnnnnnnnnnnnnnnnnnnnnnnnnnnnnnnnnnnnnnnnnnnnnnnnnnnnnnnnnnnnnnnnnnnnnnggcttaagtgaaatattttttaaaatgtgatgtggtcagatgtttgctggctattgaaatattttagggcagtagagtggtatatggatgatggctggtgggtggctgggaggaaggctataagtaacatttcttaagttgatttcatttttccatgaattgcttaagtccctctttggttagaaatctgatgcactgggaggcatatgtcctcttccaagctaccagcgaaaagaatactgcatacttagagagcactttcacatctttcaaagcaccttcccaaacattgtttcgtttgatcctcacaatcaggtatcttgataggttgcccttcagtagatgatgaaacagaggtccagagatgctaagggacttactcagactcacaaagctggtcatcaagagagggaggacgagactgaaggactctatactgcctggcaaatgtgatttcagtgacaccttcctgccttaaaagtaattcagcctgacatacccaggctatgatgcatacataaaatggcctcatagtatttgtgtcaattttgtaggataaggggtcttaggaccactta

SEQ ID NO: 696556 - DNA, 1976 bp, Homo sapiens
ccttgactcacatctagtattttttgatgtgaaaaaattttagttaattacatacatatatacacatatatacaactgtctgtatttattattgtgggccccaatgggacataatttaaatgccactgctttatgttatggtagtcaactgtgcccctgttttattgcttaagttgacactaagcttcctacccacagcagaaaccataaacgatccccatttgtgtctcaccattgtctaaccctgggtctcacccttcagaggtgctcaggagctgttggtcaaatcaaattgccaaggaaaccctgggttgggttgtagtagtctttacagaagtgtggtagatgaaacgtatgttgaatttaagaaaatgtatcaataataatgataaatgctacttaaggatattaatcactacacaaacatttagaactgggtctggcaggtagtaaatcctcaataaatgatagcctttatcattttgactctatgaccatcatttagtgaatgctcaccatgtgcttcaatacatcttatcatttatttctcataccatcattctatggtacctattattggccccatttgacagatggaaaaatctgaggctcgcatagttggagtcatttgcccaaggaagtaaatctcagtaaaagcaaagctggcgttggaaccttcaccttcacctcccctgccagactccagagttccaagctctcccagcctgtcgggatgctgttcagggctggggaggtaggcaggcctgtgagcgttcagactcagaaaggcttcctggtgctggcacttcatgcagataagaacctctgggtgtgtggccaaaatggggtggaagaaataaggcataggagctgctcaggctactgcatttccgaggccagtagtcctgaggctgacctcagcttcattctaggacaagaggttatcgtaggcccatcctccccacaattctgccccagctcctgtttcatggatgctttgacaccatcagatattgcctggtcagagggacagcgactgccggcaactgctgtaattctctggcttccatttccttgttcttaaatggagcaggtaatccctgcttgttttagagatgtgatgagaataagaatggtggggacaggcaaagaaggaggcaaaggcccggcacagaaagtcctcactaaatggatgtccctcccttgcttttgtcacaatgtccagctccactagagttgctggattcctgccataccagctcgttttttatcttggggaagctttccagtaggaggaagacagccttggtggtggccaaggaaatgtctctgggattggtccctagcctggagctctgtttgcctcagggcattccagagggcattgctattcttggcctcatgacccagcacctcctttgctcctctgctttactccccatgctgaagagaaacaagagatataagaacagatctgggagatcactgtagcccctktgaacaaatggacccaggtgtggagaggaagaaaagccttatcaagggatctctcctgggaccaggcctccagagatgcagtcatgcctctcagtcatggtatgaccaggggctctgaccttgccaccaatgactgcccaatatatcagacaggaaaatggacacaatctacatcatctatttaaatcttcataattctcatcaaaattccataatgcattagtggtcccatttcacagaggatgctatgactctgagatgaagagcttgcctaattagtaataacagcaacaacaacatataacatagtatagcacttactgagagccaggcaccatctgaagtgcacattcttgtgaagccaggattcactccaaggttatctgactttggagcccaatttctgcaaaggtaagaggctgcagagaatggaaaaagggctttggcaaaatcttgacgtgggtttaaatacatgttcc

SEQ ID NO: 696557 - DNA, 1976 bp, Homo sapiens
ccttgactcacatctagtattttttgatgtgaaaaaattttagttaattacatacatatatacacatatatacaactgtctgtatttattattgtgggccccaatgggacataatttaaatgccactgctttatgttatggtagtcaactgtgcccctgttttattgcttaagttgacactaagcttcctacccacagcagaaaccataaacgatccccatttgtgtctcaccattgtctaaccctgggtctcacccttcagaggtgctcaggagctgttggtcaaatcaaattgccaaggaaaccctgggttgggttgtagtagtctttacagaagtgtggtagatgaaacgtatgttgaatttaagaaaatgtatcaataataatgataaatgctacttaaggatattaatcactacacaaacatttagaactgggtctggcaggtagtaaatcctcaataaatgatagcctttatcattttgactctatgaccatcatttagtgaatgctcaccatgtgcttcaatacatcttatcatttatttctcataccatcattctatggtacctattattggccccatttgacagatggaaaaatctgaggctcgcatagttggagtcatttgcccaaggaagtaaatctcagtaaaagcaaagctggcgttggaaccttcaccttcacctcccctgccagactccagagttccaagctctcccagcctgtcgggatgctgttcagggctggggaggtaggcaggcctgtgagcgttcagactcagaaaggcttcctggtgctggcacttcatgcagataagaacctctgggtgtgtggccaaaatggggtggaagaaataaggcataggagctgctcaggctactgcatttccgaggccagtagtcctgaggctgacctcagcttcattctaggacaagaggttatcgtaggcccatcctccccacaattctgccccagctcctgtttcatggatgctttgacaccatcagatattgcctggtcagagggacagcgactgccggcaactgctgtaattctctggcttccatttccttgttcttaaatggagcaggtaatccctgcttgttttagagatgtgatgagaataagaatggtggggacaggcaaagaaggaggcaaaggcccggcacagaaagtcctcactaaatggatgtccctcccttgcttttgtcacaatgtccagctccactagagttgctggattcctgccataccagctcgttttttatcttggggaagctttccagtaggaggaagacagccttggtggtggccaaggaaatgtctctgggattggtccctagcctggagctctgtttgcctcagggcattccagagggcattgctattcttggcctcatgacccagcacctcctttgctcctctgctttactccccatgctgaagagaaacaagagatataagaacagatctgggagatcactgtagcccctttgaacaaatggacccaggtgtggagaggaagaaaagccttatcaagggatctctcctgggaccaggcctccagagatgcagkcatgcctctcagtcatggtatgaccaggggctctgaccttgccaccaatgactgcccaatatatcagacaggaaaatggacacaatctacatcatctatttaaatcttcataattctcatcaaaattccataatgcattagtggtcccatttcacagaggatgctatgactctgagatgaagagcttgcctaattagtaataacagcaacaacaacatataacatagtatagcacttactgagagccaggcaccatctgaagtgcacattcttgtgaagccaggattcactccaaggttatctgactttggagcccaatttctgcaaaggtaagaggctgcagagaatggaaaaagggctttggcaaaatcttgacgtgggtttaaatacatgttcc

SEQ ID NO: 696558 - DNA, 2063 bp, Homo sapiens
  misc_feature 1963, 1964, 1965, 1966, 1967, 1968, 1969, 1970, 1971, 1972,1973, 1974, 1975, 1976, 1977, 1978, 1979, 1980, 1981, 1982,1983, 1984, 1985, 1986, 1987, 1988, 1989, 1990, 1991, 1992,1993, 1994, 1995, 1996, 1997, 1998, 1999, 2000, 2001: n = A,T,C or G
  misc_feature 2002, 2003, 2004, 2005, 2006, 2007, 2008, 2009, 2010, 2011,2012, 2013, 2014, 2015, 2016, 2017, 2018, 2019, 2020, 2021,2022, 2023, 2024, 2025, 2026, 2027, 2028, 2029, 2030, 2031,2032, 2033, 2034, 2035, 2036, 2037, 2038, 2039, 2040: n = A,T,C or G
  misc_feature 2041, 2042, 2043, 2044, 2045, 2046, 2047, 2048, 2049, 2050,2051, 2052, 2053, 2054, 2055, 2056, 2057, 2058, 2059, 2060,2061, 2062: n = A,T,C or G
gcaaaagccatgattacttttgtaccaacctaatagtaggtgcttcattggtgtttatggaattaatgaattaataaatgaatggttttggtagaaggcaagatcaaataatggttagaaaaatatttttctaaaactatccattaataaattaacagataattggaaataggttttagggattaactgataaaaattatcctgcccaagggaaatgatgagaaatttaccaaagaaaatcattccttacatgtataaactactttataggttatcagtccttctgtcttcattatcttatttgatcttcaacactaacttgtgaagtaggagggcaggggcctcaatgggcaaagaaatgtgtctaacaggatcaaagaggttgaaaagaattggaccagcactcaaacccagtcttctgatgcctagcacattcattgctggttctgccagttcctatgtctgcatcactaaagactatgggtgtgggtgtgygggtgtgtgtgttgaaatgaaatgaaattcataagaagccttctgattccacctggattaagaagtccctgcgggggcagtgggcaatggaaaagccccaggcttagagaatatgtctgccacatcaggtgaagctgatacatgtgcttccaaacagcagaactagcactcagagtgggcggttagtgagtttctaaagaaagggagagaggagatgagtaggcggtgacattttctggggagaatgccacttagaaggcccttgagactgaggtctcaacagattgggacaaagaaggcaacaggataagggcataggtgttaccctgggaccccagagacctgaattctggctccaactctgttgacttccagtaatacggcttgaataagtgccctcttaaatctggatttcagcctctccatctttaaagttaaaaaaaaaaaagacaatgtcagtggttttcatgtcatgctccttgggacctgagggatctgtgggggtgcctcaagaccagggggaaggtggtgggtgaagagaggaaccacatgcatggccttcgatcgtcatgcttagaggaactttccttttataaattttatatgttggcctttgagtgtaaaatttcatttgaacaaagggttctgctacaaaataaagtttgaaaacctctgggcaaaatgatcttaaatggttttccagtttgcacaatctgtgaaaggagaatcagagtgaaaataaagccttcacttttaagtactcaattgaggaaggaaagaggacaggttgcagggaggaagatgtgagattaaacagaaaggacagagagatgctgccagcattcaccgtgactttgagatttaagactggggagaacagatttcccgtggatccttttcttttccttcttttccattagggtttattgccttgtttttctttcttcttctctccaagtagctacttgaagaacttcatacgacttcagcagttatgggttatcaagccacagctatgttctttccttcccttgcaaatgtgacttacaggagttgctcaggagaacaggtgttttaaatactcactgaaaaatttattagaaagcaagacttgtcacatgccaaaggtagaagcgagcacaaagagccactggctcaatcatcccattgtacatatgtggaaattgaggcctggagagtgaagagacttgccccgaacctcatcatcagcagtgaggcagcccgatagtccatccagccttgatgaagtctgagaaacacaacactgggtgttgcacaaagggcatgagagtttctgaccttgtatttaaaagtagatgattggcaccatctcctacatgtcctttaccttttccagatggggtgtttggggtttgcactatatgccacccttctgctttttgatcaaacacatgatagcacaaactgtgcagaaactacagacttnnnnnnnnnnnnnnnnnnnnnnnnnnnnnnnnnnnnnnnnnnnnnnnnnnnnnnnnnnnnnnnnnnnnnnnnnnnnnnnnnnnnnnnnnnnnnnnnnnnnt

SEQ ID NO: 696559 - DNA, 933 bp, Homo sapiens
caaagtgctgaaattacaggcgtgagccaccatgcccagacttattttatttttaatcgacaaatatttgtatatatgtatgtgggtacactgttaggatgtatgcatacattctggaattgttacatcaggctaattagcatatctgtcacctcacatacttagcatttctttgtgatgagaacattatgattaacttttttagtgattttgaaatataaaaaaagtttgaatcattggtcttggagaagccaggaaaatctcttagtaaattataaaattatttgttaaaatgctacctatattaaatctggaacatgcatgaagagccctggaaaagaagcacaataatagactcagccaactattgtagagaggtactgaaacctcagcatttgattggcagtaatttatggtcataacaggacaatattttaactatgaatttaataaactatagaaatagtctatgaatggaatatactagagacaaactttatgtttatattacaaatttaaggatgtggtcttcaaggtggtgaaaaaagtagaaactgttgattctaatagactttaccactgtaaacaatgcattggaatcataaactaaatctttgaccatccaaaagaaaagaaaatggaaaggataaatsctttctttcagaaaaaagaacaaaaaattagttactccaggcagtggaaaaggttttaggtaatctttctcatcgagaataaaaaaataaaatgactagaatactgcaatgtcagaattaaagacacttacatctctcctttatggaagaaatgaatgggaccccaaacaaactcaaacttctgtcccttaaagaaagatagaagaacaggggtactgaaggtatgtgtatctcaaacatttttatggtgaagcctaaacctcaacgtaatgacatttta

SEQ ID NO: 696560 - DNA, 1316 bp, Homo sapiens
gaaaatagataaattacactacctacaatcttagaattgttattttaaaactgtaggctctgtattatatttgatatatccaacaaatatttatgacatgccaggcaagcaaaataaaaaaagaacacagatgaatctaatgaccaacatgagataatattcccaactccactctgtgaacttcctgagtattgcttcatcctattcctcagggaagccctcccctaaattctgtgttccttttctatggcttacccatattcaccaaaaatacattaatactttttttaactaaatataatttagttaagatttggatagattaaattgtttcaccttgtgtggacatatcaaattttatcattttattctctttaattattcccaggtttttaatgttataaataaatttatgaaaattatcatgtatgttttcttgtaaataaatatgagggaatttcagggatacacctttaagaatagacttgctggaagtggaacgatagagtacttctgagcgtgaaatgtaataaccctatatgtcaggatttaaaaatacttttaagaatgaagaagttacagcaacatattgtttaattcccatcatatatatttcatatcatagaagaaatcttatcataagttaaatcatctttgaaccactgaaraattaccacaaatctccaaatttgccagttgtaaagaggctcacgagaacatcttgcaactttcggggaatacatatcatgtgcctttttattttattttattcatttatttatttattttgtcaactttttcttattattattatactttaagttctagggtacatgtgcacaacatgcaggtttgttacatatgtatacatgtgccacgttggtgtgctgcacccattaattcgtcatttatgttaggtctatctcctacagagtaaaatgtgtcatgttctaactactttaatgacaccaagtttttataccaaaactttaaaaaattgtacaaagaaaagtaaataaatgaaattgtttaaatagacccaaagcacttaatttttagtaattcctcacggtacaatcttgcagatttttcacctgtgcaaaaataaattcccatcgaatttcatagttgaacattaataataaaacaataaagctttgaagaataacacaggagaacatattactaacactggattaggcaaagattctgtaaacaaaacaggtgaaaatgagaagcataagctgtgcaacaattgattgtttatcaaacgaaagcattaaaacagtaaaaatacaattcaaaattaaaaagat

SEQ ID NO: 696561 - DNA, 1235 bp, Homo sapiens
ataaaattctaattacaaaatattttctttgcagctttacattaattttcccagcatatatttctatctttataaacagtgcactaatactaaaatatctttagtcagattctcatattttctagtattgatcatgggaagctctctgtttctcttttctattctattcagccattaagacacagcacaaattagatgttcttttaataaaattgtattgtctttcttgagcctacaatggaaggtgtctcctttctctgcttgaacgtatatataccataaaaataatattgtgactgtatttttgtaactggtattttcattgtttatctctacttctgttaacctattgattgttttgattattgctgcctcccactrtttacccaggccctggactgtggcaaatactcactagacacctattgaattgaattgtaacttaacaatgtttattattttaaaatgaaatacttaatgatcaaggaacatagcatatgcagggactttttattttattttcttcccagcaaatatacctaatactatgatgacatttcttagtaaatattgaatttcagtaagttaaattagattatattcaattttaatattaccatcaaaaatgttagtcagctaaactacttattatttgaaagcctactacataccagacacaggatctaggaaattaattaaatattcttttcaagcgtcagaaaaaaaacttgtaagatggctcaaatttcctcaatattcaatattctttctaagctggaaaatttttaaaagcaagatgtacaatatatgagttacaaattcttactgtcttttttctagaaatgattaccatgaccttttttggaacttttttatatctctcttgatttcaacatgatgttataaaaatgttaaaatgctgacaaaatttattggtactacattcaggtaatgtctagtaagctccgtaaactcatgaataatgtgatgtaactgctcatgaatactgagtacagtatactatctgatgcgctccttatgaaaaaatatagaacactataaatagtgcctgaatttgtattagttcaattaaataaatttattctctaatctaaaagtaattattttcattagtattttgttgaaatatttttctcctgaattttggagactaacttactatggtgtattagcttcctattgctactgtaacaaattaccacaaaatttgtggc

SEQ ID NO: 696562 - DNA, 1235 bp, Homo sapiens
ataaaattctaattacaaaatattttctttgcagctttacattaattttcccagcatatatttctatctttataaacagtgcactaatactaaaatatctttagtcagattctcatattttctagtattgatcatgggaagctctctgtttctcttttctattctattcagccattaagacacagcacaaattagatgttcttttaataaaattgtattgtctttcttgagcctacaatggaaggtgtctcctttctctgcttgaacgtatatataccataaaaataatattgtgactgtatttttgtaactggtattttcattgtttatctctacttctgttaacctattgattgttttgattattgctgcctcccactatttacccaggccctggactgtggcaaatactcactagacacctattgaattgaattgtaacttaacaatgtttattattttaaaatgaaatacttaatgatcaaggaacatagcatatgcagggactttttattttattttcttcccagcaratatacctaatactatgatgacatttcttagtaaatattgaatttcagtaagttaaattagattatattcaattttaatattaccatcaaaaatgttagtcagctaaactacttattatttgaaagcctactacataccagacacaggatctaggaaattaattaaatattcttttcaagcgtcagaaaaaaaacttgtaagatggctcaaatttcctcaatattcaatattctttctaagctggaaaatttttaaaagcaagatgtacaatatatgagttacaaattcttactgtcttttttctagaaatgattaccatgaccttttttggaacttttttatatctctcttgatttcaacatgatgttataaaaatgttaaaatgctgacaaaatttattggtactacattcaggtaatgtctagtaagctccgtaaactcatgaataatgtgatgtaactgctcatgaatactgagtacagtatactatctgatgcgctccttatgaaaaaatatagaacactataaatagtgcctgaatttgtattagttcaattaaataaatttattctctaatctaaaagtaattattttcattagtattttgttgaaatatttttctcctgaattttggagactaacttactatggtgtattagcttcctattgctactgtaacaaattaccacaaaatttgtggc

SEQ ID NO: 696563 - DNA, 1235 bp, Homo sapiens
ataaaattctaattacaaaatattttctttgcagctttacattaattttcccagcatatatttctatctttataaacagtgcactaatactaaaatatctttagtcagattctcatattttctagtattgatcatgggaagctctctgtttctcttttctattctattcagccattaagacacagcacaaattagatgttcttttaataaaattgtattgtctttcttgagcctacaatggaaggtgtctcctttctctgcttgaacgtatatataccataaaaataatattgtgactgtatttttgtaactggtattttcattgtttatctctacttctgttaacctattgattgttttgattattgctgcctcccactatttacccaggccctggactgtggcaaatactcactagacacctattgaattgaattgtaacttaacaatgtttattattttaaaatgaaatacttaatgatcaaggaacatagcatatgcagggactttttattttattttcttcccagcaaatatacctaatactatgatgacatttcttagtaaatattgaatttcagtaagttaaattagattatattcaattttaatattaccatcaaaaatgttagtcarctaaactacttattatttgaaagcctactacataccagacacaggatctaggaaattaattaaatattcttttcaagcgtcagaaaaaaaacttgtaagatggctcaaatttcctcaatattcaatattctttctaagctggaaaatttttaaaagcaagatgtacaatatatgagttacaaattcttactgtcttttttctagaaatgattaccatgaccttttttggaacttttttatatctctcttgatttcaacatgatgttataaaaatgttaaaatgctgacaaaatttattggtactacattcaggtaatgtctagtaagctccgtaaactcatgaataatgtgatgtaactgctcatgaatactgagtacagtatactatctgatgcgctccttatgaaaaaatatagaacactataaatagtgcctgaatttgtattagttcaattaaataaatttattctctaatctaaaagtaattattttcattagtattttgttgaaatatttttctcctgaattttggagactaacttactatggtgtattagcttcctattgctactgtaacaaattaccacaaaatttgtggc

SEQ ID NO: 696564 - DNA, 592 bp, Homo sapiens
ggatatcaagggacttgttatgtttgtaaagccttcctttttctgtctcatgatgcctatttatttattcttcaagattctacttacattccaactcaccaaaacctttcctaacatcccagggcaaaattaactgatctttcttcagtggttccacagaattttgttcacagcactcctataacttcacgtgttattacactccatcttatactgtgagaactttgtgggtaattactaagtttttcttctctgtggtgggatggtacctaaaatagtaccagcctcatgatataattcaattcacgtttgtcagatcaatggatgattctataaataatgattttgtatgtggcaaagactgctaattattcctcaacatcattcttccctcttcctttaccaatagacattgctccctgagtttcagctgggcatatggctgcttggttagaaacaaatttccccatgtactcaggggaataatgtgaatatatgcgtataaagggtatgtgagcaaatgtgatgtgtgcaaattctgagtcactttcatggaaaaaaattatgttycttctgtttattgtcattactt

SEQ ID NO: 696565 - DNA, 491 bp, Homo sapiens
acatttaaactgtgagtcatgtttaagtatctatatcttatgtataaaacatataattttatattttgtataaaattacttgaaatctatatttcatttgacattgcttgaagatgtgttctttatgtactatttctaccaagagtttaattcaacatactgaagctcatgtttgatatatactataacyattgctcagatgatataaaattctagcaaattaaaagaaaaatcactcttacagccccaaaactgttattccagactggacttcttttaccttctgttttggtagttacatttctcacttgtaacataaatctctaattcctttagacaggtcattagcttcaacacagatagcattattaggataatttatcaaccatccaagccaaagggaagtgaaaatttgtaagaaatggggcagaattagggatgaagagcaggtctgatgaaaattgatctggagggtgaaaaacttctagaaa

SEQ ID NO: 696566 - DNA, 491 bp, Homo sapiens
acatttaaactgtgagtcatgtttaagtatctatatcttatgtataaaacatataattttatattttgtataaaattacttgaaatctatatttcatttgacattgcttgaagatgtgttctttatgtactatttctaccaagagtttaattcaacatactgaagctcatgtttgatatatactataactattgctcagatgatataaaattctagcaaattaaaagaaaaatcactcttacagccccaaaactgttattccagactggacttmttttaccttctgttttggtagttacatttctcacttgtaacataaatctctaattcctttagacaggtcattagcttcaacacagatagcattattaggataatttatcaaccatccaagccaaagggaagtgaaaatttgtaagaaatggggcagaattagggatgaagagcaggtctgatgaaaattgatctggagggtgaaaaacttctagaaa

SEQ ID NO: 696567 - DNA, 585 bp, Homo sapiens
tttaaatgaccgtcagtaagttggagctcatgttactggtcccataagtagcctccatctctctcaatgtgtccactcagcttatgttgctaatgtgccaatacttgaagggctaatgactgaggctccctgaaaccaattagcatattatatctttgttgaatgctttatgctgtgcattgataaaaagatcatcacactttgtgtccactcccttgtctgccctatgcacatagtgtggacagattccaaactttcttttcccagagttatgamaagtcacacaggccacttgccactgcccatgacatcatatatattttaacctcaggccacctttccttttttgcaaactaggttggcagatggagagcataaagcagttcatttgaagaattttatttcaccattgattttaaaggccattcctgagtaaggctatggtgaaattgccatccattgttggcacatccttcaagaaagcttcagattttacctcctccatcactggtcaaatagtccttcctatgccagaggtgggagctgagagaggagtactagtgcaacagtggtggataacatgtg

SEQ ID NO: 696568 - DNA, 585 bp, Homo sapiens
tttaaatgaccgtcagtaagttggagctcatgttactggtcccataagtagcctccatctctctcaatgtgtccactcagcttatgttgctaatgtgccaatacttgaagggctaatgactgaggctccctgaaaccaattagcatattatatctttgttgaatgctttatgctgtgcattgataaaaagatcatcacactttgtgtccactcccttgtctgccctatgcacatagtgtggacagattccaaactttcttttcccagagttatgaaaagtcacacaggccacttgccactgcccatgacatcatatatattttaacctcaggccacctttcyttttttgcaaactaggttggcagatggagagcataaagcagttcatttgaagaattttatttcaccattgattttaaaggccattcctgagtaaggctatggtgaaattgccatccattgttggcacatccttcaagaaagcttcagattttacctcctccatcactggtcaaatagtccttcctatgccagaggtgggagctgagagaggagtactagtgcaacagtggtggataacatgtg

SEQ ID NO: 696569 - DNA, 669 bp, Homo sapiens
tcagctgacactgcccctgggagataagaagatttctgtgtaaacacagtgtactcaaattgcacccacatcatattaaatatattcagtggcaatcacatttgtggtaacttaacctacattgacccctgactgggggcaatgagaccactaaggcttgaatgcagaatggacttcaaggggatgaattccctgaagtgatccatacctgcagaaccttgtatcctgtgccaatgcatgtcttcagtacacagataaagcattttataaaggttatctattaccatctaggcagaaataatttctcctacttcgtcttttatccagggtatctcatgctcatgctcaacttttatgcatattatttcattaaacacacacatacaattatgtgcaaaaaacttttctaagtactttgcaaatattaacacatttaatcctcatagaaaccctaagaaatagacactcatcatcccattttacaactgaggaaactaaggcacaaagaagctaaagactgttttagcttttccagccagtgagtggctaatctagcttcaaacccagaatatcatctgcctccagaatttgttttcaatctctttctttacatcaattgtttctcgttttgtcttccctcgatcttccatcccyatttagcttctcaca

SEQ ID NO: 696570 - DNA, 1044 bp, Homo sapiens
ttttaggtatgggaataaaatgacataaagaaactgaccttgttatcagtttagctgtagaggtgaaagataaggatatttcaaggaaaaacctattacaggcagtatatagagtacttgggcccagttgaagcccaggtaatgtgatgatagtaatgataatggtccactgaatgctaacagacaagtatatatagttacagctgtacatggatatcacaaccttacacacaaattctagaaagatcattgtgaaaatgacattccataaatcacatggaatcagcaccaagtgtgtctttatgcatgcccaaaaaggaaggagaaactgacaaccatcaataatgaacaatgacttatttcaaatctaatatctagtgctgataaatttattttgttgttgttgtttaaacgagaatgtttctatgggcctcctaagtcatcttatgcctaaaaataacagctctttttttgtgtctttccaagagaggtaatattaagaattaataggtatttcagaacctccaaaacgaactcactaaacgagtaccaacaagttacaacctgagctggattttattttcaaatgataagcaacagcaataaggcagtccatattctataagctacttttgttacacattaatgactaaaacagcttctgtgcagatttcaaattaatcggacaaagaatatcagctttatggcattaaactcatttgaaaaaggagtggatggcaatacaactaaagttttaccagaaaacaagagttatctaagcaataatccagcaagaaaagagaactacttctgatttcctagaatacatccctaacaggttattatttctgattaccatggcagcacacagcattttccatctaacactttacaaagatgcttggtcatgccatgctctgctgtattaaatgatctttgttgaaaccattcatttccatttctcttacacctacgaaatgtcaaataagagtgataagacagtcatttactctcaattttctctwtaatttagagtgtattaga

SEQ ID NO: 696571 - DNA, 670 bp, Homo sapiens
ttaacttgagtctttgatgcccctaatgaggcgtgaaggactcttctcccatggggaagtttttctttttcaggagggaggagggctttcccaggtaatgtgtctagagtgttgggcagaagaatctgggactacaccacaccagttctctscttaatccacgtcatttgccttctatcccagctatgtttccagtgtcctctgggtgtttccaagagcaacaggaaacgaataaatctctggtgagttgtttatttgttcttcactttgttttacactgtattttctgagtttttgggtgtctgtgaattaaaaaggaaaagtagaaataagtaaaactcaggttgaaggaaatatacataaataagataaagctgacctgtagatataggcaggttataagagcttagagttgtctaagttgggtgcaaattttcctctgatctttctgatgccgagacaaaaaaggcagtcatatttgttacgtgattggagtggaacccgagaagagaacatgctgtgttcttgtgggacaggaaagcttgcgtgcaccaagtctgaaccaccaccttcattggtgacatatattatgtgctggaacatatttcacaccggcctggcagtaaccacttgtagtgttgtacagtggaaacggtcatcttccgctaaa

SEQ ID NO: 696572 - DNA, 670 bp, Homo sapiens
ttaacttgagtctttgatgcccctaatgaggcgtgaaggactcttctcccatggggaagtttttctttttcaggagggaggagggctttcccaggtaatgtgtctagagtgttgggcagaagaatctgggactacaccacaccagttctctccttaakccacgtcatttgccttctatcccagctatgtttccagtgtcctctgggtgtttccaagagcaacaggaaacgaataaatctctggtgagttgtttatttgttcttcactttgttttacactgtattttctgagtttttgggtgtctgtgaattaaaaaggaaaagtagaaataagtaaaactcaggttgaaggaaatatacataaataagataaagctgacctgtagatataggcaggttataagagcttagagttgtctaagttgggtgcaaattttcctctgatctttctgatgccgagacaaaaaaggcagtcatatttgttacgtgattggagtggaacccgagaagagaacatgctgtgttcttgtgggacaggaaagcttgcgtgcaccaagtctgaaccaccaccttcattggtgacatatattatgtgctggaacatatttcacaccggcctggcagtaaccacttgtagtgttgtacagtggaaacggtcatcttccgctaaa

SEQ ID NO: 696573 - DNA, 3074 bp, Homo sapiens
ttactgaattggaaaacatacaggtgttttttgcctggtcacttgtggttttacaacactccccccgcttccgcaccactgccccaggtgattttgttgccagccaaagtgtgagaactactggcagctgctggcagacagcagcaaaggcccaaatcctctgtgtgatttcaatacccctatctggttttcagccatatttccttctccttctcaaagctgagcccactcctcctccctcaccacctgtaggctatgctttccagcctgtgtccaggattagtcctgatgtaaggcacgtggggtttaaggatctctctcttcagtcttatttccgcaccatcgctgacacatatattccagttgtaatcatggggctacctccttttctttccagtcccatgctcattttctctatcacattctaccttgtaataacctaaatcttctggtgggcaagcttcttcctcaatcaaatttgtgtttatgattgtgttggggattggcttagtaatccaggtactgctactgccttgaaagcggagactgcatccttctgtctggatatcttgagtttctggattgtaaaccttattagggcccatttttcctagaattggagcctctactttgttcttgctactttagttcacccagaaagcacgatctctgcctgaatttcaaagtgttggctagcttaaatatccttttgtgagactttcgtcttcctgcggggtgattttttcatcttacataccattgctaatctttttgtcttgaatgtaattgaaatagttttaatctgtgttaccagcaacaagaaccccttttatgagatgaagaggccaggtcagtctcataacatgtgtccccctccgtgtgttgaatttatgtcagagccaggttctttcctatttgacgtctctcaccaaattccagtgtttatgtcctaggaggtgcccaataaattctagagttgatacaagctgcaattttagagaaattaaattagcaagtaaaattagattatatacaacctaatcaactttttttttctgaggatgaccaagatttgggcttcagtgacaatagttgtcccctaaatatttatactcaaaatctaggatcaccagtacaatgttgaatagaggtgatgaacacacacatccctttcttgtcctaatctatgtggtttaaacatttacgctttcaccattaaatatagtattgtttatatgttttgttgtggatgctttccatcacgtcgagaaaatttctttatctagcttgctgagagttttttttaaatcagcaatagatatatctccaaagaaaatatccacatgaccaacagatacatgaaaaaaatgctctgcatcactaatcagggaaatgcaaatcaaaaccacaaacagatattgcctcaagccctttagaatggtcttattaaaagaaaaagatatcgagtgttaacaatggggagaaattggaacacttctacagtgtttctgggaaagtaaaactgtgcagcctctatggaaaacagtacggtggttcctcaaaaaaattaagaaagtagaactaccatatgatctagtagtctcacttcaggttatttatctgaaagaatggagattgggatgattctcaggctcattgcagcattatttacactaattaaaatgtggaaataaggttaatgtctattggcagatgaaaagataaagaaaatgtggtatattcatacaacggaatattattcagctttaaaacaagaaagcccgtcaatatgcaacatggatgaacctagaggacattaatgctaagtaaagtaaatcagtcacagaaggacaaactgtatgattccacttgtataaagtatctaagatagccaaattcattagaatcacagattagaatgatgatagctctttaaattgaagtcaattttgcattcctaggttttgtaattttggtatcaggattctgactcataaaacaagtttggaatttcccccttctttatttctgaaataatttaaaaattttattttttttaaacgtttgaaagaattcaccagtgaaattctttagatctggggtttgcttatttttttatttatttaattttatgtttttatgtgcaggtattttacaattaatttaattactttaataaatgtcaattacttcatatgttccattaaatcttgtgaatttttttataagtttttttcaaggaagtcaccctttcatccaagtaatgaaaatttgtatataatgtttcacaatattccattatcttgttaatgtctcttgtgtttacaactgtacaatctcattaatccctgatatgtataatttgcgttttctttctttctcacagaactaacttttgrccatgttgattttctcctgtttctgttttctgtctcattgatttctaatttctgttttatttcctttcctctacttgttttggacttaatttgctctcttgttttagattttctttttaaggtagaaaattagttcacttgttttgaacttctcttttctagaataagcatttatacaaaaaatttactctgggtctgcttaactttatcccatacatttttatatagtatatttttatttgtattcagttcaatgtatttaaaagtgtttcttatgatttcttcattgagctaaagggcattttaaggtgtatttaaatcttccaatagtgtagactttcctgggtagcttgtttttacccatttcaactcattttcattatggtcagaaagcttactttccatgattacagtgttttgaaacttcttgagagatattttgtggtctatagcctattgataaatgtttcatgtgtagcataatagaacatatattctattgtcttggtcaatatcgattaggtcaagctgttgtcaaaattattttatcttaattttctttagttattctgtcagcaatacagcattatgtcttcataattacttgacattttatcattatgaaatagctgtctgttgtaatattgctcgtttggaggtctactttttcttata

SEQ ID NO: 696574 - DNA, 3074 bp, Homo sapiens
ttactgaattggaaaacatacaggtgttttttgcctggtcacttgtggttttacaacactccccccgcttccgcaccactgccccaggtgattttgttgccagccaaagtgtgagaactactggcagctgctggcagacagcagcaaaggcccaaatcctctgtgtgatttcaatacccctatctggttttcagccatatttccttctccttctcaaagctgagcccactcctcctccctcaccacctgtaggctatgctttccagcctgtgtccaggattagtcctgatgtaaggcacgtggggtttaaggatctctctcttcagtcttatttccgcaccatcgctgacacatatattccagttgtaatcatggggctacctccttttctttccagtcccatgctcattttctctatcacattctaccttgtaataacctaaatcttctggtgggcaagcttcttcctcaatcaaatttgtgtttatgattgtgttggggattggcttagtaatccaggtactgctactgccttgaaagcggagactgcatccttctgtctggatatcttgagtttctggattgtaaaccttattagggcccatttttcctagaattggagcctctactttgttcttgctactttagttcacccagaaagcacgatctctgcctgaatttcaaagtgttggctagcttaaatatccttttgtgagactttcgtcttcctgcggggtgattttttcatcttacataccattgctaatctttttgtcttgaatgtaattgaaatagttttaatctgtgttaccagcaacaagaaccccttttatgagatgaagaggccaggtcagtctcataacatgtgtccccctccgtgtgttgaatttatgtcagagccaggttctttcctatttgacgtctctcaccaaattccagtgtttatgtcctaggaggtgcccaataaattctagagttgatacaagctgcaattttagagaaattaaattagcaagtaaaattagattatatacaacctaatcaactttttttttctgaggatgaccaagatttgggcttcagtgacaatagttgtcccctaaatatttatactcaaaatctaggatcaccagtacaatgttgaatagaggtgatgaacacacacatccctttcttgtcctaatctatgtggtttaaacatttacgctttcaccattaaatatagtattgtttatatgttttgttgtggatgctttccatcacgtcgagaaaatttctttatctagcttgctgagagttttttttaaatcagcaatagatatatctccaaagaaaatatccacatgaccaacagatacatgaaaaaaatgctctgcatcactaatcagggaaatgcaaatcaaaaccacaaacagatattgcctcaagccctttagaatggtcttattaaaagaaaaagatawcgagtgttaacaatggggagaaattggaacacttctacagtgtttctgggaaagtaaaactgtgcagcctctatggaaaacagtacggtggttcctcaaaaaaattaagaaagtagaactaccatatgatctagtagtctcacttcaggttatttatctgaaagaatggagattgggatgattctcaggctcattgcagcattatttacactaattaaaatgtggaaataaggttaatgtctattggcagatgaaaagataaagaaaatgtggtatattcatacaacggaatattattcagctttaaaacaagaaagcccgtcaatatgcaacatggatgaacctagaggacattaatgctaagtaaagtaaatcagtcacagaaggacaaactgtatgattccacttgtataaagtatctaagatagccaaattcattagaatcacagattagaatgatgatagctctttaaattgaagtcaattttgcattcctaggttttgtaattttggtatcaggattctgactcataaaacaagtttggaatttcccccttctttatttctgaaataatttaaaaattttattttttttaaacgtttgaaagaattcaccagtgaaattctttagatctggggtttgcttatttttttatttatttaattttatgtttttatgtgcaggtattttacaattaatttaattactttaataaatgtcaattacttcatatgttccattaaatcttgtgaatttttttataagtttttttcaaggaagtcaccctttcatccaagtaatgaaaatttgtatataatgtttcacaatattccattatcttgttaatgtctcttgtgtttacaactgtacaatctcattaatccctgatatgtataatttgcgttttctttctttctcacagaactaacttttggccatgttgattttctcctgtttctgttttctgtctcattgatttctaatttctgttttatttcctttcctctacttgttttggacttaatttgctctcttgttttagattttctttttaaggtagaaaattagttcacttgttttgaacttctcttttctagaataagcatttatacaaaaaatttactctgggtctgcttaactttatcccatacatttttatatagtatatttttatttgtattcagttcaatgtatttaaaagtgtttcttatgatttcttcattgagctaaagggcattttaaggtgtatttaaatcttccaatagtgtagactttcctgggtagcttgtttttacccatttcaactcattttcattatggtcagaaagcttactttccatgattacagtgttttgaaacttcttgagagatattttgtggtctatagcctattgataaatgtttcatgtgtagcataatagaacatatattctattgtcttggtcaatatcgattaggtcaagctgttgtcaaaattattttatcttaattttctttagttattctgtcagcaatacagcattatgtcttcataattacttgacattttatcattatgaaatagctgtctgttgtaatattgctcgtttggaggtctactttttcttata

SEQ ID NO: 696575 - DNA, 3074 bp, Homo sapiens
ttactgaattggaaaacatacaggtgttttttgcctggtcacttgtggttttacaacactccccccgcttccgcaccactgccccaggtgattttgttgccagccaaagtgtgagaactactggcagctgctggcagacagcagcaaaggcccaaatcctctgtgtgatttcaatacccctatctggttttcagccatatttccttctccttctcaaagctgagcccactcctcctccctcaccacctgtaggctatgctttccagcctgtgtccaggattagtcctgatgtaaggcacgtggggtttaaggatctctctcttcagtcttatttccgcaccatcgctgacacatatattccagttgtaatcatggggctacctccttttctttccagtcccatgctcattttctctatcacattctaccttgtaataacctaaatcttctggtgggcaagcttcttcctcaatcaaatttgtgtttatgattgtgttggggattggcttagtaatccaggtactgctactgccttgaaagcggagactgcatccttctgtctggatatcttgagtttctggattgtaaaccttattagggcccatttttcctagaattggagcctctactttgttcttgctactttagttcacccagaaagcacgatctctgcctgaatttcaaagtgttggctagcttaaatatccttttgtgagactttcgtcttcctgcggggtgattttttcatcttacataccattgctaatctttttgtcttgaatgtaattgaaatagttttaatctgtgttaccagcaacaagaaccccttttatgagatgaagaggccaggtcagtctcataacatgtgtccccctccgtgtgttgaatttatgtcagagccaggttctttcctatttgacgtctctcaccaaattccagtgtttatgtcctaggaggtgcccaataaattctagagttgatacaagctgcaattttagagaaattaaattagcaagtaaaattagattatatacaacctaatcaactttttttttctgaggatgaccaagatttgggcttcagtgacaatagttgtcccctaaatatttatactcaaaatctaggatcaccagtacaatgttgaatagaggtgatgaacacacacatccctttcttgtcctaatctatgtggtttaaacatttacgctttcaccattaaatatagtattgtttatatgttttgttgtggatgctttccatcacgtcgagaaaatttctttatctagcttgctgagagttttttttaaatcagcaatagatatatctccaaagaaaatatccacatgaccaacagatacatgaaaaaaatgctctgcatcactaatcagggaaatgcaaatcaaaaccacaaacagatattgcctcaagccctttagaatggtcttattaaaagaaaaagatatcgagtgttaacaatggggagaaattggaacacttctacagtgtttctgggaaagtaaaactgtgcagcctctatggaaaacagtacggtggttcctcaaaaaaattaagaaagtagaactaccatatgatctagtagtctcacttcaggttatttatctgaaagaatggagattgggatgattctcaggctcattgcagcattatttacactaattaaaatgtggaaataaggttaatgtctattggcagatgaaaagataaagaaaatgtggtatattcatacaacggaatattattcagctttaaaacaagaaagcccgtcaatatgcaacrtggatgaacctagaggacattaatgctaagtaaagtaaatcagtcacagaaggacaaactgtatgattccacttgtataaagtatctaagatagccaaattcattagaatcacagattagaatgatgatagctctttaaattgaagtcaattttgcattcctaggttttgtaattttggtatcaggattctgactcataaaacaagtttggaatttcccccttctttatttctgaaataatttaaaaattttattttttttaaacgtttgaaagaattcaccagtgaaattctttagatctggggtttgcttatttttttatttatttaattttatgtttttatgtgcaggtattttacaattaatttaattactttaataaatgtcaattacttcatatgttccattaaatcttgtgaatttttttataagtttttttcaaggaagtcaccctttcatccaagtaatgaaaatttgtatataatgtttcacaatattccattatcttgttaatgtctcttgtgtttacaactgtacaatctcattaatccctgatatgtataatttgcgttttctttctttctcacagaactaacttttggccatgttgattttctcctgtttctgttttctgtctcattgatttctaatttctgttttatttcctttcctctacttgttttggacttaatttgctctcttgttttagattttctttttaaggtagaaaattagttcacttgttttgaacttctcttttctagaataagcatttatacaaaaaatttactctgggtctgcttaactttatcccatacatttttatatagtatatttttatttgtattcagttcaatgtatttaaaagtgtttcttatgatttcttcattgagctaaagggcattttaaggtgtatttaaatcttccaatagtgtagactttcctgggtagcttgtttttacccatttcaactcattttcattatggtcagaaagcttactttccatgattacagtgttttgaaacttcttgagagatattttgtggtctatagcctattgataaatgtttcatgtgtagcataatagaacatatattctattgtcttggtcaatatcgattaggtcaagctgttgtcaaaattattttatcttaattttctttagttattctgtcagcaatacagcattatgtcttcataattacttgacattttatcattatgaaatagctgtctgttgtaatattgctcgtttggaggtctactttttcttata

SEQ ID NO: 696576 - DNA, 3074 bp, Homo sapiens
ttactgaattggaaaacatacaggtgttttttgcctggtcacttgtggttttacaacactccccccgcttccgcaccactgccccaggtgattttgttgccagccaaagtgtgagaactactggcagctgctggcagacagcagcaaaggcccaaatcctctgtgtgatttcaatacccctatctggttttcagccatatttccttctccttctcaaagctgagcccactcctcctccctcaccacctgtaggctatgctttccagcctgtgtccaggattagtcctgatgtaaggcacgtggggtttaaggatctctctcttcagtcttatttccgcaccatcgctgacacatatattccagttgtaatcatggggctacctccttttctttccagtcccatgctcattttctctatcacattctaccttgtaataacctaaatcttctggtgggcaagcttcttcctcaatcaaatttgtgtttatgattgtgttggggattggcttagtaatccaggtactgctactgccttgaaagcggagactgcatccttctgtctggatatcttgagtttctggattgtaaaccttattagggcccatttttcctagaattggagcctctactttgttcttgctactttagttcacccagaaagcacgatctctgcctgaatttcaaagtgttggctagcttaaatatccttttgtgagactttcgtcttcctgcggggtgattttttcatcttacataccattgctaatctttttgtcttgaatgtaattgaaatagttttaatctgtgttaccagcaacaagaaccccttttatgagatgaagaggccaggtcagtctcataacatgtgtccccctccgtgtgttgaatttatgtcagagccaggttctttcctatttgacgtctctcaccaaattccagtgtttatgtcctaggaggtgcccaataaattctagagttgatacaagctgcaattttagagaaattaaattagcaagtaaaattagattatatacaacctaatcaactttttttttctgaggatgaccaagatttgggcttcagtgacaatagttgtcccctaaatatttatactcaaaatctaggatcaccagtacaatgttgaatagaggtgatgaacacacacatccctttcttgtcctaatctatgtggtttaaacatttacgctttcaccattaaatatagtattgtttatatgttttgttgtggatgctttccatcacgtcgagaaaatttctttatctagcttgctgagagttttttttaaatcagcaatagatatatctccaaagaaaatatccacatgaccaacagatacatgaaaaaaatgctctgcatcactaatcagggaaatgcaaatcaaaaccacaaacagatattgcctcaagccctttagaatggtcttattaaaagaaaaagatatcgagtgttaacaatggggagaaattggaacacttctacagtgtttctgggaaagtaaaactgtgcagcctctatggaaaacagtacggtggttcctcaaaaaaattaagaaagtagaactaccatatgatctagtagtctcacttcaggttatttatctgaaagaatggagattgggatgattctcaggctcattgcagcattatttacactaattaaaatgtggaaataaggttaatgtctattggcagatgaaaagataaagaaaatgtggtatattcatacaacggaatattattcagctttaaaacaagaaagcccgtcaatatgcaacatggatgaacctagaggacattaatgctaagtaaagtaaatcagtcacagaaggacaaactgtatgattccacttgtataaagtatctaagatagccaaattcattagaatcacagattagaatgrtgatagctctttaaattgaagtcaattttgcattcctaggttttgtaattttggtatcaggattctgactcataaaacaagtttggaatttcccccttctttatttctgaaataatttaaaaattttattttttttaaacgtttgaaagaattcaccagtgaaattctttagatctggggtttgcttatttttttatttatttaattttatgtttttatgtgcaggtattttacaattaatttaattactttaataaatgtcaattacttcatatgttccattaaatcttgtgaatttttttataagtttttttcaaggaagtcaccctttcatccaagtaatgaaaatttgtatataatgtttcacaatattccattatcttgttaatgtctcttgtgtttacaactgtacaatctcattaatccctgatatgtataatttgcgttttctttctttctcacagaactaacttttggccatgttgattttctcctgtttctgttttctgtctcattgatttctaatttctgttttatttcctttcctctacttgttttggacttaatttgctctcttgttttagattttctttttaaggtagaaaattagttcacttgttttgaacttctcttttctagaataagcatttatacaaaaaatttactctgggtctgcttaactttatcccatacatttttatatagtatatttttatttgtattcagttcaatgtatttaaaagtgtttcttatgatttcttcattgagctaaagggcattttaaggtgtatttaaatcttccaatagtgtagactttcctgggtagcttgtttttacccatttcaactcattttcattatggtcagaaagcttactttccatgattacagtgttttgaaacttcttgagagatattttgtggtctatagcctattgataaatgtttcatgtgtagcataatagaacatatattctattgtcttggtcaatatcgattaggtcaagctgttgtcaaaattattttatcttaattttctttagttattctgtcagcaatacagcattatgtcttcataattacttgacattttatcattatgaaatagctgtctgttgtaatattgctcgtttggaggtctactttttcttata

SEQ ID NO: 696577 - DNA, 3074 bp, Homo sapiens
ttactgaattggaaaacatacaggtgttttttgcctggtcacttgtggttttacaacactccccccgcttccgcaccactgccccaggtgattttgttgccagccaaagtgtgagaactactggcagctgctggcagacagcagcaaaggcccaaatcctctgtgtgatttcaatacccctatctggttttcagccatatttccttctccttctcaaagctgagcccactcctcctccctcaccacctgtaggctatgctttccagcctgtgtccaggattagtcctgatgtaaggcacgtggggtttaaggatctctctcttcagtcttatttccgcaccatcgctgacacatatattccagttgtaatcatggggctacctccttttctttccagtcccatgctcattttctctatcacattctaccttgtaataacctaaatcttctggtgggcaagcttcttcctcaatcaaatttgtgtttatgattgtgttggggattggcttagtaatccaggtactgctactgccttgaaagcggagactgcatccttctgtctggatatcttgagtttctggattgtaaaccttattagggcccatttttcctagaattggagcctctactttgttcttgctactttagttcacccagaaagcacgatctctgcctgaatttcaaagtgttggctagcttaaatatccttttgtgagactttcgtcttcctgcggggtgattttttcatcttacataccattgctaatctttttgtcttgaatgtaattgaaatagttttaatctgtgttaccagcaacaagaaccccttttatgagatgaagaggccaggtcagtctcataacatgtgtccccctccgtgtgttgaatttatgtcagagccaggttctttcctatttgacgtctctcaccaaattccagtgtttatgtcctaggaggtgcccaataaattctagagttgatacaagctgcaattttagagaaattaaattagcaagtaaaattagattatatacaacctaatcaactttttttttctgaggatgaccaagatttgggcttcagtgacaatagttgtcccctaaatatttatactcaaaatctaggatcaccagtacaatgttgaatagaggtgatgaacacacacatccctttcttgtcctaatctatgtggtttaaacatttacgctttcaccattaaatatagtattgtttatatgttttgttgtggatgctttccatcacgtcgagaaaatttctttatctagcttgctgagagttttttttaaatcagcaatagatatatctccaaagaaaatatccacatgaccaacagatacatgaaaaaaatgctctgcatcactaatcagggaaatgcaaatcaaaaccacaaacagatattgcctcaagccctttagaatggtcttattaaaagaaaaagatatcgagtgttaacaatggggagaaattggaacacttctacagtgtttctgggaaagtaaaactgtgcagcctctatggaaaacagtacggtggttcctcaaaaaaattaagaaagtagaactaccatatgatctagtagtctcacttcaggttatttatctgaaagaatggagattgggatgattctcaggctcattgcagcattatttacactaattaaaatgtggaaataaggttaatgtctattggcagatgaaaagataaagaaaatgtggtatattcatacaacggaatattattcagctttaaaacaagaaagcccgtcaatatgcaacatggatgaacctagaggacattaatgctaagtaaagtaaatcagtcacagaaggacaaactgtatgattccacttgtataaagtatctaagatagccaaattcattagaatcacagattagaatgatgatagctctttaaattgaagtcaattttgcattcctaggttttgtaattttggtatcaggattctgactcawaaaacaagtttggaatttcccccttctttatttctgaaataatttaaaaattttattttttttaaacgtttgaaagaattcaccagtgaaattctttagatctggggtttgcttatttttttatttatttaattttatgtttttatgtgcaggtattttacaattaatttaattactttaataaatgtcaattacttcatatgttccattaaatcttgtgaatttttttataagtttttttcaaggaagtcaccctttcatccaagtaatgaaaatttgtatataatgtttcacaatattccattatcttgttaatgtctcttgtgtttacaactgtacaatctcattaatccctgatatgtataatttgcgttttctttctttctcacagaactaacttttggccatgttgattttctcctgtttctgttttctgtctcattgatttctaatttctgttttatttcctttcctctacttgttttggacttaatttgctctcttgttttagattttctttttaaggtagaaaattagttcacttgttttgaacttctcttttctagaataagcatttatacaaaaaatttactctgggtctgcttaactttatcccatacatttttatatagtatatttttatttgtattcagttcaatgtatttaaaagtgtttcttatgatttcttcattgagctaaagggcattttaaggtgtatttaaatcttccaatagtgtagactttcctgggtagcttgtttttacccatttcaactcattttcattatggtcagaaagcttactttccatgattacagtgttttgaaacttcttgagagatattttgtggtctatagcctattgataaatgtttcatgtgtagcataatagaacatatattctattgtcttggtcaatatcgattaggtcaagctgttgtcaaaattattttatcttaattttctttagttattctgtcagcaatacagcattatgtcttcataattacttgacattttatcattatgaaatagctgtctgttgtaatattgctcgtttggaggtctactttttcttata

SEQ ID NO: 696578 - DNA, 3074 bp, Homo sapiens
ttactgaattggaaaacatacaggtgttttttgcctggtcacttgtggttttacaacactccccccgcttccgcaccactgccccaggtgattttgttgccagccaaagtgtgagaactactggcagctgctggcagacagcagcaaaggcccaaatcctctgtgtgatttcaatacccctatctggttttcagccatatttccttctccttctcaaagctgagcccactcctcctccctcaccacctgtaggctatgctttccagcctgtgtccaggattagtcctgatgtaaggcacgtggggtttaaggatctctctcttcagtcttatttccgcaccatcgctgacacatatattccagttgtaatcatggggctacctccttttctttccagtcccatgctcattttctctatcacattctaccttgtaataacctaaatcttctggtgggcaagcttcttcctcaatcaaatttgtgtttatgattgtgttggggattggcttagtaatccaggtactgctactgccttgaaagcggagactgcatccttctgtctggatatcttgagtttctggattgtaaaccttattagggcccatttttcctagaattggagcctctactttgttcttgctactttagttcacccagaaagcacgatctctgcctgaatttcaaagtgttggctagcttaaatatccttttgtgagactttcgtcttcctgcggggtgattttttcatcttacataccattgctaatctttttgtcttgaatgtaattgaaatagttttaatctgtgttaccagcaacaagaaccccttttatgagatgaagaggccaggtcagtctcataacatgtgtccccctccgtgtgttgaatttatgtcagagccaggttctttcctatttgacgtctctcaccaaattccagtgtttatgtcctaggaggtgcccaataaattctagagttgatacaagctgcaattttagagaaattaaattagcaagtaaaattagattatatacaacctaatcaactttttttttctgaggatgaccaagatttgggcttcagtgacaatagttgtcccctaaatatttatactcaaaatctaggatcaccagtacaatgttgaatagaggtgatgaacacacacatccctttcttgtcctaatctatgtggtttaaacatttacgctttcaccattaaatatagtattgtttatatgttttgttgtggatgctttccatcacgtcgagaaaatttctttatctagcttgctgagagttttttttaaatcagcaatagatatatctccaaagaaaatatccacatgaccaacagatacatgaaaaaaatgctctgcatcactaatcagggaaatgcaaatcaaaaccacaaacagatattgcctcaagccctttagaatggtcttattaaaagaaaaagatatcgagtgttaacaatggggagaaattggaacacttctacagtgtttctgggaaagtaaaactgtgcagcctctatggaaaacagtacggtggttcctcaaaaaaattaagaaagtagaactaccatatgatctagtagtctcacttcaggttatttatctgaaagaatggagattgggatgattctcaggctcattgcagcattatttacactaattaaaatgtggaaataaggttaatgtctattggcagatgaaaagataaagaaaatgtggtatattcatacaacggaatattattcagctttaaaacaagaaagcccgtcaatatgcaacatggatgaacctagaggacattaatgctaagtaaagtaaatcagtcacagaaggacaaactgtatgattccacttgtataaagtatctaagatagccaaattcattagaatcacagattagaatgatgatagctctttaaattgaagtcaattttgcattcctaggttttgtaattttggtatcaggattctgactcataaaacaagtttggaatttcccccttctttatttctgaaataatttaaaaattttattttttttaaacgtttgaaagaattcaccagtgaaattctttagatctggggtttgcttatttttttatttatttaattttatgtttttatgtgcaggtattttacaattaatttaattactttaataaatgtcaattacttcatatgttccattaaatcttgtgaatttttttataagtttttttcaaggaagtcaccctttcatccaagtaatgaaaatttgtatataatgtttcacaatattccattatcttgttaatgtctcttgtgtytacaactgtacaatctcattaatccctgatatgtataatttgcgttttctttctttctcacagaactaacttttggccatgttgattttctcctgtttctgttttctgtctcattgatttctaatttctgttttatttcctttcctctacttgttttggacttaatttgctctcttgttttagattttctttttaaggtagaaaattagttcacttgttttgaacttctcttttctagaataagcatttatacaaaaaatttactctgggtctgcttaactttatcccatacatttttatatagtatatttttatttgtattcagttcaatgtatttaaaagtgtttcttatgatttcttcattgagctaaagggcattttaaggtgtatttaaatcttccaatagtgtagactttcctgggtagcttgtttttacccatttcaactcattttcattatggtcagaaagcttactttccatgattacagtgttttgaaacttcttgagagatattttgtggtctatagcctattgataaatgtttcatgtgtagcataatagaacatatattctattgtcttggtcaatatcgattaggtcaagctgttgtcaaaattattttatcttaattttctttagttattctgtcagcaatacagcattatgtcttcataattacttgacattttatcattatgaaatagctgtctgttgtaatattgctcgtttggaggtctactttttcttata

SEQ ID NO: 696579 - DNA, 778 bp, Homo sapiens
agctgggactacaggtgccmgccaccacacccagctaattgttttttaagattaaggatgaaataaaagctgctcccctatattacattcataaatcagaattattaaagcaagctatttatttattagaaacacatactccaaatttagcatctaagacatgacagtctttcaagagacatcaatttactttttagggtctatagctatatttgtattcatgttattggtgtccataatatttcattagatgttctgggtaaattgataaatgaaaataatatatgtgataaggagaacaacctaggcctcctggagggccccttacaactcagctggtgttagcagaaatgcctgggagtaacagtgagaaacaacctttcaaaagtgttgagcaatttttcaggcagaggaatatgtataccaatccaggcagcaagataagtggaggtcagttaaaagatcagtgtgtgattacatttcatttttaggtttctactgagaggaaatatgacactcagttattattttctccacatatctctggttattttgtcacaaccttttatgtaagctactactaaacactgggttatccaagatctatgggtcgtattcaatatttgcttttccctcaactactaacacatttgattccctttgtaactttctcccctatttctcctttcaacctgttttctccaaacacactgagtaaataagcctcctatatactctcataacctgttttatctaaagagatttcttttttctacta

SEQ ID NO: 696580 - DNA, 778 bp, Homo sapiens
agctgggactacaggtgcccgccaccacacccagctaattgttttttaagattaaggatgaaataaaagctgctcccctatattacattcataaatcagaattattaaagcaagctatttatttattagaaacacatactccaaatttagcatctaagacatgacagtctttcaagagacatcaatttactttttagggtctatagctatatttgtattcatgttattggtgtccataatatttcattagatgttctgggtaaattgataaatgaaaataatatatgtgataaggagaacaacctaggcctcctggagggccccttacaactcagctggtgttagcagaaatgcctgggagtaacagtgagaaacaacctttcaaaagtgttgagcaatttttcaggcagaggaatatgtataccaatccaggcagcaagataagtggaggtcagttaaaagatcagtgtgtgattacatttcatttttaggtttctactgagaggaaatatgacactcagttattattttctccacatatctctggttattttgtcacaaccttttatgtaagctactacyaaacactgggttatccaagatctatgggtcgtattcaatatttgcttttccctcaactactaacacatttgattccctttgtaactttctcccctatttctcctttcaacctgttttctccaaacacactgagtaaataagcctcctatatactctcataacctgttttatctaaagagatttcttttttctacta

SEQ ID NO: 696581 - DNA, 1430 bp, Homo sapiens
tacaggtgtaagccactgaccctgcccaaaaacattttaaccaatagcaaagcacattatttcattacattttttcaaaagttgccagtaatttcaattaaaaatatatataacatgtttaatgcaatacaaatgcttttcaatgtacaatggggttaagtcttgataagctgattataaattgaaaatacagtaagttaaaaatgtatttaatacctaacttactgaatatcacagcttagcctggcatactttaatgtgctcagaacacttacatcagctgacaattgggcaaaatcattgaatacaaaacccactttataataaagtwttggatattttatgtaatttgttgaatattgtactgaaagtgaaaagcagaatggttatattctattcaaagctatcacttttgcttcatcataaagtaaaaataatcataaattgaaccattataatttgttgaccatctgtgtatatgtatgtgtgtgtgtacctatataaacatgtatgtttatatatatatttgtgtgtgtatatatcctcggtgtgtgggtatgtgtgtttgagagtgtgtgtgtgtgtgtgtgtgtatgaaattgtaggaaagtaaaatttcttatcttatagatatagcatgttaacatgttggtacctatcttcctgagatgtaaaattttacatggatagatgtgtacatttaccgttgtacacaaagagaaacatattctgtaggctctttgtttttctgtaatttaattcaacactatctggtttatatggatgattacatatataatgctaggatgaaggttcttctctataactttgaaacttccttgattatcaaccctcggtgtattcttagaataggattttattttagaattaagatccttgtttcaggactctagactgttaacacacagaaccaacaattattcagaatggttgggttagttcacattcccacagatgagacatcaaatgtccaggctgcacagcctcattaacactagattttctggacattttatgtagtatttcatctgatataaaaagtagaattctaatttaattatggttgttaatttatttttatctttttagtcattatgaaaatgtttaactatatgaaaagctaggaaagagttttattttttaaggtagtacttcagaaatatttgtgatacttaatttttaaaaattaactctaaaaaatcttgaaatgtctgtttaatgaaataggacataaatactggtcacattagtgaaaaatatttgtttaaaattaaaatatctgcagcaatcctgtagatattaataatttttaaagcatgacatctttaaaatataaatgttctaaacttataatcagttaaatatgtctctattaatacatatagatacatatatctaaataaatttga

SEQ ID NO: 696582 - DNA, 1430 bp, Homo sapiens
tacaggtgtaagccactgaccctgcccaaaaacattttaaccaatagcaaagcacattatttcattacattttttcaaaagttgccagtaatttcaattaaaaatatatataacatgtttaatgcaatacaaatgcttttcaatgtacaatggggttaagtcttgataagctgattataaattgaaaatacagtaagttaaaaatgtatttaatacctaacttactgaatatcacagcttagcctggcatactttaatgtgctcagaacacttacatcagctgacaattgggcaaaatcattgaatacaaaacccactttataataaagtattggatattttatgtaatttgttgaatattgtactgaaagtgaaaagcagaatggttatattctattcaaagctatcacttttgcttcatcataaagtaaawataatcataaattgaaccattataatttgttgaccatctgtgtatatgtatgtgtgtgtgtacctatataaacatgtatgtttatatatatatttgtgtgtgtatatatcctcggtgtgtgggtatgtgtgtttgagagtgtgtgtgtgtgtgtgtgtgtatgaaattgtaggaaagtaaaatttcttatcttatagatatagcatgttaacatgttggtacctatcttcctgagatgtaaaattttacatggatagatgtgtacatttaccgttgtacacaaagagaaacatattctgtaggctctttgtttttctgtaatttaattcaacactatctggtttatatggatgattacatatataatgctaggatgaaggttcttctctataactttgaaacttccttgattatcaaccctcggtgtattcttagaataggattttattttagaattaagatccttgtttcaggactctagactgttaacacacagaaccaacaattattcagaatggttgggttagttcacattcccacagatgagacatcaaatgtccaggctgcacagcctcattaacactagattttctggacattttatgtagtatttcatctgatataaaaagtagaattctaatttaattatggttgttaatttatttttatctttttagtcattatgaaaatgtttaactatatgaaaagctaggaaagagttttattttttaaggtagtacttcagaaatatttgtgatacttaatttttaaaaattaactctaaaaaatcttgaaatgtctgtttaatgaaataggacataaatactggtcacattagtgaaaaatatttgtttaaaattaaaatatctgcagcaatcctgtagatattaataatttttaaagcatgacatctttaaaatataaatgttctaaacttataatcagttaaatatgtctctattaatacatatagatacatatatctaaataaatttga

SEQ ID NO: 696583 - DNA, 1430 bp, Homo sapiens
tacaggtgtaagccactgaccctgcccaaaaacattttaaccaatagcaaagcacattatttcattacattttttcaaaagttgccagtaatttcaattaaaaatatatataacatgtttaatgcaatacaaatgcttttcaatgtacaatggggttaagtcttgataagctgattataaattgaaaatacagtaagttaaaaatgtatttaatacctaacttactgaatatcacagcttagcctggcatactttaatgtgctcagaacacttacatcagctgacaattgggcaaaatcattgaatacaaaacccactttataataaagtattggatattttatgtaatttgttgaatattgtactgaaagtgaaaagcagaatggttatattctattcaaagctatcacttttgcttcatcataaagtaaaaataatcataaattgaaccattataatttgttgaccatctgtgtatatgtatgtgtgtgtgtacctatataaacatgtatgtttatatatatatttgtgtgtgtatatatcctcggtgtgtgggtatgtrtgtttgagagtgtgtgtgtgtgtgtgtgtgtatgaaattgtaggaaagtaaaatttcttatcttatagatatagcatgttaacatgttggtacctatcttcctgagatgtaaaattttacatggatagatgtgtacatttaccgttgtacacaaagagaaacatattctgtaggctctttgtttttctgtaatttaattcaacactatctggtttatatggatgattacatatataatgctaggatgaaggttcttctctataactttgaaacttccttgattatcaaccctcggtgtattcttagaataggattttattttagaattaagatccttgtttcaggactctagactgttaacacacagaaccaacaattattcagaatggttgggttagttcacattcccacagatgagacatcaaatgtccaggctgcacagcctcattaacactagattttctggacattttatgtagtatttcatctgatataaaaagtagaattctaatttaattatggttgttaatttatttttatctttttagtcattatgaaaatgtttaactatatgaaaagctaggaaagagttttattttttaaggtagtacttcagaaatatttgtgatacttaatttttaaaaattaactctaaaaaatcttgaaatgtctgtttaatgaaataggacataaatactggtcacattagtgaaaaatatttgtttaaaattaaaatatctgcagcaatcctgtagatattaataatttttaaagcatgacatctttaaaatataaatgttctaaacttataatcagttaaatatgtctctattaatacatatagatacatatatctaaataaatttga

SEQ ID NO: 696584 - DNA, 1050 bp, Homo sapiens
tacaataaaatttataaaccactctttttctctcaaacatattttccacatcattaaaaatattttgtagacatcattttaattgttgcatataagtccatcatctagatgtgctataattcacatgaccattcctcatttaggttgctttaaattcgtatcatgataaacaatattctagggcataactttatgtacagttctttggtcacatataaaattcttttttccttgtgatagggtcctagaaattgcaccactgggtcaaagattataaatatttaaagacttttacacttttttttagtttggaaatgcataactttaaaaatagtaattgaacatatagtatttgaatatgttatatctattctttgaaaatttacaatatatcttacatttttagatggcataaaatacaccatctttgtagctttaaatatacaaatatatcaattatattttattatcatgttgcgctcttttgttaacacttacattcctctccaaatcctacttcctctttactggggtgttaagtagcccacyctggtgggttcccagaggccaggatggggtggggtcgtctactccaggatgtacaaagtaggaggcaattaagtggtccactttagacaaagttcatgggagcagagagtgaggctgagagtctttcttccaaggagatatagaatgagcctgaagggcctaaggttaggctggacttaatgaggctcaaacagctgggtgtcaattggaaagtggggagatttgggttgtcacagtaattaggtgggcattgagtagacaggggttacagatgctagaaacattgtgttgcttgagacagtcctctaaaataactttccagcccccagtgctatttattatctctcccattgatacacactgggctagttttgtgctgacacatttagattccaagagctaccctgtattgtattcccttaacaattaaagaccatagaaatgtagacattcagtgaatgaataacttcaaagtccctaaatgtgaagctttaactgttg

SEQ ID NO: 696585 - DNA, 639 bp, Homo sapiens
aattcagacagaaaactccttctgccagtggcaaatgaacccaagttttatggggcctgaaacctgtgcaatttttatgatcatctttagaaaaacatggtcaaatactgctaataaaattagggggtttgaagcttaaatttaattagcttcaaggtaaatctgattttgcctccactttaagtaatgtaaaaacaacctaactctattcattaataaaattttggtagaaatttcacttcagaacttgtattagtactgttcttttaaaataagatactgtgttttttttgtttttttttktttgtttgttttttttttgagacgaagtctcactctgtcacccgggctggagtgcagtggcatgatatcggctcactgcaacttctgtctcccaggttcaagcaattctcctgcctcagcctcctgagtagctgggattacaagcgcgcaccaccatgcccaggtaattttcgtatttttagtagagacggggttttaccatgctggccaggctggtcttgaactcctggcccatgatctgcctgcctcggcctcccaaagtgttgggtttacaggcgtgagccacagcgccaggcatgatactgtatttttttttaataaacagagaatcagtta

SEQ ID NO: 696586 - DNA, 639 bp, Homo sapiens
aattcagacagaaaactccttctgccagtggcaaatgaacccaagttttatggggcctgaaacctgtgcaatttttatgatcatctttagaaaaacatggtcaaatactgctaataaaattagggggtttgaagcttaaatttaattagcttcaaggtaaatctgattttgcctccactttaagtaatgtaaaaacaacctaactctattcattaataaaattttggtagaaatttcacttcagaacttgtattagtactgttcttttaaaataagatactgtgttttttttgtttttttttttttgtttgtttkttttttgagacgaagtctcactctgtcacccgggctggagtgcagtggcatgatatcggctcactgcaacttctgtctcccaggttcaagcaattctcctgcctcagcctcctgagtagctgggattacaagcgcgcaccaccatgcccaggtaattttcgtatttttagtagagacggggttttaccatgctggccaggctggtcttgaactcctggcccatgatctgcctgcctcggcctcccaaagtgttgggtttacaggcgtgagccacagcgccaggcatgatactgtatttttttttaataaacagagaatcagtta

SEQ ID NO: 696587 - DNA, 639 bp, Homo sapiens
aattcagacagaaaactccttctgccagtggcaaatgaacccaagttttatggggcctgaaacctgtgcaatttttatgatcatctttagaaaaacatggtcaaatactgctaataaaattagggggtttgaagcttaaatttaattagcttcaaggtaaatctgattttgcctccactttaagtaatgtaaaaacaacctaactctattcattaataaaattttggtagaaatttcacttcagaacttgtattagtactgttcttttaaaataagatactgtgttttttttgtttttttttttttgtttgttttttttttgagacsaagtctcactctgtcacccgggctggagtgcagtggcatgatatcggctcactgcaacttctgtctcccaggttcaagcaattctcctgcctcagcctcctgagtagctgggattacaagcgcgcaccaccatgcccaggtaattttcgtatttttagtagagacggggttttaccatgctggccaggctggtcttgaactcctggcccatgatctgcctgcctcggcctcccaaagtgttgggtttacaggcgtgagccacagcgccaggcatgatactgtatttttttttaataaacagagaatcagtta

SEQ ID NO: 696588 - DNA, 1530 bp, Homo sapiens
cgccgatagtcccagctactcgggaggctaaggcaggagaattgcttgaacccaggaggcagaggttgcagtgagctgagatcgtgccactgcactccagcctggcgaacgagtgagactccacatcaaaaaaaataaaataaaataaaataaaaaaagacatttatgtcctatgaccataatctggcagggtaagagaaacagagttgttttagacaggatgcgatagacatctttagatatttgagcagctttgggggaaggatcaaattagcttatatgtgcctgatcctagtttaactggaatcaataattggaagctacaaggagacagttcttaactcagcaataaggatgaactttctttcagagctgtttggatgatacttcttcaaaccggatgtatttaatcagtctgagtaactctttgcttgatcctattgtaaagagaaatctaagccacatcagggagagactagatgacctcagaggctcttctcagctttagagtttatgacttggcttcaaggaacccagtgagacccattaatgtaggtccaggtgtatttatctctaaggggatattctgtattcagttgttaaatattatatgatttaaaaagaaaggtataacagatcatggtataatttttctacaaaagtgaacttgggtctagattaaaaataaatgtgtatacacaaggtgaacaagtactatcacaagaataggaccacaaccaacagaaatattttcttaaatttgtggtattagtgtttcaaaaggctttaaatccaaactaaattagataaagattaatttttgcattaattccaaggaatacttgccagaaccatggtttatatgtttgggctacaccaaacatatagcgtccaattagcttcagttggagatggatatagcagtgctaacaaccctgagcttggtcatttcctgtccataaaagaccaaattcagttcaacaagtatttactgagtctatttaatttgtcatgtcctagaggcacaagggagaatgagacaaygcaaccactcctcaaggaactaatgtgctccaagttttggctagaaatattaatactcctgtattggtccattctcctgctgctaataaagacatacatgaacctgggcaatttataaagaaaaagaggtttaatggtctcacagtttcacaaggctgggaaggcctcatgatcatggtggaagccaaaggaggaacaaaggcacatcttatatgatggcaggcaagagaagtcagaagcgaagtgggggggaaagccccttataaaaccatcagatctcatgagaactaattcaccaacatgagaacaggatgggggaaaactgcccccatgattgaattatctctacctggtccatcccacgacacttgggaattatgggaactacaattcaaggtaagatttgggtggggacacagacaaaccacatcactccctgaacacttaatttgagccatttaacacttctaaacaccttataaagta

SEQ ID NO: 696589 - DNA, 1530 bp, Homo sapiens
cgccgatagtcccagctactcgggaggctaaggcaggagaattgcttgaacccaggaggcagaggttgcagtgagctgagatcgtgccactgcactccagcctggcgaacgagtgagactccacatcaaaaaaaataaaataaaataaaataaaaaaagacatttatgtcctatgaccataatctggcagggtaagagaaacagagttgttttagacaggatgcgatagacatctttagatatttgagcagctttgggggaaggatcaaattagcttatatgtgcctgatcctagtttaactggaatcaataattggaagctacaaggagacagttcttaactcagcaataaggatgaactttctttcagagctgtttggatgatacttcttcaaaccggatgtatttaatcagtctgagtaactctttgcttgatcctattgtaaagagaaatctaagccacatcagggagagactagatgacctcagaggctcttctcagctttagagtttatgacttggcttcaaggaacccagtgagacccattaatgtaggtccaggtgtatttatctctaaggggatattctgtattcagttgttaaatattatatgatttaaaaagaaaggtataacagatcatggtataatttttctacaaaagtgaacttgggtctagattaaaaataaatgtgtatacacaaggtgaacaagtactatcacaagaataggaccacaaccaacagaaatattttcttaaatttgtggtattagtgtttcaaaaggctttaaatccaaactaaattagataaagattaatttttgcattaattccaaggaatacttgccagaaccatggtttatatgtttgggctacaccaaacatatagcgtccaattagcttcagttggagatggatatagcagtgctaacaaccctgagcttggtcatttcctgtccataaaagaccaaattcagttcaacaagtatttactgagtctatttaatttgtcatgtcctagaggcacaagggagaatgagacaatgcaaccactcctcaaggaactaatgtgctccaagttttggctagaaatattaatactcctgtattggtccattctcctgctgctaataaagacatacatgaacctgggcaatttataaagaaaaagaggtttaatggtctcacagtttcacaaggctgggaaggcctcatgatcatggtggaagccaaaggaggaacaaaggcacatcttatatgatggcaggcaagagaagtcagaagcgaagtgggggggaaagccccttataaaaccatcagatctcatgagaactaattcaccaacatgagaacaggatgggggaaaactgcccccatgattgaattmtctctacctggtccatcccacgacacttgggaattatgggaactacaattcaaggtaagatttgggtggggacacagacaaaccacatcactccctgaacacttaatttgagccatttaacacttctaaacaccttataaagta

SEQ ID NO: 696590 - DNA, 1469 bp, Homo sapiens
acttttatcatgttaaaggagtattcacctattcgtattttactatgatttctttaaagtcaggaataaacattgacttttatcaaatgcctcttctatacctgtcaatgtgattatatatttttatcttttgacctatatatacggtgagttacattaataaatatcctaatattaaacctttcttaaagtctcagaataaacccttttggctttgtgtactcttttagtttattgttggattctatttgccttgtcatttaggatttttgcatagatattcacatgtgagagaagtctataattttcttttcgtgctatttttatcaaaatgtatatgctggttttataaaagtcttttcatgctcygtgctctggtgcagttataaaagcatcataattatcttaatttcttgaacatttgaaagaattcactcaggaaaacatcagagctcagcacttcttaaaggcatagctttcagaaaacctgaagggatcaaatacataaataaagaaagctgataccatgttgacacatatctgtgttggctcagatctccacagtttgggaagagattgacctaggtaagtgaaaaaggttattcatagaaaggacacagagtaaagtcatgacatatggcagagatcggcaatatcatccaggacagctggaggtgcaagcttctcttctggactccaaaaatcctgaccagcggatgtacaactgcagatggccctagaagcctaactccctcctcccaggcagtcctcatgtggagtgtgttagagatcacctcacctgtgctggggcacctcattcatcatagttatacaggcaacaatacaacctcaaggaccaacgcactatcttcctcctccccaggctctcccagcgtgcttcaagttcacttctcactctgtgctgagaaccagaataaagattagttttctagaagcctctgggtctcaagccagcaacctgtagaacagtctggggtgtgtgtacatctacctgtcaaagataaagagagtcgtttccaagaaaatacactatattggaaaatacactatatgaacaaagtaatcattgcatacttgccagatcatgatcttcttgaagctggttccaggtctcatataattgcaaaagctccatagcggacctgataacctaaaaataattgtctaatatcctttagacttttgtccacttttccaaatctcacataaaatcctcaacaatgatgcactttagcagtaataacaacattctcagatgacatctatacccacacttgccctgtgctctacgatctaataaagttttcttcttcctgaacttgaaggagactagaagttgatgtgtggtaggaaatatacttcatggtaaaggatataggatgaattaaggaagggagacaagaaaacagaaagcaagtctaatgaaaagttaatggatttgcaaggtt

SEQ ID NO: 696591 - DNA, 1469 bp, Homo sapiens
acttttatcatgttaaaggagtattcacctattcgtattttactatgatttctttaaagtcaggaataaacattgacttttatcaaatgcctcttctatacctgtcaatgtgattatatatttttatcttttgacctatatatacggtgagttacattaataaatatcctaatattaaacctttcttaaagtctcagaataaacccttttggctttgtgtactcttttagtttattgttggattctatttgccttgtcatttaggatttttgcatagatattcacatgtgagagaagtctataattttcttttcgtgctatttttatcaaaatgtatatgctggttttataaaagtcttttcatgctctgtgctctggtgcagttataaaagcatcataattatcttaatttcttgaacatttgaaagaattcactcaggaaaacatcagagctcagcacttcttaaaggcatagctttcagaaaacctgaagggatcaaatacataaataaagaaagctgataccatgttgacacatatctgtgttggctcagatctccacagtttgggaagagattgacctaggtaagtgaaaaaggttattcatagaaaggacacagagtaaagtcatgacatatggcagagatcggcaatatcatccaggacagctggaggtgcaagcttctcttctggactccaaaaatcctgaccagcggatgtacaactgcagatggccctagaagcctaactccctcctcccaggcagtcctcatgtggagtgtgttagagatcacctcacctgtgctggggcacctcattcatcatagttatacaggcaacaatacaacctcaaggaccaacgcactatcttcctcctccccaggctctcccagcgtgcttcaagttcacttctcactctgtgctgagaaccagaataaagattagttttctagaagcctctgggtctcaagccagcaacctgtagaacagtctggggtgtgtgtacatctacctgtcaaagataaagagagtcgtttccaagaaaatacactatattggaaaatacactatatgaacaaagtaatcattgcatacttgccagatcatgatcttcttgaagctggttccaggtctcatataattgcaaaagctccatagcggacctgataacctaaaaataattgtctaatatcctttagacttttgtccacttttccaaatctcacataaaatcctcaacaatgatgcactttagcagtaataacaacattctcagatgacatctatacccacacttgccctgtgctctaygatctaataaagttttcttcttcctgaacttgaaggagactagaagttgatgtgtggtaggaaatatacttcatggtaaaggatataggatgaattaaggaagggagacaagaaaacagaaagcaagtctaatgaaaagttaatggatttgcaaggtt

SEQ ID NO: 696592 - DNA, 631 bp, Homo sapiens
ggctttgagagccacaggcatccactctctaytcactgcaacagatttgccactctgcacccagagagaactttcaagaacaaatctattcaggccacttcagattcatatcttccaggacgctgaggataaaattcaaaatcctaaatttagcttttgtccacttttatagtcaagtctagtgtatctctctgcctcatctctcataaccctgtcccttgcaactgatgaatggtggaagattgaaggcagagtgaaggaatgaaatggctcgagagatgatctctcatctttttctttctgtgtatcagactcacttccgtgagcctctgagttcctgctcttctttaactttcttgcgtatggctctgtcttatcatggaactcacctttattcctgacatcatgtctcagtagtatatacgcacacatacacatacatatatagtatttttgttttgttttgttttgttttgtttttgagatggagtcttgctctgttacccaggctggagtgcagtggcccgatcttgactcattgcaagctccacctcccgggttcatgccattctcccgcctcagcctcccgagtagctgggactatgggcacctgccaccacgcctggataat

SEQ ID NO: 696593 - DNA, 631 bp, Homo sapiens
ggctttgagagccacaggcatccactctctattcactgcaacagatttgccactctgcacccagagagaactttcaagaacaaatctattcaggccacttcagattcatatcttccaggacgctgaggataaaattcaaaatcctaaatttagcttttgtccacttttatagtcaagtctagtgtatctctctgcctcatctctcataaccctgtcccttgcaactgatgaatggtggaagattgaaggcagagtgaaggaatgaaatggctcgagagatgatctctcatctttttctttctgtgtatcagactcacttccgtgagcctctgagttcctgctcttctttaactttcttgcrtatggctctgtcttatcatggaactcacctttattcctgacatcatgtctcagtagtatatacgcacacatacacatacatatatagtatttttgttttgttttgttttgttttgtttttgagatggagtcttgctctgttacccaggctggagtgcagtggcccgatcttgactcattgcaagctccacctcccgggttcatgccattctcccgcctcagcctcccgagtagctgggactatgggcacctgccaccacgcctggataat

SEQ ID NO: 696594 - DNA, 631 bp, Homo sapiens
ggctttgagagccacaggcatccactctctattcactgcaacagatttgccactctgcacccagagagaactttcaagaacaaatctattcaggccacttcagattcatatcttccaggacgctgaggataaaattcaaaatcctaaatttagcttttgtccacttttatagtcaagtctagtgtatctctctgcctcatctctcataaccctgtcccttgcaactgatgaatggtggaagattgaaggcagagtgaaggaatgaaatggctcgagagatgatctctcatctttttctttctgtgtatcagactcacttccgtgagcctctgagttcctgctcttctttaactttcttgcgtatggctctgtcttatcatggaactcacctttattcctgacatcatgtctcagtartatatacgcacacatacacatacatatatagtatttttgttttgttttgttttgttttgtttttgagatggagtcttgctctgttacccaggctggagtgcagtggcccgatcttgactcattgcaagctccacctcccgggttcatgccattctcccgcctcagcctcccgagtagctgggactatgggcacctgccaccacgcctggataat

SEQ ID NO: 696595 - DNA, 631 bp, Homo sapiens
ggctttgagagccacaggcatccactctctattcactgcaacagatttgccactctgcacccagagagaactttcaagaacaaatctattcaggccacttcagattcatatcttccaggacgctgaggataaaattcaaaatcctaaatttagcttttgtccacttttatagtcaagtctagtgtatctctctgcctcatctctcataaccctgtcccttgcaactgatgaatggtggaagattgaaggcagagtgaaggaatgaaatggctcgagagatgatctctcatctttttctttctgtgtatcagactcacttccgtgagcctctgagttcctgctcttctttaactttcttgcgtatggctctgtcttatcatggaactcacctttattcctgacatcatgtctcagtagtatatacgcacacatacacatacatatatagtwtttttgttttgttttgttttgttttgtttttgagatggagtcttgctctgttacccaggctggagtgcagtggcccgatcttgactcattgcaagctccacctcccgggttcatgccattctcccgcctcagcctcccgagtagctgggactatgggcacctgccaccacgcctggataat

SEQ ID NO: 696596 - DNA, 631 bp, Homo sapiens
ggctttgagagccacaggcatccactctctattcactgcaacagatttgccactctgcacccagagagaactttcaagaacaaatctattcaggccacttcagattcatatcttccaggacgctgaggataaaattcaaaatcctaaatttagcttttgtccacttttatagtcaagtctagtgtatctctctgcctcatctctcataaccctgtcccttgcaactgatgaatggtggaagattgaaggcagagtgaaggaatgaaatggctcgagagatgatctctcatctttttctttctgtgtatcagactcacttccgtgagcctctgagttcctgctcttctttaactttcttgcgtatggctctgtcttatcatggaactcacctttattcctgacatcatgtctcagtagtatatacgcacacatacacatacatatatagtatttttgttttgttttgttttgttttgtttttgagatggagtcttgctctgttacccaggctggagtgcagtggcccgatctygactcattgcaagctccacctcccgggttcatgccattctcccgcctcagcctcccgagtagctgggactatgggcacctgccaccacgcctggataat

SEQ ID NO: 696597 - DNA, 631 bp, Homo sapiens
ggctttgagagccacaggcatccactctctattcactgcaacagatttgccactctgcacccagagagaactttcaagaacaaatctattcaggccacttcagattcatatcttccaggacgctgaggataaaattcaaaatcctaaatttagcttttgtccacttttatagtcaagtctagtgtatctctctgcctcatctctcataaccctgtcccttgcaactgatgaatggtggaagattgaaggcagagtgaaggaatgaaatggctcgagagatgatctctcatctttttctttctgtgtatcagactcacttccgtgagcctctgagttcctgctcttctttaactttcttgcgtatggctctgtcttatcatggaactcacctttattcctgacatcatgtctcagtagtatatacgcacacatacacatacatatatagtatttttgttttgttttgttttgttttgtttttgagatggagtcttgctctgttacccaggctggagtgcagtggcccgatcttractcattgcaagctccacctcccgggttcatgccattctcccgcctcagcctcccgagtagctgggactatgggcacctgccaccacgcctggataat

SEQ ID NO: 696598 - DNA, 1843 bp, Homo sapiens
cacattgttattctttgctcttggatgtattgttctggtttttggagggaaaataggtgtcctaaaccaagagctctgttatgtgtaaaagtttcttttaaaaggatgggggctggaagatcttctggggatataagacctatctttaggatgatggaaaatggaaacatgagagagattttcaagtagttggtgaacacatctgagttgagagctttgagaaagtgtcttgtgcccttcagcaaggtggttttaggggaaggtcttgtgatgaggaatttctcctgtctttctatctctacttttctgattcacagaatccctctcccagacatccacctgtctttaggtgggagtgcatgagcttgaaagcaatgagcatcaatcctctctttctggaagaccttagctaataacaagtctctaatatatagaagataaaactatttggtatgatgaagcagaaaatacctctacatatggacaaaaaaaaatggccaatctctccataaccaatgttgaaaattggagaaataataaacatttcttaccattctgcatttttatgagctctctctgagacagacctatccaggagaaatattcctcagagaatttatgagatgaaaggtcataaaaaatcctctatggtttctctttatcttgctatttgaaacacttgtaaacatttatgtggggttttcaggagacttaaacctctggttcaatttgaattcaaggtctttgaagatagtcatcagtttctgcttcctttaaaacttctaattacacaagcacagcctttcctgacatatggctattggtctgatttaaaacttgctcatttcagcttgtaccttcagtctcatcgcagcctgaattctaaatataacccacttttctttaagacatgaacccagtggagtgtgaattctacatagaatttcacacaacttgtaaatattcatactacatttactgccttggtcctaaatctcttaaaatatgaattttgaaatatacaattaagtcaataaagcagtttactcttaatgactgctacacttacgtggtcagagacatctatttttaaatctcttcttagtgacaaaaagtttccaatggattcatttcaacgaggatcaatacccaacttccagaagaagtaatactccatgtaagactgtctaaatatgctctgattttggatcccatattttccaccctgtaagctactttcacatgcaggctcagcccttggtttagttcctgactccagaggagtatataagaggcctccagtcttctggtcctccttctcttgttctgctttttagcttgtttgtttgtttgtattttgttttttctgtttcttctttgcattttacgctcttctatttttttcccagcttttttcctctttccccttcaccagcttttctgttacaaccaaagctttaacctaaatactcgccaggcaatgagcgttgccaagtttgtggcttcgaatcagatagaccccatgtttgagccttctctctgggaaaccgattgagaacataccagacattcacaatggtttcgaattaagtgaggtttgctgcaacctactatgaagtgaccttgcaccagcatcctaggttattcyctgggcctctacacatctctgttctgattctccgtgaaaacctcactgaccctcgatactggaaacatccatgcagagaggcagggagcctgacttcataccaccgaattcacattagtaacatctacttcctcagctatgcaaactattttccttttatacacttactttttgggactgagctactcttggtac

SEQ ID NO: 696599 - DNA, 1843 bp, Homo sapiens
cacattgttattctttgctcttggatgtattgttctggtttttggagggaaaataggtgtcctaaaccaagagctctgttatgtgtaaaagtttcttttaaaaggatgggggctggaagatcttctggggatataagacctatctttaggatgatggaaaatggaaacatgagagagattttcaagtagttggtgaacacatctgagttgagagctttgagaaagtgtcttgtgcccttcagcaaggtggttttaggggaaggtcttgtgatgaggaatttctcctgtctttctatctctacttttctgattcacagaatccctctcccagacatccacctgtctttaggtgggagtgcatgagcttgaaagcaatgagcatcaatcctctctttctggaagaccttagctaataacaagtctctaatatatagaagataaaactatttggtatgatgaagcagaaaatacctctacatatggacaaaaaaaaatggccaatctctccataaccaatgttgaaaattggagaaataataaacatttcttaccattctgcatttttatgagctctctctgagacagacctatccaggagaaatattcctcagagaatttatgagatgaaaggtcataaaaaatcctctatggtttctctttatcttgctatttgaaacacttgtaaacatttatgtggggttttcaggagacttaaacctctggttcaatttgaattcaaggtctttgaagatagtcatcagtttctgcttcctttaaaacttctaattacacaagcacagcctttcctgacatatggctattggtctgatttaaaacttgctcatttcagcttgtaccttcagtctcatcgcagcctgaattctaaatataacccacttttctttaagacatgaacccagtggagtgtgaattctacatagaatttcacacaacttgtaaatattcatactacatttactgccttggtcctaaatctcttaaaatatgaattttgaaatatacaattaagtcaataaagcagtttactcttaatgactgctacacttacgtggtcagagacatctatttttaaatctcttcttagtgacaaaaagtttccaatggattcatttcaacgaggatcaatacccaacttccagaagaagtaatactccatgtaagactgtctaaatatgctctgattttggatcccatattttccaccctgtaagctactttcacatgcaggctcagcccttggtttagttcctgactccagaggagtatataagaggcctccagtcttctggtcctccttctcttgttctgctttttagcttgtttgtttgtttgtattttgttttttctgtttcttctttgcattttacgctcttctatttttttcccagcttttttcctctttccccttcaccagcttttctgttacaaccaaagctttaacctaaatactcgccaggcaatgagcgttgccaagtttgtggcttcgaatcagatagaccccatgtttgagccttctctctgggaaaccgattgagaacataccagacattcacaatggtttcgaattaagtgaggtttgctgcaacctactatgaagtgaccttgcaccagcatcctaggttattctctgggcctctacacatctctgttctgattctccgtgaaaacctcactgaccctcgatactggaaacatccatgcagagaggcagggagcctgacttcataccaccgaattcacattagtaacatctacttcctcagctatgcaaactattttccttttatacayttactttttgggactgagctactcttggtac

SEQ ID NO: 696600 - DNA, 1395 bp, Homo sapiens
catcttacttccaaagagcattattattttcattttcttctaattctcttcaattttattttaattatttttatgcctaaaacattttagtgagtccacaaatcttataataaattgtctgcgttccatagcctattggaccacaatctttacaattttataggaccccatgagtttatattatggagactacggtgatcttaggaatgcttgcctcaaaacagaacaatttttattaacacaacaggtatcttctcagtatgaaaatgaatgtgtgtgttttatgtcactgctgtcatctaagaggcaagtcacttaaagcttaagcatttattataaattcatgtacataataaatgccagattttaaagtgtaagatttctacactggttgcatggggattttaaaatacatattacacttttaattatcgtgagaaacatgacttttagagaaaactgctagatatctggaacagtaatcattagatttctcttgaaaagagagaactagcmgcatgaaggaatgccattacacctatacccagttaaagagactagattgtacctgcagcttggaagggcagaccctgaggacagcttttgggggactagaggatgtgacctgccaccactgcatcatcatttcctagccaatttgtgatcccaaaatgaggactccaaagaggctggctaaatgtgcagaatatattaatctcactgagtggtaccatggaaatatcacaagcccctgagatcccgttggctccactggtcccaaacctcaggcatgagcaagcagagaggtgacaccactccaaggcatcacacgttctcattattccacatattctggagcttgattccgtgactcagttttaaaacatttcctgagcgttgaccatgaacttgaataattaagaatcataagagctattttctttcttctctgtcaactcagttttctctttgatcatcacatagtaatagcaaataataattattataatgtttacttataaatactaccaggccctgtactaatttagatgtgtcatcttgttaatcatcacatcaagatgaaagcacagagagggtaagaaacttacgcaggaagtaagaaacagagctgttgtttgaactgggccatctgatggtggcacccatgaaaaaacctggggcctttccacaatgagtttatagtctagaagaggagatgtaactagatgtaagaggagatgtagaattccatgcggaaccagagttgagtgctgtgggactacatatcagggtccctggtctccccaaccagggtcacgggagaaggttgaatagaaggaaaccaagcaaagaacttatcgtgttatcatgggaagacaagttaatataatcaac

SEQ ID NO: 696601 - DNA, 995 bp, Homo sapiens
gccaccgcgcccggccttaagatttctgtaagcttaaagtttctgaaataggacgttatgttgttaacatggtcattttaaatttaacatatagcgttttacagtgctgaagctggaatggaagatgaagaattgttatactggaaacatcttttttttttttttggtttgtttgtttttggaaacagggtctctctctgcccttcaggctggagtgcagtggcgcgaacagggctcactgcctcgacctcctggtctcaagcaatcctcccacctcagcctcctgagtatctggactacatggcacatgccaccacgccgggctactttttgtattttttgtagaagtgaagtttcaccatgtttcccaggctggtctcaaactcctgggctcaagggatctgcctgcctcagcctcctaaagtgttgggagtacagatgtgagccaccatacccggcccagagacatctttgttgttcctatgatgttataggagaagatgaagacccatctggggtgcactagtcctatatctggaacttgcaaagggataaaaaaactggttgagatacaaaagagtcagcacatagttattgctgatttacagcaaaaactcacagaaatatagcaaatattgattagctagcaacaagctattctagaccagcaraagaaaatatatgagcaaatgaattgaaagaaaatccagtatagtatgctctttgatactgtgaagcaggatatgtctttctgtagcttgcaggaggacattgaatgtgattttgcaactcctctttatggaccacaaaaccagatcggaaagtcatctgtagaagtcatactctgtgcagaaagctgaaggtgatgtgaaagtgattcatgatggagcaagctgcctagactgtggcctttgtgaaaccgatgaattttgcaatttccaaaagagaatatcacagggtgaaaaatgtactttatgccctgcagggctcccccc

SEQ ID NO: 696602 - DNA, 546 bp, Homo sapiens
ctacacaattctgtattcaggtacatttctttggattcagcatttattagattaatccagatcagctggctctttctaaacaggactttccaggataagcttatttttgatagaatttatttttgccttattcaattttacctttaaatgtactggtcttaagccaaaattaatatttattatatcatcattatcttgttttcctgttttcttcaattatatgtacttctctcaaaacacccattgcccaggtcccgccacatacatatatatttttattttatttatttatttatttatttatttatttayttatttatttatttattgagacagagtctcactctgtcacccagtttggactgcagtggtgcaatctcggctcactgcaacctctgcctcccaggttcaggtgattctccagcctcagcctcccaagtagctactactacaggcacacaccaccatgcctggcttttttgtgttttcggtagagacagggtttctccatgttagccaggcctgtctcaaactcctgacctcaag

SEQ ID NO: 696603 - DNA, 588 bp, Homo sapiens
acacacacacacacacacacacacacacacagagtgagctcagtgaattggccaggtgacacactgatgagggagtcaacggtcattctctatttgtgctctcaggacacacagtgaacagtgatcatgaaaagcatggcctcaataattttgcataaaatgtgctcaagtttccctgcagccaccatgagaatacagcttttgaggtatggtcaaccttcactaggttagtaaatgataagggkaggaagaaatggaaacctaaacatttactctaatgagaaccaaaaagcaatgtagtaggcataatttagacttgtctgacaagacaaaatcattattttcagcatgtactgttttccctggacttggcatctccaggtgtcaacatcaaattaactgtccacaatttctcagactcacctgggacctgttgcctcttggtcctcctttttcacttgatcccaccgatgtcctgcaaataaattcagatggggcctcttacattaagcagttcttccttgcacacagaaacattcctctgtccaatcctaacacaggtacatcagtctggtcagtgtgagaaca

SEQ ID NO: 696604 - DNA, 588 bp, Homo sapiens
acacacacacacacacacacacacacacacagagtgagctcagtgaattggccaggtgacacactgatgagggagtcaacggtcattctctatttgtgctctcaggacacacagtgaacagtgatcatgaaaagcatggcctcaataattttgcataaaatgtgctcaagtttccctgcagccaccatgagaatacagcttttgaggtatggtcaaccttcactaggttagtaaatgataaggggaggaagaaatggaaacctaaacatttactctaatgagaaccaaaaagcaatgtagtaggcataatttagacttgtctgacaagacaaaatcattattttcagcatgtactgtkttccctggacttggcatctccaggtgtcaacatcaaattaactgtccacaatttctcagactcacctgggacctgttgcctcttggtcctcctttttcacttgatcccaccgatgtcctgcaaataaattcagatggggcctcttacattaagcagttcttccttgcacacagaaacattcctctgtccaatcctaacacaggtacatcagtctggtcagtgtgagaaca

SEQ ID NO: 696605 - DNA, 588 bp, Homo sapiens
acacacacacacacacacacacacacacacagagtgagctcagtgaattggccaggtgacacactgatgagggagtcaacggtcattctctatttgtgctctcaggacacacagtgaacagtgatcatgaaaagcatggcctcaataattttgcataaaatgtgctcaagtttccctgcagccaccatgagaatacagcttttgaggtatggtcaaccttcactaggttagtaaatgataaggggaggaagaaatggaaacctaaacatttactctaatgagaaccaaaaagcaatgtagtaggcataatttagacttgtctgacaagacaaaatcattattttcagcatgtactgttttccctggacttggcatctccaggtgtcaacatcaaattaactgtccacaatttctcagactcacctgggacctgttgcctcttsgtcctcctttttcacttgatcccaccgatgtcctgcaaataaattcagatggggcctcttacattaagcagttcttccttgcacacagaaacattcctctgtccaatcctaacacaggtacatcagtctggtcagtgtgagaaca

SEQ ID NO: 696606 - DNA, 663 bp, Homo sapiens
tggcagggtttcaacattagctcaggctgttgataaggactcaggtgtagccatgaggatgggcagctaaataaaatgtgcataaagatcactggctttgggagaatggtcaagtgaaggagcttgggtgatttgtgcacttgagtattgacctgaagcctgtaccgtcctactgatcagcaaggatcagatccaaaggtattttccaatatcctgatccccttttccttttaacatcctccaaccttagactcccctactccacccctacagcatggggattatgytgttgggcaagcaacccacagtacaggacttataataatttaagcatttattttctaattacctcatcagtttatcacaactgcttttagcactttgaggtatttgcttccagtcttttctttgtgtgtctggtgtttacatagttataataatacttttgcattgtgctttttctcttagcattatcacatatttcttagcatttttccatattgccaaatagtcctcataggatgctatgtattcttagtatcttgggctctctgctacccaggactaaaaccacaaataactgtatgatgctcaaagaccttgtagggagaagggggaagatatgagtggggaccaggtgaaggaggtcgggggaacagaaga

SEQ ID NO: 696607 - DNA, 605 bp, Homo sapiens
tgtactcgatgccttttgctgctctaaaatgtttactcaacagggggatcgttctttgcaacaaacgttcatctgcttcatagggtggcgataccttgctgaggcctctgctgcctgtgtttttaacgcagttacagcttcttgtattatctccatactcaatgatgaacttaaataatgcccatactgaagcccacagagacctgtaagttgtgagggcagagggaaaggagcaatgtctccctgagagattgctgaggagagagggtggagtaactgattcaaggtgttcaatatgctattacatgttctgttctcttgagggartaattttgtgttctgcagaagatattacaatcacaactatggggaagtaacatgatgtggaaaacagcaagtcctttggagtcagataatgatgatgacattgataataatggtaatgaggataataacaataaaaatagcagcagcagctatcatttactgagtgcctgctctgtatcagctgctcttctgagtacgtgtattacctcaattaattatttactaaccctgaaaggtattctttctattatatagatgtggaaactgagatatggtca

SEQ ID NO: 696608 - DNA, 648 bp, Homo sapiens
gcttgtaattccagcctacttgggaggctgaggcaggaggattacttgaacccgggaggcggaggttgcagtgagccaagatcgtgccatcgcactccagcctggacaacaagagcgaaactccatctcaaaaattaataaataataaataaataaataaaattagccaggcatgatggcgggtgattgtggtcccaaccacttcagaggctgaaatgggaggattgcttgagcctgggaggcagaggttgcagttagtcaaggattgcaccctcgcctgggtgacagagtgaggccctgtttacaccccactcccatcaaaaacaaaaagagtatggctcagaatgtctcaacrtggtctacaaactttttaagtcctgacactggctttacctctggcccctttaacaatactcacgacttccttcatgtctcctggatggttctggctccttattgccttgtggcctttgaccttgattttttttttcctttgtttggaatgttcctcctccctaccctgatgacaaaactcctcctactggttcagaaaactgggctcagttagccttcttccattctcccttccttctcctccaaccgccagctgtgatcatcattaacctgctcccactgtattcagaagat

SEQ ID NO: 696609 - DNA, 648 bp, Homo sapiens
gcttgtaattccagcctacttgggaggctgaggcaggaggattacttgaacccgggaggcggaggttgcagtgagccaagatcgtgccatcgcactccagcctggacaacaagagcgaaactccatctcaaaaattaataaataataaataaataaataaaattagccaggcatgatggcgggtgattgtggtcccaaccacttcagaggctgaaatgggaggattgcttgagcctgggaggcagaggttgcagttagtcaaggattgcaccctcgcctgggtgacagagtgaggccctgtttacaccccactcccatcaaaaacaaaaagagtatggctcagaatgtctcaacatggtctacaaactttttaagtcctgacactggctttacctctggcccctttaacaatactcacgacttccttcatgtctcctggatggttctggctccttattgccttgtggcctttgaccttgattttttttttcctttgtttggaatgttcctcctccctaccctgatgacaaaactcctcctactggttcagaaaactgggctcagttagccttcttccattctcccttccytctcctccaaccgccagctgtgatcatcattaacctgctcccactgtattcagaagat

SEQ ID NO: 696610 - DNA, 633 bp, Homo sapiens
ctcacttgagcctgggaagtagaggctgcaatgagccaagatcatactactgcccctcagcctgggtgacagagtgagactctgtctcaaaaagaaaaaaagaaaaaagaatatgcactatgtcattccattttcacaagaaccattttacagatgaggaaacttaggcacagagacaagacgggacaatgtgcctgacagaactattgaatcaaaaattaagtatattacagaatggacaggaaatgagaaaatgactttttcaatatatttmaatcatatagcctggtgtttacaaactcttggcatcaattattttttgtgcaaatagtacagacatttctcatctcctgaaattgaatccatttttattatctgactcactttatgatttttctcaccacacacttataaaaatgtcaatttttttctggtagaaatcatcaaacctctcattaaatctatctaaataaccctttcaagtttctgaaggtattatccatttattattcctttttccttgaggatgaatcctagaaatattctattataccttcattatttttttctctaaatttggtaaagaatgagaaaaacatatttactaactcccatttgataatctcaccccat

SEQ ID NO: 696611 - DNA, 662 bp, Homo sapiens
cacaaacacatgttctgtgtttccatttgatgacctataaatgaagacacattctaaagtgagacaaaataactatatcctaaatattctatcctaaacgtccccatattcttgcattgtatgaagaagtgtgttggctggtgtrtgctaatttaatagttagatataatttggttgcttgatggaagataaagggaaacttgcagtttgaaagcagtcagaatgttaacatctgttaaaaatttgctaagtttcatcactgaaattgccatgacttagtactttagagggaataattatctcccttggaaaaaactaatcactttagaagtgcataaacacttctaagtcacaaaggtgctgtttcatgaatgacatcaaattattattattttttttggttaggaatcagttttaggagctaatttatttcctaaagtctctcatttcttctttaatgtcatttgtgtagtgagagatattaacaagctactctacaaatgatgagaaatataaaaacaaattaattgtatctattaataaccgtatctgttaatattatgaaatttccatatttctccccctagctgttgtcaacatcacatctatttattgtctgaatttcaatttctttgttatccctcatatatgaaagtttaacc

SEQ ID NO: 696612 - DNA, 1229 bp, Homo sapiens
gcttttttttttctttttgtcttcagcaacagaaattcattttctcatagtcctggaggctcaggttcaagatcaagatgctgttaggattggctctaggtgaggcatctcyccttggctaacagacaccaccttctgctgtgacggcaacatggtctttatgctcacagtgggagagaaagagagagggaggaagagggagagagagaagagagcaaagagaagagaaagagattgagtgctctggtgtcttcctattcttataaaaacaccagctctatgagatcagggccccatccttatgatgtcatttaactttaattatctcctaaaaggccttgtctctacttacagtcacatgggaagtgaagacttcaacatacgaatgttggggggacacaatttggctcataatagtatatgaactaaagatgtagcattaaaaaatgtctatattatactaataaagaccttacagactagttactttgcatccacaaagctacactacaagaaggagaagaagaaagatactcttactattccctccctccattgggccagccctggaggttatgatttctgttattcttaacacatgtcatagagaaatttgagttcagctgtgaagagccatttaagccttttgagaagaaatataccttgatcagaaccgtgatttaggaagataaacatgaactgctctgtgggaggtaggaagattaggagaagggagacttatcaagtagattttagagtactctaagaaaaattcgatgtggctattatgtgggacattgacagaagtttcctcagtcagtacatatttactgagtgtctacaatgtgcctgtatctactgtaacacatttatacagttctaggtgccaggaacaagtcagggctctttgttatttgcctttgataaaaatgatgacaagtcagatttgaggagctttaaacccagacacaagaagacattgttttgatccaggcagacaagtgacaaagagcaagcgcagagagtaggaatggaataaagtcttggagttaggacaatgaagcaatatctacaaaggacaagccgttggttacatcgctgcaggcaaaataatgccaaatggacagacatctcaaaatgcattcctctctcgtccaaagatttcacctcagatcgctcagagatgttttttcttttatgcaagttaaaaatgcagacaaatggaaata

SEQ ID NO: 696613 - DNA, 1229 bp, Homo sapiens
gcttttttttttctttttgtcttcagcaacagaaattcattttctcatagtcctggaggctcaggttcaagatcaagatgctgttaggattggctctaggtgaggcatctctccttggctaacagacaccaccttctgctgtgacggcaacatggtctttatgctcacrgtgggagagaaagagagagggaggaagagggagagagagaagagagcaaagagaagagaaagagattgagtgctctggtgtcttcctattcttataaaaacaccagctctatgagatcagggccccatccttatgatgtcatttaactttaattatctcctaaaaggccttgtctctacttacagtcacatgggaagtgaagacttcaacatacgaatgttggggggacacaatttggctcataatagtatatgaactaaagatgtagcattaaaaaatgtctatattatactaataaagaccttacagactagttactttgcatccacaaagctacactacaagaaggagaagaagaaagatactcttactattccctccctccattgggccagccctggaggttatgatttctgttattcttaacacatgtcatagagaaatttgagttcagctgtgaagagccatttaagccttttgagaagaaatataccttgatcagaaccgtgatttaggaagataaacatgaactgctctgtgggaggtaggaagattaggagaagggagacttatcaagtagattttagagtactctaagaaaaattcgatgtggctattatgtgggacattgacagaagtttcctcagtcagtacatatttactgagtgtctacaatgtgcctgtatctactgtaacacatttatacagttctaggtgccaggaacaagtcagggctctttgttatttgcctttgataaaaatgatgacaagtcagatttgaggagctttaaacccagacacaagaagacattgttttgatccaggcagacaagtgacaaagagcaagcgcagagagtaggaatggaataaagtcttggagttaggacaatgaagcaatatctacaaaggacaagccgttggttacatcgctgcaggcaaaataatgccaaatggacagacatctcaaaatgcattcctctctcgtccaaagatttcacctcagatcgctcagagatgttttttcttttatgcaagttaaaaatgcagacaaatggaaata

SEQ ID NO: 696614 - DNA, 1352 bp, Homo sapiens
tatacctaagtgaaatgctacttcacatcttccagggctgcctgttcactagttctccatccatctggttttctttccaatttggagggtgtagagtgtgaattctcacaactatatctgttcaacttctatcttcagtattgcttataatgtttggagcagaaaagatgcaccattcagcctgctgtactgaatcttctgtatcttcccttggccaccaccttttgattcttagtttaactttcttatccttcttgttgttggctgttcttggtgatgatgatgatttcgttggctattttcaaattttttgtttgttatttttattgcatttattgtgtattctggaaaataaaaatcctgatctagttttattctgtcttcttaacccagaaatatctctcaatatttaaatcaaaatgtttttattataataaagcctattcctcttggctactttccttacctatcttaaaggcatgtgtattatgagtgttccttattatttaatctttgggtaggcccttaatcactagaaaaatattgtatttagattgttagttctatgttttggctcttcaaatatgccatctagggaagtcacttaactgaattttgttttctcataagcaataaagaaatatctgttttactcacgtgatatatttttgaaagtatcaagtgagatactctaaatggaactgctttgtagattctcaaacattatacagggtacaggaatcgttatgatgatgattctatgatgatgatgatgatgatgatgatgatgaattgtttttcagttaatagggaaatgaaaaagctcaacagaaaacattaaactctctcaacagtttggcttgttgacattcatggtgacagttattgtcccatggatgtccaaagggttgagggctctccttttattaaaacaagggcaaggcctggtagaagcataagaaactaattcgaaaaccaaggtgcctgcatttgcaaaaagcaaagccacagttcattttcaattaaattatttttagtcttatgcaataaccaaatgcagttaggtcatacgttatggagaaaagaaaaatgcagcatcacttgtgttatttttagtgccagtggagcaactgaatacaaagcaccattttacttttttcctagtttttttcctgtgagttgattttcacataagaaaagaaacgcggctatctttcatatgcatcttatattttcccaagtttctaggcttgtaccaaggcagagttccatccatattccatggmattccatcctgacaacttctgtgacaggaaaatctagggtactttgtaaaatattgaaggtgtata

SEQ ID NO: 696615 - DNA, 663 bp, Homo sapiens
agtaggaagcagggtcttagttaattaggtgaagaggagaggagaatgttccaagcagaggaaaccacacgttccaagttcctgtggtggaagagaacatgatatgtataccaggcactgaaataggatggactatgccacaccataaaagccatgttagggggctttgactttattccaagggcaatgagaagccattgtgggatgttaagtagggagtgacatattgatctgtgtgtcaaaaagattactctgcactctggagaacaaattggmagttacaagaaatgaaatcagaaagatcaggtacttggctgctccaatggtccagggcagaggttaaatggtagctttgactaaattggtggcagtggaagtggagagatgaggacagagtcaagagctatttagaaggtacataggccaggatgtgatgataatcagatatgggaagtgagacagcagtggatctagggtgacacctaaggttctgacttgcataactggatgaagggtgattccaatcactaggatggggaaactggaagagggctagcttggagagaagaacccaagttttagtattagctccatctaatttgagatggcttgagacatccaaaaaacaatgtcaactaagtgagaacctcagcttaaatgagt

SEQ ID NO: 696616 - DNA, 663 bp, Homo sapiens
agtaggaagcagggtcttagttaattaggtgaagaggagaggagaatgttccaagcagaggaaaccacacgttccaagttcctgtggtggaagagaacatgatatgtataccaggcactgaaataggatggactatgccacaccataaaagccatgttagggggctttgactttattccaagggcaatgagaagccattgtgggatgttaagtagggagtgacatattgatctgtgtgtcaaaaagattactctgcactctggagaacaaattggaagttacaagaaatgaaatcagaaagatcaggtacttggctgctccaatggtccagggcagagkttaaatggtagctttgactaaattggtggcagtggaagtggagagatgaggacagagtcaagagctatttagaaggtacataggccaggatgtgatgataatcagatatgggaagtgagacagcagtggatctagggtgacacctaaggttctgacttgcataactggatgaagggtgattccaatcactaggatggggaaactggaagagggctagcttggagagaagaacccaagttttagtattagctccatctaatttgagatggcttgagacatccaaaaaacaatgtcaactaagtgagaacctcagcttaaatgagt

SEQ ID NO: 696617 - DNA, 604 bp, Homo sapiens
gagagggtacatttcttacactaaaaatatatactttggaatctctaaaacaaaaatatctctatctctacatgagacccactagaaasaagaacatagaaaacaagggaaatgtaccagcaccttgagttgtccccttccgagggaaggttgctctgttctccacctgacaccattagcttggaagggcagccaaatctaaccaatcagacagagagacacagataaacaagagggaggctttatgatcctggaggagtgaatataggagaaaggaaggaggaggaggattttagcctcttctacaaaaggagtaattgtacaatcagttgggtgcttctgtttccagcattattgcacacatgaaaagcctgcatgttgaagtcaattgcaaacctgctaggtgaagcccaacctccgctgatttctgctgggctcagaaaagtgccgtgggtgggttctttctgtcaagaaatattaatgccatcagctagaagaaaaagttctgtattctccaatgctgaaactgggttaggtttaagaaaaatgctatttcttttctcttcagaaggatcagaaaccattcccttccctttgagcacag

SEQ ID NO: 696618 - DNA, 698 bp, Homo sapiens
aagtgaaatgcatgtttgtccaaatataatcaagatgaaatttttaaattttccacagtccactgatcaaaggcaaagcctctcttccttgataaacagaatcttctcaaatttcttttcactcatcttatacttgggctctggctaggctagtggctcatgcctgtaatcccaacatgttgggaggccaagatgggaggatcatttaaggcctggagtttgagatcagcgtgggcaacatagtgcggccctgtctctattaaaaacaaaaaaagccagatgcagtgacatatacctatagtcctagctactgggaaggctgagtgaggtaagaggatcacttgagtccaggagtttaaggttgcagtgaaccacgatcatgccactacactctatcctgggcaacagagaaagaccctgactggataaataaataaattaaattaaacataactgggctctaatgcatcatgtttcatcatctttttttttaaacattagccaagacataaagttttaccatgtctcatgaraacagctccctcaactttcatctcaatatttctcacattagatctaatccattggctgaccagagaggggacagatatcatgatatctccttctatcatcactgtctttatcctccgtcaagtccctgtacacaatccaaaagtcctctgctctactctattgaa

SEQ ID NO: 696619 - DNA, 972 bp, Homo sapiens
agagagtgtgttatccacaagagatcaaagaggccagccttctctgcctgggttgtgtagatgattccctgaagcaaaacagtacgtaccttgatcaggaagaatgaaaagaaaataaatctgggagataagttgtatttaaaaggcatccttatgattgacattataaaggagagacagagctcattagcaaacaactgataaaaccactcagcatgcttcaaaaagaagtggtaataattattgtctctctaaaaaagggggcaaagtgtccacaggatgtcattcaggaatctgtttgcagacatcacagagcaagctgaaaaaagtcccacagccttctgatttaattaagcgaagaaggcaaaataagacttttacagctcacatgcctgaatcatagaaggttctacatgaaacatgatttttctacaaggcattttagaaacccctagagttgccaaaccctcattcaacagcataattttccctatttctcccaggatattgtacaatcaactaacagrgtgcagcatttctgccggctaaaggaagtgggcagctttgatcagaattcacaataatatatcccccttgtgtgataaatgatttactgctgaggataaatggatataatctttcattatgtatgacattcatcagcaacaaggaagctttggaccgaatggaaagtgatttcatattaaaagcctcatgtacctcagactgagatgaaagggaggtctggtcttaaaaaaaaaaaaaatagcataggcctataggtttaaattggcactcagtcaaatataattgttattgtaagtttgaaaatttgttgggggaaaaccagggaattatataactagagcaatcttaattttatacaaaaattcctgtttcttgtttttttttctttttttttctgaagctaagctatttacttattcatcaattcattcatttatgctttta

SEQ ID NO: 696620 - DNA, 811 bp, Homo sapiens
agcaagaaacataaaactgtgccctagtaagacatcctaaagttactgtataaatcaggttgggctgctgtaacaaaataccatagaccaggtggcttaggcaacagatatttattttcccaaatttctggagactaggagtccaagattcaggtgcagcattattgggttttgatgagggctctctccttgggttgcagaccccaccttcttgctgagtcctcacctaagagagattctctctttttataagcccacagtgctacaggattaaggccccatccttgtgacctcatttaaccttaattttcccctaaagatcctatctccaaatacagtctcattgggagttagggcttcaccgtgtgaatagcagggtaggggcagtacaattcagttcacaggagttaccaagtaggggaacgtaatatctacagactagcaaagactagaacgtgaattctactatatgtagtgttgccaggtaaaatacagtacacctgttcaaatctgaatttcagataaacaacaatttcttgtrtgtgtcctagaagcaatatttgggacatacttatactaaaaatgcattcattgtttatctgaaattcagatgtgaacaggtgtactgtattttatttgctaaatccatcaattttacctatgttggaatacaataatctgaatagtcacagtagtaagaactattaacaggaacacctaaagtttaatgtatactatttttcctataacgatatcccattctgatcaatttagctatctcttgttttaaggataaggcacttggggaaaa

SEQ ID NO: 696621 - DNA, 811 bp, Homo sapiens
agcaagaaacataaaactgtgccctagtaagacatcctaaagttactgtataaatcaggttgggctgctgtaacaaaataccatagaccaggtggcttaggcaacagatatttattttcccaaatttctggagactaggagtccaagattcaggtgcagcattattgggttttgatgagggctctctccttgggttgcagaccccaccttcttgctgagtcctcacctaagagagattctctctttttataagcccacagtgctacaggattaaggccccatccttgtgacctcatttaaccttaattttcccctaaagatcctatctccaaatacagtctcattgggagttagggcttcaccgtgtgaatagcagggtaggggcagtacaattcagttcacaggagttaccaagtaggggaacgtaatatctacagactagcaaagactagaacgtgaattctactatatgtagtgttgccaggtaaaatacagtacacctgttcaaatctgaatttcagataaacaacaatttcttgtgtgtgtcctagaagcaatatttgggacatacttatactaaaaatgcattcattgtttatctgaaattcagatgtgaacaggtgtactgtattttatttgctaaatccatcaattttacctatgttggaatacaataatctgaatagtcacagtagtaagaactattaacaggaacacctaaagtttaatgtatacwatttttcctataacgatatcccattctgatcaatttagctatctcttgttttaaggataaggcacttggggaaaa

SEQ ID NO: 696622 - DNA, 1181 bp, Homo sapiens
ggacaaatcagcactctgtaaaatggacaaatcagcaggacatgggcggggccaaataagagaakaaaaagctggccatgccaaccaccagtggcaacccactcgggtctccttccacactgagggagctttgttgtttcactcttcacaataaatctagctgctgctcactttttgggtctgcaccacctttaaagctgtaacactcgattcaaagttccacagcttcattcttgaagtcagtgaacccaccagaaggaacaaactccggatgcaccacctttaagagctgtaacactcactgcaaggtccgtggcttcattcttgaagtcagcgagaccaagaacccaccagaaggaataaattctggacacaattttatttgcatctaaccataattatataatagagggattattattatctttgttttgtaggagaaaacctaagcacggagtgatttagtaactcacacacagtcacaccgctggtaagacatggagccacgatgtgtaccagggcaggctagctccagtgccagtgctcttcaggtagaaataattatgacatatttaaaataaaatctagtattgttggaaaacaggcaatacctaatgattcctttgctcttttaaaaaatgcaattatcatcatcgtccattcattaaataaaatactttattcaagtctagcaatgtggttaaagaaacaaaatttctagctgtaagtttatttaaaataaatgaatgctgttggcttgacatcatgtatcacattacttagggagattgaaaaaaatgcaatttagcaggattttatactaagggataggattggggaaattggacaaagtagaatgtggctaattggaaattaggaagatcaaataggtcaataattaattgtgaaaaacaagattgacaggagtgggcagaggcaacctggggtagagcaacatcttctatagtgacatcaagtagcgcagcaaacagtgttgaggggcggcccatctataagatgctgcttcccttcctgtgtcctgaccctctgttggccagcattcagggccatgaatattacagtgaaggaagtagctctgcctcacagtctcaaaaattaccatatattttttcccctcagttctaaacatcaagatattgatagaggcaggaggcagacaa

SEQ ID NO: 696623 - DNA, 1181 bp, Homo sapiens
ggacaaatcagcactctgtaaaatggacaaatcagcaggacatgggcggggccaaataagagaagaaaaagctggccatgccaaccaccagtggcaacccactcgggtctccttccacactgagggagctttgttstttcactcttcacaataaatctagctgctgctcactttttgggtctgcaccacctttaaagctgtaacactcgattcaaagttccacagcttcattcttgaagtcagtgaacccaccagaaggaacaaactccggatgcaccacctttaagagctgtaacactcactgcaaggtccgtggcttcattcttgaagtcagcgagaccaagaacccaccagaaggaataaattctggacacaattttatttgcatctaaccataattatataatagagggattattattatctttgttttgtaggagaaaacctaagcacggagtgatttagtaactcacacacagtcacaccgctggtaagacatggagccacgatgtgtaccagggcaggctagctccagtgccagtgctcttcaggtagaaataattatgacatatttaaaataaaatctagtattgttggaaaacaggcaatacctaatgattcctttgctcttttaaaaaatgcaattatcatcatcgtccattcattaaataaaatactttattcaagtctagcaatgtggttaaagaaacaaaatttctagctgtaagtttatttaaaataaatgaatgctgttggcttgacatcatgtatcacattacttagggagattgaaaaaaatgcaatttagcaggattttatactaagggataggattggggaaattggacaaagtagaatgtggctaattggaaattaggaagatcaaataggtcaataattaattgtgaaaaacaagattgacaggagtgggcagaggcaacctggggtagagcaacatcttctatagtgacatcaagtagcgcagcaaacagtgttgaggggcggcccatctataagatgctgcttcccttcctgtgtcctgaccctctgttggccagcattcagggccatgaatattacagtgaaggaagtagctctgcctcacagtctcaaaaattaccatatattttttcccctcagttctaaacatcaagatattgatagaggcaggaggcagacaa

SEQ ID NO: 696624 - DNA, 670 bp, Homo sapiens
ctgcccttccctaagctgtcggcatcaggacagggaaggtggggccagccgaccctcactttcctgggcaggaagggaaagtcacggggcccagcggccaggtagggcagggtctcttagcggaggacaaagggcggcaggagaggaggcacacagcagcacaaaggaacccaggggcaactggcagccctgtcgctcgttgcctaggcctcagagccaccaccacaggctggccacaamgtggaggccctccaggcattggaagctgaggcctggctctcctgattgctctcccaccctggcttgcctggttagaggtgatggtagagggggtgggtgagagttggaggtcatcactgctgaccaaggtcaggaggaaagaagggtgagaagtggatgggagctggataccatgcaggtggggctgagatgcagcccagtccagggctcctgacagggataacctgctcagccccaggttcctgtcggcagcagggaaaggacactgcgctggggtttgggagtgcagaccctcccccaacctcaggtgcatacctatatttcaaaggcccatcttcagtcagagctcgccctgtagcctctctgtctgtgccctcccctcccttgctctctcccactagtcccttccctcttgggaatgtcaaagtgc

SEQ ID NO: 696625 - DNA, 730 bp, Homo sapiens
aaaaaagtgaaagttctccctgaactatgggaaccaatgtttgccacaacacaagaagcagagtgaaactgctgagtttctagtgcagaattctggaaaacgagatgcttcccagacttcacattcaattaccacaaacgtttataggtggaaaacatacggtacagttatctactttagccccattatctactgaaaatgggagtcaaaccaaccaagacatatgaaatgtttcatccagagctcttgaggtggcattccctagcatttcatgrcaccaaataacatgatacaattccatattgctgaattacataaattaccagataaatttatcaaattagtcagatatgttaaaagtctaacttgagcaaagcaatttaacacctcagagggtggaaaaaggcctcatctgcttttactttgaaagaagaaaatctctagaattttgtctatctttagaacacaatgtacagaactcagctttctactaaagagtcaaaggttaaatttttagctaagaaattatgcttcttacatgataaaaatcatacatgccaaaacttaccatactttattaaacaacataatgtaaggtctgattcaacagaaatattggagtggtgattttttaaaatatgtggaagtatatatttgttttcaaaatattggaaataaccatgatggaactataaattcaaacagtttgagctaagcagataaacttgca

SEQ ID NO: 696626 - DNA, 651 bp, Homo sapiens
ttctagtatttgttaatcttaatggttcagttgaaactattaaacgtgtggtctgaaatgcatgctttgttcattttaaggaattatcccgattcagattttattcaatccttttttttcaatcaagaataaatgttgaattttttcaaaggtttatttaaaccaataattaacagacttctatgatttttatccttgactcattgacagaatgaattatttaaatagattttctaggattatttttctctgtactgttggactaggttatttgcatattrattctttatgattcactcatgaccattttggcctggagcttattataaatcaataactggcaactttctcaatgatattttttgctttttagcctactaaggtgttccaattaatatatacaacatttttctacaaaattacgcatttcactcaagttttctaatctactaacatattgttcttaaaattttatctgaatctctgtcttcccctcctatatccagtattatatacttgcattttttcttgattagctaaatgtttgtatggtatattgagtttttttcctcaaagaaaactttaacctattaatctactctttctcctctaatttattggtattttttatctttaaatccatcttttggc

SEQ ID NO: 696627 - DNA, 2320 bp, Homo sapiens
  misc_feature 1866, 1867, 1868, 1869, 1870, 1871, 1872, 1873, 1874, 1875,1876, 1877, 1878, 1879, 1880, 1881, 1882, 1883, 1884, 1885,1886, 1887, 1888, 1889, 1890, 1891, 1892, 1893, 1894, 1895,1896, 1897, 1898, 1899, 1900, 1901, 1902, 1903, 1904: n = A,T,C or G
  misc_feature 1905, 1906, 1907, 1908, 1909, 1910, 1911, 1912, 1913, 1914,1915, 1916, 1917, 1918, 1919, 1920, 1921, 1922, 1923, 1924,1925, 1926, 1927, 1928, 1929, 1930, 1931, 1932, 1933, 1934,1935, 1936, 1937, 1938, 1939, 1940, 1941, 1942, 1943: n = A,T,C or G
  misc_feature 1944, 1945, 1946, 1947, 1948, 1949, 1950, 1951, 1952, 1953,1954, 1955, 1956, 1957, 1958, 1959, 1960, 1961, 1962, 1963,1964, 1965: n = A,T,C or G
ccttctgaaatgggaatgactaaaatggctcaggtttttttcttccaaaagcattcaaaagagttgttttccttcctttcctgtcaatctccaggtgatatgttagatttacctctcccttttcgaaatyatggcagaaatgtttccctggaaatagcaacttcttagacagaattaaaaagctgagattggatcaccacaaatacaaaatgtctgtgggtgagtgaaaatacaaaatcacatttctcccagcacgaggttctgaattttagcttgttattggcatctccagcaggttgctgttaactaccagtggtaataaaactattcagctacgtgcttcagactaccaaacctatataaagagaaatataaaatgacatcaatcatgaatgtcgacgatagttttactgttatacttccgggtagacttcacggtgggtacacttccctacttcgtcccaagatgcctgtggggtcagtgtgatcatcccccctggtgatatcacaagtctgttctcaccgattgtctaagccaagtccactttttggtcacctatgtccaactgtgctaggctcagggtgtttctacattaccccaaacttttttttttttcttaaaaaatgcaaaaaccaaaaccctcaataaatagcactaagcaatcatccaactacatcacagtcggaagaatgaagtggaaagaaaggtgaaccttattaacctatttttcaaaaaggcaacagtaaggccaacacatgatggaataatttcacatggtatttactaactctgctttcacatgacttcagagtcattttgctgttctttttgttaatgtccaggcccaatccttttgttttctttttggacaggagactctgaacatttaggaacattcactgtgaaatccctcctaattcagttgaaaacaacagccgaattttaaattcaaacactttaaatcttgtgaggaatgctttcactcccacaacgtttaatacagacatttctcctggaatagctaatgctccatgttgtgaaaacagaattttctacctacctgaactaaagcaggaagcaaacagtaattaattctgaatcataggtaacgtgaggaaacccagacagtactaactcccccttctctccacatagtcaaatctattaagctaaaaatgagcaaaaggtagatagaactacccagttaattcaggtaaaaaaataagccacttaagcaaactaactatcattctttgaactctttctgctttgattttcaacttttcagatcaaaaatattttctgtaaaacagattaaaacccgtagtgtcctgaactcggagtcggagtccagagtctggtcttactcttcccccccaatggctatttattttacatatactctaaagttccatccagctctcacattcttggaatttatgattacataaaactgaggttttaaactgacacaagcccaatcagcacaatatacatgtgtgtgcccatatgtgtatgtgtgcgtgtgtgtgtgtgtgcgcgcgcgcgcgtgtgtgtgtgtgtgtgtgtatgtatgtatattctgtttggcctacacattgtttttggaaatcatgttattaattaacaacattcaaacttgaggaatttcctacaaaaatctgaatttctggcttttattaataaaagcagaagatctggaaatactaaatgatacctagctgcagtgaggtagagactttgcacctttagacagggcatgtattcctttgccacagtctccactgcctatacaactgttaggaccaaatgtaaattaccattagttgtcaaactgtgcttttatttctgttttatttgaatannnnnnnnnnnnnnnnnnnnnnnnnnnnnnnnnnnnnnnnnnnnnnnnnnnnnnnnnnnnnnnnnnnnnnnnnnnnnnnnnnnnnnnnnnnnnnnnnnnngactcctttctgaacaacccaggaaattacctccccttccacttgaccacagcacagaagaaacatcagcaaggtggttaatggtgcagatctgggagcaagatggctagggtttgaataccacctcctctacctaccacctctcttgcatcatagtttcttcattcataagcggggatagtgataatctacctcacagagctgttgtgagaattaaaggagctaaagccaggaaattttttaaaaagttaatgtaagagttgctatgaaaaaatacttagtatctgatatatagtatgctctatgtgttagttattaatgtacatgctaattttaagttctagggctaagttat

SEQ ID NO: 696628 - DNA, 2320 bp, Homo sapiens
  misc_feature 1866, 1867, 1868, 1869, 1870, 1871, 1872, 1873, 1874, 1875,1876, 1877, 1878, 1879, 1880, 1881, 1882, 1883, 1884, 1885,1886, 1887, 1888, 1889, 1890, 1891, 1892, 1893, 1894, 1895,1896, 1897, 1898, 1899, 1900, 1901, 1902, 1903, 1904: n = A,T,C or G
  misc_feature 1905, 1906, 1907, 1908, 1909, 1910, 1911, 1912, 1913, 1914,1915, 1916, 1917, 1918, 1919, 1920, 1921, 1922, 1923, 1924,1925, 1926, 1927, 1928, 1929, 1930, 1931, 1932, 1933, 1934,1935, 1936, 1937, 1938, 1939, 1940, 1941, 1942, 1943: n = A,T,C or G
  misc_feature 1944, 1945, 1946, 1947, 1948, 1949, 1950, 1951, 1952, 1953,1954, 1955, 1956, 1957, 1958, 1959, 1960, 1961, 1962, 1963,1964, 1965: n = A,T,C or G
ccttctgaaatgggaatgactaaaatggctcaggtttttttcttccaaaagcattcaaaagagttgttttccttcctttcctgtcaatctccaggtgatatgttagatttacctctcccttttcgaaatcatggcagaaatgtttccctggaaatagcaacttcttagacagaattaaaaagctgagattggatcaccacaaatacaaaatgtctgtgggtgagtgaaaatacaaaatcacatttctcccagcacgaggttctgaattttagcttgttattggcatctccagcaggttgctgttaactaccagtggtaataaaactattcagctacgtgcttcagactaccaaacctatataaagagaaatataaaatgacatcaatcatgaatgtcgacgatagttttactgttatacttccgggtagacttcacggtgggtacacttccctacttcgtcccaagatgcctgtggggtcagtgtgatcatcccccctggtgatatcacaagtctgttctcaccgattgtctaagccaagtccactttttggtcacctatstccaactgtgctaggctcagggtgtttctacattaccccaaacttttttttttttcttaaaaaatgcaaaaaccaaaaccctcaataaatagcactaagcaatcatccaactacatcacagtcggaagaatgaagtggaaagaaaggtgaaccttattaacctatttttcaaaaaggcaacagtaaggccaacacatgatggaataatttcacatggtatttactaactctgctttcacatgacttcagagtcattttgctgttctttttgttaatgtccaggcccaatccttttgttttctttttggacaggagactctgaacatttaggaacattcactgtgaaatccctcctaattcagttgaaaacaacagccgaattttaaattcaaacactttaaatcttgtgaggaatgctttcactcccacaacgtttaatacagacatttctcctggaatagctaatgctccatgttgtgaaaacagaattttctacctacctgaactaaagcaggaagcaaacagtaattaattctgaatcataggtaacgtgaggaaacccagacagtactaactcccccttctctccacatagtcaaatctattaagctaaaaatgagcaaaaggtagatagaactacccagttaattcaggtaaaaaaataagccacttaagcaaactaactatcattctttgaactctttctgctttgattttcaacttttcagatcaaaaatattttctgtaaaacagattaaaacccgtagtgtcctgaactcggagtcggagtccagagtctggtcttactcttcccccccaatggctatttattttacatatactctaaagttccatccagctctcacattcttggaatttatgattacataaaactgaggttttaaactgacacaagcccaatcagcacaatatacatgtgtgtgcccatatgtgtatgtgtgcgtgtgtgtgtgtgtgcgcgcgcgcgcgtgtgtgtgtgtgtgtgtgtatgtatgtatattctgtttggcctacacattgtttttggaaatcatgttattaattaacaacattcaaacttgaggaatttcctacaaaaatctgaatttctggcttttattaataaaagcagaagatctggaaatactaaatgatacctagctgcagtgaggtagagactttgcacctttagacagggcatgtattcctttgccacagtctccactgcctatacaactgttaggaccaaatgtaaattaccattagttgtcaaactgtgcttttatttctgttttatttgaatannnnnnnnnnnnnnnnnnnnnnnnnnnnnnnnnnnnnnnnnnnnnnnnnnnnnnnnnnnnnnnnnnnnnnnnnnnnnnnnnnnnnnnnnnnnnnnnnnnngactcctttctgaacaacccaggaaattacctccccttccacttgaccacagcacagaagaaacatcagcaaggtggttaatggtgcagatctgggagcaagatggctagggtttgaataccacctcctctacctaccacctctcttgcatcatagtttcttcattcataagcggggatagtgataatctacctcacagagctgttgtgagaattaaaggagctaaagccaggaaattttttaaaaagttaatgtaagagttgctatgaaaaaatacttagtatctgatatatagtatgctctatgtgttagttattaatgtacatgctaattttaagttctagggctaagttat

SEQ ID NO: 696629 - DNA, 609 bp, Homo sapiens
accaaaagaaagagaacacgagagaaataaagtagcagataaatatttcaagtaattacttaacaattttataaaagacattaatccttaaaccaataagctcaatgaactctaagtagaataagtgcagagagattcatacccacatacatcatagtaaaaatacttcaagacaatgacagagaacaaatctttaaagcagcaagaaaaaacatttcatcacattcaaaaaagccccagtatgagaaacagctaatttctgaccagtaacaattgaggagaggaagtgagaagacatactcaaagcactgagagaaaaaaatatcaaccaagaatcttatactgagagcacatgttttcaaatataaaggtgaaataaagaaatgcccaaataaaccatagaagttatttgcaagcaaaactgtttgacaagaaataataatggaagttctttatggtgaaagcaagtgaccccataatgtaattagaatccacatgaaaaaaacagagcacaggtaaaaataattatgtaagtatgaatgatagtaaaaatgcatatttcttcttyttatacacttagccaacttaattagtaactctataaaacaa

SEQ ID NO: 696630 - DNA, 664 bp, Homo sapiens
ctgaagtgcagtggcgcgatctctactcactacaacctccgcctcccagactcaagtgatcctctcatctcagcctcctgagtagctgagattacaaatgtgcaccaccacacccggctaatttttgtattttttggtagagatggggttttgccatgttgcccaagctggtctcaagctcctgggctcaagtaatccaccctcctcggcttcccaaagtgctgattacagacgtgagtcaccscgcctggcccagaagcacttttaagtgaacttgctttggttgataacgggcatctttgtatatttgagaggcagcagaaacacattggggatatctaggagagctctgattccttgtaaaatatttggtggttctgggcataaaactgaccatgagatggggcctggctgcttccctggggtccctctgtcctctggacctttgcaggtgccacacctcccacccctgccccctctccccagcctgtggctcacagcctcctgctcattcttcaggtctcagctgagcagccccgctctcgggacaccttccctcccacctgcccctcgcctgcacacccaggctgagtcagaggccccacagtgcaggcacagcctctcgtacatctcccacaacacgtatcgcggtacagggtctgcg

SEQ ID NO: 696631 - DNA, 664 bp, Homo sapiens
ctgaagtgcagtggcgcgatctctactcactacaacctccgcctcccagactcaagtgatcctctcatctcagcctcctgagtagctgagattacaaatgtgcaccaccacacccggctaatttttgtattttttggtagagatggggttttgccatgttgcccaagctggtctcaagctcctgggctcaagtaatccaccctcctcggcttcccaaagtgctgattacagacgtgagtcaccgcgccyggcccagaagcacttttaagtgaacttgctttggttgataacgggcatctttgtatatttgagaggcagcagaaacacattggggatatctaggagagctctgattccttgtaaaatatttggtggttctgggcataaaactgaccatgagatggggcctggctgcttccctggggtccctctgtcctctggacctttgcaggtgccacacctcccacccctgccccctctccccagcctgtggctcacagcctcctgctcattcttcaggtctcagctgagcagccccgctctcgggacaccttccctcccacctgcccctcgcctgcacacccaggctgagtcagaggccccacagtgcaggcacagcctctcgtacatctcccacaacacgtatcgcggtacagggtctgcg

SEQ ID NO: 696632 - DNA, 904 bp, Homo sapiens
ttacataatatttatgaattaatttttcttttacatctagacttttaacccactcaagattgattttgctatacataagatgttaaagatcaatttcgctttttttttttttttttttttacctgatagctaatttttcaagggccaattataaaagcatttctttgtctcccamctacctaggacaccctttgtcatatatcaagtttctgtgtacacacatatttgttttagggttctatatgatgtaatgttagtttatatatgtctatatcattctgctccaaggcagcattgttttattacttagagctaaaagaagcaagtcttttaaggttttctttcttgaaggattttctaagtattcttggcgttttgtatttttattttaattttataatctgtttgtcaagtggtacccccccacacacacacacacatatacacacatatagtactctgcttcccaccctgatattttaaaatttgaattgcagataatctatacatctatgaacacagtataatctttgagtttacttaaactttctttagggtcggaacatgggattttacacttttgttcatagacaccttggacatagtttattaataatattcctgtgtatctttcactttgaatgataaatgacagtttatattctaattggctgtcgcaaatatctactaatacaacacatttttctgtatggacctctgtctagcaaccttatcaaagtcacttcttaattctataaatttccctatagaaatattgaagtttctatatgtacaatgttatctataagtaatacaaattttgcttttttatttctaactgtaagcctaggatttttttttactttattggcctgaaaagagatccaatccaagttgaaaataa

SEQ ID NO: 696633 - DNA, 904 bp, Homo sapiens
ttacataatatttatgaattaatttttcttttacatctagacttttaacccactcaagattgattttgctatacataagatgttaaagatcaatttcgctttttttttttttttttttttacctgatagctaatttttcaagggccaattataaaagcatttctttgtctcccaactacctaggacaccctttgtcatatatcaagtttctgtgtacacacatatttgttttagggttctatatgatgtaatgttagtttatatatgtctatatcattctgctccaaggcagcattgttttattacttagagctaaaagaagcaagtcttttaaggttttctttcttgaaggattttctaagtattcttggcgttttgtatttttattttaattttataatctgtttgtcaagtggtacccccccmcacacacacacacatatacacacatatagtactctgcttcccaccctgatattttaaaatttgaattgcagataatctatacatctatgaacacagtataatctttgagtttacttaaactttctttagggtcggaacatgggattttacacttttgttcatagacaccttggacatagtttattaataatattcctgtgtatctttcactttgaatgataaatgacagtttatattctaattggctgtcgcaaatatctactaatacaacacatttttctgtatggacctctgtctagcaaccttatcaaagtcacttcttaattctataaatttccctatagaaatattgaagtttctatatgtacaatgttatctataagtaatacaaattttgcttttttatttctaactgtaagcctaggatttttttttactttattggcctgaaaagagatccaatccaagttgaaaataa

SEQ ID NO: 696634 - DNA, 1982 bp, Homo sapiens
aataatttaacaacacaatatctgtatccttacacacaagtatcttttttttttgagatggagtctctctctgttgcccaggctggagtgcagtggcgcgatcttggctcactgcaacctctgcctcccagattcaagcgatcctccttcctcagcctcttgagtagctgggattacaggcactgccaccatgtccagctaattttttgtattttttagtagagacgggttttcgccatgttggccaggctggtcttgaactcctgacctcaggtgatccacctgccttggcctcccaaagtgctgggactacaggcgtgagccaccacacccaggcaacacgcaagtatcttatttctgaaatacattccaaagatacactaaatatattttaaatattatataaatattttaaggaaacatttgttaagcatatttaattcccaagggtaggagataaaaaagatacttaagacatgtttcctgctaacaaaaaatacgaactcaaatttgcagaaaaacatattaaataatatcacattgccagataataaatataaagttacataatgggaacacacacactatggacatctaattaaaattgaactcatagagaaacagatgtcatcaaatattgtctcttgattttatccctaaaattaaaaaaaggttagcactgaacagaatacggaaatgaggctgagcacactcaaggatcaaagaatattataatgttagtcaaggaaattaggtaactgttcatttaaggaaaattcaagaattaaatatagccaaagtaaacagtgatatatgaatgtagagaaagatgaatctggaaatattgtcaaagtccagattataaaagattttgtttatctcggaaaaaatttgagaatttattttgaagatgatggaaattcttttgttagtttttaagttatgggggtatcataatgagatttggacttttgaaaagtttgtttaacacaatgctctaaacaagaggatgtggttactcaatgaaaagtaactaaaaagagccctaagggacccaaatagtagtacatacacacatttttgtctgggagcttgtcatgttatgggaaatatatttccccacaacatatatgttcatgattgtagaaccaagtgttagctgggaaagcatgtaacccgtaatgcatgccaaatgcattatggtatgcaactcaagtgaataaacttctgcttctctttgtgctgcaccttaagagattcctgcctcataagcttggaaacttttagtggtgattatttctcatagtctcaaatatggactggaaactatcaaatctatttacttatatgaggatgcagttaagtaaaactaaaaagaaacatagagcattcttaaaacatgatacaatgaactaacatggaccacaaatacagagacatcttgaagaaattatatcatcttgtaaataaataagatttaacacaaacatgattatacaactttttttttctaaaggcagaaattgtttaaaaatattctttaggaaagcaatcacacaaagccttttgattacagcagcatgttaagaaaacttctatacagaagccatgtgtgatatagggcaacagaatggtaaaccaacgaccaccatagagaggttattattacctataggagggaaaaattctcagtcaggaaaatataaatctcttaaccagcagacagtgttttctagaagtaacaaataacctaccaaacaaaaaacaggtatcactttagtaatgaatattgtcactgaaatgaaagaaaagaaacaaagatacaaagccataagtagccactactaaacaccccaaaactgagaagaaaatacaatgcatccttacggaagtaagcaacaaaatgaacaccaagagggcagaataaaaaaaaaaarggattaatagctttagattcaggaagaaatgtggtactttaaaag

SEQ ID NO: 696635 - DNA, 625 bp, Homo sapiens
taataaaatctaggttatataacaaaaggactatttaaattaactttaatcaccattactaatagctaatatttattatggatttgctatgaaaccaamactaacttagcactaatttaggtgtttcatataaaataattttaaatctttttatcagttttagaaagtatatattattctcttcaccttgaaaataaaaatactgaaatagagcagattttttaagtgccttaaattatgaagctagagggtgctgaaagtgggagttcgacctaagcattcacattttccaccactacactctgcctgtcagaatgttcaacacagatctgttgagttaactaaattgcacctacaaatcattttaatatttattgaaagctgttatcccttcccaacattttcaacatgccgagaactttcacttagtttttatataaccctgttatctgctagggtttacttgtcactaggaaatctagacaaacttgactgaagcactgatcctgacttgccaataccattgcttgtgaaatttaaaatcaaatcctatgacctttaagaattcttagtggcttacaccttcatggttctcattgtttccaacacctgaattgtcattaaa

SEQ ID NO: 696636 - DNA, 625 bp, Homo sapiens
taataaaatctaggttatataacaaaaggactatttaaattaactttaatcaccattactaatagctaatatttattatggatttgctatgaaaccaacactaacttagcactaatttaggtgyttcatataaaataattttaaatctttttatcagttttagaaagtatatattattctcttcaccttgaaaataaaaatactgaaatagagcagattttttaagtgccttaaattatgaagctagagggtgctgaaagtgggagttcgacctaagcattcacattttccaccactacactctgcctgtcagaatgttcaacacagatctgttgagttaactaaattgcacctacaaatcattttaatatttattgaaagctgttatcccttcccaacattttcaacatgccgagaactttcacttagtttttatataaccctgttatctgctagggtttacttgtcactaggaaatctagacaaacttgactgaagcactgatcctgacttgccaataccattgcttgtgaaatttaaaatcaaatcctatgacctttaagaattcttagtggcttacaccttcatggttctcattgtttccaacacctgaattgtcattaaa

SEQ ID NO: 696637 - DNA, 625 bp, Homo sapiens
taataaaatctaggttatataacaaaaggactatttaaattaactttaatcaccattactaatagctaatatttattatggatttgctatgaaaccaacactaacttagcactaatttaggtgtttcatataaaataattttaaatctttttatcagttttagaaagtatatattattctcttcaccttgaaaataaaaatactgaaatagagcagattttttaagtgccttaaattatgaagctagagggtgctgaaagtgggagttcgacctaagcattcacattttccaccactacactctgcctgtcagaatgttcaacacagatctgttgagttaactaaattgcacctacaaatcattttaatatttatwgaaagctgttatcccttcccaacattttcaacatgccgagaactttcacttagtttttatataaccctgttatctgctagggtttacttgtcactaggaaatctagacaaacttgactgaagcactgatcctgacttgccaataccattgcttgtgaaatttaaaatcaaatcctatgacctttaagaattcttagtggcttacaccttcatggttctcattgtttccaacacctgaattgtcattaaa

SEQ ID NO: 696638 - DNA, 625 bp, Homo sapiens
taataaaatctaggttatataacaaaaggactatttaaattaactttaatcaccattactaatagctaatatttattatggatttgctatgaaaccaacactaacttagcactaatttaggtgtttcatataaaataattttaaatctttttatcagttttagaaagtatatattattctcttcaccttgaaaataaaaatactgaaatagagcagattttttaagtgccttaaattatgaagctagagggtgctgaaagtgggagttcgacctaagcattcacattttccaccactacactctgcctgtcagaatgttcaacacagatctgttgagttaactaaattgcacctacaaatcattttaatatttattgaaagctgttatcccttcccaacattttcaacatgccgagaactttcacttagtttttatataaccctgttatctgctagggtttacttgtcactaggaaatctagacaaacttgrctgaagcactgatcctgacttgccaataccattgcttgtgaaatttaaaatcaaatcctatgacctttaagaattcttagtggcttacaccttcatggttctcattgtttccaacacctgaattgtcattaaa

SEQ ID NO: 696639 - DNA, 1216 bp, Homo sapiens
ctgagtcatgagaatcacttgaacccaagaagcggaggttgcagtgagctgaaatcatgtcactacactccagcctgagtgacagagtaaggctctgtctcaaaaaaaatgaaaagaaaaagaaaacagaagtagtcagaagtaaaggaacctaggttcttatctctattctgtaaataaaagggtaatctgaggtaaaactctttacttttagggtttaagttttctcacctgcaaagcagaagaaggcaggctagatggtcactaaagtccttcccttgaatcagtattatttctgagctaataatgagtaattgaagaaccatagacaaattggccaaatatctgtgaagccaggtattataactacaagaaaacgaacacaggtgttctaacaaagcacctgttcttagtaggagcttcatggaaatcttatttcatgtcttcaggtcattgctatttgcttttttatgctttagacagactttctgctgttggctgcaggatctagcctcttgaatttactttgtatgttccagtgtttctatctgagtccctagacatggacatgtctatttccctctatgttaaggttggtgacaaaatgaatatttttttagtacctcctgtgtgccaaccactgctaggtgctcaggaatacaatgatgacaaagcaaacaatattccagctttcatggagttcacattctagtgaaactgaacagagaaacattgggagcaaaggaactagcagagggagggtaaattggaaaggagagggaaacaaaccccrggtggaagtacaaaatggttgaacaagaagacgacaagcctctttcagaacctccccctcctcagtctattaaaagaaagaggcaggacgtagttagtagcctacaataaacaatatggatggtgcgaaataaatagtcattaaagaatgatgtagtgtcaccagaagataccaggaggctaacggagataagatttggacagcagtggagcgggaaaatgttttggaagtggccacaagaagaaggattcctaatctgacttccaggctctgtggcatgtagggtcaccatctgacgagtctcagatatagtgttatttaccaacccagtcttccattaggataaaaagataaaggcttaatgaaggtagacaatatcagggattttgcagacgattctagagggcacaatgaaagtcttga

SEQ ID NO: 696640 - DNA, 572 bp, Homo sapiens
ttttgcaacaacaaaaaaggaataaattaatgtttgagtgattttgtgatttctaaggtccctcttggctttaagcttctatgagtctataatccaggaagcaaatattttctgtaaattgaaacgaaattaattctcttatcccgtctcatcttctctcatcagccaaaggagaatctttcctataaatagtcattaaaacattggggaatgttgtaacatttttctttgtgttagtaatcctttctgtgaattgagacacttacaggtaacaagcaaggaaaaaaagttcccattgggaaattgacttcaaaagaaaattccaacatccattgtttctcttgatatctttttggcaaagatatcttaattctcactgccattgcaaattttgaatttaatccaatgggtgaggagactccatccttatttacaattcccctgctgatggctcccatatgggtgggagaccaggctcyctggagccagccttggcacctgagtctctggatgtggcaatccaaaaggctcctgtcacctttcctgtcgtattatttccttctccagctaca

SEQ ID NO: 696641 - DNA, 1399 bp, Homo sapiens
tcccagcattttgcgagaccaaagtgggaggagtggttggggccaggagtttgacaccagcctggacaacacagcaagatgctgtctctataaaaaatttaaaaattagctgggcatcatggcacatgcttgtaatcctagctacttgagaggctgaggcagaaggatcgcttgagaccaggagtttgagggtgcagtgaactatgatggcgccaccacactccagcctgggagacagagtgagaccctgtctctaaaagaaaaaagaaaattcaagatacagagccagacaggtaacaaggacaggtgaaggtggctgagtagggtccacactgaactagasagtgcctttcatccccatcctccccacccccaatttaacttacacacagtcagtcccaagaaagcttgttgaatgaatgaatggatttctaaataattccctaaaggggaatatctaagcctaaaaactttcccctgctctcaatgccacttaattctgttttataatcatttctttctttcctgcaggagcctggatggccatctttcttctgatagcaataagctggatgctgggatagaagcctgatacctcctccaaccctagtccttggcctctagtttactcgcctgaggcaagggtagagtggaggaagatttagggaaagcaagtagtccgttttattgttacggaccagagaggttgggggtgcagatgaaaccaacatctggtaaggagtgtggctgatcagccttgggctctgcttcctcatcccacctttgcttcctatctctggaactcttctagggggagattgagttacttagtatggtatggggaggtgcagagggtatggctaataaacagccgggaattctactttgtctgactcctttctgtgtaatccagatcttatattgagggggttggggatggcagggagaagtcactttatcctctatctctccatatgtaaaatgagagtttgaactgatgatctctgcttcaacatggagactctatgactctcattccagggaaagttcctgggccttggccagctggccctaagtctcctttctttttttctgcaaaatgggcacgaactattcaatttcagaatgaggataaatgtatacacacactattatccaagcctccttctcctgccccttaattatttctgacctcattagctcccccttcctagtagagggtggatatggcagcagtgtttgtgtgaatatcattcctttattcaaaaacaggttggaatctgctatgcacttgttaactgtattaggcctgggggattcaacagtacaaaagacagagtctttgaccttacagagaaaacagttgagtttggggagtaggtagtgaggaccaggaagc

SEQ ID NO: 696642 - DNA, 615 bp, Homo sapiens
atctgacttcattttgaactccggttccctaacttgctagttgggcagattacttaaccttggaacctcagacacttcagctgtaaaatgtagataataatagatgccacctcacagaactgttgctatgaaggttgatcaaaatgatgctgcatggtgctcagcctggcacctagcactttgccaagcagccaagtaagctattaactattaactgtaaaaagagaagccaaacagagagtgtgcttgctactattttccactgagtttgaacaaacaccggccctgcttccactgaaaggataggggtgcatagatgggggagaaaaggcgagagtttcaacaagctctaagtgagcgtatcatgcagctggtgacactcgtgcagctcaggcaattgcagagatgttctgagtgacacttctcctactccctgaaggcttagtgctgaaataatgacatagatgacaggttttcattttccccccaattttcctgcctacatsgttaatctaggggttctatctgtgtgctacacctgatgggaaacacaaaattctaataaagatgtctaaagtgtaccaaattttttatctgggaatattgtattgcaga

SEQ ID NO: 696643 - DNA, 632 bp, Homo sapiens
taggttgtgttgttatcctcatttttatatgaagaaaatgaggaacagagatactaagaaatttgcccaaggttacacagctaataaattgataacttaatgtttagtgggttcaagtgtatttgtttagacttcaaatccacttctgctgaattctcagcacctacccctagtgtactgtaaatataaatattttaaggagtgagaacatgggacgagaacttcacgttcctagctcaggattggagttctacttatgagcaagaattctttcccatctttttacatcgtatgactgactttaattactggaagaattgaggaatttgttttgtgttaatcataattgatgctgtaatacttcactgttggtttagttctttagttctttatccacctcgtcctgtcatcaggtccccatggctaagaagattcatggtaaagtttgttaattaaaagtaatatttttaaattttataaaaatcagaagggttctaggaccrtatggaatctgtattggtaatctctggttctaggttttctatactggatttgggaagagaagtagagtggagtattgggatttactttgtcttaaaaatatccttagaagtaaaacatgtaaaaacata

SEQ ID NO: 696644 - DNA, 1333 bp, Homo sapiens
atgaaaagtggtctttttttagcagtagcaagggatatgttggtgaaattgcttttggccactgaacataatgattcaggatacttctgggttttttaaaaaaataccctgttatggatttattatccactaattaacttacactgaacttaaccatggtgtggcttccttcatgcaattataaaactcatttcaacaatagaaatggaagtgcagtggcctctcctcatcttgatggactcggtaggctcccccaggtgtatcaagctagarctatttttctatttttctgtttttctattttctgatctctaaaccctgcctattggtccagaggttaaattcagagtgatctatagaaacatggcccagtttcccaaaaacatagttgagatttgggacagatttcccatggactgggaaccaagatgtaaaatcttgtgtttgtaaaatcaaattttgcaatttgaaattcaaataggcatacaaaatcatgaaaatataaggatgtagggtgaatttcatgtggttcacaggtagaaacaaatggtgaagtgaagcagaaccctcaaataaacatttttttatgagagaaagaaaatgttatgagataaaatataaatgtggtgttgaatgaaatccccaaatggaaaagggaggagaggagcagagaggttctgaggagacaagccaagattgtgaggctgtgaggggctgggaaccagccacaagttcaggccacagaagagaatggaaggggtagtaagtactccacaacttgggccagcttctacatcaaccacttggcttcgactccgtgtaaaaaaaccctagacatcatgactatataacctgagagaatctccatatctaggtgtgtggattctagatttttatttcaaaataatcttgggcacttactccctgatactgggctccttctcttacctcaccccactgatccctgggcccaggctactacagttgcctcatgtcacatacaatctgtgcttgcctctgtttaggaggatgccaaagaccattaggacctaaataaggttttcttattaagtaagtaaaaaattggaaataaagaaacattggagggaaatctgaagttttcgtgttggggaaggactgcttcatttctgtgcttctctggaccctttcctctgagatgggggaggtgaacctgagcctcacgtttgtttggattgtgaagccccaggggcttctgaacagactgttcttgattctaaggcaggactgctgagagtgcaaagttcagccttaaaaataacatctctatctctcaactgggcaaagggccttg

SEQ ID NO: 696645 - DNA, 627 bp, Homo sapiens
atatgtgaaagtttcacacagctaaaattataaaacactattaaaaattaatgattacctaaataaataaagatactttttctggtaatacaatagaatgatatttttatttttgtttttgttttcaattttaccttaagttctgggatacatgtgcagatcatgcaggtttgtaacataggtatacatgtgccatggtggtttgctgtacccattaacccggcatctaggttgtaagccccacatgcattaggtatttgtcctaatgctatccctccccttgactcccatcccccaaaaggccccagtgtgtgatgtttccctccctgtgttcatgtgttctcactgttcaatgtccacttatgagtgagaaaacattgtgtttggttttctgttcctgtgttagcttgctgaaaatgatggtttccagcttcatccatgtccttgcaarggacatgaacccaccctttttatggctgcatagtattccatgatgtatatgcaccacattttctttatccagtgtatcattgatgggcatttgggttggctcaaatgctttgctattgtgaacagtcctgcaataagcatacatgtgcatgtgtctttatagtagaataattcgta

SEQ ID NO: 696646 - DNA, 656 bp, Homo sapiens
ttctgatgattaataacaaaatataattttcaaaagttactcttctctattaaattcacacagagcaagagtttaaaggayggcaggcttagcactctgttcatgtgcaaaatttcttcacagtcagcttgttgccaatataataaaaataatctattgattttcagtgaaaagccgtctgatacctaaataatgataaattcatctttgtgctattatgcttagtgttctttggttcttggtcttttcttttactgaaaagtagcggtcgttttctctctcctttctgctaaaaatagtgagatctttcatcataacctccagctttatgacagtcatatcaacttctgttaagcctatagttttatcacgcattctcttatccacttaaaggaagtacatagacaaacttcacaagcagagtaacatttatcttctaagttcttcacttgttgaaaacatattctcttatgctaaaaatatctttttacagaaagaaaaataagttgaaatgggacgccaattctcagaaggagggattgttcaaacacaaatgacctgattttttttttttactaggaatatgtttcctactataagaaaagacagcaaagagtgatacactggtaatattagaaaggggaaacttgctgtta

SEQ ID NO: 696647 - DNA, 656 bp, Homo sapiens
ttctgatgattaataacaaaatataattttcaaaagttactcttctctattaaattcacacagagcaagagtttaaaggatggcaggcttagcactctgttcatgtgcaaaatttcttcacagtcagcttgttgccaatataataaaaataatctattgattttcagtgaaaagccgtctgatamctaaataatgataaattcatctttgtgctattatgcttagtgttctttggttcttggtcttttcttttactgaaaagtagcggtcgttttctctctcctttctgctaaaaatagtgagatctttcatcataacctccagctttatgacagtcatatcaacttctgttaagcctatagttttatcacgcattctcttatccacttaaaggaagtacatagacaaacttcacaagcagagtaacatttatcttctaagttcttcacttgttgaaaacatattctcttatgctaaaaatatctttttacagaaagaaaaataagttgaaatgggacgccaattctcagaaggagggattgttcaaacacaaatgacctgattttttttttttactaggaatatgtttcctactataagaaaagacagcaaagagtgatacactggtaatattagaaaggggaaacttgctgtta

SEQ ID NO: 696648 - DNA, 1207 bp, Homo sapiens
gtaatgtgttatttttcttatttttaatattttgaacagtagttgataacatctgtgataagcatattcattttgtcatatttaccttatataagattaagtttagaataaaaacaactgctttaatcatttaatattatataattttacaaatgtggatatgtatgtataaaataataaaaatgtcaatttttctggcatcaagaatatgagatatatctaaatacatatttagtaaaatattcaaaacctcataattttaagttaagtacattttaccttgcatttgcaacttaggctgtttccacagaaacagcagctggcactcagaagcaagaatgtttataactttgatatttcagctgtgcttgtcaagtagatgatgaaaatgtcatttttcaaagaagcacctgcagcttttgggttccaacaggttcgtgaaatataacattttagcttttgaaaaagtttttgttcataatgtttctgtataaatcataaccatgcctgcttttcaaagaggcttaattaccctaggtctattttagaaaatgactttttaagcgtaataactgatttgaggtaacttagaattataatggtctgcaggtctctcagagtcacagtgaaaaaaattatcacaataatttgcctttggtcagatatctactggaggtagattctgtgcagagccacttttgttctgatacagcatctctattccgggagcccacttctatttgcctataaattcgtgactctgggagttttgttctcagcggtaaatcacacctggatagtgggctggtcacaatctctcccactactaaacaacaaatttaaaaaggtgctgtttgatacctgtaatctgttgtgcttgacatatttctgccatagatagggtataaagtgctaaygctctaccggttgaaaaattcaatgaagtacttattaagatgtcatcaaaattatctcctatcaatgcatttttttaaatgccagtgcctaaatattgtcaatgacaaaataataaagtggaagagagatgatttgtggtaagaagttcctcaaattattatttcaagattgcattttcagttcaataaaacacggtagttttaagaaaataaaatgatatcctttaaaaacattacactcttagttttatgttaaggattcaggcaagataaactaaaagatttcacag

SEQ ID NO: 696649 - DNA, 643 bp, Homo sapiens
aattttaatcttttttgtgtctcatgataattttccactcttaggttctaaaagctccaaagcagagtgcagagtgacagagatggttctcagaaatatcgagaatgggtgaagtttataaggaaaaagaggcacttaaatgttttcctttattttctggaactcaaaatatatgttgactgtttcagagaatattttccacctgaaactttgaagatgttctctctgagtttctgctgtaatgagccttaatagagcattacagtcaatttttatatgttyggtggattctgtggctggaagaagagaaaatcgttgaggtttaattgattatcttcaaattcaactggaaaataatttccttgctcagaagtaatatcatgtgggaaacagtaatgatgaacaaaattctcagaaaatcatgtaagcatatgtataggcaaataaaaatgtaaataaaggttaagtgtctacttcagttacaaatatttgatggttccataatgaaaagttgtcaagtgtaaccagcactcaagcaattggttagctagttctcttggagtatggtactatattggagagcaggattggctgttgcagctagtcaaaaggaacagcagcagaacagtagtttggcaagttt

SEQ ID NO: 696650 - DNA, 643 bp, Homo sapiens
aattttaatcttttttgtgtctcatgataattttccactcttaggttctaaaagctccaaagcagagtgcagagtgacagagatggttctcagaaatatcgagaatgggtgaagtttataaggaaaaagaggcacttaaatgttttcctttattttctggaactcaaaatatatgttgactgtttcagagaatattttccacctgaaactttgaagatgttctctctgagtttctgctgtaatgagccttaatagagcattacagtcaatttttatatgttcggtggattctgtggctggaagaagagaaaatckttgaggtttaattgattatcttcaaattcaactggaaaataatttccttgctcagaagtaatatcatgtgggaaacagtaatgatgaacaaaattctcagaaaatcatgtaagcatatgtataggcaaataaaaatgtaaataaaggttaagtgtctacttcagttacaaatatttgatggttccataatgaaaagttgtcaagtgtaaccagcactcaagcaattggttagctagttctcttggagtatggtactatattggagagcaggattggctgttgcagctagtcaaaaggaacagcagcagaacagtagtttggcaagttt

SEQ ID NO: 696651 - DNA, 643 bp, Homo sapiens
aattttaatcttttttgtgtctcatgataattttccactcttaggttctaaaagctccaaagcagagtgcagagtgacagagatggttctcagaaatatcgagaatgggtgaagtttataaggaaaaagaggcacttaaatgttttcctttattttctggaactcaaaatatatgttgactgtttcagagaatattttccacctgaaactttgaagatgttctctctgagtttctgctgtaatgagccttaatagagcattacagtcaatttttatatgttcggtggattctgtggctggaagaagagaaaatcgttgaggtttaattgattatcttcaaattcaactggaaaataatttccttgctcagaagtaatatcatgtgggaaacagtaatgatgaacaaaattctcagaaaatcatgtaagcatatgtataggcaaakaaaaatgtaaataaaggttaagtgtctacttcagttacaaatatttgatggttccataatgaaaagttgtcaagtgtaaccagcactcaagcaattggttagctagttctcttggagtatggtactatattggagagcaggattggctgttgcagctagtcaaaaggaacagcagcagaacagtagtttggcaagttt

SEQ ID NO: 696652 - DNA, 643 bp, Homo sapiens
aattttaatcttttttgtgtctcatgataattttccactcttaggttctaaaagctccaaagcagagtgcagagtgacagagatggttctcagaaatatcgagaatgggtgaagtttataaggaaaaagaggcacttaaatgttttcctttattttctggaactcaaaatatatgttgactgtttcagagaatattttccacctgaaactttgaagatgttctctctgagtttctgctgtaatgagccttaatagagcattacagtcaatttttatatgttcggtggattctgtggctggaagaagagaaaatcgttgaggtttaattgattatcttcaaattcaactggaaaataatttccttgctcagaagtaatatcatgtgggaaacagtaatgatgaacaaaattctcagaaaatcatgtaagcatatgtataggcaaataaaaatgtaaataaaggttaagtgtctacttcagttacaaatatttgatggttccataatgaaaagttgtcaagtgtaaccagcaytcaagcaattggttagctagttctcttggagtatggtactatattggagagcaggattggctgttgcagctagtcaaaaggaacagcagcagaacagtagtttggcaagttt

SEQ ID NO: 696653 - DNA, 659 bp, Homo sapiens
gatgcaaagttattttaatatctgtattagtcaaggactgtattagtatgtatacagctattagtctctagagaaacagaattaatagcatatatgtatatataaaagggagtttattaaggataactgacttacagggtcacaatgtaaagtcccacgataggccatctgcaagttgaggagcaaggaagcaagtggtaaattagttcaaatcccaamacttcagaagtaggaaagccaacagtgcagccttccatctgtggtcaaaggttggtgagaccctcgcaaaccactcaagaatccaaaagctgaagaacttggagtataatgtttgagggcaggaaacatccagcacaggaaaaagatgaaggctggaagactcagcaagtcagcttattctaaccatactggcagttgattaggtggtgaccacccacgtggagggtgggtctgcctctcccagtccactgattcaaatgttaatctcctttggcaccacccttacagacacacccaggaacaatattttgcatcctttaatccaatcaagttgacactaatattaaccatcacaatagcttagtagattttaatttaaaacaatataaattatttaattaaaaatcaagttggagttagaagattgtaaatcacctagt

SEQ ID NO: 696654 - DNA, 659 bp, Homo sapiens
gatgcaaagttattttaatatctgtattagtcaaggactgtattagtatgtatacagctattagtctctagagaaacagaattaatagcatatatgtatatataaaagggagtttattaaggataactgacttacagggtcacaatgtaaagtcccacgataggccatctgcaagttgaggagcaaggaagcaagtggtaaattagttcaaatcccaaaacttcaraagtaggaaagccaacagtgcagccttccatctgtggtcaaaggttggtgagaccctcgcaaaccactcaagaatccaaaagctgaagaacttggagtataatgtttgagggcaggaaacatccagcacaggaaaaagatgaaggctggaagactcagcaagtcagcttattctaaccatactggcagttgattaggtggtgaccacccacgtggagggtgggtctgcctctcccagtccactgattcaaatgttaatctcctttggcaccacccttacagacacacccaggaacaatattttgcatcctttaatccaatcaagttgacactaatattaaccatcacaatagcttagtagattttaatttaaaacaatataaattatttaattaaaaatcaagttggagttagaagattgtaaatcacctagt

SEQ ID NO: 696655 - DNA, 659 bp, Homo sapiens
gatgcaaagttattttaatatctgtattagtcaaggactgtattagtatgtatacagctattagtctctagagaaacagaattaatagcatatatgtatatataaaagggagtttattaaggataactgacttacagggtcacaatgtaaagtcccacgataggccatctgcaagttgaggagcaaggaagcaagtggtaaattagttcaaatcccaaaacttcagaagtaggaaagccaacagtgcagccttccatctgtggtcaaaggttggtgagaccctcgcaaaccactcaagaatccaaaagctgaagaacttggagtataatgtttgagggcaggaaacatccagcacaggaaaaagatgaaggctggaagactcagcaagtcagcttattctaaccatactggcagttgattaggtggtgaccacccaygtggagggtgggtctgcctctcccagtccactgattcaaatgttaatctcctttggcaccacccttacagacacacccaggaacaatattttgcatcctttaatccaatcaagttgacactaatattaaccatcacaatagcttagtagattttaatttaaaacaatataaattatttaattaaaaatcaagttggagttagaagattgtaaatcacctagt

SEQ ID NO: 696656 - DNA, 638 bp, Homo sapiens
tgtcccttccctctccatccctggtagctgacggtgctggagagaaagagaagttttcagtggtaagggcaaaacaagaaacaagtcatgagtttgctatttttggatgagttattgctgcatcacacattgttcttagtagtctcagtatgacacagcaatttttcatcayttaaatgcagttttagaatttttaataacactttaaattgctaatcataagactgaaacttgatgtcttcttatccggcaaaatacattagtcacttaccagctctgtagtagctttttaaaaaattcaggatcttggtcatgagggcttaggatccaaatcaattgctatataaatccttttggaaatgtattcagtgctataactacacgtgcactaccatattctagtattgtctttttagttccaaaatttagttgttatagaaatcaaagatagttgttcccagagtgtccaaaccatctaggccaactgtaattgaagaaagacaatattgtttgcagtctcagtatgaatgtggattccttctcaaataatcatttgcgcttacctcttgggctttgtctgaagaaaataaaagcaatatcacaaagtatgctgtacaaacatgtgcatctcaacattg

SEQ ID NO: 696657 - DNA, 615 bp, Homo sapiens
aaagaaaaaatcacttacaatagtatcaaaaaaatttaataccaaggaataactctaattacaatatgctggatagcaacacatgtatctgcatatgcagatggtctctgacttaacagttctttgacttatgactatttaactttacagtggtgcaaaagcaataaacattcagtagaaaccatacttcaagtacccatacaaccattctgtttttcactttcagtatagttttgaataaattacatgagatattcaacactttatyataaaatcagctttatgttagatgattttcccaaccgtaggccaatgtaagtgttctgagcacttttagggggggctaggctaagctatgatgttccataggttaggtgtgtaaaatgcattgttgacttaagacattttcaacttgtgataggtttatcaatgtaactccattgtaagtcgagcatttatccatccattcatctatctgtctgtctatctacctacctacctaccctctttctgactacctacctgtctatctgtatatatatatatgaaaagctatatagtatatatgtgtagatatctatatatacacacactatatatactatatatagatta

SEQ ID NO: 696658 - DNA, 615 bp, Homo sapiens
aaagaaaaaatcacttacaatagtatcaaaaaaatttaataccaaggaataactctaattacaatatgctggatagcaacacatgtatctgcatatgcagatggtctctgacttaacagttctttgacttatgactatttaactttacagtggtgcaaaagcaataaacattcagtagaaaccatacttcaagtacccatacaaccattctgtttttcactttcagtatagttttgaataaattacatgagatattcaacactttattataaaatcagctttatgttagatgattttcccaaccgtaggccaatgtaagtgttctgagcacttttagggggggctaggctaagctatgatgttccataggttaggtgtgtaaaatgcattgttgacttaagayattttcaacttgtgataggtttatcaatgtaactccattgtaagtcgagcatttatccatccattcatctatctgtctgtctatctacctacctacctaccctctttctgactacctacctgtctatctgtatatatatatatgaaaagctatatagtatatatgtgtagatatctatatatacacacactatatatactatatatagatta

SEQ ID NO: 696659 - DNA, 585 bp, Homo sapiens
actgctaaaatatgagtatcattataaaaggagttattctcatcttgattctaaaactttccatcagacatagcacaacaaagactgacctaggagtgagaagctcagtcatctcatttagatactatcactaagtattcaaggtttgttcttagctcactatgcattcactcaatcaacagataaatatctgccgtaggtctcctctgtgcmgagtaccggacacacaatgaagggtaagttaagaccctgactttaaggaccttacagccacttctggcatgtcatttcagttttgtggggctctgtctttccctcctcatctgttgcacccgcttgtgccctccaggtacacacagaacagtgcctttgtgactctgtcctgttttcctgaatggccttcacttcccactcttgttccctccagactgggctaaaatatgacttggatgatatattttttttctaaaataacaactttattaagatcatccacacaccatagaattcacccaccgaaagtatacaattgaatagtttttagtacattcacggagtttagtacattcactgtgaggccgccat

SEQ ID NO: 696660 - DNA, 2626 bp, Homo sapiens
cgtgaatgatagcttttgttccagttatcagtgaatctttaaaaactatgaattatttacctcgtaggttattcatcactttgtgggtatttgtcttccttactaaaaacaagttatttaatattgtttgaaatttaaaaggaaaacagttgaaaatgtaattgaaagcaatgaatgataaataaagcacactgaccatgcttgccccagccccaaccatttctcagttcttccataactgtgatgtgagcttcttcgtttatgatatggaattagttcccagtggtactttggggtgtccaatacttttctttatgtactgttttctctattctggaatggtgaaaaaatattttcatagtttaggctgggcataatagactaatgtatcagagaaatcagagatggagaaggtcatttagtctctgtttgtttcaccgtaagattgatccctcaatgcactttctagtctgtgcctaatggatttacattaccgtaaaaaatatggattttgaatggctgctaagaggataaaagaagatagatactggaattatcttaacatgtaaaattcataataccaggagcctaacgaagctgaaacttaaaattttttagcgtttagtgactagtttacagcaattactaaactcattagttagtctcatcatcaraaaactttctagtttgaggtctgagacctttttaagacgtcttcattctgggtaatcccaaaggaatttaatttgagttgcaatagaatctaggggtgcattgatccagtaagccagcgatatcaaaagtgcttttttggatgtgccttggcctggggttttttgctaggattgttgttgctaccatccttgtggtttaggtctgataatcagccatttagttgccaatgtctctgagaagaagagtttttaggccaggcataatggctcatgcctgtaataccagcaccttgggaggatcacttgagcccaggagttcgagagcagcctggccaacatggagaaaccctatctctaccaaaaatagaaaaattaccaccagacgcggtggctcacacctgtaatcctagcactttgggaggccaaggtgggcagattgcctgatctcaggagttcgagaccagcctgggcaacatggcaaaaccctgtctctactaaaaatacaaaaaaaattagccaggcgtggtggcatgtgcctaataatcccagctgcttgggaggctgaggcatgagaatcgcttgaacctgggaggcggaggttgcagtgagccgagattgtgccactgtactctggcctggcagtggagcgagactctgtctcaaaaaagaaaaaaaaaaatagaaaaataagtcaggcatggtggtgtgcacctatagtcccagctactcgggaggctgaggtgggaggatcacctgagcgtgggatgtggaggttgcagtgagctgagaatgggccactgcactgcagcctgggccacagagtgagaccctgtctcaaaaaaaaaaaaaaaaaaagaaaagaaaaaatgtagaacttagcataaagtaaaaatggcatatgacatctcctgtggcttctgtgtcaccacttaaagtatttggtggaggtcacaaaatcagtactttgggagccaggcagttgaagagtaaagaaagtgagtggatcacagtcaggggttagacaatagaggctggtggagaccatggataactagagatttggctttaggagattgttgtcatgttgtacccactgttgtcagatcatttagatttcaagagaagctgaaaatttgaattttcatgttaacgtgtcctaatttttaaatgttgatgactaattcaaggttttcaaaatagtgagatctaagcaaaatacatctgctgaccagatgtggctctaggcttttagtgtgtaacctcttgtttataggaatacttaggacagcacttggtttctttgagtttcaccgttgaagctaagcagtaatcaaggatgctgccggatacccttggaaagcttatggtataggtcggaaagaagtatgggtgagagaaaacaagtcgcagaaaaggcaggatgggaaggaaggagaacaactgaaggagacagacaaaagaaatgataccatgggaagtgggagagtggccatcatgtttctcaggttgcatactgagaattctgcaaggtaacattacttattaaatattaccactgttgtatggaggcagtatagtgttatagttgaaagtgcagagtttagtgcccaagaactgaattcaaggcctggagttgttcctggctctgtggcagtggtatggcttgagtgttacttgccttctcctctctgacagtaccaacatcagggattgttgtgaagtttaaaatgagataacctggatatagcatttaacatagtgctggcgtgttgagtgcttaatacatgcttacaattattattagcgtattctaagttggtataggtgatgttatatgagatttacattaaaagtaaagagatggtagtaaaaaatccattaatttaattttaaaaattacaaatgcatggtcacttgtaaaaactggaaaattaaaattggtttacttaatt

SEQ ID NO: 696661 - DNA, 2626 bp, Homo sapiens
cgtgaatgatagcttttgttccagttatcagtgaatctttaaaaactatgaattatttacctcgtaggttattcatcactttgtgggtatttgtcttccttactaaaaacaagttatttaatattgtttgaaatttaaaaggaaaacagttgaaaatgtaattgaaagcaatgaatgataaataaagcacactgaccatgcttgccccagccccaaccatttctcagttcttccataactgtgatgtgagcttcttcgtttatgatatggaattagttcccagtggtactttggggtgtccaatacttttctttatgtactgttttctctattctggaatggtgaaaaaatattttcatagtttaggctgggcataatagactaatgtatcagagaaatcagagatggagaaggtcatttagtctctgtttgtttcaccgtaagattgatccctcaatgcactttctagtctgtgcctaatggatttacattaccgtaaaaaatatggattttgaatggctgctaagaggataaaagaagatagatactggaattatcttaacatgtaaaattcataataccaggagcctaacgaagctgaaacttaaaattttttagcgtttagtgactagtttacagcaattactaaactcattagttagtctcatcatcagaaaactttctagtttgaggtctgagacctttttaagacgtcttcattctgggtaatcccaaaggaatttaatttgagttgcaataraatctaggggtgcattgatccagtaagccagcgatatcaaaagtgcttttttggatgtgccttggcctggggttttttgctaggattgttgttgctaccatccttgtggtttaggtctgataatcagccatttagttgccaatgtctctgagaagaagagtttttaggccaggcataatggctcatgcctgtaataccagcaccttgggaggatcacttgagcccaggagttcgagagcagcctggccaacatggagaaaccctatctctaccaaaaatagaaaaattaccaccagacgcggtggctcacacctgtaatcctagcactttgggaggccaaggtgggcagattgcctgatctcaggagttcgagaccagcctgggcaacatggcaaaaccctgtctctactaaaaatacaaaaaaaattagccaggcgtggtggcatgtgcctaataatcccagctgcttgggaggctgaggcatgagaatcgcttgaacctgggaggcggaggttgcagtgagccgagattgtgccactgtactctggcctggcagtggagcgagactctgtctcaaaaaagaaaaaaaaaaatagaaaaataagtcaggcatggtggtgtgcacctatagtcccagctactcgggaggctgaggtgggaggatcacctgagcgtgggatgtggaggttgcagtgagctgagaatgggccactgcactgcagcctgggccacagagtgagaccctgtctcaaaaaaaaaaaaaaaaaaagaaaagaaaaaatgtagaacttagcataaagtaaaaatggcatatgacatctcctgtggcttctgtgtcaccacttaaagtatttggtggaggtcacaaaatcagtactttgggagccaggcagttgaagagtaaagaaagtgagtggatcacagtcaggggttagacaatagaggctggtggagaccatggataactagagatttggctttaggagattgttgtcatgttgtacccactgttgtcagatcatttagatttcaagagaagctgaaaatttgaattttcatgttaacgtgtcctaatttttaaatgttgatgactaattcaaggttttcaaaatagtgagatctaagcaaaatacatctgctgaccagatgtggctctaggcttttagtgtgtaacctcttgtttataggaatacttaggacagcacttggtttctttgagtttcaccgttgaagctaagcagtaatcaaggatgctgccggatacccttggaaagcttatggtataggtcggaaagaagtatgggtgagagaaaacaagtcgcagaaaaggcaggatgggaaggaaggagaacaactgaaggagacagacaaaagaaatgataccatgggaagtgggagagtggccatcatgtttctcaggttgcatactgagaattctgcaaggtaacattacttattaaatattaccactgttgtatggaggcagtatagtgttatagttgaaagtgcagagtttagtgcccaagaactgaattcaaggcctggagttgttcctggctctgtggcagtggtatggcttgagtgttacttgccttctcctctctgacagtaccaacatcagggattgttgtgaagtttaaaatgagataacctggatatagcatttaacatagtgctggcgtgttgagtgcttaatacatgcttacaattattattagcgtattctaagttggtataggtgatgttatatgagatttacattaaaagtaaagagatggtagtaaaaaatccattaatttaattttaaaaattacaaatgcatggtcacttgtaaaaactggaaaattaaaattggtttacttaatt

SEQ ID NO: 696662 - DNA, 652 bp, Homo sapiens
ggggaccactagtctatggtagatttagctctgcaacagcagagttgagtagttgcaaaagagatcacatgtctggcaaagcttttttttttttttttttttttaactatcttatccttgcagagaagtttgccagcctctgtcctgtaggaaaacttcccagtaagaaagatagaagccatcccctttcatgactaagcctaggaagtctcataactcacttctggcatagtagtaacctgctaagattaaagagaagagggattaaactctacttttaaaaagggaagagggaggttccagaaaaacctgtggaacaatagatatgcttacagccatcttgtaaaatacgaacttctaatgrctagattgtgatttgtttcgtaaaaatagtattccaaaaaacaaatgaggcagttcacaagcaaggaagtgattttttttcatcataaaaatttgttaatgtgtagcttagagatgttttctactaacagaataattcatcaaaaataaaatacaatattactttttaaataaggccttacatttaaattcacttttaaactgtgtctctatggtgtaccaaacaggctaatattcttcttaaactaagtttttaaaatagaaaatgtcaagatgtatacaagacaat

SEQ ID NO: 696663 - DNA, 652 bp, Homo sapiens
ggggaccactagtctatggtagatttagctctgcaacagcagagttgagtagttgcaaaagagatcacatgtctggcaaagcttttttttttttttttttttttaactatcttatccttgcagagaagtttgccagcctctgtcctgtaggaaaacttcccagtaagaaagatagaagccatcccctttcatgactaagcctaggaagtctcataactcacttctggcatagtagtaacctgctaagattaaagagaagagggattaaactctacttttaaaaagggaagagggaggttccagaaaaacctgtggaacaatagatatgcttacagccatcttgtaaaatacgaacttctaatggctagattgtgatttgtttcgtaaaaatagtattccaaaaaacaaatgaggcagttcacaagcaaggaagtgattttttttcatcataaaaatttgttaatgtgtagcttagagatgttttctactaacagaataattcatcaaaaataaaatacaatattactttttaaataagkccttacatttaaattcacttttaaactgtgtctctatggtgtaccaaacaggctaatattcttcttaaactaagtttttaaaatagaaaatgtcaagatgtatacaagacaat

SEQ ID NO: 696664 - DNA, 642 bp, Homo sapiens
cttcactggtttaccgtgtgactttagctaaattgtctaattattccttttcatgttattcgcctatatgaagtagggttaataataactactatgaacgcattatcrggaacattaaataataaaatgggtgcattttcagtgacattatgagtatcattctgcttctttcattacccaatgctagcaagctagttctaactttcgtcttatttttctttattcaagcttcacctggaccatttttcaatggctccgtggtctgactgtagatatgatgacgccactccatgtccattcaaaagttaagtgaggaggtgttaccttacctatttagtcacaatggttttcagaacattccaaatgaagcctgctttttctcaaagaaaatagaatatacatataccaaaacattttcaaattaaaataggcactgaccagacatattgatgccaggaataatctaagctctactcaaagctggtttgtaggattgtaaattgagaccagcctttgcttcttaccctatagaggcagtgagtcaggatttcctgaaattaagcaatcatgtaaaatgcattagtggcttccagaacacctcgggcttccttgtgccaagaaattaacatgttttctacttgg

SEQ ID NO: 696665 - DNA, 618 bp, Homo sapiens
cgctttgttcttattctatttgaactttcttttagttgttgttgttttttgttttgttttgttttcatttaagacggagtctcrctcttgttgcccaggatggagtgcaatgacgtgatctcggctcaccgcaacctccacctcccagattgaagcgattttcctgcctcagcctcccgagtagctgggattacaggcacgtgccaccacacccggctaattttttgtatttttagtagagatggggcttcaccatgttggccaggctggcctcaacctcctgacctcaggtgatccacccacctcagcctcctgtagtgctgggattacaggaatgagccactgtgcctggcctctatttgaagtttctgtaccaatatcacctctgtattgaaagaccttttgtttccaaaacagcatttttttcctagtgaccttctatctttcttcactgattacttcttactcctgtacctacccccggaatgctgcagttgtcccagggttaatgtcattgtccctcctcctgtcaagtgtcagaaattcaaatggtagcagggactaggccaggtaggtaaaatgaaagtcagatataattaataggtagcgtggggactc

SEQ ID NO: 696666 - DNA, 618 bp, Homo sapiens
cgctttgttcttattctatttgaactttcttttagttgttgttgttttttgttttgttttgttttcatttaagacggagtctcactcttgttgcccaggatggagtgcaatgacgtgatctcggctcaccgcaacctccacctcccagattgaagcgattttcctgcctcagcctcccgagtagctgggattacaggcacgtgccaccacaccyggctaattttttgtatttttagtagagatggggcttcaccatgttggccaggctggcctcaacctcctgacctcaggtgatccacccacctcagcctcctgtagtgctgggattacaggaatgagccactgtgcctggcctctatttgaagtttctgtaccaatatcacctctgtattgaaagaccttttgtttccaaaacagcatttttttcctagtgaccttctatctttcttcactgattacttcttactcctgtacctacccccggaatgctgcagttgtcccagggttaatgtcattgtccctcctcctgtcaagtgtcagaaattcaaatggtagcagggactaggccaggtaggtaaaatgaaagtcagatataattaataggtagcgtggggactc

SEQ ID NO: 696667 - DNA, 592 bp, Homo sapiens
aaagcaaaccattgcaaattagttttacacggtgagctctgtgagggcattttagagtgaatcgacttgtactaaatgaattatgcagttgtttcccctttagaggtggagatgcatagagctgatctctggtttattcctgaacttgcattagactccaagcttttcttagtcatcattttttttttttagagacagggtttcactatattgttcaggctagtcttgaacacctgagctcaagcaattctcctatctcagcctctggtgtaggctgggactccaggcacatgccaccacacctgactttagtcatctttgaatccctccacctagaacaatgctcagcctctrgtaggcttgtagggagaaatggttttcaaaattacttaaattaatgagtaaataaatacatagaaatgagtaaatcgtgagtaggtgagtaaatgaatagtgaataggcacacaaaaatgaaagggtagaatcatattggtaaaggagtcagcgaatcaatgaacaggacatttcaagacctgtgtaaggacaatagactactgatatgaacaggtccatgacaatagactactaata

SEQ ID NO: 696668 - DNA, 592 bp, Homo sapiens
aaagcaaaccattgcaaattagttttacacggtgagctctgtgagggcattttagagtgaatcgacttgtactaaatgaattatgcagttgtttcccctttagaggtggagatgcatagagctgatctctggtttattcctgaacttgcattagactccaagcttttcttagtcatcattttttttttttagagacagggtttcactatattgttcaggctagtcttgaacacctgagctcaagcaattctcctatctcagcctctggtgtaggctgggactccaggcacatgccaccacacctgactttagtcatctttgaatccctccacctagaacaatgctcagcctctagtaggcttgtagggagaaatggttttcaaaattacttaaattaatgagtaaataaatacatagaaatgagtaaatcgtgagtaggtgagtaaatgaatagtgaataggcacacaaaaatgaaagggtagaatcatattggtaaaggagtcagcgaatcaatgaacaggacatttcaagacctgtgtaargacaatagactactgatatgaacaggtccatgacaatagactactaata

SEQ ID NO: 696669 - DNA, 612 bp, Homo sapiens
tatatatgacggagttttgctcttgttgcccaggctggagtgcaayggcacaatcttggctcactgcaacctccacctcctggattcaagtgattctcctgcctcagcctcccaagtagctgggactacaggcatgcaccactataccaggctaatttttatttttagtagagacagggtttcaccatgttggccaggctggtctcagactccttacctcaagtgacccacttgcctcggcctcccaaagtgctgggattacaggcgtgagccaccgcacccggcctaacgtcagtatattttaacccaactattttcatctaaggatatcgttaagtttagctcttttttcccaaacaccagtgcacttctttttttttttattttttttttacagcagcgtttatgacatttaatgtcaactttgcatttctcacagtgttttgcttaactcacaaggtctcattttcttcatgcaactgtcttaaaccatttgccttttaaaatgaatcacctgttcttagatctctgttgccttttgcagctgtaggattttgtggaaaaatcattttagggtctccgccttaaaactgtttcatcctgacttaaaag

SEQ ID NO: 696670 - DNA, 612 bp, Homo sapiens
tatatatgacggagttttgctcttgttgcccaggctggagtgcaatggcacaatcttggctcactgcaacctccacctcctggattcaagtgattctcctgcctcagcctcccaagtagctgggactacaggcatgcrccactataccaggctaatttttatttttagtagagacagggtttcaccatgttggccaggctggtctcagactccttacctcaagtgacccacttgcctcggcctcccaaagtgctgggattacaggcgtgagccaccgcacccggcctaacgtcagtatattttaacccaactattttcatctaaggatatcgttaagtttagctcttttttcccaaacaccagtgcacttctttttttttttattttttttttacagcagcgtttatgacatttaatgtcaactttgcatttctcacagtgttttgcttaactcacaaggtctcattttcttcatgcaactgtcttaaaccatttgccttttaaaatgaatcacctgttcttagatctctgttgccttttgcagctgtaggattttgtggaaaaatcattttagggtctccgccttaaaactgtttcatcctgacttaaaag

SEQ ID NO: 696671 - DNA, 612 bp, Homo sapiens
tatatatgacggagttttgctcttgttgcccaggctggagtgcaatggcacaatcttggctcactgcaacctccacctcctggattcaagtgattctcctgcctcagcctcccaagtagctgggactacaggcatgcaccactataccaggctaatttttatttttagtagagacagggtttcaccatgttggccaggctggtctcagactccttacctcaagtgacccacttgcctcggcctcccaaagtgctgggattacaggcrtgagccaccgcacccggcctaacgtcagtatattttaacccaactattttcatctaaggatatcgttaagtttagctcttttttcccaaacaccagtgcacttctttttttttttattttttttttacagcagcgtttatgacatttaatgtcaactttgcatttctcacagtgttttgcttaactcacaaggtctcattttcttcatgcaactgtcttaaaccatttgccttttaaaatgaatcacctgttcttagatctctgttgccttttgcagctgtaggattttgtggaaaaatcattttagggtctccgccttaaaactgtttcatcctgacttaaaag

SEQ ID NO: 696672 - DNA, 612 bp, Homo sapiens
tatatatgacggagttttgctcttgttgcccaggctggagtgcaatggcacaatcttggctcactgcaacctccacctcctggattcaagtgattctcctgcctcagcctcccaagtagctgggactacaggcatgcaccactataccaggctaatttttatttttagtagagacagggtttcaccatgttggccaggctggtctcagactccttacctcaagtgacccacttgcctcggcctcccaaagtgctgggattacaggcgtgagccaccgcacccggcctaacgtcagtatattttaacccaactattttcatctaaggatatcgttaagtttagctcttttttcccaaacaccagtgcacttctttttttttttattttttttttacagcagcgtttatgacattyaatgtcaactttgcatttctcacagtgttttgcttaactcacaaggtctcattttcttcatgcaactgtcttaaaccatttgccttttaaaatgaatcacctgttcttagatctctgttgccttttgcagctgtaggattttgtggaaaaatcattttagggtctccgccttaaaactgtttcatcctgacttaaaag

SEQ ID NO: 696673 - DNA, 632 bp, Homo sapiens
tacagaatggagctttgtgggtttgcttttcaactccatcttcttaattccatctgcagtagctctgtagggcttacccctgttcactcagccaagtttaggaaatatctcactgtcactccttacatcatattaaattacacrcacttaggtgttagcaattatagggtattaatttttaatgacatgcaaaaacatttacagcaatctcatacccacagagttgtaactctgcaatgatgatttcttagtatgggaaaaatcttcttcagagttattaattgaattacaaaagtgagtgttaatacaatttaacaaacattcacagaaacactgcatcatacaagatattttactggaggctggatgcttgtgctagtgttcggtgccagtactaatgttgggtcctaggtgctggtgccaatactgacctgagttctagtttgattgcactgtggtctgagagacagtttgttgtaatttctgttcttttacatttgctgaggagtgctttacttccaactatgtagtcaatttttggtgctgaaaagaatgtatattctgttgatttagggtggagagttctgtagatatctattaggtccacttggtgcagagctgagttcaattcc

SEQ ID NO: 696674 - DNA, 801 bp, Homo sapiens
  misc_feature 701, 702, 703, 704, 705, 706, 707, 708, 709, 710, 711, 712,713, 714, 715, 716, 717, 718, 719, 720, 721, 722, 723, 724,725, 726, 727, 728, 729, 730, 731, 732, 733, 734, 735, 736,737, 738, 739, 740, 741, 742, 743, 744, 745, 746, 747: n = A,T,C or G
  misc_feature 748, 749, 750, 751, 752, 753, 754, 755, 756, 757, 758, 759,760, 761, 762, 763, 764, 765, 766, 767, 768, 769, 770, 771,772, 773, 774, 775, 776, 777, 778, 779, 780, 781, 782, 783,784, 785, 786, 787, 788, 789, 790, 791, 792, 793, 794: n = A,T,C or G
  misc_feature 795, 796, 797, 798, 799, 800: n = A,T,C or G
ctgatctcaaacaactgtagctgaagtcatcacaagtacaatggtcattgtaagcataagaatcaggggcatattttatttctaggtaaaaactatttttaagatacttcataaatcactggcaaggtcaaccacactaaacattccagaacacacaggggaaatctccgtgggcgtgcccagacctctgggctgcagcgatgcattgttctgaggcttcctgcacggagctgtccccgtcgtcagcaagtctgctgggcccagagcagtgcctgcgggaggcttactgtgacccagctgtacaggtgcagcagacaccatggtccacaccgccagtccccacacagtgcggtgatcactacgaggcacacctactgcaggcccgctgtcttcatgcagcarataagaccacagcagcctatagagctgttgagaacatgaagtggagtaacaaagaccgagcactttacacccggcctgtcattcggccagtgttcatcatttcacagatagggataatcactttttatcccaggccatgctgatcaccttacccaggtgcatttagtggtaggctcaaccccaagcctactgctgaatacacatgaatgcatgcatgaataatgaatcgcgaatgagcgaagagttcccttttttacagacgaggatagcaagaatctgaaaaggcaatatatgaaaannnnnnnnnnnnnnnnnnnnnnnnnnnnnnnnnnnnnnnnnnnnnnnnnnnnnnnnnnnnnnnnnnnnnnnnnnnnnnnnnnnnnnnnnnnnnnnnnnnna

SEQ ID NO: 696675 - DNA, 1063 bp, Homo sapiens
tatcctcatattatataaagaatatcatttgaagtatttctccttgtgtaacatctctctaagtaaaaattaaatttctctagtagaataactttaaaacaacacaaaacttcatttatccatagatatatatttaagccatctttttacttttttgtaaaagttttgaaaaactttttctttcaggcaataaaagtaattcagaatcattgtaaagagtttttagaaagtactgttatttttaaaattagtaattagtaataatgccagagttaaccactgttagcactttgctatatttccttttatatttttatctatgctgcacatttgcatagacacacacacatgcttctataaatacttaatggtatttgtctacacacatatgtatatatatatatttaggttggaattgtactatgtttacttttatcatgtactatgccaagaacatattatatattgttcattgctggtctttctggaacactatgttcagagatataytatcatttcaccacatataatctatcataatttaactaatatgctattgtggataataagtgttttcattttcattatctattgagtttattggtctttaacagctcttacttttatttattctaattcctttagcttattttgcttgtatattttacctctcaataaccttcaaagtttagtcttttgtccttatgttctttcaaaatggcattttcttgactctcagtggtttcgtcccatggcctgtttacctttagttccttgattctatctgtctcaccttccttgtattttctagagtagatctcatttccgggatgtgtttcctggcaggctttcactgtggtgaagtgggaacaacgtgaccccacagcccacttcctactctgtcagaaccttctcctcaaagagcacgctcaggacctggggttcttccccctgtggctggctaggtcacagtgccctctggaatcatgttcccagccatcccttgctgagagaggaacattccatgttctagagtctctaacatgtgcagcctctgatgagg

SEQ ID NO: 696676 - DNA, 630 bp, Homo sapiens
ttggcttagagctgatcctattccaacacagtcactgagagctttgtttgcagcattatatattgtagctcctttactgtggttgaatttttaggagatggatgaatggatttcttgcttctgaatcccaggatctctccttttaggccatttccctacattagattttcactgatcacttgttgtttagattgtggctttagtgtcctacttgcctttctccctacctgttttctcagtaagagagactcatttctattaggttgatgcaaaagtaattgtggttaacggtaaaaaccgtgattccttttgcaccaatctaataaatgaacctcctgtgtcttcattccaactctcacgacctgttgtcttttgtgataattgacttcctaaaagaaagaagcagaagcttctggacaagttaaggactaygcttggaaatggctcaagggtaacttctactgcatttttttggtcaaagctaccacaggcccttctagatttaagagattgtagaaataaaccccatgtgttgatgaaggagtatcaagatcacactggagaagagcatgtaggataaaggatatcatcatgaccatctttgaaaaatacaatttgccacatttgtca

SEQ ID NO: 696677 - DNA, 574 bp, Homo sapiens
atgaccttaagtttayatgtaaccatataaatgaatcccacaatgttgccttagagaagcaagatgcaaaaacaaacaaaacacacacacacacacacacagtgtgattctaactatagggttttaaaaaatgggtaaatggcggggcacagtggctcatgcctataattctagcactttgagaggccaaggtgggagaatcacttgagcccaggagtttgagaccagactgggcaacatagtgagaccccatctctacaaaaaaacttaaaaaatttttaatgggtaaaattaaagtatattgcttagaaatatgtatacctaaaggctaaaatgtaaaaaagcaagaatgggttatcacagaagtcagaataatgtttacgtctatgtgagaggaagaggactgtaactggggaggaggtggggggagttttggaggaatgacgctatttactttttgaccaaagtagtggttataagggatataaggctataaagaattgctttctaattattctgtaagatatatatgttttatgttctttctgttcgaaaattacctcactacaaaaaa

SEQ ID NO: 696678 - DNA, 574 bp, Homo sapiens
atgaccttaagtttacatgtaaccatataaatgaatcccacaatgttgccttagagaagcaagatgcaaaaacaaacaaaacacacacacacacacacacagtgtgattctaactatagggttttaaaaaatgggtaaatggckgggcacagtggctcatgcctataattctagcactttgagaggccaaggtgggagaatcacttgagcccaggagtttgagaccagactgggcaacatagtgagaccccatctctacaaaaaaacttaaaaaatttttaatgggtaaaattaaagtatattgcttagaaatatgtatacctaaaggctaaaatgtaaaaaagcaagaatgggttatcacagaagtcagaataatgtttacgtctatgtgagaggaagaggactgtaactggggaggaggtggggggagttttggaggaatgacgctatttactttttgaccaaagtagtggttataagggatataaggctataaagaattgctttctaattattctgtaagatatatatgttttatgttctttctgttcgaaaattacctcactacaaaaaa

SEQ ID NO: 696679 - DNA, 574 bp, Homo sapiens
atgaccttaagtttacatgtaaccatataaatgaatcccacaatgttgccttagagaagcaagatgcaaaaacaaacaaaacacacacacacacacacacagtgtgattctaactatagggttttaaaaaatgggtaaatggcggggcacagtggctcatgcctataattctagcactttgagaggccaaggtgggagaatcacttgagcccaggagtttgagaccagactgggcaacatagtgagaccccatctctacaaaaaaacttaaaaaatttttaatgggtaaaattaaagtatattgcttagaaatatgtatacctaaaggctaaaatgtaaaaaagcaagaatgggttatcacaraagtcagaataatgtttacgtctatgtgagaggaagaggactgtaactggggaggaggtggggggagttttggaggaatgacgctatttactttttgaccaaagtagtggttataagggatataaggctataaagaattgctttctaattattctgtaagatatatatgttttatgttctttctgttcgaaaattacctcactacaaaaaa

SEQ ID NO: 696680 - DNA, 626 bp, Homo sapiens
tcttttgtattatattttagcctcaasttcatttttgctctgatctttattattttttaaagaaactttaaaaaattcctattgagattattttctttttaaattaatgtatatattttatttcaatagcttttggggtacaagtgttttttggttacattaacaaattatatagtggtgaagtctgagattttagtgcatctgtgacctgagtagagtacactgtacccaatatagttttttgtcactcactcccctctcgttcaccattctgagtcaccaaagcccattatattactctgcgtttctgtactcataatttagctcccacttataagtgagaacatacagtatttgattttctattcttgagtcatttcacttaaaatattgggctccagctccatccaagttgctgcaaaaatattatttcatacttttttacggttgagtagtattccatggtgtatatataccacattttctttatgcactcattggtcaagggacacttaggttggttccatatctttacaatagagaattgtcctacaataaatatacacatgcaagtgtcttttttggtattggtattgtttgtatttttgtacagtttgtattttttg

SEQ ID NO: 696681 - DNA, 626 bp, Homo sapiens
tcttttgtattatattttagcctcaagttcatttttgctctgatctttattattttttaaagaaactttaaaaaattcctattgagattattttctttttaaattaatgtatatattttatttcaatagcttttggggtacaagtgttttttggttacattaacaaattatatagtggtgaagtctgagattttagtgcatctgtgacctgagtagagtacactgtacccaatatagttttttgtcactcactcccctctcgttcaccattctgagtcaccaaagcccattatattactctgcgtttctgtactcataatttagctcccacttataagtgaraacatacagtatttgattttctattcttgagtcatttcacttaaaatattgggctccagctccatccaagttgctgcaaaaatattatttcatacttttttacggttgagtagtattccatggtgtatatataccacattttctttatgcactcattggtcaagggacacttaggttggttccatatctttacaatagagaattgtcctacaataaatatacacatgcaagtgtcttttttggtattggtattgtttgtatttttgtacagtttgtattttttg

SEQ ID NO: 696682 - DNA, 636 bp, Homo sapiens
gtcagtggctcacgcctgtaatcctaacactttgggaggctgaggtgggaggattgcttgagcctaggagttcaagaccagcctggacarcatggcaagccctgtctttacaaaagatacaaaaattagccagatgtggtgccatacgcctgtggttccagctactcaggaggctgaggcaggagggttgcttgagcccagagaggtcgaggttgcagtgagctgagattgcgccactgcacaccagcctgggcaacagagccagaccttatctcaaaaaaaaaaataaaataaaataaaataaaatggaaaatgccatgcagattaaaaaaagattagacaaaaattaaaagccctaaatcagccccaccccaaagatgcccctattgtattaaactttctcctgaagagaaattccagaacgagtaagggagagtcactagagcaagtgtctcttttagtttaccttctcttggctgtctctgactcagctattagaggtaaagtcaaagggggttgcaaaagctcaagctgaacgaagtagcagtagaatgatgcagaggactgccgtaacctgcgtactaccagcagatgtcagcatacaaactgttcacacacaaggattgctgacagggg

SEQ ID NO: 696683 - DNA, 636 bp, Homo sapiens
gtcagtggctcacgcctgtaatcctaacactttgggaggctgaggtgggaggattgcttgagcctaggagttcaagaccagcctggacaacatggcaagccctgtctttacaaaagatacaaaaattagccagatgtggtgccatacgcctgtggttccagctactcaggaggctgaggcaggagggttgcttgagcccagagaggtcgaggttgcagtgagctgagattgcgccactgcacaccagcctgggcaacagagccagaccttatctcaaaaaaaaaaataaaataaaataaaataaaatggaaaatgccatgcagattaaaaaaagattagacaaaaattaaaagccctaaatcagccccaccccaaagatgcccctattgtattaaactttctcctgaagagaaattccagaacgagtaagggagagtcactagagcaagtgtctcttttagtttaccttctcttggctgtctctgactcagctattagaggtaaagtcaaagggggttgcaaaagctcaagctgaaygaagtagcagtagaatgatgcagaggactgccgtaacctgcgtactaccagcagatgtcagcatacaaactgttcacacacaaggattgctgacagggg

SEQ ID NO: 696684 - DNA, 636 bp, Homo sapiens
gtcagtggctcacgcctgtaatcctaacactttgggaggctgaggtgggaggattgcttgagcctaggagttcaagaccagcctggacaacatggcaagccctgtctttacaaaagatacaaaaattagccagatgtggtgccatacgcctgtggttccagctactcaggaggctgaggcaggagggttgcttgagcccagagaggtcgaggttgcagtgagctgagattgcgccactgcacaccagcctgggcaacagagccagaccttatctcaaaaaaaaaaataaaataaaataaaataaaatggaaaatgccatgcagattaaaaaaagattagacaaaaattaaaagccctaaatcagccccaccccaaagatgcccctattgtattaaactttctcctgaagagaaattccagaacgagtaagggagagtcactagagcaagtgtctcttttagtttaccttctcttggctgtctctgactcagctattagaggtaaagtcaaagggggttgcaaaagctcaagctgaacgaagtagcagtagaatgatgcagaggactgcygtaacctgcgtactaccagcagatgtcagcatacaaactgttcacacacaaggattgctgacagggg

SEQ ID NO: 696685 - DNA, 1861 bp, Homo sapiens
taagaatccattatgtcatattgaaaatttggaattttttcctgaaaagataaggagctaataaacaactgtaagacaaaaataatcattcaacatcttatttagaagataattagtgattgggcatgatggttcatgcctataatctcagctgtttggggggccgaggcagaaggatcacatgaacccaggggtttgagaccagccttggcaacatagcaagatcctgtctctacaaaaattaaaaaaattagccaggcatagcagcacacctgtaatcacagctacttgggaggccaaggcaggagatcacttgaacccaggagttcaaggttgcagtgaactatgatctcagccttgcatgcctgcctgggtgacagaacaagaccctgtctaaaaagaaaataaaaagaagatgactagttctagtgcagagtacagattgaatgcatacagactggggaaagagggttattagaaaacggttgcagtagcctggtaaaagctaatgagggccccatgtaaggacagagctgtgggtagcagaagatctgctgtgagagagactgaagaggaacaatcaataggacgtattgcctagcttcatgtatactggtaggtagagaggggtgttaaatattcaccgagctaccctggttgggtgaattagtgaatgcaattgctattctctaagatatgaaatatataaggaggaagaaagtttatggaatacagaatacagaagaaggagaatgagagggytgaggaatgggaataagtcaacttttagctatgttgagagggagatgcctatagacaggttcagtagtcacagatggagttcaggacgaagatcaagactagagtaaaagtcataaattttcttaagagcactcaggaatgtgcatcattcaccttctcataagagggaaaatcaagaccactgcttggctttagagatcaattccagatgacacagattagagaactcagggtaaggattaaataataaaacaatatttggcataacatatgcaattctggaagatgtaatatttactaacaaagtatgaagacactgatgtgcttattgcattgtaagtagagttaacagtctgattcttctcattgcattgatatacccaaagatcaaaatcttgagacgtcaaactatagtttcatgaccaaatatggatttcaacactattaacaagctttttaaaagttagatagacagaaaactcagaaacattcatgattcttaaggattagggaaggtgttatacgcttcattaagtcaaaagtagttgacaaatgtttaatattgcactatcagattaatttcaaatatattatatcaaaagacataaaatgtacggaatttttataatcctgtttcctcttcctaataggatcacagtttttccctttccttctttctttttatttttttgttgcttatcagttcaatgtaagattcaagggtcaacatttataaatttaaatggtttacagttttctcatgatcattggctacttgaacaattgctgttagaggggtcacatgggaactgacagaaaagctcagcaacggaagactggagaagcatacctcaacatttatagaaaggaaatattcaaataatatttttaagtggtaggttaggcatccctatacagcacatgacctgtaaataaggaagtatgacgagacagaagaaagtggagaagcgagataatgatacattgggtaaatccataattatgtaaccaaggaatgtcctcaaagtcttgtacacacaaacaggttagactggttattcataaaaatgtttaatttgcaaaattattttgtgagcaa

SEQ ID NO: 696686 - DNA, 1861 bp, Homo sapiens
taagaatccattatgtcatattgaaaatttggaattttttcctgaaaagataaggagctaataaacaactgtaagacaaaaataatcattcaacatcttatttagaagataattagtgattgggcatgatggttcatgcctataatctcagctgtttggggggccgaggcagaaggatcacatgaacccaggggtttgagaccagccttggcaacatagcaagatcctgtctctacaaaaattaaaaaaattagccaggcatagcagcacacctgtaatcacagctacttgggaggccaaggcaggagatcacttgaacccaggagttcaaggttgcagtgaactatgatctcagccttgcatgcctgcctgggtgacagaacaagaccctgtctaaaaagaaaataaaaagaagatgactagttctagtgcagagtacagattgaatgcatacagactggggaaagagggttattagaaaacggttgcagtagcctggtaaaagctaatgagggccccatgtaaggacagagctgtgggtagcagaagatctgctgtgagagagactgaagaggaacaatcaataggacgtattgcctagcttcatgtatactggtaggtagagaggggtgttaaatattcaccgagctaccctggttgggtgaattagtgaatgcaattgctattctctaagatatgaaatatataaggaggaagaaagtttatggaatacagaatacagaagaaggagaatgagagggctgaggaatgggaataagtcaamttttagctatgttgagagggagatgcctatagacaggttcagtagtcacagatggagttcaggacgaagatcaagactagagtaaaagtcataaattttcttaagagcactcaggaatgtgcatcattcaccttctcataagagggaaaatcaagaccactgcttggctttagagatcaattccagatgacacagattagagaactcagggtaaggattaaataataaaacaatatttggcataacatatgcaattctggaagatgtaatatttactaacaaagtatgaagacactgatgtgcttattgcattgtaagtagagttaacagtctgattcttctcattgcattgatatacccaaagatcaaaatcttgagacgtcaaactatagtttcatgaccaaatatggatttcaacactattaacaagctttttaaaagttagatagacagaaaactcagaaacattcatgattcttaaggattagggaaggtgttatacgcttcattaagtcaaaagtagttgacaaatgtttaatattgcactatcagattaatttcaaatatattatatcaaaagacataaaatgtacggaatttttataatcctgtttcctcttcctaataggatcacagtttttccctttccttctttctttttatttttttgttgcttatcagttcaatgtaagattcaagggtcaacatttataaatttaaatggtttacagttttctcatgatcattggctacttgaacaattgctgttagaggggtcacatgggaactgacagaaaagctcagcaacggaagactggagaagcatacctcaacatttatagaaaggaaatattcaaataatatttttaagtggtaggttaggcatccctatacagcacatgacctgtaaataaggaagtatgacgagacagaagaaagtggagaagcgagataatgatacattgggtaaatccataattatgtaaccaaggaatgtcctcaaagtcttgtacacacaaacaggttagactggttattcataaaaatgtttaatttgcaaaattattttgtgagcaa

SEQ ID NO: 696687 - DNA, 1861 bp, Homo sapiens
taagaatccattatgtcatattgaaaatttggaattttttcctgaaaagataaggagctaataaacaactgtaagacaaaaataatcattcaacatcttatttagaagataattagtgattgggcatgatggttcatgcctataatctcagctgtttggggggccgaggcagaaggatcacatgaacccaggggtttgagaccagccttggcaacatagcaagatcctgtctctacaaaaattaaaaaaattagccaggcatagcagcacacctgtaatcacagctacttgggaggccaaggcaggagatcacttgaacccaggagttcaaggttgcagtgaactatgatctcagccttgcatgcctgcctgggtgacagaacaagaccctgtctaaaaagaaaataaaaagaagatgactagttctagtgcagagtacagattgaatgcatacagactggggaaagagggttattagaaaacggttgcagtagcctggtaaaagctaatgagggccccatgtaaggacagagctgtgggtagcagaagatctgctgtgagagagactgaagaggaacaatcaataggacgtattgcctagcttcatgtatactggtaggtagagaggggtgttaaatattcaccgagctaccctggttgggtgaattagtgaatgcaattgctattctctaagatatgaaatatataaggaggaagaaagtttatggaatacagaatacagaagaaggagaatgagagggctgaggaatgggaataagtcaacttttagctatgttgagagggagatgcctatagacaggttcagtagtcacagatggagttcaggacgaagatcaagactagagtaaaagtcataaattttcttaagagcactcagraatgtgcatcattcaccttctcataagagggaaaatcaagaccactgcttggctttagagatcaattccagatgacacagattagagaactcagggtaaggattaaataataaaacaatatttggcataacatatgcaattctggaagatgtaatatttactaacaaagtatgaagacactgatgtgcttattgcattgtaagtagagttaacagtctgattcttctcattgcattgatatacccaaagatcaaaatcttgagacgtcaaactatagtttcatgaccaaatatggatttcaacactattaacaagctttttaaaagttagatagacagaaaactcagaaacattcatgattcttaaggattagggaaggtgttatacgcttcattaagtcaaaagtagttgacaaatgtttaatattgcactatcagattaatttcaaatatattatatcaaaagacataaaatgtacggaatttttataatcctgtttcctcttcctaataggatcacagtttttccctttccttctttctttttatttttttgttgcttatcagttcaatgtaagattcaagggtcaacatttataaatttaaatggtttacagttttctcatgatcattggctacttgaacaattgctgttagaggggtcacatgggaactgacagaaaagctcagcaacggaagactggagaagcatacctcaacatttatagaaaggaaatattcaaataatatttttaagtggtaggttaggcatccctatacagcacatgacctgtaaataaggaagtatgacgagacagaagaaagtggagaagcgagataatgatacattgggtaaatccataattatgtaaccaaggaatgtcctcaaagtcttgtacacacaaacaggttagactggttattcataaaaatgtttaatttgcaaaattattttgtgagcaa

SEQ ID NO: 696688 - DNA, 1861 bp, Homo sapiens
taagaatccattatgtcatattgaaaatttggaattttttcctgaaaagataaggagctaataaacaactgtaagacaaaaataatcattcaacatcttatttagaagataattagtgattgggcatgatggttcatgcctataatctcagctgtttggggggccgaggcagaaggatcacatgaacccaggggtttgagaccagccttggcaacatagcaagatcctgtctctacaaaaattaaaaaaattagccaggcatagcagcacacctgtaatcacagctacttgggaggccaaggcaggagatcacttgaacccaggagttcaaggttgcagtgaactatgatctcagccttgcatgcctgcctgggtgacagaacaagaccctgtctaaaaagaaaataaaaagaagatgactagttctagtgcagagtacagattgaatgcatacagactggggaaagagggttattagaaaacggttgcagtagcctggtaaaagctaatgagggccccatgtaaggacagagctgtgggtagcagaagatctgctgtgagagagactgaagaggaacaatcaataggacgtattgcctagcttcatgtatactggtaggtagagaggggtgttaaatattcaccgagctaccctggttgggtgaattagtgaatgcaattgctattctctaagatatgaaatatataaggaggaagaaagtttatggaatacagaatacagaagaaggagaatgagagggctgaggaatgggaataagtcaacttttagctatgttgagagggagatgcctatagacaggttcagtagtcacagatggagttcaggacgaagatcaagactagagtaaaagtcataaattttcttaagagcactcaggaatgtgcatcattcaccttctcataagagggaaaatcaagaccactgcttggctttagagatcaattccagatgacacagattagagaactcagggtaaggattaaataataaaacaatatttggcataacatatgcaattctggaagatgtaatatttactaacaaagtatgaagacactgatgtgcttattgcattgtaagtagagttaacagtctgattcttctcattgcattgatatacccaaagatcaaaatcttgagacgtcaaactatagtttcatgaccaaatatggatttcaacactattaacaagctttttaaaagttagatagacagaaaactcagaaacattcatgattcytaaggattagggaaggtgttatacgcttcattaagtcaaaagtagttgacaaatgtttaatattgcactatcagattaatttcaaatatattatatcaaaagacataaaatgtacggaatttttataatcctgtttcctcttcctaataggatcacagtttttccctttccttctttctttttatttttttgttgcttatcagttcaatgtaagattcaagggtcaacatttataaatttaaatggtttacagttttctcatgatcattggctacttgaacaattgctgttagaggggtcacatgggaactgacagaaaagctcagcaacggaagactggagaagcatacctcaacatttatagaaaggaaatattcaaataatatttttaagtggtaggttaggcatccctatacagcacatgacctgtaaataaggaagtatgacgagacagaagaaagtggagaagcgagataatgatacattgggtaaatccataattatgtaaccaaggaatgtcctcaaagtcttgtacacacaaacaggttagactggttattcataaaaatgtttaatttgcaaaattattttgtgagcaa

SEQ ID NO: 696689 - DNA, 671 bp, Homo sapiens
tatttatacgagatctatttccttacacagtattatgactggtcttggagaaaacacttttacttccttgtttgtttgtttattaataataataacaataagcggccatgaatctactactcaacacaagaagtgacagagtgccagtgacttcatcaactctgtactcgtcccccacccattagaagcattatgycaagtcttatttgtcactcccttgcctctttatatatagttttatcctatattatttacatatttatctcatgtatacacgtacatatgaatactacttatgtgtttcaaaaactatgtatttgcatatgtctatagtttagttctgattgttttcattttgtatcatgcagtataaaattatctgagtcttattttttcacttatagtcttgctaatatattcatatcatatctcactgtgtgaatatgccataatgtgttcgttcattccactctgatagtcattcgggctattccccgcttttttgtttgtctattttagttatgaaaggcactacactgaacaacctggcacatgtcacccaatatacatatagcaaaagtttctcctgtgtatatgcctttaagaggaattgctggtttgttcaatatgtgaatatccaacttgaaaagataattacaagcaatgtgtag

SEQ ID NO: 696690 - DNA, 671 bp, Homo sapiens
tatttatacgagatctatttccttacacagtattatgactggtcttggagaaaacacttttacttccttgtttgtttgtttattaataataataacaataagcggccatgaatctactactcaacacaagaagtgacagagtgccagtgacttcatcaactctgtactcgtcccccacccattagaagcattatgccaagtcttatttgtcactcccttgcctctttatatatagttttatcctatattatttacatatttatctcatgtatacacgtacatatgaatactacttatgtgtttcaaaaactatgtatttgcatatgtctatagtttagttctgattgttttcattttgtatcatgcagtataaaattatctgagtcttattttttcacttayagtcttgctaatatattcatatcatatctcactgtgtgaatatgccataatgtgttcgttcattccactctgatagtcattcgggctattccccgcttttttgtttgtctattttagttatgaaaggcactacactgaacaacctggcacatgtcacccaatatacatatagcaaaagtttctcctgtgtatatgcctttaagaggaattgctggtttgttcaatatgtgaatatccaacttgaaaagataattacaagcaatgtgtag

SEQ ID NO: 696691 - DNA, 671 bp, Homo sapiens
tatttatacgagatctatttccttacacagtattatgactggtcttggagaaaacacttttacttccttgtttgtttgtttattaataataataacaataagcggccatgaatctactactcaacacaagaagtgacagagtgccagtgacttcatcaactctgtactcgtcccccacccattagaagcattatgccaagtcttatttgtcactcccttgcctctttatatatagttttatcctatattatttacatatttatctcatgtatacacgtacatatgaatactacttatgtgtttcaaaaactatgtatttgcatatgtctatagtttagttctgattgttttcattttgtatcatgcagtataaaattatctgagtcttattttttcacttatagtcttgctaatatattcatatcatatctcactgtgtgaatatgccataatgtgttcgttcattccwctctgatagtcattcgggctattccccgcttttttgtttgtctattttagttatgaaaggcactacactgaacaacctggcacatgtcacccaatatacatatagcaaaagtttctcctgtgtatatgcctttaagaggaattgctggtttgttcaatatgtgaatatccaacttgaaaagataattacaagcaatgtgtag

SEQ ID NO: 696692 - DNA, 553 bp, Homo sapiens
gtaacacttttgtatggctcatcctaaagtgttaatgaaatacgttgttttgataagttggataaaagcgaggttgagaaagtgctaaaataaatacgctcaaggaatacgaatgtagcttatagttcagaatcagaatcaggagtttggcacagtattccaaatatttacaacattgaagataatttgttttggccaggcacggtagctcaaccccagcactttgtgggagtggaggtwggatagcctgcaggagttcaagaccagcttgggcaacacagtgaaaccttatatctacctatttaaaaacagataatttgttttaatttaaaataaacgaatgaaagttacatggaatttgtttgatctttaaaatggactaataattatccctgaattcatattgaagagcatgagtgattaatgtgtataaaataaaaagtagtaacaattactgaatatttaccacataccagaaattgttctaagcagttaaatacactaatttattattcctcacttcctaccacacaaattaggacatactgttatg

SEQ ID NO: 696693 - DNA, 579 bp, Homo sapiens
agtaatgtaagtgggataagtttataaataaacttctaaacaataactattttttataatatgtctactgaaaaacagtttcccaaatctctttggtaacatatamccttagagtttttttgttaagttaaattgtgaatattcattgagtatctagaccatttacaaataagataaaatactaaaatattaattgccaaacataggtttaaatttatgaacttttggcttcttaatacagaagtggggtcagttggtaaatatgtcctgtgcaacattgaaaaatagtgctgtgggaaattatatgtttctagaaattatgaaattatatagtcatacatttgccaatctacagagtgttatacagtatgtaccagacagttcacaattgcttacttcctagttttcactagaaattaggtttactaaggattaagaattttaattaggcaatatagtggtaccctgtatctacaaaattaaaaaaaaattatccaggctttgtggcatgtactgatagtcctagctactcagaaggctgaggtgggaagattgcttgagcctgggagctcaagactg

SEQ ID NO: 696694 - DNA, 579 bp, Homo sapiens
agtaatgtaagtgggataagtttataaataaacttctaaacaataactattttttataatatgtctactgaaaaacagtttcccaaatctctttggtaacatatacccttagagtttttttgttaagttaaattgtgaatattcattgagtatctagaccatttacaaataagataaaatactaaaatattaattgccaaacataggtttaaatttatgaacttttggcttcttaatacagaagtggggtcagttggtaaatatgtcctgtgcaacattgaaaaatagtgctgtgggaaattatatgtttctagaaattatgaaattatatagtcatacatttgccaatctacagagtgttatacagtatgtaccagacagttcacaattgcttacttcctagttttcactagaaattaggtttactaaggrttaagaattttaattaggcaatatagtggtaccctgtatctacaaaattaaaaaaaaattatccaggctttgtggcatgtactgatagtcctagctactcagaaggctgaggtgggaagattgcttgagcctgggagctcaagactg

SEQ ID NO: 696695 - DNA, 1097 bp, Homo sapiens
gcatgggaaggggctgtgggggtgagctggtaaggcctctgtcttgggraggggtgggagatggggggtctgctagctccccagctgtccccacagttcctctgggaagccaggaataaccagagcctccctcccctcctaggcacctggcagtgggggtgtaaccattggaataaaagcagggcaggggaccctgcttcatgtcacctgccaggatgcaaagtagtgtggggactcagtgacctctgaatgtgggttctctgtaccgccccgctcccacccatacctgccctgtctctttcagcgtgccctgtcccccatcccgtcctcagctgctctgaggcgagggggctgtgcaggtcctgggcacccgacccccactgtcatgagacagagacccaggtctcaggctcagctcatttgacagaggaggaaaacagaggctccggatggtgatggtgttagggtcacagagccgccctgggttctcccctgctgtctctctactgagcccccgctactgctgccaggcgactaatatggaaggggagaaattagggctgatgtggaggcagtgggtttgggagggacctgcattgggtcctgcgccccctggctgccctcttctcagcctcctggggcacacagggctggggggtgagggtggatgtggacatgcagtgccggctgtgggacagtagccagcagctgccccagaccagacactggggatccggatgttgacagggcagccagttctggtgctgtgcagagtcaacaggtcagggtggccaagatgaaggtgggctcgggttcatgcagagcggcaacccccatcccacctcccacaacacacaccttcaattttgatttgacttgcctggcatctaggggcaaagggtggcccagggtcccagattttaacaatcatccaagggccatcatgttattcagagagtggctttgtctgggtaggactggaggcaattgcccccaacatcttgccccaaagtggcatcagacacaactcttctgttctgtgcccaaaccattgccctggttcagcctcaggagctggaggagctttgggcagggga

SEQ ID NO: 696696 - DNA, 1496 bp, Homo sapiens
cccagccctgcggcctcccttatccctctcctctcaccaagcccaggcactgggcacttcccacagtgcccaggctgtggcctcttacaaatcacaccttagcccctggtcgcagccgtgccagccttgccctaacatgaggctggcccctggcctgagctgccctgcctgactctgcccttgcaggggctgcagccttctcaggggctgtgacccacaccatctccacggcgctgctggccttcgaggtgaccggccagatagtgcatgcactgcccgtgctgatggcggtgctggcagccaacgccattgcacagagctgccagccctccttctatgatggcaccgtcattgtcaagaagctgccatacctgccacggattctgggccgcaacatcgggtgagtggtgcccacctcaggctgactgaagggggtcacagtgtttgggaagggctggggtgaagggcacctcgaaaaagaaacgccaccgtagctgacctyggacatgggggctgacacacagctgtgctctgttctccactctccccagtgccccgggtgaccttgggcaagtccttggccttgaggcctcagtgtctgtctaggggtcagctgggcttcacagcaggaggatgagtattgccccgtgtacagattgaggaaaccggggctcagagaggtgccgtgtcttgctccaggtgacacagagagtcagcaccagatccgagaggtctcctcccctctccccactcctgctgtccttgctgggactttgggagcaggaggtggaacgagaatggaaatgggctttgaggtcttcactcaaccagataggaccagagcagcttctggcaccagaaaagcagaccaaagaggctctgagagtccctgggtctgaggccccgctgaaaacacaagcaagctgctgccttgctctgaacccgtttccctatctggaaaatggggctgcttaccccagtggtttccagactttcaagtttttttccctgggggaggcatatacttttttttttttgagatggaatctcactctgtttcacaggctggagtgcagtggcacaatctcagtcactgcaacctcaacctcccaggttcaagcaattcttctgcctcagcctcccaagtagctcagaccaggcatgtgccaccatgcccagattatttttgtaattttagtggagacggggtttcaccacgtcagccaggctagtcttgaattcctggcatcaagtgatccacctggcttggcctcccaaagtgctgggattacaggcgtgagccaccgtgcccagccgcatatactttttactcaaattaaatcctccagggaaggctgctgggtaaaacaggctaaagtggagctggtctgggggacacgggggtccagggggctgggaattcgcaactgggtcatcggcgatgtggtccccaggtttcctctcaccgtgggttctaggagtccctcattccagga

SEQ ID NO: 696697 - DNA, 644 bp, Homo sapiens
ttaattatttgtaattcttccaataatgccttgctttttttttttttttgcactgcttttccctctgcttaaaatgcctttcttcatctttcctacatggtaagctcctatttatccttcaaggatgagctaaaatatctgtttgcctcttatatttatgggggttttgcattggtacatggggaaggggagaaaggagtttgtggtgaagcaaagggagaaggagcacaggatggatgagatggtaggaatagttccccacagacccaaaaccaaaccaaagcaaaactagatttgagacaatatgcttagggacagtgaaggtcagatgctactgaaaatgtttaaaagaccctgcatgagactttggacaggagcagagctgcttcrgggccaaggtgttgtggtgtggcccagagggcacatggaggtccttttctctgctctgccaggaatcaacactgatgctttgggagcatccgggaccagcacccttggcatggacattgatgttcttggaataagcagggcatctaaatggctctgctggcatcctgtgtgggggactagaaccagaaaaggagattaagaatgggaaagatgcctcatgttggctacaactcgtaggctgctttggggactca

SEQ ID NO: 696698 - DNA, 1545 bp, Homo sapiens
cttgatataagctttctgatatcaaagtatattgacagttaacccttactgattttaaacttgactatccagtctgttaattacctaagattttgttttcatttcatctctaattgttttgatcattggcagagaaagagtatttgaaattcatatcagttttgctccttattttaatctctttgaattaaaaataaaactttttcaaaatggaaatttgaaattataagtagacttcaattatctttgctaatcctctctttaattagtcagctagttaaaagttgttatattcatatatcctcaaccctctttttgcctttgtagcttttaatttcctgaaagaagaaaatgagttgttcgtttttggttctgaggatgtgatatccgtacttactgatactaaagccaaatttaaattctaaaattaattcttgggtatccaataaacaaagaactatttttctatttttgcttttgtgaagtcaatgcttagaggatttttaagatggtgagtgagcttttgtgaacataaagagaaatatgattttaaaatgaccaggtctgagtttagctctgttaacatccagtagcttagaaatgaatatcatggccgggtgccgtggctcatgcctgtaataccagcactttgggaggccgaggcaggcagatcacgaggtcacgagatcgagaccagcctgaccaacatggtgaaacccatctctactaaaaatacaaaaattagctgggtgtagtggcgcacgcctgtagtcccagctactcaggaggctgaggcaggagaatcgcttgagcccgggaagcggaggttgcagtgagccaagatcgcaccactgcactctagcctggtgacggagcgagactctgtctcaaaaaaaaaaaaaaaaaaaaaaaaaagaagagaaaagaaatgaatatcatatagcagtaggctattaatagtgcacttaagtaaaattttggaatactatgaacttacygttttgtttataatctattcctaaattgtttttaacattaaaactacagtaatggcatgtgaaatatttcattcaacacagtagtaaaagctgatttccaacctctttgtttcaagatagaaatctgagatcagtccactggggatggttggagggacaggagtgattttaggaattggttttacttaagatctctcttgccaggtgcggtggctcacgcctgtaatcccagcactttgggaggcctaggcgggtggatcatgaggtcaggagatcaagaccatcctggctaacacagtgaaaccccgactctactaaaaatacaaaaaattaaccgggcatggtggcgggcgcctgtagtccgggaggctgaggcaggagaatggcgtgaacccgggaagtggagcttgcagtgagccgagatcgcaccactgcactccagcctgggcaacagagcaagactccgtctcaaaaaaaaatagaacatctctcttgggtttattgaaagatgtaggaaaatgccatgggggtgaggtgcaagtagggt

SEQ ID NO: 696699 - DNA, 2205 bp, Homo sapiens
tgcacagatgatgagcccagctgcaaaggatcaggagtgttgatcataatctcccaaagcattctgggtgtgttcccctttgacactacttttgcgggcttcacctagttgagatgaagatgtcaaataacttcaaggttcagccctgctgggaggcatgccatgagcttccctttctgaaggtcaacgtactatttgtcatgatgggctagacccacagtgggcagaaggaataaacagtaagtattaacatgagaagatgccatgacctggagtttagtgaatctttgctggtcacattcagcagtaatcaacccaccaggaggctattctactgaccatactttgccattgaatgggatcatcaaactctacgactacgtgtgtgtgtgtgtttatgtttcagagactgagacaacctccaagttaaagatagttttactctctcctctctctctctctatctacacccatcccatacagctgggctcttacaagaagttctatccttggtaacaattcctctttttgataaagctttgccttttcccctaaagaccatgacattcttaatcaaggttcctcttctgaaatacacaacacagagcagaaacagtagctctgagtgactactttctctctttcaagaaaagtacctaattagtcctattcatatttagtactattctccatgcataggaaagaaattgcatcattgcatacaatgtatgccctayacatcagggcttagttgtctcactgaaccctaattgagaaaggctaatgaaggcctcaagatttatacagctgtagaattaggtcatgaaatctcacaacagaaaagcctctgactacttttccagttcaacacccccttctttgccatgaattcccagcactaccctgaaaaataagcaactgacttctacctgaacaactcagccatcaaagacagccaacaccattaaagagagccctggctgctagaagtttttcctctgaatatggtagaaagaggccagatggcgagggtccttagagactgggtcaagacatctggactgcatcttgtaggtagtagcaacccatcagtcccccagctctctgcaaggccagcacaggttcatgcaagttctctgattctgcctgatattatttcaggaagaagcatccacaaacctgctgacaagcttagaaagccaatgcagtgccagcaggtagatgctatcaacaaataatgccattcatctcacacagagatctacctggcaggatagacagtgccttgaggaatgctatcgctgcctgcaacctaccaagatttcctggtacctccttggataacttgaaaataccccatcataatgtcttatcttgttttctcacatcaagcctgggctgaggtttcaggtgccatgttgcagccagaagggagatttatggtcttgttatcagcttcagacagaaagaggctgtggtcacatgggggaggaaacaatagcccagcagggaaggtcacaagcagggctgccggtcagcacctggaatcacctgtgcctacacagtccccactggggggttgcctggacggtgcgttggaaatagaaatgtactgttcgtcctggaaaaacagccccaaccactcaagtgctacgagtgcaatcacttaccagctcagggggttgtcacttgtggctagatccactgtcacatatttcaaaggtgttaaatcattccagtaatgtataaaatggaagagctatcaaagctgtttggcactaaggaggtcataataaatggagagggaataataggacccctttggggcttactcatccctatgttcaaaccatagaagggacatcttgttgacttgtgcaaccatatgacaggacgcatgtcacccaccctccaaggacaaaaataagaatgtacaagacaacttctatttgtcagacatggggaggtaggagtaaaaatatgtattattttagcaacaagttttctccatctcagtcaaccactgaccattgtgtgacctcctccatcttatttctaataaatactctccaactaaatatagtatatctatctttcctataggtgttttaaagtaccttgtgtcattatcctccttgtgtcattatctgccttgtataataagctcctaaaattcagcccccatgtatgacatttaattagtat

SEQ ID NO: 696700 - DNA, 2205 bp, Homo sapiens
tgcacagatgatgagcccagctgcaaaggatcaggagtgttgatcataatctcccaaagcattctgggtgtgttcccctttgacactacttttgcgggcttcacctagttgagatgaagatgtcaaataacttcaaggttcagccctgctgggaggcatgccatgagcttccctttctgaaggtcaacgtactatttgtcatgatgggctagacccacagtgggcagaaggaataaacagtaagtattaacatgagaagatgccatgacctggagtttagtgaatctttgctggtcacattcagcagtaatcaacccaccaggaggctattctactgaccatactttgccattgaatgggatcatcaaactctacgactacgtgtgtgtgtgtgtttatgtttcagagactgagacaacctccaagttaaagatagttttactctctcctctctctctctctatctacacccatcccatacagctgggctcttacaagaagttctatccttggtaacaattcctctttttgataaagctttgccttttcccctaaagaccatgacattcttaatcaaggttcctcttctgaaatacacaacacagagcagaaacagtagctctgagtgactactttctctctttcaagaaaagtacctaattagtcctattcatatttagtactattctccatgcataggaaagaaattgcatcattgcatacaatgtatgccctatacatcagggcttagttgtctcactgaaccctaattgagaaaggctaatgaaggcctcaagatttatacagctgtagaattaggtcatgaaatctcacaacagaaaagcctctgactacttttccagttcaacacccccttctttgccatgaattcccagcactaccctgaaaaataagcaactgacttctacctgaacaactcagccatcaaagacagccaacaccattaaagagagccctggctgctagaagtttttcctctgaatatggtagaaagaggccagatggcgagggtccttagagactgggtcaagacatctggactgcatcttgtaggtagtagcaacccatcagtcccccagctctctgcaaggccagcacaggttcatgcaagttctctgattctgcctgatattatttcaggaagaagcatccacaaacctgctgacaagcttagaaagccaatgcagtgccagcaggtagatgctatcaacaaataatgccattcatctcacacagagatctacctggcaggatagacagtgccttgaggaatgctatcgctgcctgcaacctaccaagatttcctggtacctccttggataacttgaaaataccccatcataatgtcttatcttgttttctcacatcaagcctgggctgaggtttcaggtgccatgttgcagccagaagggagatttatggtcttgttatcagcttcagacagaaagaggctgtggtcacatgggggaggaaacaatagcccagcagggaaggtcacaagcagggctgccggtcagcacctggaatcacctgtgcctacacagtccccactggggggttgcctggacggtgcgttggaaatagaaatgtactgttcgtcctggaaaaacagccccaaccactcaagtgctacgagtgcaatcacttaccagctcagggggttgtcacttgtggctagatccactgtcacatatttcaaaggtgttaaatcattccagtaatgtataaaatggaagagctatcaaagctgtttggcactaaggaggtcataataaatggagagggaataataggacccctttggggcttactcatccctatgttcaaaccatagaagggacatcttgttgacttgtgcaaccatatgacaggacgcatgycacccaccctccaaggacaaaaataagaatgtacaagacaacttctatttgtcagacatggggaggtaggagtaaaaatatgtattattttagcaacaagttttctccatctcagtcaaccactgaccattgtgtgacctcctccatcttatttctaataaatactctccaactaaatatagtatatctatctttcctataggtgttttaaagtaccttgtgtcattatcctccttgtgtcattatctgccttgtataataagctcctaaaattcagcccccatgtatgacatttaattagtat

SEQ ID NO: 696701 - DNA, 587 bp, Homo sapiens
gtggagattgttattaaactattactacgatgacactgcgagttcattctggctggagagagtgtctatactcgtttgaaatcacctatgggtgcgtgcaagtaaagaacggaggaaagagacacaagtcttttccactctttgaacaagaggtgaaagtcttatatctcatgtaaccatcacagcaactcagggcagaagatattcttcctctcttacagatggccattttgagaagcagaggggttgggtaatttgatcaaggtacttggcgggtaaggggcgtggccgagcctctgacagaaatctgcctttcttactccaatctccgaactwgtggtctgcggcgattttctacagtcaaggagaaaaaaagttcaaagaaatgatttgttctttttgacgaattattctgatcattatttcaaatattcaccttacaatgttagtgtagacccaaccatagagaaatctattaaaagtcatctcgctgcatccccagggaaagcgcattcatggtatgccctgtatggtatgccctgtacggtatgcaaggttcacagccgaaggaagagagggcccaagtg

SEQ ID NO: 696702 - DNA, 634 bp, Homo sapiens
tggggagttgcttcttatggatgaggaaagaaaatgtttcttgagatgaaatcttccagtaaaaatgctgtgaacattgttgaaatgacaacaaataaaattacataaacttagttaataaatcagtagcagagtctgggaggattggctycaattttgaaagttctattgcaagtaaaatgctgtggtaaaagcatcacatgctacagataattctttagtgaaagaaataaccaagtaaggaggcaaacttcattatcatcttgttttaagaaattgtcacagccatttcaaccttcagccaccaccaccctggtcagtcagcagccatcagcatcaacaaaaaattattacttactaaaggctcagatgatttttagcatcttttagcaataaagtatttttaatcaagatatatacatcattttgtttagacaaaacataatgctattgtgcagtgaatagatcacagaatagtgtaaacatcccttttacgtgcactgggaaaccaaaaattttatgtgatttgctttattgcaatattgaggtggtctggggacaaactcaaaatacctctaaggtatatccaatatcctgtacatactttcttttctgtttacttacaagatctaaa

SEQ ID NO: 696703 - DNA, 1736 bp, Homo sapiens
agaattcagggacatcctctgcatgtcttcagagctctctgtgcagctctcctctcttcaatacttggcattgcgatactggttggcttcatccttttgaatactcaacttcatctctccaagacagggagaccacagggctcaacctgaattgtactttgctgagcctggaaactcattggtggaacatgcaggagttaccttgtttttcttttactcagagatcaatgtccttagctgccaattgtttatatcctaaaagcttttttgaaactttttgtctggacttacaattgtttaatatgggaaggtaagttctgtactttaatttataagacttatattagttttctattgttgatgtaacaaattaccacaaatattttctatcttggctagaggtgaaattttggaatattgttttcattatttttaatgttttattttaagttagtatacaaagctctttctgtcttttcaaccactttctaacacacagtttagcagattattcttttttaagctgaaataaattatttaaaattaatatgtaatttttactatctccttaaagataaaaacataattttgctgaggttttttattggtaatcccttatttgcatagatgaaatatgactgtttctttcatcttattaggatataattgatcaaatcaatagttcatccaaggccataattggagtgttaaatttgagaaaaatattgtttaatcaggtattcaagctcatattaagagatagatatcaattttatatatttggagacaaactccataaatctaaaattaacttgttacctggattacaaagtgagtctcacaggtgataagaaattcactgtctagcaagttgaggaccttaaaaaaacttgaagaatctcaatttgagacaaatttatacaaatatataatttggaaatctgaaagagtgtcatgggcttgcttcccagccccagaagtcttagaataagtcagtgtttgggagccaatctgtgatttcctttgaacttatacacagagagtaaacatttggcagtattagttgtcaaaactgtttgagtctaatttgcagaacaaattcaagaaggcatattaagttcagtaacactgttgctttatctatgataataatcaagccaaatctaataagaccagctttttatgtgatcaagaataatctttggagattgtgaccataagagagaaaactgtcaaaacaaaaatgttcacagcttggatacaggtaaacgagtttactgtgtatttttcagtgcagtactggccttattttctgagtgattttcaaccttccacaggtagtgcttaacctgtagaattctgtctggttgagatgtaatatctgtctgtccagtaaaagagataaccaaagtattatttttttwaaaaaatttttatttattttttaactctttatttccataggttttaggggaacaggtggtatctgtttacatgaataagttctttagtggtgatttgtgagattttggtgcacccatctcctgagcagtatattatggtttatagcctcattgacattagccagtttcacatttaattcagcaacctatcaaatgctgtgtttacctctagctttatttttatatatactctcaaatgttctttaaactattcataacatgctactggttccatcattaagtagtgagtcacatataaactttgacaaatgt

SEQ ID NO: 696704 - DNA, 641 bp, Homo sapiens
ctgcattaatgagggagcttcttaggataatattacaacagagagtgcaagaaatacctgtgaggtcaacgcagttctattaactgtcatctaacacagaaatattttccttgaataccattaaagctttctccgtttctttgttctgctttttgaaggcagtaggagcccaaatttccctaccaataatttctgtttttgacttggcagcataatgatactagacttgaggaaaaaaaatcaccttggcaatgtcttcttcagaggtttttacaraagatattttgttaggataaattatactaagtaggctctttaactaagcaaaaacaaatccacttgtaactaaatgacctgcgtagctttatattttttaaagagaacctacctggaaaacactacgctctttaaatgaacattttgttaaaatggaaaatatgaaacagaagggtaattagacaagtaagttgctctttgctactcctgctgatagggtaaactcagaagactctcagagttcccactgccatatataaatcaagactcaagctgtggttccagcaaaacagctctgggataatttttctttatatcctggaggctcagcccagctgattggagagatgtaatggcagttaaaa

SEQ ID NO: 696705 - DNA, 1234 bp, Homo sapiens
cctatgcttctgatggctcagtgtatataaactttgtctcatgcaaaaaaattattaaaaatatggtataaaattacctgcaggctatatgtataaggtgcatatgaaacataaatgaattttgtgtttagacttgggtcctatccccaagacatctcattatgtatatccaaatattcaaaaatcaaaaaaaaaaaaaatctaaatgtttctggtcccaagcatttcaaataaaagataatcaacctgtgtcatcaatctttttcatttatatgacagatttaaaaaatgccatctaaattaatttgtatatttgctttagtaagagaattttataatctttatttttcaagagtttatcactgttgttgtgagagctactggaatattaagttatatttattttacttaattccagtctattcccagccctgaggcatcatcttttcttcattgtaaaaagtgggacattgttttcaatgtaaaataatatgtctaggtatgatgtaattaatacccactattccatccaatgttattttttagtggaatgttatttttattaaacaaccccaccccactctactcacccaaaaaaggttaaaacattctcaacttaaaccatttcaatacttttccaattcaatctcagctgtaccactactgactggaaagattttcatccaagcttttgctgatttatttatttatttaattaattaatttatttatttatttattttgagacagagtctcacattgtcacccaggctggagtgcaaaggcacgatctyggctcaccacaacctccacctcctgggttcaagtgattctcctgcctcagcctcctgagtagctgggactacaggcatgcgccaccacacctggctaactttcgtattttttgtagagatggggtttcaccatgttggccaggttggtcttgaactcctgacctcaggtgatccacccacctcagcctcccaaagtgctgggattacaggcgtgaaccactgtgcccggccaagcttttgctttctaatggctgattatactttcaaaatacttgaataaattatccattcatttccctatggaaaacaatgatttaatctaaacagcaacaaggttctcaaaaatattccagaagtttcatcttcacaaattactggaaaacataattattattctgccacatttacctttgaaaacagaaaaaaaaagacaacagaaa

SEQ ID NO: 696706 - DNA, 1792 bp, Homo sapiens
cactgttttgtgaattattggtttactgagagataagtctggctgaacatgacctggtggttccgtacttatctctctcagtcagataacagctcataaatcaacatctggtttatgactcagtttattgtaaatttgattattaaaagttagtacttctcaatcatgatcaacttcagataaaataataatatttagttcctgggtctagttattagcagttgtactttacatgtgatatctcatttcaaaaaacaaaaaacaaaacaaaacaaaacaaagaaacaaaaaaacaagaaatcacgtataagtctctagaagatagctatgattgtggctattttatagataaagaagcagaggttgagcaacctacctcaaatcaggaacaatctattctgagaatgttggagatgcaaagaaaaacaacagattggtagagtaaagacgttgcagtcaaaggggaaaatgtggatccaaattacacatttaagtggtacaaaatagacarttcaaatctcttcagatactcttgtttattttttccacatatataagttttcatctttcttgagtgaaattgagtagtcccagataaataagtagagtaagaatggtgtaagtcacctagtgagctaacatttggtggttataacaaaagattaagagaaaacactctctttgttgctagaaagtaggtcctcttctgcagccctagtttataagttccccccaccctccgccctcaatttgtgtatcattatcccgtgcttgtcactgactctgtataaaactatgctcaagttttacacgtcttgacaaagtattcttcctttaaccctacgttttcaactacatacactacctacgctgtttctctcctttccttcatagtcaagcctttagaaaaaataacctatgttcatgatgtctacttctccaccttccattcattctccaattcctaaaatatggcttctgtctgggttacttctctgaagctgttttctctaagggcttcattgacacacttattatcaaaccaactatacctttttattccaattattctcatctttttgtagtgttcgcttctgttcaccactacatctttctgaaaattattttatcattttctatcctgcaaattcctcctgattctctttctattctttttatgagcactccttagttttcccattgatgtttccccaggtacccactcaaatcatttatttctttcttcatgcaattttcttaggcaatattttcaacttccacaatgttaactccacatatcctcaattactcatccatatctacctatcacctacaacagttcttggagctgaggaggcatttaattagtatgttctgaataatcaatggatggatggatggctggatgggtggatctacatgagaagtcacaatctagaaatgttaacgatgaatgtgaagtactggcattttatgtgggtggggggtggtggagagccaattaaaaatatactatattcagtctgggaattctacctttaaacttagattataaattttcttgaaaaccaatgggaaggtacagcaaaaatggcccaatattctagcatggcaaccatccgttagagctgagtcatatttgtgccctttagaggaaaacgtgttgttcaatatggcacagtcagaccatggctacgccttcatttacgttacctgcctgacctcataagcattcaattagatatgtcaaacaaaacagcctgcagacatgtaaattcagtatgatccagac

SEQ ID NO: 696707 - DNA, 629 bp, Homo sapiens
ataattacatgttggggacacgtaagaacaaaggacacatcattttaaaaaatggaggcgaacaggacactaagcaacagccattttcaggggactggataggtggagacagacccaaaaataatcattctgaaatagagcataatacatggtatagagaagaaacatacaaagttttcggtggattcataggcattctcctaataaaaactaaaacatgaattcacacaaasagacattgtttatattccccaaaaaagtggaaacaaccaaaatatccatcagtcagtgaatggacaagaacaatgtgatatatccatacaatggagttcagtaataaaaagaatagaatattgaccgatacctgcttctatgtggataaacatcaaaaactttatataactgaagaaattcagtcataaaattccatatattatgtaaatcaatttatgtaaaacatccagaaaaagcgaatctttagagaaataaaattggtggttacctaacgcctagtggcagggaggactggagtaggggctatgtatgtatatagatatatatattttttgggaggggagtggcagaaatgttcttaaattgaactgcgatattgcttgtgcagctctttg

SEQ ID NO: 696708 - DNA, 629 bp, Homo sapiens
ataattacatgttggggacacgtaagaacaaaggacacatcattttaaaaaatggaggcgaacaggacactaagcaacagccattttcaggggactggataggtggagacagacccaaaaataatcattctgaaatagagcataatacatggtatagagaagaaacatacaaagttttcggtggattcataggcattctcctaataaaaactaaaacatgaattcacacaaacagacattgtttatattccccaaaaaagtggaaacaaccaaaatatccatcagtcagtgaatggacaagaacaatgtgatatatccatacaatggagttcagtaataaaaagaatagaatattgaccgatacctgcttctatgtggataaacatcaaaaactttatataactgaagaaattcagtcataaaattccatatattatgtaaatcaatttatgtaaaacatccagaaaaagcgaatctttagagaaataaaattggtggttacctaacgcctagtggcagggaggactggagtaggggctatgtatgtatatagatatatatattttttgggrggggagtggcagaaatgttcttaaattgaactgcgatattgcttgtgcagctctttg

SEQ ID NO: 696709 - DNA, 1169 bp, Homo sapiens
aaaaaaaaaaggtcaaagagcagcagagaagtaggaggaaaactaggagagtatgctatcctggcagctaagcaagtatctcgaggagagagtgatcaattttatctcaggttgtgctgctgataggtgacgcaaggtaagaactaaagatggtttaacaacgcgaaggtcggcttagtgatgtggaggtcactggggactttgaaaaaaagcagtttcagtggaaaagcttgattgaagtgagttcaagagagaattggagtaataaattggagagagtgtgtatatataaaactactgtgggttttgctgaaaaagaaaagaaataaccaagacagtagcttgaattgaaagcatgataagacagagagagagagaacaatagcacgtgtgtgtgctgctgggaatgattcagataaaagaggagaaaagttgatgaagagacagagggaagggaaaaaactttaagtgaggttcttaagtaggtgagagggtacaagtgtttgggcagtataccagtcatggcttttactataaaataaaaaacctactctagtaggatggaagggattttcaaagacataaggacactcacagaatttctaggctggacaacagaaataacatccaaattatattgcaggacagccccattagaaacctcactgttgcactgttgctgcactgactgctgtatcaggcccgggatctgatggatggaccattggcctctctgatgcacactaagctgtctacttctgcttgtcagaggggaagctgtgcaatgtctacttcactgtgcctctccttgcccaagaatggtctgatagggtgagcttatgtcatgcaggtacaaatagctggaaggaacatgagaatgacatgtatatgacatttactttrgagaggtgtggacttacatggaagaaattatccaaacataggaaggatgctcaaatatattgagtggtcaaaaatgcatgaaaaatgtctgctacagtgtggcactgatatttcaaggcttaaaaatgtcctgaatttttagcaaagcataaagatgtcaaaatgtgttcttgcaaacatacagattcataaaaatagattggtcattgctagagattttcattttgtgaagtcaatgatttgtctctcctttccctcactttgca

SEQ ID NO: 696710 - DNA, 645 bp, Homo sapiens
gtctcaatactattttatcaccagaactagaagtacaatcttttcactcattaacttaaaaattatcttttgtgaaatttgcattttattattttcagaatcattgtgagttcctttatcctttgaatttttcattcttgatttttaaatgcatacttcattgagcagaatagtttctaatactagtcttgagaatcatatttagggggtatattttctgaacatttacataattttcttgtaccttttacttgaatagctctgtacatatttctttcagcttctgtctttcaaaattctgtagataccacttcataaatttatgacttttaatcattctgaatgtgattcctctgtaggcattttgtatttactaaytgaatgcttgaaagattaatttttttctttttccttaaaattcaaaaatgtatctaggtcatagattggcattgtcaccattgtgttaattttttgtagtgagtttttaaatattctcatgaaagcttttcatcagccctgaaaaaaataagtgtttttgagtgcatttttgaatgatacttctcatccaattgtcctagtgatgtatcgttacatttcctcttatttattcactgtttttatttacattctagaggagttttcttc

SEQ ID NO: 696711 - DNA, 645 bp, Homo sapiens
gtctcaatactattttatcaccagaactagaagtacaatcttttcactcattaacttaaaaattatcttttgtgaaatttgcattttattattttcagaatcattgtgagttcctttatcctttgaatttttcattcttgatttttaaatgcatacttcattgagcagaatagtttctaatactagtcttgagaatcatatttagggggtatattttctgaacatttacataattttcttgtaccttttacttgaatagctctgtacatatttctttcagcttctgtctttcaaaattctgtagataccacttcataaatttatgacttttaatcattctgaatgtgattcctctgtaggcattttgtatttactaactgaatgcttgaaagattaatttttttctttttccttaaaattcaaaaatgtatctaggtcatagattggcattgtcaccattgtgttaattttttgtagtgagtttttaaatattctcatgaaagcytttcatcagccctgaaaaaaataagtgtttttgagtgcatttttgaatgatacttctcatccaattgtcctagtgatgtatcgttacatttcctcttatttattcactgtttttatttacattctagaggagttttcttc

SEQ ID NO: 696712 - DNA, 1445 bp, Homo sapiens
aggaaaacacaggtggcctctagaatctagaaaagtaaatgaattctcccatagaacctccagaagtaatgcagccctgctgataccttgattttagccaagatccatttcagacctctgacctttggaactgtcagagaacacagctgtgctgttttaagccatgaaatttgtagtagtttggtaaagcagcaataggaaaccactacattgactgttccattatttcatttaatccttatgaaattctataaatgtattattattgctattttacggataaagaaactgagtccgagagtttagttaacttgcccaaatttacccagctagtgggtacctaaaccaggtttcaaaactattctaattccaaggtctatccatttaattattataattcttctctcatgggttgatattaccatacactcaacattacaactccccaccacgtatttattccaagaaaagatttcatcactggggccttactctgtacctgcacatgaagcagctggtgcagactgtggctcttycaactcagaatgaatgagaatgtggtataaaacagtaaaacagtgacttattggaggagcaaaactaggagttttacacatatagatgtgagcaatgaagcagggaggcattctgacagctgctgatgacaagcagattggctgctatagcacgtcagacgccatgaatcacaagagagctttcagtaatggttcccaccagtacagcccactgacaccatttttcagtgttgacagactcaaacattcccatttccagtgactcattgggcagagacaatttgacatatggactgaccactcctggataggatccctctactaaagaacattaatgtatattgcagttttactattaatcatttaaagcactattgttttgccttctgatttatattagttttcatggaaatagccattgactaaacctcatgctaagtatgaatccactcagatgtctctactccaagtctcaaggtttcactcttttccaatcaattctctatcacataagagatctggcaagattgcaacttatgttgtaattctgcaacctgcacaattaaattttgtgcctgattttcagtaagctataagaaacaaggaattttttaagcagctctctggttctctgataatgactttggctgggagcttaaagacctgggtttgaatttcttctctgagtgctccagtgcattcaaagaaaagcattccataccacagtgcttgtagtcgtcatcacttccataatggtcagcactaccaatgcacttgattattaggcacttccacacagttaacagcagatgaaaattttattaatcctgatgacactatataccatatattactaatatctcattacacatttgcacagaactcagtactgtattcaagctcaagcat

SEQ ID NO: 696713 - DNA, 606 bp, Homo sapiens
aaggatgtgatccctggtaatatggcaagggaagaggcagtgggatagaatcatagatgaggctttgatatggtttggatttgtgtccccacccaaatccatattcacttgtaatccccagtgttggaggaggggcctggtgggaggtaaatggatcatgggggcagattttccccttgctgttctcatgatagtgggtgagttctcacaagacctggttgttaaaagtgygtagcacctcccccttctctctctctcctgctccagccatgtaaaggtgtgctgctttccctttgccttccgccattattgaaagtttcctgaggcctccccagccatgctacctgtacgacctgtgaaaccataagccaattaagcttcttttctttataaatttcccagtctcaggtatgtctttacagcagtgcaagaacgaactaatacaggcttcaaaacctgtgtgattggaagaatgaaaaggttgttagtaagaataataagagaattattatctgagcattaggaaagatgataatatgttcttgcaatgtcataggcaatcctattctaaattctaagtgttaaaattttcaaagtttatgctga

SEQ ID NO: 696714 - DNA, 606 bp, Homo sapiens
aaggatgtgatccctggtaatatggcaagggaagaggcagtgggatagaatcatagatgaggctttgatatggtttggatttgtgtccccacccaaatccatattcacttgtaatccccagtgttggaggaggggcctggtgggaggtaaatggatcatgggggcagattttccccttgctgttctcatgatagtgggtgagttctcacaagacctggttgttaaaagtgtgtagcacctcccccttctctctctctcctgctccagccatgtaaaggtgygctgctttccctttgccttccgccattattgaaagtttcctgaggcctccccagccatgctacctgtacgacctgtgaaaccataagccaattaagcttcttttctttataaatttcccagtctcaggtatgtctttacagcagtgcaagaacgaactaatacaggcttcaaaacctgtgtgattggaagaatgaaaaggttgttagtaagaataataagagaattattatctgagcattaggaaagatgataatatgttcttgcaatgtcataggcaatcctattctaaattctaagtgttaaaattttcaaagtttatgctga

SEQ ID NO: 696715 - DNA, 606 bp, Homo sapiens
aaggatgtgatccctggtaatatggcaagggaagaggcagtgggatagaatcatagatgaggctttgatatggtttggatttgtgtccccacccaaatccatattcacttgtaatccccagtgttggaggaggggcctggtgggaggtaaatggatcatgggggcagattttccccttgctgttctcatgatagtgggtgagttctcacaagacctggttgttaaaagtgtgtagcacctcccccttctctctctctcctgctccagccatgtaaaggtgtgctgctttccctttgccttccgccattattgaaagtttcctgaggcctccccagccatgctacctgtacgacctgtgaaaccataagccaaktaagcttcttttctttataaatttcccagtctcaggtatgtctttacagcagtgcaagaacgaactaatacaggcttcaaaacctgtgtgattggaagaatgaaaaggttgttagtaagaataataagagaattattatctgagcattaggaaagatgataatatgttcttgcaatgtcataggcaatcctattctaaattctaagtgttaaaattttcaaagtttatgctga

SEQ ID NO: 696716 - DNA, 1230 bp, Homo sapiens
atgctttgctaatatgctggacaggggacctcaggctctaattcgtgtttgggtcctcctatttggaagtacacagtgtaagcattacagttgcatcagtctctggtttatttgcatccattataggtgaagcataaccttcaagatatgccaggcattgggcagaactgtaagattgaagggaggagtgactttatctcatgctcacctcttcttctggtatcctttttcccctttgaaaccatcactgtccacctgcatctcccaccatgatgaatctctattttaccctgtgcctttgcaaacagaggcagactctctcccactctcatttataaaacagacacttctgacactcaacttaccatcaaaaatgtatcagtcctagcattggttcactgattagtgtcattgcwttttgagacacattaatgaaattaactgatccaggataaaatgatttctaatgtcatattgtatttaacatttaactgagaataacaccctacttctagtcattaagtaagtcaatgatataagtatgcatgaaacatgtcccctatccttagagatgtttacaatcttagaagttttagggaaagaaacaaatgcatgtaagaaatagaataaatgattttaatgggcagaagcagcacagagaaatcaatgcctaataggggattaacatggaattaattgcaactgggagtgaaaaccacttttctgttatgcctctcattatagagtcttcctcaggtataggaggtgatatggtttagctgtgtccccacccaaatctcatcttgaattgtagctcccataattcccacatgttgtgggagggacccctgggagataactgaatcataggggtggtttcccccatactgttctcgtggtagttaagtctcacaagatctgatggttttataaggggtttcctctttctcttcgttctcattctctcttgcctgcttccacgtaagataagcctttcgccatccaccatgattatgaggcctccccagccacatggaattgtaagtccattaaacctttttctttataaattacccaatcttgggtatgtctttatcaggagtgtgaaaacagactaatacaggaagcaagagagaagtgctttattctaactaccagagtatgggcttcgcagaggattcttacatcttacacaaggcaggtgcctgataaatgtttaaataatgacta

SEQ ID NO: 696717 - DNA, 1532 bp, Homo sapiens
tatctatctatctatctatctacacatacacacacacaaaagatgtatggcttaatgaattattaccagtgataccacttcagtcaggaaatagaactttaccgcacattccagaaaccccattccattcacaactctgttcccctcaccaaaatcatcattctcctcatttttataatacctaactttaattgtgttttaaaaatagctttatcactccaatatctgtctctaattactctggttttgctcatttttaaaaacctgatatagtttaagtcacttttaatctacagggtcctcytccacatctgccactttcctgcaatttatcttttggaaaacccagacaatttgacctatagagttttccagaatccggattttacagaacacatccttttgagagtgcagttcagcatgttcctttgtcctctcaatagccttctgcaatttgcagctggatccagagaagcatcagactcaagtttaatcttttgtcatgactattagtggcatttggcaggattataggaggcacgtaatatccggtcatctgtgttatgtgatcttagcagctgtttgtgctaaatgcccatattcattcattggaaattgcaaaatggcaacattctatcattcatttttcatttattagttgaaattacttttataaagaaatattcccacatctactatttagatacttagtggtatagttcatttaggaaagtcagaataaatgtttatatatttcccctttattgactaattttcatgtaatgattggtttcgtattatcttccaaagatgaataattcttttgttgtttttaaatatcattatgaacgcaaagattttaacatatttgatgggcttcaatctactgcaattatcattactgaagctcaaattcagttggcaacttttaacatggatctaacagtctctgaaagcttccttgatagctaccattacaagattttccgagcccactttataggccatatcagagtttctgggctttttcagtgcacagaactgggaagtacgcatttaaaaataaaatttctcttgaggttactcgctttgatgattcagattagattcaaattcctgacttaattttttctctagcacaccgctatctactttcttcaaaaccaaaaatctgattctcaaggacacgggatgatacatcaagactatcccataattattcattagttttttccatattatatacacaatagtctcagaacctaacaataataccaccaccaatatgactagtaaaaacactaaaatacaggtttacttttccattctcctcccatttgtaaagtacttacactgtctgtactctcagttcatatggccatcacataccctctccttttctgccccatttactttaagctctacaagtaactatttatttaatgttctccaccagttcttatgatgtctctctagttattctacttgtctcaagccggttctctaataaattcctcaggaagtgcttatag

SEQ ID NO: 696718 - DNA, 2058 bp, Homo sapiens
gatgggatatgaatggtccagaagaccacagctgtctaggggcaaaaagatagggttccaggagtgtttatggaaggtttcttggaggaacccttccttgagttgaaccttggagattgactttcagtaggtatagagcaagggataaggctgaggaaagagcaggtgtagagataggaaagcattctcttggcgtttaggacaaggagacaaggttggaactgaaatgtagccctgcacagatgtgcccacatttggtagagcctaagtgtcagattaattccactaaattacgttgaagcttcaggtggtagttccagagctttcttgaatattttatgcaagactaatacaatgaaggaggtgcttagttttacacagggtgaattaaatgggcatgtaaggaagaaaagcatgtcagaacacatgtgcaattgtgagagcatcatgaagagctgtgaaggtaacagcttgatgaaggagagaaaagaaccaaagatggctgctgttttgaatccagctgactcagagactattggtacaataaatcgcattagggaggtctgtgtgcgtgcgtgcgtgcatgtgtgtgcgcgtgcatgtgcgaggtaatgaatgcagaagactgaagtacaaatagaaggttgattaggcagctagctggaaatagatgtgaacatgttcaggcaattagaatgtggtgccacagctcaggttgtgttagggattcagaaagaagagaggtcagaaccttggctttcatattaatttaaggcacagaaggaaaacaaggagcaatagaaagaaacagagacacaaccattcaaaatagataacagccaggaaagtgtgttaccaaaccaagaggtgagaatttccagatatcatatcttgctgtataataattaaaatttatctatctctatgtaaaaatggtattatacataggacagaaatcaccaattaagatgaataagagtaccatatttaatcaagtgcatacatctgttaatatccattttcagaatgtaaacagcttaaaataaaagctgacagaagtcccctgtgtctgctataacaaaaccaatgttcactgtataaataactttttattttgcttctctggtgaagaatctgggcacaatctccttatctgtggactgttagggtcaaagaaggaactggtaacattgcacaaaatcccattttcatctaccactgagcatgggagctcctcctctgtgtcagaagcccacaccttcctccaggcatggagcctagggccatagtgcagtctccttttggtatttcctctcatgagcttggaaaagacaatttgagacttactgtagtgtggggattgaaaagttctatatggccaggcgcagtggctcatgcttgtagtcccagcactttgggaggctgaagcaggtggatcacttgagctcaggagtttgagaccaactcctgggctcaagtgatccatggcaaaaccctgtctctacaaaacatacaaaaaattaatctgggtgtgtgttgtacacctgtagttccagatacttgggaggctgaggtgggagaattgcttgagcccaggaggttgaggctgcagtgagctgtggtcatgccgctgcactccagcctgggtaacagagtgagaccctgtctcaatacatatatacatacatacatacatacatacatggttctgtattctgcagagtaaagtgggatgctgtatgcttgaaaattgctaagagagtagattttaagtgttctcaacacaaaacattgataagtaagtgagatacatacattagtatgtgttaattagtttgakttaggtatttcacaatgtatacattttcaaaacgtcatgttgtacactataaatatatacattttttatttctctattaacacaatgaaaagcattagacctaattcttcaggaccagtggtcaaatggttcacagtagggaatagtgggcttggtgcatattttcaagcaaacatttgccttaaatttcaagttaaatatgatatttttaaagaaca

SEQ ID NO: 696719 - DNA, 617 bp, Homo sapiens
tattatgaatattttaggaatctgagtggagtatgtaagaaagctaaattataacctctatggactactttaggttactttatcagtcggctgaaacaaggaaaactgcccaggtacttagattattggatttttttacatatactatatttagaaataatgcaattatgactgtattatgatacctagacagtttcacattaagttacacattaatgtttgcaagatacactaaggttagtaaaggaggctaattgtggctgtagttattctgcccaggggctttcacatgcaccccaggaggctgctcaaaacaatgagtatcaacacatttataatcacttaatggcatacttattgatgaatcatattccaattactaacaaccgaaattcagttttgtggaaggcatggtaaatgatatacctgtttgtccagccaggacraacaatgagtatttgtcaagagcctcctgtttgcttaacaaacattgtttagcaaggacccaatactgggtaaacaactgttgcatttagttttcaaactgaacatttcttaattttatagtgaagattgagtgtagaatcttatggtagctgtgaaatggtatgtagcta

SEQ ID NO: 696720 - DNA, 633 bp, Homo sapiens
  misc_feature 533, 534, 535, 536, 537, 538, 539, 540, 541, 542, 543, 544,545, 546, 547, 548, 549, 550, 551, 552, 553, 554, 555, 556,557, 558, 559, 560, 561, 562, 563, 564, 565, 566, 567, 568,569, 570, 571, 572, 573, 574, 575, 576, 577, 578, 579: n = A,T,C or G
  misc_feature 580, 581, 582, 583, 584, 585, 586, 587, 588, 589, 590, 591,592, 593, 594, 595, 596, 597, 598, 599, 600, 601, 602, 603,604, 605, 606, 607, 608, 609, 610, 611, 612, 613, 614, 615,616, 617, 618, 619, 620, 621, 622, 623, 624, 625, 626: n = A,T,C or G
  misc_feature 627, 628, 629, 630, 631, 632: n = A,T,C or G
atgagaaaataaatacagaacaataaaacagaattaactctaaaatgcagatagtaaatgctaattaatgaaaaacatactgccaaaatttgtgcagtgggttcgtcacttgtaaatgcaatgatcttaggcagattatgaaacttctctgcctcaacactgttatctgtaaaacagaaaatgtaatgtgaccaacttcatagtatgattgtattaaataaattaatacctgtaaagctcttataacagtgtcttgcayccattacattctcatattagtatttttcactaagatcatttttattatgctaatgttttacaaaacattcttgattattaaaatgctctgggagttttaaggttgtttaatcacataaataattgggtctcagatgcctaaatctgctctaatgctattgcatcttatagcagcacacagaacttgattaagatgggctatgaaatgaattttacagaataatatgtattcgcctattgctctgtgccaaaaaagtgtgtatctaacacttatnnnnnnnnnnnnnnnnnnnnnnnnnnnnnnnnnnnnnnnnnnnnnnnnnnnnnnnnnnnnnnnnnnnnnnnnnnnnnnnnnnnnnnnnnnnnnnnnnnnnt

SEQ ID NO: 696721 - DNA, 1721 bp, Homo sapiens
  misc_feature 1196, 1197, 1198, 1199, 1200, 1201, 1202, 1203, 1204, 1205,1206, 1207, 1208, 1209, 1210, 1211, 1212, 1213, 1214, 1215,1216, 1217, 1218, 1219, 1220, 1221, 1222, 1223, 1224, 1225,1226, 1227, 1228, 1229, 1230, 1231, 1232, 1233, 1234: n = A,T,C or G
  misc_feature 1235, 1236, 1237, 1238, 1239, 1240, 1241, 1242, 1243, 1244,1245, 1246, 1247, 1248, 1249, 1250, 1251, 1252, 1253, 1254,1255, 1256, 1257, 1258, 1259, 1260, 1261, 1262, 1263, 1264,1265, 1266, 1267, 1268, 1269, 1270, 1271, 1272, 1273: n = A,T,C or G
  misc_feature 1274, 1275, 1276, 1277, 1278, 1279, 1280, 1281, 1282, 1283,1284, 1285, 1286, 1287, 1288, 1289, 1290, 1291, 1292, 1293,1294, 1295: n = A,T,C or G
ctcctgatggtctttgtgttagatccagatcccaaaggtaggggttctctcctatcatggtgaattaattcctctttgtagtcttttaagctaggaaactttgtttatgaagatagcaattcactcccacagttttacttaactttcaaacttgggaggaaaggcattggatatctgggacccttccttcccagaatgcacatggctccttacactcccccaaattcttttcaggggctagagaaactttccataagccaaactaacatttctactatataatttctccaacacaagaagtttctgcttgtcttaaawttttataaccaagaaacacaactgaagtaacactttcaagaacataaaaaatttctttcttgttgatttttggcagcttattaaaagaaaaacagcaacaagatttaccttattgattattctgattagaatgtcttaaataaatttgaaagacaattttaagattattttacaatgtattatatgttttgacaacattgtgtgtgttatttattagatggaaaatactataagaaacataattgtatattcagaacaccttatctacttccttctttcattcagttacggtaattcttctgatcatcatttgagatggttctatttattctgttcttacagagccagttcattgccagagtgtgaatgcaaactcctttcctctctcttgtaatggcttgacctgaggagtttcaggtggctgaaatctggtctgatttaagctgggtcattattcttctgttcttgagccacaatgttactaaaccagcaaaaaagtacaaaataaccaaatggtgatttcttcattcattcaaggaaagtttatcaaaaatttactgagtaccaggagctgtgcaagattcttaactggcagtgatgaaaaatgcaggtaaaatgctgtatcctccaaaaactgacagtacttaaggagtaacagctaaatgaaaagaggaagaaaactgcaaaagaaactctaattgtggtttggtctctaatgtgtatgtggttttaagcatgttttttacctctctgggtttcagtttctatatgtaaaaattgtggaatacattttcaaattttaaaattctatgaattttttacagggtagctgacaatttttacattttggtgaatgaaattttcaaatgacaattatnnnnnnnnnnnnnnnnnnnnnnnnnnnnnnnnnnnnnnnnnnnnnnnnnnnnnnnnnnnnnnnnnnnnnnnnnnnnnnnnnnnnnnnnnnnnnnnnnnnnttagtatctgtttatattgtttccttctgtgaatctctgaccacctcttccattttttcttgccatgttaaacttactatttgcatagagactagactcatatgtttagccagaagtatttttttccatctgtctacaaattctgtttaaatccctcattatcaagctgcctatctttggaacaatacttttcccatacaaatgacatagcttattggcacgggataaaatgtatcagtctggtaccttgagtcataatttgaaatgcacatgtttaaaattccattttcttgcccaatatttttattcccatatattcttttctcttccaaggttccaactgccagtgagaacaatgactaaacaccacctgtgcatacttgtctttattaattgccaaagactttataatccctaaaaaaatct

SEQ ID NO: 696722 - DNA, 957 bp, Homo sapiens
ctttcatgctaaagccaggtgggtcattcatgttcttgggtccagggttaattcatacgaagtctttgggacatgtaagaaggaaagcgattcctcgattcctcgggccagttcaattgacattgtagttaaaaccaattgttctctttgaaaaccctaaaatgatatgccagagcaaagctggtgactccaaaatctaaagaatgtttaaaactacaggccaggcacagtggctcatgcctgtaatcccagcacgttgggaggccaaggcaggtggatcacctgagctcaggagttcgagactagcctggccaacatggtaaaaacctgtctctactaaaaatacaaaaaaattacccgggcgtggtggcatgtgcctgtaatcccagctacccaggaggctgaggcaggagaatcgctggaacccaggaggcagaggctgcagtgagctgagatcgcaccactgcactccagcctgggtgactgagcaagactctatctcaaaaaaaaaaaaaaaaaaaaaaaaaaaaccacaaaaaaaatctactaagtactttttagacccaacacagaccctcataggccagggatgattacaagagtatgttttttggagatttcaatacacatccagtggtctgygcctaagcaacttaaaaaatatattgaaatttcagaaataattgttgaggctctttgtcaaaaacagtggcacatgttgtgtaaggtaaatgcatacaatgttatttgccaaattaaaaacaaaaaacaggaccaaattctgaatccttctcctgaggttgaccaccgttgttctaaagccaggcttctccaactgtttccatctactgattaattcagaaggagaagagtttttatgaagcaacctccatgtcaactataaatggttgctgaaagaaagaaaataaaaaatatattaccagaatagaacagaaa

SEQ ID NO: 696723 - DNA, 427 bp, Homo sapiens
tctcttactaaagcctatcccaaggtaatttttttctgaatttcttctataaaacataaactagttataatttttgtgtcaaaatttatttttttacatgtttttgtaaatgaaacatatattcatgtaaacacrtaaatcatttatatatattaatacattagatttatgggtttttttcactcttttattctaagaaaattttaagacagctttcatagctttggtttattagttccattgctgctctaaccaattcccacaaattaagtagcttaaaagaacacaaatttattattttacagttttggaggtcagaagttttaaattggtttccttgggctaaaatcaagatacagcaggattgcattcttcctgacagctctaacaaagaatctatttccttgtcttttccacatactacagg

SEQ ID NO: 696724 - DNA, 642 bp, Homo sapiens
gtgaaaacaaacacttctttaataatgacttttgaaaaaaatgatgaaaagttataaatgaacagtcagtgttcaaaagaggtttctgtgatttttataaatgcatagcatcttacaaacactataaattagttggtggatatttaatatgatagaaactattccatctgaattttctagggaggtcaaagttactttggtattgtaactcttttaagccaaattaattgggttatgtttcctttttttttctttttcaacttttattttaggttcaggggatacatgtgcaggtttattacatgggcaaatttcatgttgctaggatttgttgtataaatgattttgtcaccgagatagtgagcacagtacccaaaaggtagttttttgaacttctccctcctcccccactccaccttcaagtaggccccaatgtttgttgtttccctctttgcactcaatgtttaccccccatttataagtgagaacatgtggtatttrgttatttgttcctgcatcattagttcacttaggataatggcctccagctgtgtctatgttgctgcaaaggtcatttaattctttgttatggctgcgtagtattccatggtatatatgtgccactttttctttagctagtcc

SEQ ID NO: 696725 - DNA, 645 bp, Homo sapiens
tccgtaagaactaggtatagggcaaatatgatctttctgtactttcttcacaactcttctgttaacatagatatattttaaaatgtaaacatttattaaaaagcaaaaaaaaaaagtgtgctttcttacagttttattttactctgcccgttatttatccatgtttaatttaccactaaactgtgaaaagcttcaggtatcattaaatcagaaaatatttctaatttgcatatatttttaatgtaatggctgtatcatatgttatctacttaatatttcctattttggggcaccttggttgcttctttttttwaaaaaaataagtaactctatagtgaatatcattctacataaatttttctcatttctggtttttgtatgtttttgacttcaatttctttccttcctttcttttcagtcaattgatctgactagggttgtttatatgttataatggatttttttgaattaacatttctaggttattggattacaattttcaagactgatgcaactgaagattaaaatggctgacatgttaaaatagcccaaattagaattttcttactttatccatatgattcataaaaattaagcattcttaatacaaaagccgttaaaacaagaaaagaatcaaatttgttg

SEQ ID NO: 696726 - DNA, 645 bp, Homo sapiens
tccgtaagaactaggtatagggcaaatatgatctttctgtactttcttcacaactcttctgttaacatagatatattttaaaatgtaaacatttattaaaaagcaaaaaaaaaaagtgtgctttcttacagttttattttactctgcccgttatttatccatgtttaatttaccactaaactgtgaaaagcttcaggtatcattaaatcagaaaatatttctaatttgcatatatttttaatgtaatggctgtatcatatgttatctacttaatatttcctattttggggcaccttggttgcttctttttttawaaaaaataagtaactctatagtgaatatcattctacataaatttttctcatttctggtttttgtatgtttttgacttcaatttctttccttcctttcttttcagtcaattgatctgactagggttgtttatatgttataatggatttttttgaattaacatttctaggttattggattacaattttcaagactgatgcaactgaagattaaaatggctgacatgttaaaatagcccaaattagaattttcttactttatccatatgattcataaaaattaagcattcttaatacaaaagccgttaaaacaagaaaagaatcaaatttgttg

SEQ ID NO: 696727 - DNA, 645 bp, Homo sapiens
tgataggagttgctggggaaagaggctgacttgtacacaaagtatgggtctttctgtccacttggttattaaagtccctctctgctgagatcactgtttggtggacattcacatggcacaaaaacatttacatcataccattttggaagtaggatcttttcagatgtaatcaagttaagatgagcctgcactagattaaggtcaaccctagtctaatcactggagtctcaataagaaaaaaaaaaagagacacagaggcaaacagagggaagaaaaacacgcgacaatggaaacaaagactggagttatgcagctgcaagccaaggaatgctatggattggcagcaactgtcagatgctggaaaaaggcaaggaagtatcttcscctagaaccgtcagagagaacatgagcctgccaacacctttattagacttctaatctccagaattgtaaataaatatatttctgttgttttaagtcatccattttgtggtatttttttatagcagccttagaaaactaatacagctaaaatcttacattaaaaactttcctcattaagtctttatttatcctaaaatacataccatattttgttcaatgcatttgtgatggatttgtcttcaagcttcttctagtctccac

SEQ ID NO: 696728 - DNA, 621 bp, Homo sapiens
gcgttaaatgaaacctatggtcccttataactataacattctatgatgctttgagtgtctttttatgtatgtatttgcttggattttttttcttgtcagggaaggtagctccagcctccttctggaatagctttccacctacatatcttcctactgcaatgacacaagttgagctgactgcacagtgatgtaacttcaggattaaaagaaaatgaaaaagagagttctaccccagtccttcatgctatcaccaccagggtccagctagtgaacattttgttttatcaaaatactagaggctacactaaaatggttcctaacaggttaggttaaaaaattttcctttcttttaacttattgagggtaagagggagaaaattacaaggagagcagaaagattcttttatgttacacatctacctatggagtacaaatcctgtgtcccataaagaaaactctatttgtgctgaatgtatatttascatttcctgctaatgaagtaaaaactgattccagatgaacagaaaaaatattttaattttcactgaaaattaattccagggcaaaaatgcaaggcagtttttttaaaacctataactctgttgatccatttctgatttc

SEQ ID NO: 696729 - DNA, 618 bp, Homo sapiens
aataaagcaagattgtagattcatctttttattcaggcatttgaggaaagtgtgacttcaaggactattgaaatctgagacatatgttctgggtacattaaggagaaggtatagtagtattgaagaatataaaaatatatttaggtctcgtaagtcagcacttctccttacattaactatatgactccttcattgtggattattattccatccaaaatttcctatttagaaggccacatttggttcatgcaaatacgaaaagatgccataatcggagaaaaaagtttggagatcatgaagatgcaaacaggagtatttcttaatactttattaagcttatacgaatacactaaagtacagttttaatttggcttctaagtatactttactctatacaaattaccaccacttgaaagaaaaaaagagagccagagatgaatatatagtttccaacataatatagaggcatagtagcatccttaacatgacatayactgtgctcctaaatactgctcctaaatattaaggataacatgctaaaatttgtctttatccccatgttttgggttataaaatattagatttagaaaaaagaaaaaaaaagaaagtaaaaagaaa

SEQ ID NO: 696730 - DNA, 2584 bp, Homo sapiens
taccaagctatggtaatggcaaaagcaagtaaagtaatatgactgagttatagctcaaaatttgttcaatataagaaacagaaaagttgtaactagatttataagaaaataatttattgtatataattgatcatatataaaataaaatctcattatttagtatttaaattacatttcttttcaaaatataattaacaatatggaatgcaattgttttacaaagctcatttagattgttggcagaattcatttctttttggttatatgactgagggctgttgtctggaggccatcctctggtccaagaagtcacctggagttccctggcatatgtccttctccaaaggcagtttacaatacgtttgcttctttacacagagcaggaagatttatctttctccaatgtgctaagactgaatcttatataacttaattgaaacaataaagtgatatcttgttacctttatcatattctacacattagaagcaagtcatagattccactatctatggcaatggtccccaagtttgtggcaccagggactggtttcatgaaaaataaatttccaccgacctggggctgggagcaggagagtggtttgggatgatttaggtgcattccatttattatacactctatttctattattattatattataatatataatgatataatcatacaactcaccataatgtaaaatcagtgggagctctgaacttgttttcttgcaactagatgatcccatctgggaataatgagagacaatgacagatcaatcatcagacattagattctcgtaaggaacatgcaacctggaacccttgtatgtgcagttcacaatagagattgccctcctatgagaatccaatgctgctgctgatctgacaggaggcggagctcaggcggtaatgcgaatgatggggaggggctgtaaatacagatgaaactttgcttgctcacccaccactcacctcctgctctgtggcctggttcctaacaggccatggaccagtactgaacccctgatctatagaatagtattatacgaggatttgattcattatgagctactttaggtgtgactgtcacactctgttagactgaaaactctatatggactattatgtatttattattaattcatttagtttttctcataaagctgtagccactgcatcttataaagtgcattatccagaatcagtgctcagtaaacacttatgctataaatgaacaaatgaatattcttaacttttatttttggtcaaaattttatctgtcaatcacagaagaataaaatggatttattgtcctaattttaaactgattctcacaaggttaaactagttacccttaaataggcctccaaaagcaacataactaggaatgcaatgcgagactctctcatgccagagccaggacttttattatattacatgatacaagtcactgacattttcatacttttaggttgagtctctgttgactgacttaatacttttggattttttttgctgatggatttgccttaaggaaaatactcatttactcattaatttatttgtgtttcttagaatctataatattcatcaaacaagaatattaatcagaatcatttttctgtgccaggtaataacactgcacagaactctctttcaagcttcttttttaaaatgatgcatgcgtttgcttgagcattaaaactccattttaaatttacttggttatatttttaagctaaacactccactgatgaaataatgtttgggcttctctttttatatttccctttgcttgctcctttcaaactaagctttttcccatgacttttctaacaaatagtgagaaatgtatttatctaaaagactgagatttagatgaaggttctgaaaacatagatggaatggaaacctcaaaaaaattggcaattaaaayttatttatctcctaatttggagttattttactaaagtaccttgaaatgtatattaggtaaaaaaatatgaaatgtagtgcatgctcaatagcaaagtcattgtgaggaaatggaataatttatttctatagtaaaagcttagtgtctgatatgcactaaatataaaataaatactaattgagtaaatgtatgtataaacactaagaaaatatccaatataatagcaatagtaaacatggagattaaatttccactcatttaaaaacatttttggtgtatttatattttattaaaccaactagtatgactacattattataacatttggcatgtatctattatagactaaactgaatattagtttttttccatgaagacacaatctttaaacataagcagattaattatattggtcagtcatttattttcttgagaagtagtattccccaaaaagaaaaccagtgttcttccctcttttatttaaagttctattattaaaaccagaatttaataatgaatagactcaacagacatgttaagacactgatttgaattctccaagaattcaccatagctgtagtataagaatgccagagcttggacttaccttatgtgtttcatgtggtttcgggaaatatattttggg

SEQ ID NO: 696731 - DNA, 2584 bp, Homo sapiens
taccaagctatggtaatggcaaaagcaagtaaagtaatatgactgagttatagctcaaaatttgttcaatataagaaacagaaaagttgtaactagatttataagaaaataatttattgtatataattgatcatatataaaataaaatctcattatttagtatttaaattacatttcttttcaaaatataattaacaatatggaatgcaattgttttacaaagctcatttagattgttggcagaattcatttctttttggttatatgactgagggctgttgtctggaggccatcctctggtccaagaagtcacctggagttccctggcatatgtccttctccaaaggcagtttacaatacgtttgcttctttacacagagcaggaagatttatctttctccaatgtgctaagactgaatcttatataacttaattgaaacaataaagtgatatcttgttacctttatcatattctacacattagaagcaagtcatagattccactatctatggcaatggtccccaagtttgtggcaccagggactggtttcatgaaaaataaatttccaccgacctggggctgggagcaggagagtggtttgggatgatttaggtgcattccatttattatacactctatttctattattattatattataatatataatgatataatcatacaactcaccataatgtaaaatcagtgggagctctgaacttgttttcttgcaactagatgatcccatctgggaataatgagagacaatgacagatcaatcatcagacattagattctcgtaaggaacatgcaacctggaacccttgtatgtgcagttcacaatagagattgccctcctatgagaatccaatgctgctgctgatctgacaggaggcggagctcaggcggtaatgcgaatgatggggaggggctgtaaatacagatgaaactttgcttgctcacccaccactcacctcctgctctgtggcctggttcctaacaggccatggaccagtactgaacccctgatctatagaatagtattatacgaggatttgattcattatgagctactttaggtgtgactgtcacactctgttagactgaaaactctatatggactattatgtatttattattaattcatttagtttttctcataaagctgtagccactgcatcttataaagtgcattatccagaatcagtgctcagtaaacacttatgctataaatgaacaaatgaatattcttaacttttatttttggtcaaaattttatctgtcaatcacagaagaataaaatggatttattgtcctaattttaaactgattctcacaaggttaaactagttacccttaaataggcctccaaaagcaacataactaggaatgcaatgcgagactctctcatgccagagccaggacttttattatattacatgatacaagtcactgacattttcatacttttaggttgagtctctgttgactgacttaatacttttggattttttttgctgatggatttgccttaaggaaaatactcatttactcattaatttatttgtgtttcttagaatctataatattcatcaaacaagaatattaatcagaatcatttttctgtgccaggtaataacactgcacagaactctctttcaagcttcttttttaaaatgatgcatgcgtttgcttgagcattaaaactccattttaaatttacttggttatatttttaagctaaacactccactgatgaaataatgtttgggcttctctttttatatttccctttgcttgctcctttcaaactaagctttttcccatgacttttctaacaaatagtgagaaatgtatttatctaaaagactgagatttagatgaaggttctgaaaacatagatggaatggaaacctcaaaaaaattggcaattaaaacttatttatctcctaatttggagttattttactaaagtaccttgaaatgtatattaggtaaaaaaatatgaaatgtagtgcatgctcaatagcaaagtcattgtgaggaaatggaataatttatttctatagtaaaagcttagtgtctgatatgcactaaatataaaataaatactaattgagtaaatgtatgtataaacactaagaaaatatccaatataatagcaatagtaaacatggagattaaatttccactcatttaaaaacatttttggtgtatttatattttattaaaccaactagtatgactacattattataacatttggcatgtatctattatagactaaactgaatattagtttttttccatgaagacacaatctttaaacataarcagattaattatattggtcagtcatttattttcttgagaagtagtattccccaaaaagaaaaccagtgttcttccctcttttatttaaagttctattattaaaaccagaatttaataatgaatagactcaacagacatgttaagacactgatttgaattctccaagaattcaccatagctgtagtataagaatgccagagcttggacttaccttatgtgtttcatgtggtttcgggaaatatattttggg

SEQ ID NO: 696732 - DNA, 621 bp, Homo sapiens
cttcagcctgggtgacagagtgagactctgtcttaaaaaataaaatagaagactgggggagacagaataaaattattctcatcaaaaatattaggattgcaatagtaaaattagaaaagtaaatttaagacaaagatttatgtaaaaggtcactttatatggacatatgataaataatgaaagatgaatctttttatgccgtgaagttttgataaagtattcttttaacctcagaatgtatctttaaaaaaayaagaacaggtctcttcatagctcaaattatattattatctctaagcaattaatagtaattccttaacatcttctaatatctagtccatactaagattttctcagttgttccaaaaacatcctgtactttgatgtccctaaactaaaagtcagtctaggactatgcacaactggttatatcccttatatctcttttaatttagaactgttcttttttttctttttgtattgatttgttgaagagactgcaccagttgtcctgaataatatctcatcttgaaaataatttttagaaagatttaagaaatattgaagagcatcctaaagaaagaaaagtgaaagcattaatctttatcagtaggtaccttg

SEQ ID NO: 696733 - DNA, 973 bp, Homo sapiens
tttctggtggaagatttgttctcaaggaggaaggagctatttttctacttagatgcaatagaagaatagaaggttgaccgaaagaacatgtgtctttaacaaacacttatgaggtgcctatcactgtcttaggagctttacaaatgcctgtcactgtcttaggagctttacaaacatcaacaatacaatgctccttacaaccttgtgaggtaatattattattcccatactacagatgagaaaacaaaggcacagtcacgtaactaggaaggaacagagacaatttgatcccaagcagtctggctacagagttcacaattatagcccttagttctatgtctcactttaaggagaggttcaatcatataaattaatttgtccatttatttaaatagtttataagacaataaaggatggcataccagtgattaatacaaggacttggagggagaagaaaaagagggaatgagtaaaaagggaaagaagtagtaagttctaagaggacaaaatgaaacatgtaaaattaagcccctgggaaaagcagtggtgactcaatgtgtggaaattcatacattcaatgttcttgagcaaacaagattatttttgtagtaaatttgcttaatttttattttacttcagaggactattaaatttactaatatattaccaagggtaagataatttatttctgggtaaagggatctcaaagaaacacattaaattcttatagctggaacataaacaaacatatacaggcatggcattagtttattaagagaaaatataggaaaacatattatgccatatatgttcatgttttccagttggattgctaaattattaacaaataggtgaagaaaatcgaatgttattgaggggaataatttgaagatcttatgagtcattaaatatttrtgaaataagccgtaataatcaaaaatggcaagcttaatcaaatattccttttaaatat

SEQ ID NO: 696734 - DNA, 1324 bp, Homo sapiens
ataaaggctatttgatttatcccactatctatctttacatcatttcccctaattccatttattctcaaaaagaatccagctactaaacaataaaaaagacaaaaaaaaatcagaaatttttatctcttccaaggagacaggtgaacattttttcagaccctggggaatcctattaatatcaaaaaggacaccggagacaacatgttattccacctgygagtgctgcaggtaaagactggccaaaatcttcaataaaaatatgaagaaaacacacacaaacactcacccacatcacacacacacagctgtatcgctatgtacacaccaaacatacatatacgcacagactcatgcatggataaccaccgcacagcacatgcacgcatatgcatcaaaaccacacacaacacaccatccatcacatatatacatactcccaaattctccagagatcaaatgactaagactaaaatacgtgttttcttccttaattatagatgaaatgctatagttttggaaagtcaagtagataattttaactaaaagtgcatgaattctcattcatagaaaatgtattttattttctacatctgcatattaaagtgagctaaagtgctttattcttgtgatttttacaatgcatctgtaacataagtatctagatcaatagaagaagtacacttaaaaataaatgatagaagcaggtactcagtcaatcagaaaaagaagacttattaaagagataaatatcatatggcatcctttcatggctgaggaattctaaaagttgttaggtcacagagaatttacaagctttatccctgacatcaaaagttacctttttactgtgtcttaaaggccaggagagtcaatggaagtcctagagagttgtttaggcactaaaagaagtcgttcaggctaagaattcctaggtgccagctgaaagggcaacacttattcgctagtttcctaaattatcaatgtcatatcatttaactgcatattgacccaggcaacttagattaactgactgcaatctaggacctaatgtcaacaaatatgatctaaggccccggaatttcccaaactaatctgagcacaacaatcatcttggacatgaacataaatatgtcaaggcttttagaatctctgattcacttagtctgtgttgatcctagaaatctttatttataacaagtgcccaaggtaatcagctggaccgggcaagtccaatcacactgtgaatagctgttatcagatgtttagcacgattatgttattaatatttttccgtaaaattccaggcctggcaatatcctccttg

SEQ ID NO: 696735 - DNA, 1324 bp, Homo sapiens
ataaaggctatttgatttatcccactatctatctttacatcatttcccctaattccatttattctcaaaaagaatccagctactaaacaataaaaaagacaaaaaaaaatcagaaatttttatctcttccaaggagacaggtgaacattttttcagaccctggggaatcctattaatatcaaaaaggacaccggagacaacatgttattccacctgtgagtgctgcaggtaaagactggccaaaatcttcaataaaaatatgaagaaaacacacacaaacactcacccacatcacacacacacagctgtatcgctatgtacacaccaaacatacatatacgcacagactcatgcatggataaccaccgcacagcacatgcacgcatatgcatcaaaaccacacacaacacaccatccmtcacatatatacatactcccaaattctccagagatcaaatgactaagactaaaatacgtgttttcttccttaattatagatgaaatgctatagttttggaaagtcaagtagataattttaactaaaagtgcatgaattctcattcatagaaaatgtattttattttctacatctgcatattaaagtgagctaaagtgctttattcttgtgatttttacaatgcatctgtaacataagtatctagatcaatagaagaagtacacttaaaaataaatgatagaagcaggtactcagtcaatcagaaaaagaagacttattaaagagataaatatcatatggcatcctttcatggctgaggaattctaaaagttgttaggtcacagagaatttacaagctttatccctgacatcaaaagttacctttttactgtgtcttaaaggccaggagagtcaatggaagtcctagagagttgtttaggcactaaaagaagtcgttcaggctaagaattcctaggtgccagctgaaagggcaacacttattcgctagtttcctaaattatcaatgtcatatcatttaactgcatattgacccaggcaacttagattaactgactgcaatctaggacctaatgtcaacaaatatgatctaaggccccggaatttcccaaactaatctgagcacaacaatcatcttggacatgaacataaatatgtcaaggcttttagaatctctgattcacttagtctgtgttgatcctagaaatctttatttataacaagtgcccaaggtaatcagctggaccgggcaagtccaatcacactgtgaatagctgttatcagatgtttagcacgattatgttattaatatttttccgtaaaattccaggcctggcaatatcctccttg

SEQ ID NO: 696736 - DNA, 647 bp, Homo sapiens
caattctatggtgtaggtactcttattacttccctttaatcaaaaagaaactaagacacagagcggttaaataatttttacctaaaattttcctatataaaagtcttagatgaaaactaaaaggcctaaaagtaagcaaaacactggttgggattactggcagaaacttggaatggctatattaatgtcagaaaaaataaattttgaagccaagaatattaccagcaaaacagaaagccatttcataatgacaaagaggtaaattaatcaacacgatataatagtcctaaacatttgtatacctaataacagatcttcaaaatacatgaagtaaaaactgaagacatgcaaagggaaataggcaaatccacaattacaatcaaagatttcaataccacttcaaaatctatagaacaaggaggcatgaaaatcagcaaggctaccatagacttgaatggcactataaaccaacttgacttgattgacacttattcatctaataatagtagaacacacrttctcttccactgctcttgaaacatttaagttatactatattcttggtcaaaaaacaagtcttaataaattaaaaaggaagacagtcatacaaagcatattctctgactgcaatggaattatatcaggta

SEQ ID NO: 696737 - DNA, 651 bp, Homo sapiens
taatatgactcaggaagtggtggcttcccgatgtggattcttgtcctgctccaacagcacactggactgctggaagcttgctttccagatacagaaataatatgactcaggaagtggyggcttcccgatgtggattcttgtcctgctccaacagcacactggactgctggaagcttgctttccagatacagaaataatatgactcaggaagtggtggcttcccgatgtggattcttgtcctgctccaacagcacactggactgctggaagcttgctttccagatacagaaataatatgactcaggaagtggtggcttcccgatgtggattcttgtcctgctccaacagcacactggactgctggaagcttgctttccagatacagaaataatatgactcaggaagtggtggcttcccgatgtggattcttgtcctgctccaacagcacactggactgctggaagcttgctttccagatacagaaataacatgactcaggaagtggtggcttcccgatgtggattcttgtcctgctccaacagcacactggactgctggaagcttgctttccagatacagaaataatatgactcaggaagtggtggcttcccgatgtggattcttgtcctgctccaacagcacactggactg

SEQ ID NO: 696738 - DNA, 651 bp, Homo sapiens
taatatgactcaggaagtggtggcttcccgatgtggattcttgtcctgctccaacagcacactggactgctggaagcttgctttccagatacagaaataatatgactcaggaagtggtggcttcccgatgtggattcttgtcctgctccaacagcacactggactgctggaagcttgctttccagatacagaaataatatgactcaggaagtggyggcttcccgatgtggattcttgtcctgctccaacagcacactggactgctggaagcttgctttccagatacagaaataatatgactcaggaagtggtggcttcccgatgtggattcttgtcctgctccaacagcacactggactgctggaagcttgctttccagatacagaaataatatgactcaggaagtggtggcttcccgatgtggattcttgtcctgctccaacagcacactggactgctggaagcttgctttccagatacagaaataacatgactcaggaagtggtggcttcccgatgtggattcttgtcctgctccaacagcacactggactgctggaagcttgctttccagatacagaaataatatgactcaggaagtggtggcttcccgatgtggattcttgtcctgctccaacagcacactggactg

SEQ ID NO: 696739 - DNA, 651 bp, Homo sapiens
taatatgactcaggaagtggtggcttcccgatgtggattcttgtcctgctccaacagcacactggactgctggaagcttgctttccagatacagaaataatatgactcaggaagtggtggcttcccgatgtggattcttgtcctgctccaacagcacactggactgctggaagcttgctttccagatacagaaataatatgactcaggaagtggtggcttcccgatgtggattcytgtcctgctccaacagcacactggactgctggaagcttgctttccagatacagaaataatatgactcaggaagtggtggcttcccgatgtggattcttgtcctgctccaacagcacactggactgctggaagcttgctttccagatacagaaataatatgactcaggaagtggtggcttcccgatgtggattcttgtcctgctccaacagcacactggactgctggaagcttgctttccagatacagaaataacatgactcaggaagtggtggcttcccgatgtggattcttgtcctgctccaacagcacactggactgctggaagcttgctttccagatacagaaataatatgactcaggaagtggtggcttcccgatgtggattcttgtcctgctccaacagcacactggactg

SEQ ID NO: 696740 - DNA, 643 bp, Homo sapiens
atgaaggaaaaggaaaaaggaggcaggaagagagggaagaagaaagggaaggaggcagatgcatttcctaaatcttccattgcatctcaatggaagtctctattttcgaattttaaacctgacaaagacaggtacatttagttttaggttgatgtttattgtcttacatattcaccccagtgccttttctgatctcccgaatactgctagaataggtcaaatttcccaaaagtttagctcataacagtcatccatcattctccaccagtgcattcagggtaataaagcaggctaaacttttattctaggtatttttgacaagagaaaaataattttttaatgataagaaaattrtactaactacttgaaataataatgcaaaataataatttgaggcagatagtttttttcttctcaacttacatcattactggaaatcatgcaacatattttaaacgatgtagcataaacttattttacaatactttaccatctaatttccttttccttttgtgacatccaaataccttgaacattcttgcatttattaggtaattcgttcattcaagatccatttcatcagctaccaaatacctaccataacaagacatcttgcccaatatcatggagcctataaggtgta

SEQ ID NO: 696741 - DNA, 643 bp, Homo sapiens
atgaaggaaaaggaaaaaggaggcaggaagagagggaagaagaaagggaaggaggcagatgcatttcctaaatcttccattgcatctcaatggaagtctctattttcgaattttaaacctgacaaagacaggtacatttagttttaggttgatgtttattgtcttacatattcaccccagtgccttttctgatctcccgaatactgctagaataggtcaaatttcccaaaagtttagctcataacagtcatccatcattctccaccagtgcattcagggtaataaagcaggctaaacttttattctaggtatttttgacaagagaaaaataattttttaatgataagaaaattgtactaactacttgaaataataatgcaaaataataatttgaggcagatagtttttttcttctcaacttacatcattactggaaatcatgcaacatattttaaacgatgtarcataaacttattttacaatactttaccatctaatttccttttccttttgtgacatccaaataccttgaacattcttgcatttattaggtaattcgttcattcaagatccatttcatcagctaccaaatacctaccataacaagacatcttgcccaatatcatggagcctataaggtgta

SEQ ID NO: 696742 - DNA, 161 bp, Homo sapiens
tttctcactgaatgaagcaagtcctcagagtcctcctcaagactagactmtacttatacactagtagttaatcagagttggcataagaggtaaaaaactgttttataattttggatatggaaatctcacaggctttaaaatccaagcaaacctcttgtaaa

SEQ ID NO: 696743 - DNA, 591 bp, Homo sapiens
gaaatctcaaaygtagttctccctgaagtgaaaccaaaacagtaatgtaaggtagactattgcgttgtcagtgacaatggaacagtcaggaatacaatgactctgatcctcagtctactatttcaggggtacaactacatcaaagaagcttttcaaagcagccttgtagccctaatttgtcaaatggaaaatcctttataggtgccttagagagcatctgggtatttcagtatgataacacattcttttgtattatttcaagtaatagtaaaaataaaccagcaaacaaataaaacccatgctatttctactttctcagtctttgtactagattctaacagtaaaacaatgaaaagacaatgggtcttttcaggatgataccattcaaatcaacaatttaatgtttaattttagatatatatttgtagtaaactacaataaaagcaacggaatgataaatataatattggaattaagcttggaagtcaggtaggtatattcttcagtaaggggtgtgtggaagctttactatattgacaatgttctatcccttacattaatgctgacttagtgttcaccttcttatactgc

SEQ ID NO: 696744 - DNA, 1405 bp, Homo sapiens
cttcctgactcagtttatcaacactgtcataaacacaggtgagcccaatcgtcaaggcacttggcatttctgcattgaacttttcacattaggataatcgcatcatcacatatcctcattatcacaactgaaatttttacctgcgagacgtgggtagttggtgtgtggaaacttaattgtgcctgcacttgagaaaggattctgccccctccctagttacctcaaatcagatgcttgtgcagtccaactttggagaaatgcacagccacagccccgctgcctgaggcaaccactcagcagctgtcagaggacatcacaaatgctttctgtctgttatttttacggcagtggctgatctctaacagcctcctggtaacaaatggagccactgagagctttccaacaatgcagcctccagtaggatgaactcctccagtccctataccaggaagatagaaaatgaggaagacacacagaagacatgctaagccagcagttccactgacccagaaaattaaactccatcctcatcatctggcttcctacatctcaagaaaaaagaaaagcatgattaagacaaaggaatgagaacagaaaaaaaaaaatgaagcacatagaatataaggctaaataatcactagcatgggctatgaccaagacactaatatttttctctctccaccttgattcctgctcaaaggaatgctcttgacaactgtgttcacaaagagaatgtttgtaaacttttgtcccaaaataacacccacatgcagttttcaggttgctcatgttctataagcctaaacgaatttcccatttgcttcagttttcttttttcttcaagagaagtttttatyttttcaacctgaagtgtttgctgttgtgccccatggaggttcactggaaatctctgacataaggcagattgattaataggagaaaaagcatacaaatttatttaatgtgtgtacccaggaacccttagaatgaagacccaacatcccaatgaggtacagaagcttgtaaccaccttgaggttacagaaagaatggggcttggattctggtagaagaaaatatgagatgggggaggagaggaattctattgaggagcaataaatgattactagggagactgattggatcagggaacagagattaacttgtaaattgttctctttggaatttaaatgacccttggagaaagtcattatacatgtaaagaactctgttcagatatggttatattcttggtcttcttttctgcagtaaataatgaaataaggagggcaagaaaaaataattgttttctttgctaggtctggatcttaggcagataaaggaactcaacctctatgggagagatagtttagggggaggtcagagagaccttgaggcttctttgg

SEQ ID NO: 696745 - DNA, 1804 bp, Homo sapiens
gaacatccattcattcattcattcgatgataatttaatagtagtaataatagctggaacctattgagtgcttatcttacattatatcattcagttctcaccataatcttgtgaagtaggtgctattaataatcgtttctacagataagaaaactaaggcacaatgcagtgaagcaactttgccaaagtcacatatgtagcatagttatgaagccaggatttggacctgaactcttaaccaagatggatttttgcatctcatgggtcttggtatttacaactatgtgccaagcatgaggctagttgctggggattccaaagcagccaaaactcagaccctggtattgcggatcctgcagttgggtggggaaggaagttaggcaatgaacttaacaggtgctctgctaaagactagactggtgggataaattgcatgattggatgtgtggcaaaccatcaggagggtacatatcctgctgcgtgaggggaacaagtaatcacttggtggacgctttaatccaggttgcacctgcactgccacatgcaggtaaatcaggttctgtggtatgttcctgaaacaccaggaggaaagttaattctcagactccctggatatctgttttccttggcttatggtcagcttctccttggacaaataatgtttcttgtacaggtcgagcacccctaatataaaaatctaaaatccaaagtgctccaaaattccaatatttttgaatgctgacatgatgccacaagtggaaaatgccacacctgaccatgtgaccagttgcagtcagaacacagtcaaaactgtgtttcaagcagaaaatcatttaaaatattgtataaaatcacctttaggctgtgtgtataaggtgtatatgaaacataaatgaattttgtgtttatacttgggccccatccccaagatacctcattatgtatatgcaaatcttttcatatccagaaaaatccaaaattcagaatgctcctgatcccaagtactttggataacggatatgcaactggtacttaaaagggaagaaaatagactccagctttggaagcatataatgtaattgtaagttattagcccattattaatatgcaggagaacatttctaaaatgttcccccaggcctttgattcaaagaaaaattattctattcacctacttagtattttctgtctaaaaattggctaatttgttcattttgtggtttaacattttctaagactctaggagagaggacacatgactcactctttgttaaatacattttgtgctattatctttctctgttttggattccaaaatgttttcagcataactttgtggcgtattttttttgtatcagcagatcagctatggttcttatgtctcttctttggtctcactaaatacatgtgggttaatagatgttcatgataactgtagattttataattcagaaactataaacttaaattgattggctgttggttgaccaaacaatataaaataatgaatagagtatgaaaatatatggatttgacctcttaactgtcacttacaagctatgaatgatccaacaaatatttattcagcatgtattaagtactgggcacygtgctaagctcggcaaacacaaaagtgtacaagacaacatggccctagtctttgatggaacttacatcccatggtgtggaaaagacctttattttttgaggaactaaagcaaatcaaatgggctggagtgtcatgaaaaggttggagagtggcacaagatgcagtcatattggagtaagggcgggagatgctttca

SEQ ID NO: 696746 - DNA, 655 bp, Homo sapiens
attttggtgtatgtgcttccaagtatttaaacctccagtctgatctgtatatgctatcctaactgttaattgtattattgattatgttgattatcttgcttgaaggttcatacttttcaatttgatagaaataaagtttttttctgcttatagctagcgaattcatttgtttgtatagctttttatacttgataatataaagtttcacaaatactttcattgatgcgtctctgcaaccactacattaccaacaatgttgtctccaatttgcagaaaagcaagatcttgaaccaagaattattatccccagtcctgttttcttttctgctacaccatattgccttattcgtatacccttaaattccttatttgtccagcactttattgtttacaattttaatgtacattctttgtttttttccccctaaccactagacaaccagggatttttctttttcttgaaatagataatgtgagcagattctctccctgttttacacattaggaaactrgatcagattatatgactcttaaggttgtagcatctgggattactcagcagaagcagaaactatagcaggcctatcacatgggagctagaaccacaaagaaaatagagctgctgtaggagaagctccctgagatagtgagggat

SEQ ID NO: 696747 - DNA, 1088 bp, Homo sapiens
tgctgagtgaaaaagccttataaaaaagcacatttctattatttcagttatgtgaggttttggaataaatttttaaaatcagtgcattgctttagtgagtgtcggggtagggatacaaattgagaaggaaagggcatgagggaattttctggagtgattgcaatgtcccgcattttgatagggttttgtgttatgcaggagtatgcatttaatcaaaatttatcaaatgatatgcttaagattcatgtatctcatcatatgtaaaattgcataagaaaaagaaccataaatagatattaaactctgattagtggtttgcctgatgacgtgttcaggatgaagtgtaccaaagtcagcaacttattttgaaatgcctcaaaacatacaatggatcaatggatgtatagaaggatagacagactgatatatttatgaaaaacaagtacagtaaactgttaaatgcagaacctagtagaggatagatgatgttccctatacaattcttcccactttgaaattttttctaataaaatatgggtaaagaacctaacctattacacctaaacaaatatacttatctattatgaaataatatattgctttgaaatatatatgacaaacataaatgggaaataattttgttaggagtgttaatccttggatgtaggaagtatagggaatcttttttcttatttttacttttctgtagcttccttttttttggtaatgagcttctaatacatttttgtttataattttaaaatcatcagtgcccagctcctcccttcccactccaaatttccccactccagaagcaaccttcacagtgttaggcacttctgacatctgctttcatgtttctaagtaacagtctgatgctcctatggaagatgagaatttagctctcatacctcctaaccattcatatacccaaacttacttatttacatacttttctcatcctccaagagtttatatcttaaatattggtcagaattyatggtttacatttttgttactatgtaaatattattcacagcagggacatgtggtatgctatgatgacattttctttctttcacaacttt

SEQ ID NO: 696748 - DNA, 613 bp, Homo sapiens
agaagaaaagaaacaaaatagtaatgagagaagaaccagattgktttttttaaatgcaagatccaaggtaagctacttctttaataaagttaatctcagttttctattaggaaaatgtagataagggtcaatgaattcacactaagatatgaatgacagattatttctcttagtttccctagtacttgacactttaaaaaccaaacagacaagcaatccaacaaacaaaaaattggacattcattaacttattaaattactcaacaaatatttattaagcagttactacgtgacaggcactattatacaccatatatatctgtaaatatacacatatgcatgcatatatatctatatatacagatatacatgcgtgtatatctgtacatatacatgcatatatatatctgttctgtatatatacatatatgcatgcatatatacatatatacatgcatgtatatatacagatatatatatgcatatatacatacatacaagaagatagatatacatatataaaagaagattatatagtatataatagtgccagctttatgatggtgcaaaagcaatacacactcagtagaaatcgtacttcaaatacacaacc

SEQ ID NO: 696749 - DNA, 1847 bp, Homo sapiens
aaaggcctttgacaaaattcaaccaccttcatgctaaaaactctcaataaattaggtattgatgggacatatctcaaaataataagagctatctatgacaaacccacagccaatatcatactgaatgggcaaagactagaagcattccctttgaaaactggcacaagacagagatgccctctctcaccactcctattcaacatagtgttagaaattctggccagggcaatcaggcaggagaagcaaataaagggcattcaattaggaaaagagaaatcaaattgtccccgttgcagatgacatgatgtctatctagaaaaccccatcgtctcagcccaaaatctcctattatatttcttgcaagtctacaggtttatttcttgtacctgccagtatcatagtctcaagccagctgagatgttggcctttcctggggtatgcacaccattccaaatcaaattagcctcctccagctgtggagctgctcgtttcagggaatttttctccccttttagaactaccaaggtaatggaagctgaaagaggaggctttgctcaaaattacttcaattagctactttgttattaatgaatattaatattttttctgactttttggcagtgaacatctttatgaagatttcacttcttaccatgtgtattagttttctasgcttgccataacaaattatcacaaatttcgtggcttaaaacaacaaaaattgcttctctgatattttaggaggccagaaatctgaaaccagagcatcaacagtattggtttcttctgggagttttgagagagaatctattccatgcctctttcctagcttccggtggctgccagcaatgcttagcctagcaacatctctccaatctttgttgtcacgtggcattcttctctctgtgtctgggtatctgaacttccttctcctttctcttataaagacagaagtcattggatttaggacccactgtaatctagtatgaccttatcataactaattatatcttcagagatcctgtttccaaatgagctcacattctgagattctggtagacataaattttgggggacactgttcaatccagtatacaattcgttatgaagtagcacctgaaaatctgtatggtctccggtgttgattaggttatctttttgtgaaaattagtttgaaaatgaatggaacagcaagctaacttgacctttttttgtttgggtggttctttaagttaaaataattcacacccacttttttattgtttttttttttcatattattaagaaaaaggcagagagatctgtggacaggaaagtgttggcagaaccttacacttctcattctgacttacatgtctgcttttaatctagagccaaataactatcggaccatgcatggccgggcagtaaatggcagccagttgggaaaggattacatccagctgaagagcctgttgcagcccatccggatttattccagagccagcttatatggccctaatattgggcggccgaggaagaatgtcatcgccctcctagatgggtaggtcagattatttagcttttcttatgacattgttcatttaatgaattaatgtatttgcatttctcttggttatttatttatttatttatttattttggtcttaagaaaaaaggagggactctttccatagtggcttcacccactctaagacagagattctccatctttctcatctttctaggccttccatagtcaacagggggtggtgggatggggaaggtatatcacaatctctaggatgggttggaaaggaaacattgtttgaaaaaccacaattaatattatgcatcttatagcatca

SEQ ID NO: 696750 - DNA, 949 bp, Homo sapiens
tgagacagggtcttactctgtctcctgggatggagtggcatgatcacgcctcactgcaggctcaacttccctggttttgagcgattctcccaccttagcctcctgagtagctgggactacaggcatgccccatcacgcctggctaatttttgcatttttagtagagacggggttttgccatgttgcccaagctggtctcgaacttctgagctcaagctatccttctgactcagccccccaaagtgctgggattacaggtgtgtgccatcgtgcctggctaatggcttgttttattggctaagttgagatgccctggaggctgcctccatgtgtctctgtcaaatgttttgctctgggtgtgggacaggcctggggacaaaacagagcccagacatggcaaagatgcagagggagtcttggtagcccatccccttcctcaatacccctaagtggaggacgtgctcagaatactcccatcttacgtggcacctttgtgcaaattagaacaaggtactctccagtccaacccacctctagccaggtcctagtagagtacagcgttctccttcacatgataccagccaggatgccaccctccaaaacttactctgggggcctgggagtgcgtgctgtcttagctcctacagaacagggtccagctgcaagagtgaagtgtgtgtatgtgtgtgtgtgtgtgtgtgtgtgtgtgcgcgcaagtagggtttgaggggggaagggggcaggtagggctcctagcaggccccagggygacaccaaggtctatggggaggagctcatgatgttatcatgggctgccctccaagcctttccctgaaaatggagcaactggggagagaatgtgtgtgctactcaggctcagaacagatgcaagagtctctcccaacccagccatcaccacggcaattcacagttaccacaaacagcagca

SEQ ID NO: 696751 - DNA, 949 bp, Homo sapiens
tgagacagggtcttactctgtctcctgggatggagtggcatgatcacgcctcactgcaggctcaacttccctggttttgagcgattctcccaccttagcctcctgagtagctgggactacaggcatgccccatcacgcctggctaatttttgcatttttagtagagacggggttttgccatgttgcccaagctggtctcgaacttctgagctcaagctatccttctgactcagccccccaaagtgctgggattacaggtgtgtgccatcgtgcctggctaatggcttgttttattggctaagttgagatgccctggaggctgcctccatgtgtctctgtcaaatgttttgctctgggtgtgggacaggcctggggacaaaacagagcccagacatggcaaagatgcagagggagtcttggtagcccatccccttcctcaatacccctaagtggaggacgtgctcagaatactcccatcttacgtggcacctttgtgcaaattagaacaaggtactctccagtccaacccacctctagccaggtcctagtagagtacagcgttctccttcacatgataccagccaggatgccaccctccaaaacttactctgggggcctgggagtgcgtgctgtcttagctcctacagaacagggtccagctgcaagagtgaagtgtgtgtatgtgtgtgtgtgtgtgtgtgtgtgtgtgcgcgcaagtagggtttgaggggggaagggggcaggtagggctcctagcaggccccagggtgacaccaaggtctatggggaggagctcatgatgttatcatgggctgccctccaagcctttccctgaaaatggagcaamtggggagagaatgtgtgtgctactcaggctcagaacagatgcaagagtctctcccaacccagccatcaccacggcaattcacagttaccacaaacagcagca

SEQ ID NO: 696752 - DNA, 660 bp, Homo sapiens
ttttatcatgtcagtaacagagagctaatgaaggttttgctaagtgccacacttttgggtgattaggcttctgattatattcagtgcatgttagagggagggaggagtagaactgataagaagtctttcacagtggctcaagtgagaggacattaggctctgaaccagagcaaaggcaggggaaagttaaaggaagagacagatttgaaaggaaagtggtaatrcaatcaatgatgtgttacagtcttgatgaggagggggaagaaaaaggagttgaagacatacctaagtttttgatagagcaatgaggggaaaaggtgatgctttttagtggaaatagggaatgagacgtgtaaattttggagggtagactagatgatatgaggagaatagtaagtgggaaaataagtatcccatggagaaagttctttaatttacctctataatctgttatagctcccttgaaatatccgttgacaaggttcttcatcttcattgtcctgttatatctgactcaatctctcatatgctcattcagactcatttcctctctgttctgggggtagatgaaaatgacaaagtgccattgttcttataagaactcgccccaaataaaaacttttgacaccatttctgtcgtacatcagtagcctgttggtg

SEQ ID NO: 696753 - DNA, 1034 bp, Homo sapiens
ccaattataatgaacttttccaagttccagggctaatgggtaagctacaaacgctgtaaatgagcttgctagatttgggcagccctctgtgaatgtcaatttagtcctagaattttgcaaggataatttcaagtgaacaaaacctggacatcttcctcatcttccaaaacattcaaggcagttcttgtatgcccattaattttttagcaacaacttccattcgatctctggataaaaggccatctttatatgaaaaaaattacttttcaaaacaggcagtaggtagttcctttttaaaatctcatgttgtaaaacaatatcattccaaaaataattctaacaagactttataggctctcgtaagagaatttattatgtattgccttttatcaccgtgcgtgtcaaacagcagaattatgagataaatggtaatggtagtcatgtgatatttgctttaggaaatctaaacaattgtaaaaagacackgtacttctatcaaatacctaatacttggttccagacttgaaatgccagaggtttactgcaagtctgagacagaaaagaaggattaaaaatgataaaattaggatttgggcacagtcaatcataacatcttaacatctgacgtgacctctggagttatctgcaccagacaagctctcccagtcagagatgaggtgaggcccacagctgaggaatccaattgccccagcttcagagatgagtggcatctgtaggagaaaatccgacaggtccacagggaggggtttttattctttagcaacagaataccagcagaacacgttttatgtaaaatagcggatgaaatcccaacctataattgacacagaatggaaatgcttgggtagaaggtggagaagaggccctcatccacctggcactgctctccagctccctgcaatttctctgtggggagttatcagacacttaggtcttggggaaaatgcatgagttaggacttctctggttgcaaagtaaacaattcgatctgagtgagaattacatccaggaaa

SEQ ID NO: 696754 - DNA, 1034 bp, Homo sapiens
ccaattataatgaacttttccaagttccagggctaatgggtaagctacaaacgctgtaaatgagcttgctagatttgggcagccctctgtgaatgtcaatttagtcctagaattttgcaaggataatttcaagtgaacaaaacctggacatcttcctcatcttccaaaacattcaaggcagttcttgtatgcccattaattttttagcaacaacttccattcgatctctggataaaaggccatctttatatgaaaaaaattacttttcaaaacaggcagtaggtagttcctttttaaaatctcatgttgtaaaacaatatcattccaaaaataattctaacaagactttataggctctcgtaagagaatttattatgtattgccttttatcaccgtgcgtgtcaaacagcagaattatgagataaatggtaatggtagtcatgtgatatttgctttaggaaatctaaacaattgtaaaaagacactgtacttctatcaaatacctaatacttggttccagacttgaaatgccagaggtttactgcaagtctgagacagaaaagaaggattaaaaatgataaaattaggatttgggcacagtcaatcataacatcttaacatctgacgtgacctctggagttatctgcaccagacaagctctcccagtcagagatgaggtgaggcccacagctgaggaatccaattgccccagcttcagagatgagtggcatctgtaggagaaaatccgacaggtccacagggaggggtttttattctttagcaacagaataccagcagaacacgttttatgtaaaatagcggatgaaatcccaacctataattgacacagaatggaaatgcttgggtagaaggtggagaagaggccctcatccacctggcactgctctccagctccctgcaatttctctgtggggagttatcagacacttaggtcttggggaaamtgcatgagttaggacttctctggttgcaaagtaaacaattcgatctgagtgagaattacatccaggaaa

SEQ ID NO: 696755 - DNA, 615 bp, Homo sapiens
cagagaagaagaactggtcaggcccccagcaatttggaaactactgatactgtgtctggaattggtgggttctcggtctcactgacttcaagaatgaagccgcggaccctcgcggtgaatgttacagctcttaagatggcgcgtctggagttgttcgttcttccaggtgggcttgtggtctcgctggcttcaggagtgaagctgcagaccttcacggtgagcgttacagctcataaaagcagtgtagacccaaagagtgagcagtagcaagatttattacaaagagcaaaagaacaaagcttccacagtgcagaaggggaccccagcgcgttgccactgctggctcgggcascctgcttttattcccttatctggccccacccacatcctgctgattggtagagcctagtggtctgttttgacagggtgctgattggtgcgtttacaatccctgagctagacacaaaggttctccacgtccccaccagattagctagatacagagtgtgacacaaaggttctctaaggccccaccagagtagctagatacagagtgtcgattggtgcattcacaaaccctgagctagacacaggctgctgattggtgtgtttaca

SEQ ID NO: 696756 - DNA, 703 bp, Homo sapiens
tatgaggtataattttacaagacatacataaaataagaatagatgaaagtcaattgattaaatattaaaattataaatataaatttaatgttaaatacagaaaaacaaaaggtaaaaagattaaataatttaaacattagaagctgactggatcttcttgaagaggtccttcacatcccttgtaagttgtattcctaggtattttattctctttgtagcaactgtgaatgggaattcactcatgatttggccctctctttgtctattattgttgtataggaattgtgatttttgcacattgattttgtatccagagactttgttgaggatgtttataagcttaaggagattttgggctgagacaatggggttttctaaatatacaatcatgtcatctgcaaacagagacaacttgacttcctttcytcctatttgaatacgctttatttccttctcttgcctgattgccctggccataacttccaatacaacactatgttgaataggagtgctgagagaggggatccttgtcttgtgccacttttcaaagggaatgcttccagcttctgtccattcagtattatattggctatgggtttgtcataaatagctctcagtattttgagatatgttccatcaatacctaattttttcagtatttttagcatgaagggtgttgaattttattgaaggccttttctgc

SEQ ID NO: 696757 - DNA, 620 bp, Homo sapiens
gaatcatacccagctgaaaactgtagttacatttgggcaagaggcaaggtctaagagaacattaaaaataaaaatattatatgaaatgcttacagagggctgggcacggtgactcacacctataatcccagcactttgggatgccaagagggggcagataacttgaggtcaggagttcaagaccagcctggccaacatggtgaaaccctgtctgtagtaaaagtacaaaaattatctgggtgtggtggtagacacctgtcatctcagctactcaggacactgaggcaagagaatcacttgaacccaagaggcagaggttgcagtragctgagatcgtaccactgtactccagcttgggcaacagagcatgactccatttcaaaaaaaaaaaaaaaagtgcttacagagaatgcattccagcatccctcatgaaatagagatgatttttttttttttttgccaagatccccttcagtcactgatctctattcctccagtctgcatgtagtgattcccaaccaactcacaggcaatatctgtttcacaaaatctggatggtagagctgacagagggtggcgctctaatatgcaccatcacactagacacactgacatttgcc

SEQ ID NO: 696758 - DNA, 609 bp, Homo sapiens
tctaggccctgtccctttgatgttaagtggtggagggagttggcgggatttgctctggcttgcggtatatccagtggattgtatcaaatccagaattcaagttctttccatgtctggaaaacaggcagaatttatcagaacctttataaatgttgtgaaaaatgaagctgaataaacacctgtttttccagcatctattatacatcttaaaatctgagatatgaacttctctgttttgattgtaaaaggaaagagaacagtaacacagaaactttgtgtcccaaatagagcacagataccttgtctattactcatagtaatcctcccttaaatttgtataacatgtgaaattttacaaagtacttatacctcccttatctaattcaatcttcataaccaccctgggcagtactaatattttaaaccagtctccaacctcaaggttggtgctcttgccactgcccaggtgaagctgcaaagctgtggccacctctgtctccatggttgcctctgtctggccatctcaggcctcaaytctgccccatccatatactaagagttaaccaagcatggaattggggtatgttacatgagcatcagtcagttttg

SEQ ID NO: 696759 - DNA, 599 bp, Homo sapiens
tctgtggaaaagtgagaggtgtggaataaactaatctgaaatcactttccatttcaagttttatttcatgcatagtaagaataaaactataaatttaaaagaattaatctgagtttttaaaaaatggacatttcatactgtgttggctaaactgcaagttaatataaattttcttgtgaacaactgagaaatagtgacaaaggccatttgttaaaagtttttataattgaacaacaaaaaaaatctatatcgaagaatttattcaaagtaaataaccaaaaatgtagaaaaagatttgtataaaagatgttccttgcaacattatttaaatacaaaaaactttaaaacccccaattcaatttgctaaaccaatgatgagatttccrtatggtaaactcctatatagtcataaaaatgatgatttaaaagagtaagcaattagttatttgtagaagtattcacagtaaagaacttgttatatcatatcaaagaatttcacactgcagaagactcagaagttctctcccctgttcagccccagaaggtaagtcagtaattacatatttttagcataaaggaaatacttcaaccatttcttt

SEQ ID NO: 696760 - DNA, 2091 bp, Homo sapiens
gcttaggaaatacatgggaatctctttgtaatacagattttgagacagaaattttaaatttctgaatttccacattaaaagaaaaactagaggtgaggtcttcttatgttgcccaggctggtctggaactcctggactcaagtgatcctactgcctcagccttccaaggagctgggactacaggcacgtgccagcatgcccagctacatgtccacaatgttattggagtctaattacagaaccaaggacggaaagagagaaaaagtttcctactaaaaactgtgtcatcccacaataagcatccaagaaagtaaaaggaaaccatatgatatgtgctttacagttttggaactgaaagacaccggggacattctatggttactataatgagtaattgaacccattaaaaggtattcaggcacaaggattataaagatcactatagtatgactgaaaagttccagtaagaatacttaccaaataaacccggagcaaatttcaagtttcctctactgtgggaaagcttttccatgcagttttcctatcactatgtattttccagttcatgccatttttcagccccaattcctcaaagtatttaccaccctttcccattttccaaagaaaaaatgtaaaagacgttcaaatagtcatattactataatatgtttttttctgaccaactattccccaagaccataaaacaattatagatagaccgctgccacagttgaagagtaaatactatgcaaaactagattcatagcaagaaaatttatttcacaaaagagcactttaccttggtatcagaatcaaagggttcgtcatctactgaaagccatgagtcaccagaactctgtccacaggacagcctatagagaaaaacatacaacaaaaatgaatgagttcatttatctaaaaaaaaatggattgttttgtgtctaggtatcatcccacaaaaaaaaaacaaaaacaaaatctggggaaaggtcagctacctatagaataaataatatttcttaattaattaaaattggcctctttttcaaaaagattttagttacctatttctgcctccacctttcccaatctatgaaatgttcgataaagactcacctttagttccttaacaaatagtgactggcaatatattggcagagcctgagaataatttgtcttcagaagtgtctgtcctgaaggctgaattcaatatccaattaatgagtgacataacctttgttacctgaattggaaccagyggatcacttaaaacaaggtagaaagagacactgtgtcttctccattacctgtatctggttcaaaggctaatctgtgccactcaaaaatggcagtcttggttcttcagcatggaaaccacttaagtaggccctattgctgccctttaccctaaaacagtgtaggcagttccctgaaatgtctgaaattcttgacacctgaacgtacaaaagttaaaggaacaagtgtctatgtcattattggaaatatgctttgcagaaaaattaaaactttaaaaatgataaactttaattatgttccctgcgtaggtcccgcctagttcaggtccacatcaactagcaagcccttgagaatcttcataggtgctctgatacccaaggagagagactgctggaaaaatagagtcctgaaagctgtatctctgtttttcccaactgttatctcaatatcttccttcctatgggctcctacttacagatcactctaggactcaatgacagtctccaacattgaagtctttcatgtatgaaagcacccattccaaaaaatgggttcaaatgaccaagagtaggagctatttccctccttccggtaaacaaactacgtgtagtctcagtcatctgtccccagtacagacacgttccccaccacccaagtgaattagtacaaccatcttggagaatagctttgaagttcctaaaaaaagctaagaatagaattaccataggatctagcaatcccactgctaggtataaatcccaaagaaaggcaatcagtatattcaagaactatgagcacattcatatttaccgaagcattattcacaatagccaa

SEQ ID NO: 696761 - DNA, 667 bp, Homo sapiens
gatttaagaggaatttatgtatgtatgtatttatttatttatttaatttttacagtccagtgctcaatatctatctctcactattttctcttcccagatagaaacagttactggagttctgtagaccatgttccacctctgcatattgcattttttggagagcaggtaacctgtattattagttcataagtctctggatcaagaaaagccaaatatatcctgatgtgggagactactgtgcattaacttctgatagagawaacacataatccaaaggtagtggattttgagctatctcataaattgatagggttttaaactctttcatttagatagaggagttcattttttgcatagaaaggaaagagaactgaatatgttatttgtggtagaggcttctaatgcttacctatatctgtagatggctatatgaacatgtttcttatcaagctgcatgatcatataaccatctacagataccaagtgaatgggacaaagtagcccttgtttatattcaccacttaaattttactattggtggcttccctggtaatgcccagatatacaattactgctgaaatggcaaagtcatgtcactctaactgtaagttgtttgtagaagtagcatgattaacagccttccattcctgagaaagaacattgagca

SEQ ID NO: 696762 - DNA, 667 bp, Homo sapiens
gatttaagaggaatttatgtatgtatgtatttatttatttatttaatttttacagtccagtgctcaatatctatctctcactattttctcttcccagatagaaacagttactggagttctgtagaccatgttccacctctgcatattgcattttttggagagcaggtaacctgtattattagttcataagtctctggatcaagaaaagccaaatatatcctgatgtgggagactactgtgcattaacttctgatagagataacacataatccaaaggtagtggattttgagctatctcataaattgatagggttttaaactctttcatttagatagaggagttcattttttgcatagaaaggaaagagaactgaatatgttatttgtrgtagaggcttctaatgcttacctatatctgtagatggctatatgaacatgtttcttatcaagctgcatgatcatataaccatctacagataccaagtgaatgggacaaagtagcccttgtttatattcaccacttaaattttactattggtggcttccctggtaatgcccagatatacaattactgctgaaatggcaaagtcatgtcactctaactgtaagttgtttgtagaagtagcatgattaacagccttccattcctgagaaagaacattgagca

SEQ ID NO: 696763 - DNA, 1099 bp, Homo sapiens
tgaaagcatttttgaacatttctcactttacagattctcataattggatactggaccacagagattcgttctctcaattttcttgttctttgcctcatttttagctctttgattttttgcattttttagctaagcttttggaatgtttgctttttgttccttttttattattttaattgatacatactaattgtacatatttatggagtacagtgtaatattccaatacgtgtgtatactgtgtaatgatcaaattagagtaatgagtatagtcattgcctcaaacatttatcattgytttgtgttgggaatatcacaatagccaaaatatggaattatgctgtgttcattggcaaatgaatggataaagaaaatgtgttatgtgtacacaacagaatactacttatccataaaaaataatgaaattctgtcattcacactaacacagatgagcttggagaacaattatgttatgtgaaattagccaggcacagagagatacatactgaatattctcacatatgaaagctaaaaagttaatttcatttaattagagagtagaatagtattacagttactagagaggagaaagagtaggagagaggagtgaaatttttgcttttaattttttattctgagagtttttcagactttaatattatgataaatattttgttgtcatttaaaattatagagtttgattcttattttctgttcatttaaaaaatattatccagttatagttcattgttaatgtcctgtgttttcttctgtacctgctctattactgattctttctacttctatatttaatttactttgctctctgttatttacatttttacttaatgggtagaacatgcccatttgggggcttcatattgttgatattgttgaggggaccctcatttatagcttcaatctgcagaactcttcttcacttctgaataagagtacccagtcttctgcctattggcatagtctcctggcacagagataaaccttgaaccatataacatgcgggcgtatagacatttacttaatgacactgattttgctcattgtttctcataaattaagccaagtctctttttttatg

SEQ ID NO: 696764 - DNA, 2256 bp, Homo sapiens
tccccttttgaaacccttaataaaaacttgctggtctgagactcaggcagacatcacagtcctaccaatatgtgatgtcactcttggtggcccagctgtaaaattcctctctttatactgtctctctttatttctcagctggctgacacttatggaaaatagaaagaacctacatggaaatattgggggtgggttcccccaatagcacattttattgattatttattgaaccagtcattgaaatcacctttacatcgagatgacatttttaataataatgtgtcaatattttgattacaatgtattgttcagtaaagttggattttattcaaaagcatagagaatatttctacattcaaattttaagaaaaacaaagcaatattattaatacattactaagattttgatgattttagtaaatcgcatcatctctacaccagggaattattttaaagctgttacactcttcttctttattatggcaagcctatcaatgcacttacaagcctctccaaccccttagaactaccataaacacacactctctctctctgtcacacacacacacacacacaccaacaactataccaccaccaccaccacactctgagggaatttttcatgtgagcaatccaggtggccacagtctcactttctgcatgctggtgtacagcaagacacattcacacacactaactttttttctttaatttcccccctgaggaacatgtgatgggagttaatgcttgcatttgtatttcatagctcattttcccacacatttttaaggaatcttctgcatcatttatttcttctccttgaatctttacattcaatttctttaatgactctttctccttaggtttaaaatgatagtctctcacatctttaaatagttttccctcaattctgaacttctaaatttatcttaagctacttttgtaacrctttctttcatttcactatcttcaaagtactctatgctcattatgctaaataacatattttatattttcctttattttgacccatatgtgagctatattgaattcaccatggataagtcatgcccctgctgtattttaatatccaacctgaaaattttaaaatttcaaaaattgattgtggcttatagattgaacaatccagagaaaacatatgattagattgctgtttcttttaataacatagcctaaaacatctgtgaacaaattgaattaatactttatatgagaatagaatttgaaagtgagatgctccatgtcacactcattccacttatatattgaatggctgttaagctgccagattatcatttcatgtactttgcatgctccagttattaacaagaaaaaaagaaaattttaaaaactcctagaattaaagaacaaatattttataaactcactgtaatctgtaataaaaagtaaattataagtatcttagaaggttataagtgcaaatgatagataaaagagacaaaataaagccctgacatggtggcatttgagaaaacatctgtaggaagttcaggaggtgccatgtcagtatgtagggaacactcttccaggcaagggtattaccagtgcaatagccctgaggcctgagcacaaccatttactctgaggaacagcaaggttgctagtctgtatcaagcagagtgaagaatagtcatgacaggtgaggttatgaagaaacaagtggtttgtaggatctaactgggaattttccatctcccaggggctccacaaatgaaatgaaaatgtattgtcagtctaggtttccttagaaaacttttgactacagaaaacaaagcagttttgttatatgatcatggtctttcttcttgagtttatttgaatttccatataacatgctcggagactctacatataaccactctttatattttaactgcaacttaagataccatcttcttgtagtcaattcagtagaatagatttcagtaggctcatgtgttcagcctccgccaaggcccaataatagctaaacacatgattatcaaaaggcttttacctttcagctgactccgggagcttacaagtccatgggattacaggtccagaaacctgatgggctctgctaacccttgccagtgtccctctgtcataggctccaattagaaaactgagaggttgctggaacctataactcaaatggcaaatgtagatcagtgagcccctgaaggaaagagaacctgggtggtttgttggagggcccagagggcatccctg

SEQ ID NO: 696765 - DNA, 2256 bp, Homo sapiens
tccccttttgaaacccttaataaaaacttgctggtctgagactcaggcagacatcacagtcctaccaatatgtgatgtcactcttggtggcccagctgtaaaattcctctctttatactgtctctctttatttctcagctggctgacacttatggaaaatagaaagaacctacatggaaatattgggggtgggttcccccaatagcacattttattgattatttattgaaccagtcattgaaatcacctttacatcgagatgacatttttaataataatgtgtcaatattttgattacaatgtattgttcagtaaagttggattttattcaaaagcatagagaatatttctacattcaaattttaagaaaaacaaagcaatattattaatacattactaagattttgatgattttagtaaatcgcatcatctctacaccagggaattattttaaagctgttacactcttcttctttattatggcaagcctatcaatgcacttacaagcctctccaaccccttagaactaccataaacacacactctctctctctgtcacacacacacacacacacaccaacaactataccaccaccaccaccacactctgagggaatttttcatgtgagcaatccaggtggccacagtctcactttctgcatgctggtgtacagcaagacacattcacacacactaactttttttctttaatttcccccctgaggaacatgtgatgggagttaatgcttgcatttgtatttcatagctcattttcccacacatttttaaggaatcttctgcatcatttatttcttctccttgaatctttacattcaatttctttaatgactctttctccttaggtttaaaatgatagtctctcacatctttaaatagttttccctcaattctgaacttctaaatttatcttaagctacttttgtaacgctttctttcatttcactatcttcaaagtactctatgctcattatgctaaataacatattttatattttcctttattttgacccatatgtgagctatattgaattcaccatggataagtcatgcccctgctgtattttaatatccaacctgaaaattttaaaatttcaaaaattgattgtggcttatagattgaacaatccagagaaaacatatgattagattgctgtttcttttaataacatagcctaaaacatctgtgaacaaattgaattaatactttatatgagaatagaatttgaaagtgagatgctccatgtcacactcattccacttatatattgaatggctgttaagctgccagattatcatttcatgtactttgcatgctccagttattaacaagaaaaaaagaaaattttaaaaactcctagaattaaagaacaaatattttataaactcactgtaatctgtaataaaaagtaaattataagtatcttagaaggttataagtgcaaatgatagataaaagagacaaaataaagccctgacatggtggcatttgagaaaacatctgtaggaagttcaggaggtgccatgtcagtatgtagggaacactcttccaggcaagggtattaccagtgcaatagccctgaggcctgagcacaaccatttactctgaggaacagcaaggttgctagtctgtatcaagcagagtgaagaatagtcatgacaggtgaggttatgaagaaacaagtggtttgtaggatctaactgggaattttccatctcccaggggctccacaaatgaaatgaaaatgtattgtcagtctaggtttccttagaaaacttttgactacagaaaacaaagcagttttgttatatgatcatggtctttcttcttgagtttatttgaatttccatataacatgctcggagactctacatataaccactctttatattttaactgcaacttaagataccatcttcttgtagtcaattcagtagaatagatttcagtaggctcatgtgttcagcctccgccaaggcccaataatagctaaacacwtgattatcaaaaggcttttacctttcagctgactccgggagcttacaagtccatgggattacaggtccagaaacctgatgggctctgctaacccttgccagtgtccctctgtcataggctccaattagaaaactgagaggttgctggaacctataactcaaatggcaaatgtagatcagtgagcccctgaaggaaagagaacctgggtggtttgttggagggcccagagggcatccctg

SEQ ID NO: 696766 - DNA, 433 bp, Homo sapiens
ggccaacataacttgaccctattttacctgcactgggaagtattgacagtagtgtgaaatcaggttgttctaatttgaagcctgagtacaccacttattagctgtgtgaccctaggcaagtaagttaacccctctaacacttcctcagcttctcatctctaaaatgtggctagtattcatcatatgggtgtttttacagagtgaaaattcatataaagtgcttacttagcactttacatgtatgcctggcactggagatgcatcctttaaatgtgagctgttactacttccctaaactgtctactccacctgggctgctcttccagatcatttctaacacacattgcccaacttaggcctttggctggtggtgttctcayccatgaggcaccattccatcacaatcaccaccatcaacaaagagtatgtgttc

SEQ ID NO: 696767 - DNA, 907 bp, Homo sapiens
tttctagttgagcattttattgccctggaaaagattgtggttttgttgcaaggaagaagagaagaatgacatttttgtgggtaagaggccatctattttatattcaatgattatctcaaaataatctttcttagaaattgacaagctggagttaaaactcttatagacaagaaaattgccaaagaaaaaatgtttaataaaaaaagggtaacacatrtgtgtatttagtgtctggctattaaagtattagcaagcaatagtaattaaatgagaaatgcttcagttataaacatttattaatatgacacaatatggtccagaaaaattataattctaatgtgaactagaagccttgacactccttttggcttgactaagatattttcccgactctaagcccctgtccctccattttttgagcgctggttttagaaaacctgtaatgatttttcagctacattgagatgtaaattatctccaaaactcttgccatttttacaacccaggaatgccttggaccttggaattatccctctaaaatgtaatctttaagaacagtagagcctgtatcttcctccgtctgtgggaagataaggacctaacttcagtaaacgtcaattaacaagcacattggcctaatttcactggccaaccctcattttaatgtcctccagttattttctcactaaggcacttcggtgcttaaaaactctcctgcatttttttttccagaagaattgggttctgtctcccaattaggatagacttgactgcaactgaaatagccttgaagtcttccttgcctgcttaactctctcctgcaatttctctttgacaaatgaaactgtatgtgatggcagtgatattacaaagctataaaattctatgattctttattcataaaatt

SEQ ID NO: 696768 - DNA, 1861 bp, Homo sapiens
tgtactaaaaatacgaaaaaattcgccgggcgtggtggcgggcgcctgtaatcccagctactcgggaggctgaggcaggagaattgcttgaacccaagaggtggaggttgcagtgagccgagattgtgccatcgtactccagcctgggcaacaagagcaaaactccgtctcagaaaaaaaaaaaaaaagtaaggacaatactattatttcattttttttcaccagaataatctgttctgtagcttgatatttgaagaaatattttattaaacctgacattatttataagtacatcccacctttcccctctttggggaaaatgattattgaagtctctaatatatgtgcattttatatataattgtgaaaatagtcatatatacatatatactacttatttaccctttttggaaataacgtttttgtcataatattcaaaatggcctttgaaggartaacaggatattctagtttacagtttttcaagggtagtgtgcctttagcttgtccactttgtagagataagccacttaatatttttaattttgccataagaaaattacagttgttttcaagtatctaaaaagtaatgttaatgaagtgatatcacttaaaataataaaagctccttttaaaggaggagggcatgaagatagttaagctggaaatttattgatgtgggctgagtttagaaaaatattccgtttttgccagctactcggggtgctgaggcaggagaatctcttgaactcaggaggcagaggtttcagtgagccaagatcgcgccactgcatccagcctgggcaacagagcgagactccgtctcaaaagaaaaaaaaaaagaaaaatattccatttttggaaaaaaacccattttgatccatagttcttggttttttgttgtgaataaatccaaggcattcttgtaactctctttggaaaataataaaattaaattgtagttgaaatatcgcatacatttcttacatttttatttgagtaaaaatattatttaattgcctgttaaaaagataaaacatttgttaaagtaatatatttatgttgcatctaaagcaactataatagagatacatgtttctaaattgttttgaaaataaaatatttgtttgttttatatataattaaaatatatacataaaatgtttactgtttatggcaatatactaattatatgtataataattactgttagcattctaaataaagtctgtaactatttgttttaaagaaacaacacccttgaaagagagctataaggaggaatctacaaattctggactgtccattctgcttgagagcattgtatctgatcttgaaaaatctcttggaacaggtttatcttcaatattagaaacagaaatgaaaattgcttttggaaacctttggatggaggtgattagttgaactctattagttgaaaatttcttttttattgctgaagatttgttatcttaagaaatattacttgtataaaatgcatacgcttcattgaataatctgtatcatgttacatttttcttcaagtttttgaaatagttttttgacagttaaatgatggacatttcttaatggttaggaatatatgttattcttttttttgagcaaacagatatttattttgcatctgctgtgtgtcagatgcactgtcccatggtgcttaaattgaatgaaaaaaaacttgtctatttaatttgagtcaaaatgtctaatataaggaatctctctagcaatatgtattcagaaaaagaagtatgtatttttgcttgtgccatgtaaatgtaagaatcagagtataagttgattgtattagtaagatattttgaaatttctttggattcac

SEQ ID NO: 696769 - DNA, 927 bp, Homo sapiens
taattaatttttaagttcataaaagttgtatatatttatggcatataacatgatgctcttgaaatatgtatacattatggaatggctaaattgagctaactaacataagtattacttcatatatcatttatttggggtgagaacacttaaaatctattgtcttaccaatttccaagtatacattacattgttattagcaatagttaccatgttgtataatagatgtcttgaacttcttactcctgtcttcctcataactttgtgatagtaacactttctagcatttgcatttttgacagctttaaaaattattaaaagttcatttacattgtcttattcaggtctcacacagaccaygtgattcaggttaattactcccatgtcagtgaatcaagggatgtgagatagtgcaatgaggcagcttcagaagacttgggttgtagttttcactgtgtaacatatgagttttgcaattgtgaagaggcaatttacacacttgaaacttcagctttccctcctggaaaatatgtaagggggacatagtgctgtggggttcattgctatgaggcattaatcagatatttaataactttcaaacaccattaaagtggcattaacatactactattaagagaatgtagtatcccggagggtagtaattatgtcccttttttatctgtttattttccagacacttagtgcagcacctaatgatggtgctcagtgaatattggttaaatggatgaatgggacagaggttgccaaactttttctgtaaaagtcaagatagtaaatattttaggctttgtgggccatacgatctctgtcacaactactcagagctgcttttgtaatgcaaaagcagccatagacaatatgtaagtaatgagcatggatgtgtttcaattaaattatttatggccactg

SEQ ID NO: 696770 - DNA, 1135 bp, Homo sapiens
caggaaaaataatgaaaagatttaaaatcattaatgtacgaaatctaaaagaagggaagtgacaatgaattgttcaaagttgccagtgggagaactcaggagtgagttctgggtataataaagccggaaaaaaaatgctcaggagagaacaaatctaaatctatttttaaaatagatttttctgcattattgacacctatagtgaaaacaggcctcacctgagtggatccctggctgaacgtcttcctgaaagaaaaacaaatgagcatacacataaatggaagaaccctcactgtcagcactgtcagtgttttcataccccctgcacagggatatgcctcatgctcagatgcccattgtgggtgccactgtgtgcccagcagacatcctggcaatcatttacagagccttcatttcacagatggaaactcaggtcctgaataattaagtgagattcccaaagccaattagtaccagatctaggacttgggacccaagtctctaaacttgcacatttattgtatgttttggttttgttttacaaccacaccacccaatcttattgtgacaaaagtccttggaggcagatgctgccacaagcatgatatagayggtgtgaggtacccaaatatgtcagaaaagcttggaatttaaatgagaatttcacagtgtcctctcttgccttgtctccaacttcctcagtgaagagaagaccaaggttaaatatacaaataaatatgtaattaccagttgtgataacgtgtgaatctaaataacttggaactcataataggagagaacaattgcaggctgtgcacgccaggtgaagcctcttggagaaaatgtcatttcagaggacaagtgagaaagttccagcagtaagtgaacatgtggatgtgtgaatgtgcggttcagagagaagaaaaagcatgtcacaatacttgaaggtgaataagaattgatgcactgactttagtactgcgatatagtcaggatagctggaactgctaacagtatttctcttctgtggcagattatgttaaatagttacattcgtttgtttgtttgtttgagacagagtctcactctgtcaccaggctagagtgcagtgccgtgatctcagctcactgcaacc

SEQ ID NO: 696771 - DNA, 1135 bp, Homo sapiens
caggaaaaataatgaaaagatttaaaatcattaatgtacgaaatctaaaagaagggaagtgacaatgaattgttcaaagttgccagtgggagaactcaggagtgagttctgggtataataaagccggaaaaaaaatgctcaggagagaacaaatctaaatctatttttaaaatagatttttctgcattattgacacctatagtgaaaacaggcctcacctgagtggatccctggctgaacgtcttcctgaaagaaaaacaaatgagcatacacataaatggaagaaccctcactgtcagcactgtcagtgttttcataccccctgcacagggatatgcctcatgctcagatgcccattgtgggtgccactgtgtgcccagcagacatcctggcaatcatttacagagccttcatttcacagatggaaactcaggtcctgaataattaagtgagattcccaaagccaattagtaccagatctaggacttgggacccaagtctctaaacttgcacatttattgtatgttttggttttgttttacaaccacaccacccaatcttattgtgacaaaagtccttggaggcagatgctgccacaagcatgatatagacggtgtgaggtacccaaatatgtcagaaaagcttggaatttaaatgagaatttcacagtgtcctctcttgccttgtctccaacttcctcagtgaagagaagaccaaggttaaatatmcaaataaatatgtaattaccagttgtgataacgtgtgaatctaaataacttggaactcataataggagagaacaattgcaggctgtgcacgccaggtgaagcctcttggagaaaatgtcatttcagaggacaagtgagaaagttccagcagtaagtgaacatgtggatgtgtgaatgtgcggttcagagagaagaaaaagcatgtcacaatacttgaaggtgaataagaattgatgcactgactttagtactgcgatatagtcaggatagctggaactgctaacagtatttctcttctgtggcagattatgttaaatagttacattcgtttgtttgtttgtttgagacagagtctcactctgtcaccaggctagagtgcagtgccgtgatctcagctcactgcaacc

SEQ ID NO: 696772 - DNA, 646 bp, Homo sapiens
ccacttgcatgatataatattgtatatttttacaaaggatgtttgctttcttcattaattctcatttgtctttctgacaattctatgyaacactgtcattcccaataagcctagtgaaatatttccacttgcatcctccaagtcacacctaactggctgcttcttgggtctctcaatttaattcccataatggttaattttaaattcttttatttatttacttaaacactacagttctggaaatgcagtatctccaatcagatcaaagctcttcagtaacaggagaaaattattcaaaattcaatgaatgtttatttagttcttgagataggtcaaacaatgtagtaagaagctgaaaattcatagatgaataagctacccaagaatgttgaaggcaatttgtaagaaggactatagtgtggatgtgcacagagtgttgtggatcacaggggaatgaataaaatctagggctggaaagaggttaagagacatgaaataaaatacaaaacattcaatttatgtttaaattaatgagtagatgcatttctcatgaataaggaggaggaagagacagagaataagaccaggttatgggttttcataaaacatggcctgcttgggaaggagaatagaatagttgtatatg

SEQ ID NO: 696773 - DNA, 646 bp, Homo sapiens
ccacttgcatgatataatattgtatatttttacaaaggatgtttgctttcttcattaattctcatttgtctttctgacaattctatgcaacactgtcattcccaataagcctagtgaaatatttccacttgcatcctccaagtcacacctaactggctgcttcttgggtctctcaatttaattcccataatggttawttttaaattcttttatttatttacttaaacactacagttctggaaatgcagtatctccaatcagatcaaagctcttcagtaacaggagaaaattattcaaaattcaatgaatgtttatttagttcttgagataggtcaaacaatgtagtaagaagctgaaaattcatagatgaataagctacccaagaatgttgaaggcaatttgtaagaaggactatagtgtggatgtgcacagagtgttgtggatcacaggggaatgaataaaatctagggctggaaagaggttaagagacatgaaataaaatacaaaacattcaatttatgtttaaattaatgagtagatgcatttctcatgaataaggaggaggaagagacagagaataagaccaggttatgggttttcataaaacatggcctgcttgggaaggagaatagaatagttgtatatg

SEQ ID NO: 696774 - DNA, 810 bp, Homo sapiens
cctagaggggattgagaaaagaagtaaaaactgcttgaaatggtttgatataaaatgtcatttttttctaaaatgattctgacttgtctttcgaatattttgaatgaaacagaaaagaactagcttcctattaatctagaatatagattttttatcattcttmaaaaaataatccattcaaacatttcttggcaatatggaggaagacttgtcacatcactcgaaattttctttaagaagccttgtctcataaagtcagtcaatctcttaagatttgaagaataatgattatctggtaagaagataatcaggttaaagctagcagcactatggaaaattttctttcttgagtctgaaaggactgtttggcttttctaaagcctaaggtcttgttcccaaacctccttactttaaagccaagttaatgaaatatattaactactatcacttagtcattatgctaaatattaacattttaataatatactgtttttgcaaaagcaagtatatatatatgtataattatacaatttttcacttttattatatttattttaaatatttaaagttttaatataatattctaaaaatattataaatattttttctatatataagaaaaagtggaaaaacacataccagactattggtggtggtagattcacagagaatatatggtacaggaagttttctttctatgctatatctcttgaatttttgataaaaacataaatatctttggtaattaggaaatatttcctaacaaaattagtagatgaacatatgaagagaatgatatgtcaaagagaa

SEQ ID NO: 696775 - DNA, 632 bp, Homo sapiens
attgcccagaggcacacatgcttcttatcaagaaagggggtccagagttcttgtcatccagagttaattgttaacagaaaacatttaaaagtaatccactttaaataggtaccaatatttcttagaagtaaagaaaagctgtatttaaaaatttatcttgaactaaaaaaataaaaataatcttatccttrttgtgaggatgtatttgcaactgcgtgttaactcagcatgaataacagtcttaattcatatatgtgtgtgtttatgcaattattttaacaatctcattatttagtttcattccacaatcatgaagagatatgtttttgcaaaactcttcaaggaattccataattttttcagaccctcttttattcttttgatatccatatcattgtcttttgaggagtccgccccataaattttctcttcaatcgttaaagaatgtataccttccagctactgtttagtaatccctttgtatttggtcagaccagttctctcataacacttccatcaacttcatgaaatcatgtatgtgtcttttacatgatattaacttccatcatatttacaataaatagcattaggtagtcttaatatccaaaaatcagtggctcaagaaggattcc

SEQ ID NO: 696776 - DNA, 632 bp, Homo sapiens
attgcccagaggcacacatgcttcttatcaagaaagggggtccagagttcttgtcatccagagttaattgttaacagaaaacatttaaaagtaatccactttaaataggtaccaatatttcttagaagtaaagaaaagctgtatttaaaaatttatcttgaactaaaaaaataaaaataatcttatccttgttgtgaggatgtatttgcaactgcgtgttaactcagcatgaataacagtcttaattcatatatgtgtgtgtttatgcaattattttaacaatctcattatttagtttcattccacaatcatgaagagatatgtttttgcaaaactcttcaaggaattccataattttttcagaccctcttttattcttttgatatccatatcattgtcttttgaggagtccgccccataaattttctcttcaatcgttaaagaatgtataccttccagctacygtttagtaatccctttgtatttggtcagaccagttctctcataacacttccatcaacttcatgaaatcatgtatgtgtcttttacatgatattaacttccatcatatttacaataaatagcattaggtagtcttaatatccaaaaatcagtggctcaagaaggattcc

SEQ ID NO: 696777 - DNA, 1168 bp, Homo sapiens
ttgcccaagatctccagctagtaagtctcggggctgagattaaacccaggcgtgtgtgaytctcaaaccagcactccctcctccttcaccatgagccttccctgatgtgccctcctctcacgtgcatcattgtgtcaaatcggaggagacagtgggtgtaaccggctctataaactgcaaagtgcttatttgagggaggaagaacttaatcgttaaatattcaacagtggcttcccctgaagcccccagagctttagggtgaaggctgcgctttggtgctgcgagctgaactcaggctgataaaatgctctttcctgcctggcagggcaccgtgtccagcagtgaggccacaccggtttgggacggccagaagatggaagtgctcacacctgacttctggtcaggctgctgctcagcaggaggcacgcagaagctgccggggaaagcctctcccatctgtgcggcaaaaggagagcagctggcccgagagtccctctgcataatgcaattactcacaatgtaggtcagtgccccctgcaaatatcccgctctgtccggctgcacaaactgacaggcagggagttggagcataagtggaggtgttgaggcctgaaaggtcaaaagccttggtcctgctacagacttgctgggtgatcttgggcaaatccctgcccttttctagacctcagtttcccatttgtgaagggagcccatgggttgatttacagtgtagttaatgggagtctgagtcattgggagatgactctatctgtcctacatttcatgactgtatttgtcctacattcattcattcgaaatcgactccatgaggatttgtcatgtgcctgctgtgtgtcatgcaccatgttggtgtgggggtacaggatgaatgagaccaacatggcgcttgccttcttggagggtacattccagtggaacgggggctgctcaacaaacacaggcattcaacaaaccacacagtacagttatgaatacaaacagtgataaatattcctaaaggaaactacgggcacttggaggggtgctaatgagggaagttgtttcagatcaggtagcctgggatggctactctgcagtggtgacatttagtctgagacccggcagataagaaatgccagccatgtgaaaagctaggggaagagcacgc

SEQ ID NO: 696778 - DNA, 1168 bp, Homo sapiens
ttgcccaagatctccagctagtaagtctcggggctgagattaaacccaggcgtgtgtgactctcaaaccagcactccctcctccttcaccatgagccttccctgatgtgccctcctctcacgtgcatcattgtgtcaaatcggaggagacagtgggtgtaaccggctctataaactgcaaagtgcttatttgarggaggaagaacttaatcgttaaatattcaacagtggcttcccctgaagcccccagagctttagggtgaaggctgcgctttggtgctgcgagctgaactcaggctgataaaatgctctttcctgcctggcagggcaccgtgtccagcagtgaggccacaccggtttgggacggccagaagatggaagtgctcacacctgacttctggtcaggctgctgctcagcaggaggcacgcagaagctgccggggaaagcctctcccatctgtgcggcaaaaggagagcagctggcccgagagtccctctgcataatgcaattactcacaatgtaggtcagtgccccctgcaaatatcccgctctgtccggctgcacaaactgacaggcagggagttggagcataagtggaggtgttgaggcctgaaaggtcaaaagccttggtcctgctacagacttgctgggtgatcttgggcaaatccctgcccttttctagacctcagtttcccatttgtgaagggagcccatgggttgatttacagtgtagttaatgggagtctgagtcattgggagatgactctatctgtcctacatttcatgactgtatttgtcctacattcattcattcgaaatcgactccatgaggatttgtcatgtgcctgctgtgtgtcatgcaccatgttggtgtgggggtacaggatgaatgagaccaacatggcgcttgccttcttggagggtacattccagtggaacgggggctgctcaacaaacacaggcattcaacaaaccacacagtacagttatgaatacaaacagtgataaatattcctaaaggaaactacgggcacttggaggggtgctaatgagggaagttgtttcagatcaggtagcctgggatggctactctgcagtggtgacatttagtctgagacccggcagataagaaatgccagccatgtgaaaagctaggggaagagcacgc

SEQ ID NO: 696779 - DNA, 1168 bp, Homo sapiens
ttgcccaagatctccagctagtaagtctcggggctgagattaaacccaggcgtgtgtgactctcaaaccagcactccctcctccttcaccatgagccttccctgatgtgccctcctctcacgtgcatcattgtgtcaaatcggaggagacagtgggtgtaaccggctctataaactgcaaagtgcttatttgagggaggaagaacttaatcgttaaatattcaacagtggcttcccctgaagcccccagagctttagggtgaaggctgcgctttggtgctgcgagctgaactcaggctgataaaatgctctttcctgcctggcagggcaccgtgtccagcagtgaggccacaccggtttgggacggccagaagatggaagtgctcacacctgacttctggtcaggctgctgctcagcaggaggcacgcagaagctgccggggaaagcctctcccatctgtgyggcaaaaggagagcagctggcccgagagtccctctgcataatgcaattactcacaatgtaggtcagtgccccctgcaaatatcccgctctgtccggctgcacaaactgacaggcagggagttggagcataagtggaggtgttgaggcctgaaaggtcaaaagccttggtcctgctacagacttgctgggtgatcttgggcaaatccctgcccttttctagacctcagtttcccatttgtgaagggagcccatgggttgatttacagtgtagttaatgggagtctgagtcattgggagatgactctatctgtcctacatttcatgactgtatttgtcctacattcattcattcgaaatcgactccatgaggatttgtcatgtgcctgctgtgtgtcatgcaccatgttggtgtgggggtacaggatgaatgagaccaacatggcgcttgccttcttggagggtacattccagtggaacgggggctgctcaacaaacacaggcattcaacaaaccacacagtacagttatgaatacaaacagtgataaatattcctaaaggaaactacgggcacttggaggggtgctaatgagggaagttgtttcagatcaggtagcctgggatggctactctgcagtggtgacatttagtctgagacccggcagataagaaatgccagccatgtgaaaagctaggggaagagcacgc

SEQ ID NO: 696780 - DNA, 631 bp, Homo sapiens
cctttcctggccgtttggatcttctctacagaaaattggactttttccacagactctggaatcagcaaacactaatttttacttttataaggtataatcattaatattccctcatgcacattagtcatagtccaagaaatgagattattattaggcatygagccaggataagtactgagccaggacagctgtcaggtccaattgggcagaacatgcaaggctgtaactggtgagcagctgttggtaacctgggaggcagcctgcttcatggtcaccatagcggatgggcctaactcacctaagcaggcaagcacatgagaaccttcatatacaagaacctaccccagcaccagggtggcatgcccatgagcacagggatgttcatctgctctgtcaccactgcatccccagtgcttagaacagagccttacactgcttggtattcctcagcactgaatgaaggaaatattacatcagagaccatgaagttactgagttggaaaaggtctcaataccttaactaattgctttgcaatagaaacaagtacttggagcattttctcttcccacctccttacctctcctctttcatccatgttatctttgtaactttaggtaaaaagctaatcta

SEQ ID NO: 696781 - DNA, 615 bp, Homo sapiens
tttcaatgacattaacaccatacttttcattaaaataattgattagtgttctttttgtcatttttacaagtctccatttacactatatttattgaatggtttgaatgatgagtaggaatttcccagataaaggggttcatgaaggcattccaggcagtggragcagcaacatttctttttggtaactattggtagccaacaacaaggcaagtgagtgttacagccttcacttaaaagctagtctcggcctggcgcggtggctcacgcctgtaatcccagcactttgggaggccaaggcgggcggatcacctgaggtcaggagttcaagaccaccctgaccaacatagtgaaactccatcactgctaaatgcaaaaaatcagccgggtgtggtggtgggcgcctgtaatcccagctactcagaaggctgaggcaggagaattgcttcaacctaggagatgaaggttgcagtgagccaagatcatgccattgcactccagcctgggcaacaagagcaagactctgtctcagaaaaaaaaaaaaaaactagtcttagatgaaaatctgcccacacacacatacagactcattacaaaatgggcacaaaatagtcttat

SEQ ID NO: 696782 - DNA, 647 bp, Homo sapiens
ttaacttttaaaagtctgctcacaggccgggcgtggtggctcatgcctgtaatcctagcactttgggaggccaaggtgagcagatcacttgaggtcaggagttcaaaaccagcctggccaacgtgatgaaaccccacctctactaaaaatacagaaaaaaaaaaatagccggacatggtggcagacacctgtaatcccagctacttgggaggctgaggcaggacaatcgcttgaacctgggaggtggtagttgcagtgagccgagatcacaccactgcactccagcctgggtgacagagcaagactctgtctcaaaaaaaaaaaaaaaaaaaaagcctgctcacatgccactatcagttttctatacttaaaaaaaaacggacacatattaattgtatatatttactgggtacaaygtgatacttcaatacatgtatacattaagtaatgatcaaatcaggataattttttatcccgatttatcctgattagcatatccatcacctcaaacatttataatttctttaaggtgggaacacacaaaatcccctcttctagttattttgagatacacaatacctttgtgttgactatagtcaccctactatgcaacaggacaccaaacctttctaattctaactttttac

SEQ ID NO: 696783 - DNA, 582 bp, Homo sapiens
ggggaaatgaggacacagagaactgtataatgcacggggaatcaatgcagaaaaggaagatcacaagctttgatatgaaacaaagctggacccagccacgcattaactctgtgacttaaggcaaggtcactgaccttgctgaaactaatcttattcaaaatgaaggataagaattctgaaatgagcatttcctgggagaattagtataaatttatattatgtttttgagtcccttttttagagctagtgtaacccctctgaggcatctagttttttgcaggggttcaagtccagctcccaatttggtgcaagatgaacatgatgagttccaagcgataaaataaatacaatctccaccgttaaatataacgtcacaaaacgcacaacactaaagacaaaaacaaagttcaaaatgcagtaagtaaaggaaacagagatyatctacaaataaattataacttgtaattatactcctcattaatagtagatgtcaaaaaggaggaaaataattttcaaaatgcttagggaagacaagagccaacttagcattattaaactcaggtaataattatccagttgtga

SEQ ID NO: 696784 - DNA, 582 bp, Homo sapiens
ggggaaatgaggacacagagaactgtataatgcacggggaatcaatgcagaaaaggaagatcacaagctttgatatgaaacaaagctggacccagccacgcattaactctgtgacttaaggcaaggtcactgaccttgctgaaactaatcttattcaaaatgaaggataagaattctgaaatgagcatttcctgggagaattagtataaatttatattatgtttttgagtcccttttttagagctagtgtaacccctctgaggcatctagttttttgcaggggttcaagtccagctcccaatttggtgcaagatgaacatgatgagttccaagcgataaaataaatacaatctccaccgttaaatataacgtcacaaaacgcacaacactaaagacaaaaacaaagttcaaaatgcagtaagtaaaggaaacagagatcatctacaaataaattataacttgtaattatactcytcattaatagtagatgtcaaaaaggaggaaaataattttcaaaatgcttagggaagacaagagccaacttagcattattaaactcaggtaataattatccagttgtga

SEQ ID NO: 696785 - DNA, 861 bp, Homo sapiens
tgcattatttcaaggggtctaattttttgtgttttcttttaatttaaatctgcccccaattggtttacttgtgccttcaaaaatgtatgcagaaaaatattcatactttctgtgttccatagaatatttttaaatataatagtctacacagatagtctatatttatgtaatgaaactatgtatccatattcattccataaggaaatagtggcaatggatatttaaaagctcatttttttttgttattatccatcctcttatttctgattacataaaacctaagtcaaataaacatgtttttacaaaatctacctttgaatattttttataacctctctaaatcttttaaaaaattaatttcattcagtaacacattagtccagtaacagaaggactaatgtttatttgcatcctacgaattagaaaaacacaatttttaaacctaattatatgaatattatagaaacctactccaataggaattaaaatatcaaaagtatttgatttctatgaataataatgaagtgtatatataatatataaaatatcactattaagtttactaatatttatatttgcattccaaatgtatatcatcatgtatgtgtatttaaataggaacaaccagtggtttcacctatgcwtatgcatttttagaaaagtgattattatgcaaatccctctacattaatcacatctacaaataaaatttacagctctcattttaaattagcacaggttatatttttatattagtcacgaattttaaccacactttgttgaggaggacaactgcaatttaaaccctttaaaagctgaaaacataacacaacttttaaaatttgacaaaaaaaattaaaa

SEQ ID NO: 696786 - DNA, 842 bp, Homo sapiens
ctccatctaatctgaatattgttttcttgtttaatttctacttattatttttcttaaatgtaaaatgtgtcaggaaactttttctagctcctgattcttggtttggttgttcaacgtgtgtatgcaacgtgtcaacttgccctgtctttgaacctcccacagtgaattgaaactatctattttcttggctctctctctctcatcaagccataagcgtcttgaggtcaagcatatggccttgctcagcactgaatttttggcacaagtatttgcacaatactgtttttgaacaaatattgtttaacatttaaataataataattattatgactttttgttttatttgcattcattaattcagatatattcagtgcaagaaatggtagtggtggtggggatgtaagaaggaatgctgtaccatttttggatttaaggtgtacacattgtagtgtcattaaaccataaatcaaatctagcgcacaattgtgataatgggctcatctttgctgacttacgacatccactgcaatatactcacctctgattttctgtttcatgtgattcccaaattatgctaaatagaaacaagtaaatgatttcaaatccattagaaaacaagcttgataaaaaaataagaaatagtaaaataaagaatattactgcaaaatagtttgcatcccttgacttataaaacagttaagcttgaaataacattctgctaacattttatcttgtttttcactcccttttacaaatataaggagttcacttggaatgattttgttgattcytgctgggtttaaaacttcaattaaatgacaaccattctatttcctatgaga

SEQ ID NO: 696787 - DNA, 614 bp, Homo sapiens
atattaataatatagcacaaaataaacttcactgtctccttgatattatttactgtaggttaaaatagtttgaatggtcaaaaaatatgatcacaaatatatacaatttatttgtgatttatataattgagtcctataaaattattttacaacataacttattttaaaaaaaaagcaaggaaaaaaggaaaacattacttagcaattagaagttccatgatgtaaatatcactttttcaaaacaaattaataaagtttgttgtaagatataggtataaatttgctataagttgtagatatggggatgtgctgctttaataaagaggagtacagtacagggtgaagtgaataatgtttgtatcaaactccagttcttcactatgaagagataacccatgttaatgatcatcaaatgacactaatcccacaaaatcaaaatgtgtctaccatctytcattcctacatctcttattttagcacaataagggaagcctatagcattttcccctaattctccttgagaaaatgctctagaaacacattatacatttaccccaataattacgttgtttcggtaataagtgtgccataattttatatcaatttaagcatca

SEQ ID NO: 696788 - DNA, 614 bp, Homo sapiens
atattaataatatagcacaaaataaacttcactgtctccttgatattatttactgtaggttaaaatagtttgaatggtcaaaaaatatgatcacaaatatatacaatttatttgtgatttatataattgagtcctataaaattattttacaacataacttattttaaaaaaaaagcaaggaaaaaaggaaaacattacttagcaattagaagttccatgatgtaaatatcactttttcaaaacaaattaataaagtttgttgtaagatataggtataaatttgctataagttgtagatatggggatgtgctgctttaataaagaggagtacagtacagggtgaagtgaataatgtttgtatcaaactccagttcttcactatgaagagataacccatgttaatgatcatcaaatgacactaatcccacaaaatcaaaatgtgtctaccatctctcattcctacatctcttattttagcacaataagggaagcctatagcattttcccctaattctccttgagaaaatgctctagaaacacattatacatttaccccaataattacgttgtttcggtaataartgtgccataattttatatcaatttaagcatca

SEQ ID NO: 696789 - DNA, 628 bp, Homo sapiens
gactataggggatggagattagactcaactctaaatacaattggagaaagtggggattaatagccaaggagcagattggggttggttgttggatggaaaattactaagaagagacatcaaggataggagaaattattgctagactgaccaaatgggattcttgctgagggcaggccagagtgacttcatattaagagtggacggattctccctaaagtgatttagcaggcttattgctaaaggtgaattctgcaaggatgaaaaagaaatgcaaggttgaggactacttgagaagagagcttataggagccttactaaaatttgattaaggagaaagttatgtttaatagtctttgtctggaaggatgaatagtctcggagamaaaatttgaatacaatcaacccctatttttagcaaatttgaaagaaaggtaagtgtgttaatgctattaatgttatcaaaatatcacagaaagtgaaatggtaaaacttcagatatctttaatttaaagctaatattgtgtcaaaaacctttgctaacactattcccactggatagtctactggcacactgaccagttggattagtggagacagagcaaataaaaggtagaagacttgaaataaa

SEQ ID NO: 696790 - DNA, 1854 bp, Homo sapiens
atgatttaaacagtctgaatatttgctgagccatttacctgttttgtcagctgagtttaagataaagcccaagcaaaagcacagcagagtaaacctacaataagacagataagagagagaatgatttctcattgcgcagcatttataaagtgagtttcgggtaggtcacttcttctttgtgagccttctgatacttttttaataatacatttgtttacattttaatgaaacaaacacagtttctggatgagggacagattattattatttataataacaaccacatttgttttccatgcctgatttccccacctcaggacaatgcaaagaaatcagatgtatcttatgcataacaaaggttgtttttttttccattttttcactagttttttttttttttttggccacaggagaggaacttcaaaattataaatgtgagactttatataggctgcatgctgccttctcatctgccgccctccagagaaagagagaaactttatcttcctaaacaaagtctttgggaagaaaaggcaagcatttggctccagaggcaataggttttactatcctttgaacaagaacaaatggttctgccacaaaggaaccaagcatctctggctctaaggcccttagaatgagaaacaaatggatctggaaaatatttatactattatttataaattatctatatttatagcatgtcatttttgtttgctcagaaaatcctaactatacagcaatataaaagtattcatattgcttctaaacacttagtatccccccatataaaataagagtgttgctatacaaagtccccaaattctatctatttataacaattttataaaaatgataccttcattaagaaaaaagaaaatggccagaaacaattaaattaacttgagacttctgacaaaatggcaagctggaaaaaacactgacatagatgttattatctctctgatctgggacaaatcacttaaactgtgtcagcttcgatgttctcatgggttaaattaatagctggactacaatggatctaatacttccttaataagattatttctgagtcaaataaatagatatttgtgttttaaatatatatatgtatacaagtacatatgtaaaaatggagatatctatctatatatatccatttccagtctcaaatttgcttcagtggctctattggccagatctacagttgctatatgaagtaatatttgagccactcatttaattcatgccaaaaatctgctttgcattaataatagttcacaccaggtgttagttttctttattttcccaaaagaaactgaaaaaaagaagaatgtttttcacagtggctctcacgctttggcatgcatcagaatcacctggaaagcttgctgctattgtgcccttcccagagatttttattcagtatatctggaattggagcctagaacttgtctttttaaaacattataaggtgatattaattctgctagtccacggaccacactttaagaaacactgacctaaagaatgtttctaaacctttcatgtagaggaatcacttggggatcttagaaaaaggtacattctgatccagtaggtcagggtggggcttgccattctgcatttgtaacaarctttcaggtgacattgcttctcctcatccacagaccatacacttccagtacaaatgatcagcacaggcatcccctaagagatgttaatatgcaaaattgaaactcagttgtacaaacgtggtgcctatagttaataatactgtattgtatgcttgaaatttgctaagagagtactgtagatcttaagtgttctcatcgatatctcctaaaaaggtaa

SEQ ID NO: 696791 - DNA, 876 bp, Homo sapiens
tgatcacaactcactgcagccttgacctccagggctcaagtgatcctcccacttcacactatcaaagtgttgggattacaagagagagccatccttcccagccaatayttgcattttaaaatctactggtgaaaataacttttactgactctctctgtttctactcttggatgacaaaaattcattctttaagtagtaggtaaattgcatgtaaaaatataaatcaatgtagtctacatctctgctaaaaataacaacaacatcaagttcttctgtttttagaataaaatccataaattttctgtgtcttatgaaacatggtcccagttaactttcactttttcatagtgctctttttcaaccactgtaagaatgaaccagtctcaccaccaacattctaccaccactttcaacacatacacactcccactacacacacgcatttcacactatacacacacatgcacacaaatgcaggctcatcagcaagaccaccactactttttgttagtcctagtaacctgctaaagagcatgtctcagtttgctattttgtggtttatttatgtgtttgctgaagtattattttcatcccccttagaaaataaagtccagctgggctcggtggctcacacctgtaatcccagcactttgggaggctgaggcaggcagatcacttgaagtcaggagttcgaggccagcctggccaacagggcgaaccccatctctactaaaaatataaaattagctgttcatggtggcacacagctgtaatcccagctactgggggaagctgaggtgggaggattgttggaacctgggaggcagaggttgcagtgagctaagatcacagcactgccctccagcctgggtaaca

SEQ ID NO: 696792 - DNA, 876 bp, Homo sapiens
tgatcacaactcactgcagccttgacctccagggctcaagtgatcctcccacttcacactatcaaagtgttgggattacaagagagagccatccttcccagccaatatttgcattttaaaatctactggtgaaaataacttttactgactctctctgtttctactcttggatgacaaaaattcattctttaagtagtaggtaaattgcatgtaaaaatataaatcaatgtagtctacatctstgctaaaaataacaacaacatcaagttcttctgtttttagaataaaatccataaattttctgtgtcttatgaaacatggtcccagttaactttcactttttcatagtgctctttttcaaccactgtaagaatgaaccagtctcaccaccaacattctaccaccactttcaacacatacacactcccactacacacacgcatttcacactatacacacacatgcacacaaatgcaggctcatcagcaagaccaccactactttttgttagtcctagtaacctgctaaagagcatgtctcagtttgctattttgtggtttatttatgtgtttgctgaagtattattttcatcccccttagaaaataaagtccagctgggctcggtggctcacacctgtaatcccagcactttgggaggctgaggcaggcagatcacttgaagtcaggagttcgaggccagcctggccaacagggcgaaccccatctctactaaaaatataaaattagctgttcatggtggcacacagctgtaatcccagctactgggggaagctgaggtgggaggattgttggaacctgggaggcagaggttgcagtgagctaagatcacagcactgccctccagcctgggtaaca

SEQ ID NO: 696793 - DNA, 662 bp, Homo sapiens
tccccattatcaacattctgcacaagtggtatatttgttataattattaaaccatattttacattaggttcattaacatctatatattacagccatagtttacattagggttgctcttagtgttgtacattgtgggtttggacaaatgtagtaaatataatggcatatatctaccattatgttattatacagagtattcatatagctctaaaaatattagttgttctacctacttatgataatttatttttatgttacaactaattgaaagtcatcaatattataattatataataataaatgtttttaagtgtctgagttttgaagattatgatttgtctgtaaagaaagtaaatttaatcatttatacacatacatattacatatatgtatatatattatatatgtgaaccacaaataaaataggttccatttgtaagttataatttattattatcttttaaaaatgaggaattttagttcacatgtttctttggttgataaaattgtatagactatttttattagccatttgataatttaagtaagttgtkaaaatatttaggaaagccttttaaaatgttgtttaataattgcttgagtatcaaactgaattatattcagcacaatgatattgttagaggattaacaaatttatatac

SEQ ID NO: 696794 - DNA, 618 bp, Homo sapiens
ccttctttgtgttcataagttcttattattcagctcccacttataattgagaaaatgcggtatttggttttctattcctgcatctaacaccttttcttgctaaaaaaagaaaaaagaaaacaaaaatctaagtaatgtagcaacagaaggtaactgwctaaattcagtagaggacattgaaggaaaccctgaagcttacattatacatcattacaaagtgaatgaccaaactcttttccccaaaggttatggaaagacaagacagaccatccgcgtgcctcattacatctatttaatattttacgtagccaaatgaagaataacagttaacaggaaaagtaaaatactttttattaaaaaatagcatgtttgtcaacaaaaaagaaaaccgaatgaaattttttaaaaaactaatagaactaatgtttctagcatgtttgcagtatacaagataaattttgtttatgtacagaaatgtcaactagatattaaaaattaaaaagtaaaaattataaacaacaaaagtataacctatgtagtggcaaatgtaacaaatgatgtgtactgtatgtacaccagaaccaatggagagatatgtcatgctcatatcttggaaat

SEQ ID NO: 696795 - DNA, 2655 bp, Homo sapiens
tcagagagatcctgctttctgaaagcagtgtaactgtagctgagttatataaagtgacattttattgcctcctgtggaagatgctttgcactaatgatctgaaatctgatgtcttaagcttggaattagataatctgtggctcaaaatgtgaaaagagaaagtggagcctttatgttttagttaattacttctggctaaaatgtggggagtgctccccggaccttctgggactcctggaatccggaaacccctctacaaaacctaaaggattgaagcagttgacctcatcacaggagtgaccacagggaaaaaaacaagtgattcacaaatccaagcctgatttcagtgagaaatttttctgtgtttcataaatctgcctttttttcctctaactgcccttgccacctagcaagctacgaacagagagaccaaaaatcaacataaatatggaatatgcagtcggaaatgtggaaatacaacttgctacccagaggaacaaagctttcacccctctgaggcttcactgtgaaaaacaactctgcttgttttgtcttattttcccacatacttccatttgaaaattatagtaaatcaattaatcaatttttctctccctcctatccatgcccctcatttctccagttctctaattctctaattcctgagtactcctagggcagttcagcttactacaagagaatttttttgtggctgttctcaaactccgtattccatttgcagagaatactgttccttaattctgtttgagtttcaaagagaaaaagctcataccagtttagattacccacaatcctcaatgcacatcgaacaaaaatgtcagtcctaatggcaaagttcaggatataactgtgttagctaatttaatcatttaccatgaaataccagttgtcttaatcttatatacagttcttaagttggctgcctatttttgtgtaattgaatactgaccctacatgaagaatacaagaattttgtttttaagtaaatgttgttagaaataaaatgtttttactggaaaaaatatatatatgttattagaagcgctgtgaattcttctccaatgcttgaagagcgactgctccagcaggcctggcttatgtttgtggcattccgccctgccgctacctccagcatatccacagacctttatttttattattttatgaccacatgcaggattctggctccaaggactccatttggacttaggaaaagtagaagagcactctgaaaactggacagcggaaagtgatgaactggcatcgtaccccaacacactctgcttgtgggccttcctctccagatacctgatgtattactggagaagcaaatgcaacaaggcaaagatgtcttcattttctgtcaaagcacggcctcaactacagtgtgattgaggccctgaatctccgcagccagccggtcagaccccatcaacagctgcagcaagcagggctgaggaggggaatgggaggcgatgggcgccaacgagggctgagcctgcagctctgtgagtgactggagcagagagagagaggccagggccggaggaaaccccagcagcaagggaaaaacagattgactctcagtgactcatttagctcctggattggacagatctctcccctgctggcaatttggctctgcatcaatagttcgaataccaggctgaatagcttaaaataattagggggaaaaaatctgcaaaactgctagccatccaattctttactctgtgctgaaagacacaggacaaatgacatctaggttattaaatatgaagtcactggatttgctgcccatttggtccaaaagcagaaaactggataaaactcaaatttataattcagtgtagatggcctgtttgtccttgaggcaatccatgaattttggctgggcaggcgctgygacatgtggaagtaatgtgggggggaagggggatgaacaatgtttgatttccccccaactcagcttccaccccctgggaaaaaaaaatgaaaatgtcaataaagagtgtgaatgtgaagagaaatggaatctgagcccggagtttagtagctggcagtttaaactttatatactttaggccgacaggcggctggatttcctgtactttatatccaatgtacaaaaacagaagcaacaggctcatttggtatcagtaaaggtcagttaaaattatagagacatcctttggagcaaatccccagtcttgtatttgcatatttatgaactagagattatgacaggccattccatttattagagcagtgctgctatagttaatagtctgtcagcatttccattataaaccccgtttttcagtgttttaatatctcagctgttagaaatcacatcaggctgaaaagtggtcttcagcctctcaggccttggcagggtgagctggtggtggtggtggtgatggggcttgggaaaccaacaagatatttaaatcaagccaatggtttttacaatggatattaacagtaaatataaaatcaaagattttgaggggagttggtgaattcttctcctccctcacccccgccccccaaattatctttcccctgtcttatccttgtcagtatcagggctttcactctgtttaaagggaagactctgggattttagggcaa

SEQ ID NO: 696796 - DNA, 613 bp, Homo sapiens
tgtcagctgtctgtttcggatgctcgtcctaccacgtgtagcatggcaaagacaggagtcagagattgggaagtttagctaggtgaaaaagtctgccctagggcatgcccttcccactactagagagcagttgctttacattttattttacctagctttttgtaaatatttctccctgggttacttgtgatctaggggcgtggacttactcatctcttstaattccaatcagtgcatgacacatcataactgatcctcgattattttttaagttaatgtactcaaggtttatttttcaatcaaatgcctaagctattacaattaaggagagagaatactaccccctttcagtccaggagtatggcaaatggagatgtctataggtattaggacatacctagaaacttttagaaaagcattggaggaatgcctcctcaaactgtatgaaactccagtgattagcaatggagtctgatgaatgagaggcagtacaatgcctttctcaaaatattgggaaattcgtgatctttttctctcctttatcattcctagggttttggaaatctggattgtagtggggcattgtatgttaaaaaatcatcttcccattctg

SEQ ID NO: 696797 - DNA, 573 bp, Homo sapiens
ggtaagagctcccagcctggcaccaggttgtcactacttcatagactggcatgcagttggatcttttctsttttttcaaacatcattaccatatttatactaatattaatttaaaaagccaaatacctggcttatagtaggcttataatttaaaacaaatcaatcccttaccccacccttttttagtctcaattcccacttccacagacaaccactcttctatacattttatttttttgagacggagtctggccctgtcacccaggctgaagtgcagtggcgtgatctcagctcaatgcaacctctgcctcccgggttcaagcaattctcctgccaagtagctgggactacaggcgttcgccaccacacccagctaatttttgtatttttagtagaaatggggtttcactatgttggctaggcttgtctcaaactcctgacctcaagtgatccgcccacctcggcctcccaaactgctgggattacaggcgtgagtcaccgcacctggcttttctatacattttagatggcatttctgtcatatgcctccatatctctgacccttctaattca

SEQ ID NO: 696798 - DNA, 588 bp, Homo sapiens
cttctgcttttgccttctttgatgctgctcaaatccctggagacgtgcttgggttctaccaggaacacacatgataacagatacacacacacaccccctgtgcactgagaatctgacaggtgcaggcatcaccattcatccattctcctatgtatttgctcgttgatccattcgtgccttctcttagtaaatattcattaagtgcctattacgtatctggctctgtgctagagccttggaagcaaacagggcackattaaggatgtgattctcactctccagccccatattgcagaagagataacaaacacgttcattactcagcagcttcactgaaagaggcgtgcacgggaaggaagggagtgattaactgtagcagagatgtgagtggtgggtggaaatcaaagaatttagccttgttttaggttctcttacagaaaagattggtcaaactgtattccttccaggaaaatttaagaaaagaagtcctcaacaagtttctcgaaggcatctttgactaccccatcgcttcagttgaagatacagattctccccattataatgtttctgaaatcagaatgtttctcg

SEQ ID NO: 696799 - DNA, 959 bp, Homo sapiens
cccgccccctctttctgtttctttagagtagagctgccctagtatgcatctgaagatcatcactcagtcttgcccgtttcccaacacaggtatgtcttttaatcctctttcaatctacaggtttgttggctgggtttagtggctcacacctgtaatcctgaggggtagagaatcacttaarttcaggggtttgagaccaacctggaccacacagggagactcctgtctctacaaaatctacttttttttttttttttgacatggagtctcactccatcacccaggctggagtgcagtggcttggtttcggctcactgcaacctctgcctcccaggttcaagcgattctcctgcctcagcctcctgagtagctgggattacaagcatgtgccagcacgcccatctaatttttgtatttttagtagagacggggtttcgccatgttggccaggctgctctcgaacccctgacctcaggtgatccgcccgcctcggcctcccaaagtgttaggattacaggaatgagccaccacgcccggcccccttttcctttccatggattttggaagtccccacgctgttgggcccgcagcatttctcaaaatctggatttccctggtgcaggtgaacccattcctctgtcttttgtatttctggcaaatttgcagctggattgatgcttgcctcatgagattgagtttgatcgtgttggcagtggtcaatgggtgatgtgattgatctcttattggtgacgaatactatcttgttgtctcttattttgttaatttctctttttttaaattagtgttttagaaacgaggatctcattttgtcacccaggctggagtgcagtgactccatcatagctcactgcagcctcgaactcctgggctcaagtgatccccacacctcagcctcccaagtaactgagagtacacaccaccatgcccaacttatttat

SEQ ID NO: 696800 - DNA, 647 bp, Homo sapiens
tacacagctaataagtagcagggtcagtsttaggtgagaaaaatcacagtgtagaacagtgtgtatagcatgctcccatactgagtacaaaagacagtaaaagaggccaggcgcagtggctcacgcctgtaatcccagcactttgggaggccaaggcgggtggatcatgaggtcaagagatcgagaccatcctggccaacatggtgaaaccccgtctctactaaaaatacaaaaaattagccgggtgtggtggtgggcgcctgtagtctcagctactcaggaggctgaggcaggacaatcacttgaacctgggaggcggaggttgcagtgagccaagattgcaccactgcactccagcctggtgacagagtgagactccgtctcaaaaaaaaaaaaaaaaaggcagtaaaagatagggctgagcacagtggctaatgcctgtaatcctagcactttgggaggccgaggtgggcagactgcttgagcctggaagtttgagaccagactgggcaacatagcgaaactatgtctctacaaaaaaccccacaaaacaaacaaacaaacaaaaaatatggtgggcatggtggtgtgcacctgtggtcccagctacttgggagactgaggtgtgaagatcacctgagtccagg

SEQ ID NO: 696801 - DNA, 660 bp, Homo sapiens
aaagtgagcttcctctggctctcttttcctgtgctctctctgtctcttgcactgacttccactttctgcctttctaccatgggatgaccatcactagatgttggtgccatgctcttggacttcccaacttccagaatagcaaggcaaataaactccttttctttttaaattgcctagtctgttgtattctgtcacagcaacagaaartggaccaacacaagtactttgtatagccctgtacaagcatgtaatgtcatcctcataaccatcctgcagtgtagatgttgttacccttagctcgtagataaggaaatggaggcagacagctggactaacttgctcaaggacaagaatgtacagctagtaagtagcaaggtagctttggtcccaggtctgtgtgattgcaagttcatgccatccatcacactctatcctggaacatttagctttttaaaatctgacttcagcccttcacccacatgccttatctcattatagaattccatgcttaaggctctccaaccacttacatgcaaagtggaacgaacagctttaaccaaccaatcacagatgcagtcacggagtgaggtgtcccagagctaccacaccagctctgtgtacttgggaagtaattgacctctctaggaagtcatgagcccc

SEQ ID NO: 696802 - DNA, 550 bp, Homo sapiens
gatggcaatctctaggcaaggctcctgtcctgacttcctctcatctgcagggctggcacagaaactccacawgaattagagactctaggtgtgttagaaatcccacagtgctgatggctccctaggagctcaatgccctgaaggactacttcttcaggcctttaaggattttgaccttggggaaataaggtcttaagccaagagtcacaaactcatatgccttctggtagttatcgtaggtaatattatcaggagaggggaagtctgtgcaaactagagtgcatgcccaacctaaagacattcaaattcacaaattaaaaacaaagagatcactgtgctggcctaactaaatacatctgcatccaaccactttgcaatttatgccaaactactcactcaaggaatatgttgacatcaaagccttgaatgcttaggagatgtaaaaggaagggggagatattagaaagaggataaattgagccttgaccaattaactctcctgaagacagtttgtttctctccctgtttgtgtcccaaatgccctagagct

SEQ ID NO: 696803 - DNA, 550 bp, Homo sapiens
gatggcaatctctaggcaaggctcctgtcctgacttcctctcatctgcagggctggcacagaaactccacatgaattagagactctaggtgtgttagaaatcccacagtgctgatggctccctaggagctcaatgccctgaaggactacttcttcaggcctttaaggattttgaccttggggaaataaggtcttaagccaagagtcacaaactcatatgccttctggtagttatcgtaggtaatattatcaggagaggggaagtctgtgcaaactagagtgcatgcccaacctaaagacattcaaattcacaaattaaaaacaaasagatcactgtgctggcctaactaaatacatctgcatccaaccactttgcaatttatgccaaactactcactcaaggaatatgttgacatcaaagccttgaatgcttaggagatgtaaaaggaagggggagatattagaaagaggataaattgagccttgaccaattaactctcctgaagacagtttgtttctctccctgtttgtgtcccaaatgccctagagct

SEQ ID NO: 696804 - DNA, 646 bp, Homo sapiens
tttatccaatgttatttcagcaccaattgaaataatcatatggtttttatccttcattctggtgatatgatgtatcacattgattgatttatgtatgttgaaccatccttgtatcatagatataaatcccactttgtcatggtaaatgacctttctaatatgtttatgaattcagtttgctagtattttgttgaggatttttgcatcagtacttatcagatatatttgcctgtagttttccttcttcatgtttgtctacttttggtatcaggataatactggccttatagaatgaatttggaggtattccttcctcctctatttttccaaatactttgagtaggattgccatcagttcttacaaccatggggaaagcgaacrggaaggaggcatgtcttatatggcagtatcaggagaaagagagagacacacttttaaacagccagatctcttgagaactcagtcactatcacaggacagcaatgggggaaatccacccccatgatccagtcaccttccaccaagccctttcttcaacattgaggattaaaattgacatgagatttgagtggagacttgaatccaaaccatatcacagagtttaaccaaacatactggtcagggcaaaagtacttaaattcagca

SEQ ID NO: 696805 - DNA, 646 bp, Homo sapiens
tttatccaatgttatttcagcaccaattgaaataatcatatggtttttatccttcattctggtgatatgatgtatcacattgattgatttatgtatgttgaaccatccttgtatcatagatataaatcccactttgtcatggtaaatgacctttctaatatgtttatgaattcagtttgctagtattttgttgaggatttttgcatcagtacttatcagatatatttgcctgtagttttccttcttcatgtttgtctacttttggtatcaggataatactggccttatagaatgaatttggaggtattccttcctcctctatttttccaaatactttgagtaggattgccatcagttcttacaaccatggggaaagcgaacaggaaggaggcatgtcttatatggcagtaycaggagaaagagagagacacacttttaaacagccagatctcttgagaactcagtcactatcacaggacagcaatgggggaaatccacccccatgatccagtcaccttccaccaagccctttcttcaacattgaggattaaaattgacatgagatttgagtggagacttgaatccaaaccatatcacagagtttaaccaaacatactggtcagggcaaaagtacttaaattcagca

SEQ ID NO: 696806 - DNA, 646 bp, Homo sapiens
tttatccaatgttatttcagcaccaattgaaataatcatatggtttttatccttcattctggtgatatgatgtatcacattgattgatttatgtatgttgaaccatccttgtatcatagatataaatcccactttgtcatggtaaatgacctttctaatatgtttatgaattcagtttgctagtattttgttgaggatttttgcatcagtacttatcagatatatttgcctgtagttttccttcttcatgtttgtctacttttggtatcaggataatactggccttatagaatgaatttggaggtattccttcctcctctatttttccaaatactttgagtaggattgccatcagttcttacaaccatggggaaagcgaacaggaaggaggcatgtcttatatggcagtatcaggagaaagagagagacacacttttaaacagccagatctcktgagaactcagtcactatcacaggacagcaatgggggaaatccacccccatgatccagtcaccttccaccaagccctttcttcaacattgaggattaaaattgacatgagatttgagtggagacttgaatccaaaccatatcacagagtttaaccaaacatactggtcagggcaaaagtacttaaattcagca

SEQ ID NO: 696807 - DNA, 3634 bp, Homo sapiens
  misc_feature 2998, 2999, 3000, 3001, 3002, 3003, 3004, 3005, 3006, 3007,3008, 3009, 3010, 3011, 3012, 3013, 3014, 3015, 3016, 3017,3018, 3019, 3020, 3021, 3022, 3023, 3024, 3025, 3026, 3027,3028, 3029, 3030, 3031, 3032, 3033, 3034, 3035, 3036: n = A,T,C or G
  misc_feature 3037, 3038, 3039, 3040, 3041, 3042, 3043, 3044, 3045, 3046,3047, 3048, 3049, 3050, 3051, 3052, 3053, 3054, 3055, 3056,3057, 3058, 3059, 3060, 3061, 3062, 3063, 3064, 3065, 3066,3067, 3068, 3069, 3070, 3071, 3072, 3073, 3074, 3075: n = A,T,C or G
  misc_feature 3076, 3077, 3078, 3079, 3080, 3081, 3082, 3083, 3084, 3085,3086, 3087, 3088, 3089, 3090, 3091, 3092, 3093, 3094, 3095,3096, 3097: n = A,T,C or G
taatttcaaaaataaaaacaactgcaaactggaataaaacagtgttcaagtattctaaggtcacattattgtctttggcaatggacataggcattaactttggactgtgagaatatgcatgggtataatcagtgctaatcattaacaaaacagaaaatgtgcctaattcctgtggtatagggtaaaaaaaattcaatgtaaattgattaaatgtttctgctaaatgcatttttagacagattttttaaaaacagatagaaaaaaggtaaaggtaaagctagarccaaataaatgatgtaaattctaaccaaaggaaagacagtgaggctttattagtattggacaaagatctaaggcaaaattaataccacagtaaaatggttgtacatttataattaaaaatgtttgactctctgactagaaattcaacaaatatatgtttactcaccttataacatgtttaaaattactaaagcaaaaatattgacagtacaataatagggaaatctacaattatgagagagttttaacaaccttattaagagcaggcagatttcaacaagttttaattaacctgaccaaatgcacatacggagaacacattatttttttaattgtctatatacagtcagaagttgagtcttttaaaggattgaaataaaaaagaatattctaattggactaagatcatatagtatgcacttgttaatatgaacatttccaaatattttgttgttataagaagtgttataatgaacatctgtatacatgtttacacataggtaattctgtagactaaacgtagtgaaacttgaagcacatttttatattttcatattatgcaaaattgcccttacaaacctgtcagtttttactctctagtagcaatatattatagtaccttttgtcacactcccaccaaaaatattatcgctctgatttttgcctaatagattaaaaatgatttgtgcttttcccaattactagcaagactgaacatcatttcacattttttggccttttgagttttctcttgaaatttgcttcctttttccatcttcttttgcttttattatttttcttattgaatgtttccagttcttatgttattatcgtttgtcatgtattgcaaatatattttcctaatatatcactgctttttgaaggcttcccagtgtaaatctaagtaatcatgaatgctggtatgaattaggacagtgccaaaggtatgcctgtattattattttttgtccaactacagtcatgcattgcttaatgacaggagtatgttctgaagagaaagcccttaggtaattaagccactgtgcaaatgtcatagaatggacttccataaacgtagatggcatagcctattcctcctaggctacaaacctgtaaggcatgttattgtactgaatattataggcaactgtaacacagtgtacttgtgtacctaaatatatttaaacataggaaacttccgataaaaatatggcataataaacttaactggaccaccatcatatatgcggtgcacgactgtattcaccatgcaaaaggttttaagttttaaagtgattatttgtttaactacagtggttcctcgtccctccatatccatgaggaattggttccaggacccaccatggatacttaaagcaacaactgctcgagtcttttatatacaatgtagtatttgcatgtaacttttacatcatctcagattacttataataactaatgcaacgtaaatgccatgtcaaaacttgttatattatgttgtttacaaaataatgacgaaaaaaactcaatacatgttcagtatagatgcaaccatcctttctcttgtcttatccttagatcttgtttaataagattaaagactaagtggtaaggaggatgggaagagagacagaggaaaaatgtattaatgacagctttttttttttttttttcagttggggtctccctatgtcacccaggctggagtgcagagatgcaatcacggttcactgcagcctcaaattcctgagcttaagtggtcctccctcctcagcctcccaagttgttgggattacaagcatgactaattatgcccagcaatggtaggtttttgttgttgttgtttacaaagttaaatgtcatcattttttatactgaaatatcttttaatacttttttttgaaatattactgattatttagaacccaaagtctggaccattgaacaagttcattccaatagtctctttcactgttaatattctctgatcctatgatttattcttctcttgactttctacatcctaatggaaatatgaaaatcaaagagcttaaggaaatgttgtggctgtatcaatcaggacagaataggttattctgcagtaataaaagaaactaaaatttttcagtggcttacaataaccaagtttctcatgttcaactaggatcaacaaaggcactcttattagtccctttgtaatgtcacaaaaacttcattttgacacatgctttagcaatcgggaactccccaaagtaaaacaatctttctgctcacatttcacagccaaaacaaatcacatggacattcccaaattcaacaggatgggagtatttcatttgcagggcggatcactaatatttatgaacaatagtatattgcatatatgagatcagaaataaaaactaacaggaaaaataaaagaattttcattggagtgaacatttgaaaaataagaaatgcgagtttaaatatataaagaaaaatacaatatatagagcttctcacctccatcctttccttcgatagcaagacattcaatttcttccaagtttgtatgatcatttctatgcatgtttttatgacttacttcatctaatgttcccataaataacatataatggaattttatgtagttacctttttctaagctttgaaaagtttcataaaactgctcactcttcttaaattttgaatattcaaagatcacggtatacannnnnnnnnnnnnnnnnnnnnnnnnnnnnnnnnnnnnnnnnnnnnnnnnnnnnnnnnnnnnnnnnnnnnnnnnnnnnnnnnnnnnnnnnnnnnnnnnnnnttttttttttatctactccatcactaagctggagtgcagtggcccaatctcggctcactgcaacctccaccttcgggttcaaatgattctcctgcctcagcctcccgagtagctgggaccacaggcatgagccaccatgcccagcaattttttttgtatttttagtagagacgaggtctcatcgtgttggccaggctggtctcaaaatcctgacctcacgttgatccacctgcgttggcctcccaaagtgctgggattacagccgtgagccactgcacctggcctctttcttaatttctaattgataaccttttaaatagatacaaccacctcaagtctttatatattagtcacagatgttccagtcttacttgatatcctggctttttcttcattgcttagaccttgtgcatgttgggtacagggtatatatttcctgatgcttattcaatgttttgtgtgtatgtatgtatgtatgtatgtgtgtgtgtgtgtgtgtgtgcgcgcgcgcacgctttaagatttcctattagcttt

SEQ ID NO: 696808 - DNA, 2265 bp, Homo sapiens
  misc_feature 834, 835, 836, 837, 838, 839, 840, 841, 842, 843, 844, 845,846, 847, 848, 849, 850, 851, 852, 853, 854, 855, 856, 857,858, 859, 860, 861, 862, 863, 864, 865, 866, 867, 868, 869,870, 871, 872, 873, 874, 875, 876, 877, 878, 879, 880: n = A,T,C or G
  misc_feature 881, 882, 883, 884, 885, 886, 887, 888, 889, 890, 891, 892,893, 894, 895, 896, 897, 898, 899, 900, 901, 902, 903, 904,905, 906, 907, 908, 909, 910, 911, 912, 913, 914, 915, 916,917, 918, 919, 920, 921, 922, 923, 924, 925, 926, 927: n = A,T,C or G
  misc_feature 928, 929, 930, 931, 932, 933: n = A,T,C or G
tgaagagaaagcccttaggtaattaagccactgtgcaaatgtcatagaatggacttcattaacctagatggcttagcctatttctcctagactacaaacctgtaaagcatgttattttactgaatactataggcaactgtaacacagtgtacttgtgtatctaaatacacttaaacataggaaacttccgataaaaatatggcataataaacttaatgggaccaccatcatttatgtggtgcatgactgtattcaacatgcaaaaggttttaagttttaaagtgatgatttgtttaattacagtgattcctcctccctccatatccatgaggaatttgttccaggaaccaccatggatacttaaagtaataattactcaagtcctttatataaaatataatatttgcatataacctttacatcatctcagattacttataataactaatgcaacataaatgctatgtcaaaagttgtgatactgtgttgtttagaaaatagtgacaagaaaaaagtcaacacatgttcagtatagatgcaaccatcatttttcttatcttttccttagatattgtttaataagattagatttaagactaagtggtaaggaggatgggaagagagacagaggaacaatgtattaatgatagctttggtggtggttgttgttgaggtggccctatgtcacccaggctggagtgtggagatgcaatcatggttcactgcagcctcaaactcctggactttaagtgatcctccctcctcagcctcccaagttgttggtattacaagctacacccattttgcctagcaatgattggttttttttttttnnnnnnnnnnnnnnnnnnnnnnnnnnnnnnnnnnnnnnnnnnnnnnnnnnnnnnnnnnnnnnnnnnnnnnnnnnnnnnnnnnnnnnnnnnnnnnnnnnnnccattatgcctagcaatgataggttttttttttcaaagctaaatgtcatatttttaatattaaaatatcattactacttttttcgaaatattactgattacttagaacccagaagtctggaaaccattgaaaaaatgtattccaatagtctcgttcactgctaacattctctgatcatatgatttatccttctcttggcattctacatcctaatggcaatatgaaaatcaaagagcttaaggaaatgttgtggctgtatcaatcaggacagaataggctattctgcagtaataaaagaaactaaaatttttcagtggcttacaataaccaagtttctcatgttcaactaggatcaacaaaggcactcttattagtccatttgtaatgtcacaaaaacttcattttgacacatggtttagcaattgggaactccccaaagtaaaacattctttctgctcacatttcaaagccaaagcaaatcatgtgtacattctcaaattcaacaggatgagagtatttcatttgcagggaggatcaatgatatttctgaacaacagtacactgcatatatgagatcagaaataaaaactgtaacaggaaaaataaaagaattttcattagagtgaacatttgaaaaacaagaaatgcgagtttaaatatatatttttaaggaaaatacaatatatacagagcttctcacrttctacctcagtctcttacacctccatcctttcctttgatagcaagacattcaatttcttgcaagtttatatgatcatttctatgcatgttttcatgacttacttcatctaatgttcccataaacaacatacattgttattttacatagctacctttttctaagctttgaaaagtttcatgaaattgctcacatcttcttaaattttagatattcaaagattctggtatataaataccatattaattgctattttctaatttacaaaaaaattaaaataaaatttcttatgtaaaaatgtatatatatatattttaatcttactccatcacccaagctggagtgcaatggcgcaatctcagctcactgcaatctctacctctgggttcagatgattctcctacctcagcctcctaagtagatgggaccacaggcacgtgcaaccataaccagcaattttttttgtatttttagtagagacggggtctcaccttgttggccaagctggtctcaaacccctgacctcacgttgatccgcctgcgttggcctcccaaagtgctgggattacaagcatgagccactgcacctggcctttttctttcatgtctaattgacaccttttaaatggata

SEQ ID NO: 696809 - DNA, 639 bp, Homo sapiens
tattaaagagtgccttaaggctataatatcaagaccaaagaaaaaggtagtggagggaaaaatggccatttacttcatttctaaatttaaaaggagttctgctattgctggtatcaggagattaatatagctgtcagtgtgatcattctcagaaagctggcttatttccaactggaactgacatattcaagatataataatggtttctggcttcctaactaatttggtcttggctctattttttaaacagacattttttaaagaatagttttagatttacaggaaaattttaaagatagtaaagagagttctcatatattccacatccaatttcctctattattaatagcttacattagtatggtacatttcttataattaatgagccaatattgatacattattattatctaaagtctttatcagatttccttcatttgtctttccctaatgtctgtttcttttccacagcctagccaagatgccacattgcatttagttgtcatgtctccataggcttctcttggctgtgacwgtttctcaggctttccttatttttgatgactttgaaagttttgagagtactggttgaggatttaatagaacatgccccaattgggatttgtctgatgtttttct

SEQ ID NO: 696810 - DNA, 1980 bp, Homo sapiens
aaaataaaaataaacaaatgggattacattaaactgaaaaccatctgcaggctgggtatggtggctcatgcctataatcctagcattttgggaggtcaagactgcagtgagctgtgattataccattgcattccagcctgggtgacagagaggaaggaaggaaggaaggaagaaaggaaggaggaaagcttctgcacagcaaattaaactatcaacaaaatgaagagacaacctatggaatgggaaaaatatttgcaaaccatacatctggataagggattaatagccaaaatatattaggaactcatatgactctacagtaacaaaataaataatcccactaaaaatgggcaaagtatctgaataaacatatttcaaaagattatatacaaatggccatatgaatatgttttaaaatgctcaacatcactaatcatcagggaaacacaaattaaaaccactacgagatatcacctcatacctgttagaatgactattatcaaaaagaggaaagataacaagtattagaaaggatgtgggtaaaagggaactctgcacactgttgggaatgtaaattatacagccattacagaaaacagtataaagcttcctcaaaaattaaaaagagaaatatcatatgatttagtaatccgactcctaggtatatacccaaaggaaaatcagtatgttgaaaaaatgtctgcactcttgtgttcactgcaacattattcacaatagccaagatatggaatcaacctaaatgtcaatcagtggatgaatggatttttaaaatgtggtatatatacacaatagaacactattcagccttaaaaaaaaaaggaaggcctgtcatttgtgacaacatggatgaacctggaggatattattaaattaaataatccagacacagaaagacwcaaactacattatctcacttatatgtggaatctaaaaaagttaaactcatagaagcagcaagtagaatggtggttgccagaggccgagtgtctgtgagagggaggcgattggagagatgttaatcaaaggtcacaaagtttcagttaaacaggaggaataaattcaagaaatctattgtacaacatggtgaatatattatagttaatagcaatgtattgtatacttgagaattgctaagagagtagattttaagtgttctcatcacaaatagataagtgaggtgatgcatatgttaattagcttgatttaaccattccacaatgtatacatatttcaaaacataatgttctatgccataagtatatataattcttatttgtcaactaagtaagtaagtaaataagtagaaatggtcaaagagcagaagcagacaattcacaggagaaacaaagaatgaatgtggagaaaagaaaaaaaaaataaaagaaacaagacccgaaaagtaggtatactccttgctactggggtgatctggctctatgttaaatgttaattatggaattttttaaaaaatttattgaacactctctatttgtctggaactatattgaacaccctgccatgagtactatgctcatggtttttctttcatggggcttacattttactggggtttaagttttttaaaaagtaggtaaattagtttattagaaagtaataaatactcttgaaaactaaagtctggaaggagaatgggaaggaatgccgttttaaatagagtgatcagagaaggcctctgctgagaatggtaaggggaactgaaagagtcatatgggtttttggggtagaaacatttcaggagaggaaacagctagtgcaaagaccctgaggcaggagcatgcctagtatatgcgcagaacagaaatgaaacaggatgttcctggatgaaaaagaagaaagttataaagggtgaagtcagtaaaagtcatggcatgatgctgcaaggggtgggaagaaggtacaaatcatgttgaataagtaggccattgtgagggctttggc

SEQ ID NO: 696811 - DNA, 583 bp, Homo sapiens
gctatgaatttgttaagggcaggaatcayagcttttcatccagatagctgcagcactcatccaagtgtgtgatgaactcaagaaatgtttatcgaattgtttattaggttggtgcaaaagtaattgcagttttggccattaaaaagaggtaaaaacccagcactttgagaggctgaggcaggcagatcacgaggtcaagagatcgagaccatcctggtcaacatgatcgtagtagaaaccccgtctctactaaaaatacaaaaattagctgggcatggtggtgcatgcccctagtcccagctgctcgggaggctgaggcaggagaattgtctgaacccaggaggtggaggttgcagtgagccaagattgcaccactgcactccagcctggtgacagagccagaattcgtctcaaaaaaaaaaaaaaaaaaaaaaaaggtgaaaaccacaattacttttgcaccaacctataaaatgtagaataaaccaagatacaatgtttttgtctatggatagtattaggctggtgcaaaagtaattgtggtttttgccattacctttgcaccaacctaatatcagtgaga

SEQ ID NO: 696812 - DNA, 1424 bp, Homo sapiens
aaagtaataggttgcataaaccatackttaagtattatctagcagggtctaaggcagcatccataatgaaacaatatgctcaatacatacaacgaagcagtgagatataaatgttcacatcaagtggaataaataacaattataaatggccatatatcaattcaaattaagttttgcctccaaaggaatttgtgtgaaatttatgaaaaaactccagggttttagagtgttttgcattttgaaactggggttcacaggcttgtaatatttcaactttaagtgagaacattcaaattaagttgagagggaaaataacattaatattataaacaatatccacacattttacacaactaaaaataaaaaagctttaataattataaattaatcataagctataatattataatactaaatgaaaatgaatcagatttacataattcacggactggctttcttgaaaaattaactttgttcccgaattattccaacataacagggtaaaacatacacatttaatcagaatgtactaggtgctagggtaacaatacattggtcattctcaaaacctgcaaaggcatcacgaaagattgaataaattaacacacagcttaaacacaggggagatatcagagtttgcatctgtaacatacttcacagaggtattaatgaacaattaaaaattaaataaaatcccatattagttcataaaatcctctaatattctaaatctgagcccattacttagacaagttcaaagaaaattattattttcaacagcaagttcctcaaagatttatttccaaagaacactttactttgctcaacaggtactaaggcatttgaggagcaatatttaatctagtaacaccattatcaaaatatgtttaaggaaaactaacaccaataataaataaaagattaaatttagttatctataagatgtcaacacagacaatttagcatcataaaaactcaatcagatattggtatgacaaatcagactgatacaacctcatttaatattattttatttatagtttagtcatatccttcaaaagtgactgtgcttttagtaggaatttcagtactgcctacagatttctgtcagtatacattgtaacagccatgcatatttataaggatgtaatttcatctctggatttcagtgacactgataaaccattcaagcttcactcttggtttttaatgtcaccagaataagctgatggaattacagctttacatgtgccatcaaaagtcttatttcgtatacaataataaggctggaatctttaaagggcatcattcctactatctcaccatggaaaggtggatgcctagtttatttttttaaatcccataacttgcctttagtaatccattctaatgcccagtctacagtcatctctttagttatttca

SEQ ID NO: 696813 - DNA, 1424 bp, Homo sapiens
aaagtaataggttgcataaaccatacgttaagtattatctagcagggtctaaggcagcatccataatgaaacaatatgctcaatacatacaacgaagcagtgagatataaatgttcacatcaagtggaataaataacaattataaatggccatatatcaattcaaattaagttttgcctccaaaggaatttgtgtgaaatttatgaaaaaactccagggttttagagtgttttgcattttgaaactggggttcacaggcttgtaatatttcaactttaagtgagaacattcaaattaagttgagagggaaaataacattaatattataaacaatatccacacattttacacaactaaaaataaaaaagctttaataattataaattaatcataagctataatmttataatactaaatgaaaatgaatcagatttacataattcacggactggctttcttgaaaaattaactttgttcccgaattattccaacataacagggtaaaacatacacatttaatcagaatgtactaggtgctagggtaacaatacattggtcattctcaaaacctgcaaaggcatcacgaaagattgaataaattaacacacagcttaaacacaggggagatatcagagtttgcatctgtaacatacttcacagaggtattaatgaacaattaaaaattaaataaaatcccatattagttcataaaatcctctaatattctaaatctgagcccattacttagacaagttcaaagaaaattattattttcaacagcaagttcctcaaagatttatttccaaagaacactttactttgctcaacaggtactaaggcatttgaggagcaatatttaatctagtaacaccattatcaaaatatgtttaaggaaaactaacaccaataataaataaaagattaaatttagttatctataagatgtcaacacagacaatttagcatcataaaaactcaatcagatattggtatgacaaatcagactgatacaacctcatttaatattattttatttatagtttagtcatatccttcaaaagtgactgtgcttttagtaggaatttcagtactgcctacagatttctgtcagtatacattgtaacagccatgcatatttataaggatgtaatttcatctctggatttcagtgacactgataaaccattcaagcttcactcttggtttttaatgtcaccagaataagctgatggaattacagctttacatgtgccatcaaaagtcttatttcgtatacaataataaggctggaatctttaaagggcatcattcctactatctcaccatggaaaggtggatgcctagtttatttttttaaatcccataacttgcctttagtaatccattctaatgcccagtctacagtcatctctttagttatttca

SEQ ID NO: 696814 - DNA, 611 bp, Homo sapiens
ttgtgcttcttttacacattctgcattatttctatcataattcccaacatagcccactgtaattgttgtgtttgcgtgttttcctaccagactgtaagtcccacaaggcaatttgcctcactgtttgtaaatccaatgcttagcatggtgtctgtcacacagaataactcagtacacatggtaaacatgtctatatgttgagaaaataaagcaactctctcaaaccttctgtaggataaaaatcgtatctcataaaattttagctggtttgtttttctgctgcaagattgtttcagaagcatgttacattaacattgaaaactgtaaaactgctagggcctttccctrtggtatcttatttaatgttaaaagcagtcccaaaggatagggaggacattcttattatttccatttgaaaaatgacagactgatccagaggagaaaaatgactggcatgtggtgatacagatatttataggcttaatcaatccctcagtgttgagttccaattaagttcctctgtttgggccatatatgtaattgattgtatggcaattgatcaggtaatttttctaaaacagtcaataagacctctaaaattcaggatttac

SEQ ID NO: 696815 - DNA, 611 bp, Homo sapiens
ttgtgcttcttttacacattctgcattatttctatcataattcccaacatagcccactgtaattgttgtgtttgcgtgttttcctaccagactgtaagtcccacaaggcaatttgcctcactgtttgtaaatccaatgcttagcatggtgtctgtcacacagaataactcagtacacatggtaaacatgtctatatgttgagaaaataaagcaactctctcaaaccttctgtaggataaaaatcgtatctcataaaattttagctggtttgtttttctgctgcaagattgtttcagaagcatgttacattaacattgaaaactgtaaaactgctagggcctttccctatggtatcttatttaatgttaaaarcagtcccaaaggatagggaggacattcttattatttccatttgaaaaatgacagactgatccagaggagaaaaatgactggcatgtggtgatacagatatttataggcttaatcaatccctcagtgttgagttccaattaagttcctctgtttgggccatatatgtaattgattgtatggcaattgatcaggtaatttttctaaaacagtcaataagacctctaaaattcaggatttac

SEQ ID NO: 696816 - DNA, 646 bp, Homo sapiens
tatataaaatatccagaataggtaaatccatacagacaaagcaaattggtggttgctaggattgtggagaggaaggaatgcagagtgactgcttaatgattgggttttcatttgtggtaatgaaaatattttggaaatagaggtgatgggtgtacaacattataaatacactaaatgccactgaattgcacatattacaatgattagttttatatcatttaatttttgcatcaattaaagagaaatgtattctcgggctatacccaaggcaatttaaatcaaatgcytgggtggggaattctaagcctcatttttttaaaaatcatttcaccatgcaattctaaatgcacagccagagttaagaaccactttgactaacagaggtaagaaaaatgaatctttagatgacactcataggtgatgtaatgctgacctacaattaattgtaaatcacccccattcaggaatttctttcatatgggcaggtgttatatcaaaactaacattactacaggggaatttaaaaacaaaataatatgttaaaacttgtgctccatggcactgtggaattcatattgtgattcaaacactatgaacataaagcctgcttctgtactagtcaacaaatgaacttttctggcaaaca

SEQ ID NO: 696817 - DNA, 637 bp, Homo sapiens
ggttttactcatttttttgtacattaattatttagatatccatttttgaattatcctttttaattttaatgcatatccttgacttattactttctacctgaagaaggcaaagctcttataacagtttagcctcattttctgacctttgtgttattaygtattttacttgaatattttataaaccccacaagatattactgttactaatgttttagtcaatatttttatgtttatccacatatttatgattcctagtgttttcatttcttcctgtatttgcatggttccatctttgttcattcccatttagcctgaggaacttccttgcatgtttctcatagtgtgggattgctggcaagaaattctctcagtttttgtttgtctgaatgcaggtttatttcactttcaattttgatggatattttcactgggtattgaagtttatttcagcattttaaagataacattccagtttttctgacttctatcatttccattgagcaatcaagcataagcctattgttgattcagagtagcttttttctctagtagatatggacagaagagagaaaatattcatggaaaagtaaaaggcaatgttatttattatacccgattacttttcttctctaaaata

SEQ ID NO: 696818 - DNA, 599 bp, Homo sapiens
agccaccctgtccagctgacttaccctaattcttaaggatcattcacattgtagcttatgacagaatttccttcttttttaaggctgaattattccattgtatttatatcccacattgtctttattcaaccattgatggacatttaggttgtttgcaattcttggctattgtgaataatgctactatgaacacgggacagcaactatccctttgggatcctgttttcaattcttttggataaatacccagaagtgggattgctgcatcttatggtagctctatttttaattatttgagaagccttcatattgttttccatagcagcttgaccattttacattcccaccttagcgttcaagggttccaatttctccacatccttgccaacactcgttatttcttgttttcgtaagtgatattactgatkttattgaaaagattacagaaaattttgagttataagtagacaattttaatgtagagtataaagcttaggaaattgtgaggaattgaatatgaggcttcagatggactataattacatgtatgcactgccccgatttttttatacaaattatagaaatatctgcattgcttc

SEQ ID NO: 696819 - DNA, 1581 bp, Homo sapiens
tcattcatttttcaaaactcaattttactccactggtaatttatactgcatggtaaagaacaaataaaatgtgagcaaaaggctaattttaaaagtcaacacattttaaaaactgtgcatatataaagacagtaatgtaatagtaatactaaataagtaaaaagctcaataagcttaaaaggaattattgttaggaaatttatatgaaatttttagagtaaatatatagatccaactattatgttctgttagaaaaattagtatcaaaagaaatccctacctacaaagatgaatgagaaatgaagacaccagaaaaatccagattaaaaataaaaaaagcatgagtttgatgcatttatattaagaaaaaaaaaagtgttcctaaggatacattaaacatcacctatcaataaatttgtatgatttcaataaaatcaaaacattagtaatatttaataatagaattacctaaagagttttaatttcaagagcttttggaaactgcaaacaagagaaaaatccaaatattctgctcttgaygtaatgtggctacttccatctggactttatttcatcatgaaactaatttaatataaatctgtgtgtcatgaccatattaattcagaattacactcaggcctagagtaatatctgggctgatagccatttaacttgagcattcaattccctgtaagtttgagcacataaatctgattcataaaactcccgactccatatttaataacttaaaagtcatgctagctttctttgcatcttatcaacagggattatttagaacttgataaaaatatggaaattaaattacaaaaatctttaaaaattaaagaatgtggaaataattcattctacatttataccacaatattcatttttttattaacagatacttattgagaaagtattatacacaaaatattgaacctgtgggtgtagaaacacatatttgatataatctttgcactttggagagtgcaaattagtggttaagaatatttaaactctagcataaggtggaataaaattaataacttgaaaagatataatcaaatagtgtaagaagtgccaagaaaggaataagttaattagttaattagaattgagtataagttatttaataagaattaagatatttaatcctagcaggcaatttcttagtaaatactgtggtactacctgtggtgtggatggcacttatttttatttgtatcattctttcttctgtctaaaactgtgttcattctcacccttagaattaggatttatttttaaggttcaaaaatttatatttctatgcttacatttctcttctttaaaaaaaacagttattgagctgttcacaccgttcacatataaaatcaattataatggatttaattaattcacatataaaatccattcttttaaaatttacaatacagtgggcttagtacagccacagccttgtccaaccatcactactaattgcagaaaaatttcatgacacctaaaagttaccctgcaaccagtggcagtcactctctatccttcccttttcctggccccttgtaaaaattgggcatt

SEQ ID NO: 696820 - DNA, 1581 bp, Homo sapiens
tcattcatttttcaaaactcaattttactccactggtaatttatactgcatggtaaagaacaaataaaatgtgagcaaaaggctaattttaaaagtcaacacattttaaaaactgtgcatatataaagacagtaatgtaatagtaatactaaataagtaaaaagctcaataagcttaaaaggaattattgttaggaaatttatatgaaatttttagagtaaatatatagatccaactattatgttctgttagaaaaattagtatcaaaagaaatccctacctacaaagatgaatgagaaatgaagacaccagaaaaatccagattaaaaataaaaaaagcatgagtttgatgcatttatattaagaaaaaaaaaagtgttcctaaggatacattaaacatcacctatcaataaatttgtatgatttcaataaaatcaaaacattagtaatatttaataatagaattacctaaagagttttaatttcaagagcttttggaaactgcaaacaagagaaaaatccaaatattctgctcttgatgtaatgtggctacttccatctggactttatttcatcatgaaactaatttaatataaatctgtgtgtcatgaccatattaattcagaattacactcaggcctagagtaatatctgggctgatagccatttaacttgagcattcaattccctgtaagtttgagcacataaatctgattcataaaactcccgactccatatttaataacttaaaagtcatgctagctttctttgcatcttatcaacagggattatttagaacttgataaaaatatggaaattaaattacaaaaatctttaaaaattaaagaatgtggaaataattcattctacatttataccacaatattcatttttttattaacagatacttattgagaaagtattatacacaaaatattgaacctgtgggtgtagaaacacatatttgatataatctttgcactttrgagagtgcaaattagtggttaagaatatttaaactctagcataaggtggaataaaattaataacttgaaaagatataatcaaatagtgtaagaagtgccaagaaaggaataagttaattagttaattagaattgagtataagttatttaataagaattaagatatttaatcctagcaggcaatttcttagtaaatactgtggtactacctgtggtgtggatggcacttatttttatttgtatcattctttcttctgtctaaaactgtgttcattctcacccttagaattaggatttatttttaaggttcaaaaatttatatttctatgcttacatttctcttctttaaaaaaaacagttattgagctgttcacaccgttcacatataaaatcaattataatggatttaattaattcacatataaaatccattcttttaaaatttacaatacagtgggcttagtacagccacagccttgtccaaccatcactactaattgcagaaaaatttcatgacacctaaaagttaccctgcaaccagtggcagtcactctctatccttcccttttcctggccccttgtaaaaattgggcatt

SEQ ID NO: 696821 - DNA, 1002 bp, Homo sapiens
gcatattctaacttattccagtctgcccagtgatcccagggaaaggtaatccacagctgccattgcccacatggtctatctctccttgtcaacttcttcatatcctcaatctaaaattcatgctacagcaatagactagctttttacattatatatggtgtgatcatctaaatgattgctactagggaatatgaatatgaaaatatgcatatatacattggccactgataatcaattattacccaagtggtttatttatttaacaaatagctttattaagtcctactggtaattcaaattgaagtttgttgcacctggtcaagtgataaattacgcttatgttcactttttttgtcctcaagaataatgattactacactataggctccctaaaggaatagatagatcgtattttatactttattggtaacaaacacagcttgaagaacagaactgattatgaagtaggtactcaataaatacttgttcagtttactgatttgcttatgcatcttcttggtgttgacaatcaaataaattattagattaaaaatagaagtgagattagtaaatctaccaattcttttccctttagccataaaatgtcatggtgcaattaatctatattaggcagtagctcttaatgtgagcttcagaggaagttcctttaactccctgaaattttatttaaacattttttatacattaataggttcattttcctgaagaaaggatccatagctttcttcagtttcttggaaatacacagctccataaactgttagaaccactgacaccaagtatatctacctgcaccccaaatgtcagcaatgatgactaagaaagaaaaccggtcttgttttgcttagtataaactataacatttttttctctgattttttttaccttcctaaagatgtctgatctccagtcagaattaagttttcctaaatagtatgtggartaaggcaatgtttaaagacatggatacaaataggatga

SEQ ID NO: 696822 - DNA, 649 bp, Homo sapiens
gtcccagctactcaggaggctgaggcaggaggatttcttgagcccgggaggttgaggaggcagtgagccatgtttgtgccactacattccagcctgggaaaggagaccctgcctcaaaaaaataaataaatrtattaacttatgctctcatcaattaatttaagcagtgaggaatgatcagaaatggtagtggagtaagaccagaaggagcccctatctccagttcagtgatttttatactcaaagttctcacccaggaagttttcttcttgatgcagactgtgacatctgaaatttaaaacacgcattagaagctccaggctgttcccaccacccctttgctgcaaatagtatccatttagtcctcgctcatatcttacctcaatagattggaaatagaggaaaaatactttaatcccacttatgatctaagagacaaaataaaatgttctatgaagaaagaaggggggtgatttattaacaagtgactctgtgtagtagctatgcaaagtgttaaaagactaggaaaagtcattcctatttctggtgaaagaagataaggagaaatagatatttgccaaggctgatgtttccccaaatccttgccagcaaatcatggatcccagtatcgctcctctaactttaaatg

SEQ ID NO: 696823 - DNA, 649 bp, Homo sapiens
gtcccagctactcaggaggctgaggcaggaggatttcttgagcccgggaggttgaggaggcagtgagccatgtttgtgccactacattccagcctgggaaaggagaccctgcctcaaaaaaataaataaatgtattaacttatgctctcatcaattaatttaagcagtgaggaatgatcagaaatggtagtggagtaagaccagaaggagyccctatctccagttcagtgatttttatactcaaagttctcacccaggaagttttcttcttgatgcagactgtgacatctgaaatttaaaacacgcattagaagctccaggctgttcccaccacccctttgctgcaaatagtatccatttagtcctcgctcatatcttacctcaatagattggaaatagaggaaaaatactttaatcccacttatgatctaagagacaaaataaaatgttctatgaagaaagaaggggggtgatttattaacaagtgactctgtgtagtagctatgcaaagtgttaaaagactaggaaaagtcattcctatttctggtgaaagaagataaggagaaatagatatttgccaaggctgatgtttccccaaatccttgccagcaaatcatggatcccagtatcgctcctctaactttaaatg

SEQ ID NO: 696824 - DNA, 639 bp, Homo sapiens
ggtgggtggattgcttaaggtcaggagttccagaccagcctgaccaacatggtgaaactctgtctctactaaaaatacaaaaactaactgggcatgatggtgggtgcctgtaatcctakctactcaggaggctgaggcaggagaatcacttgaacccaggagggcagaggttgcagtgagcgagatcgtgccattgtactccagcctggacaacaaaagtgaaactccatctcaaaaaaaaaaatttataatggaaaaagaacaagaaatttcctccagaatcctgttggcttaaaatcctttgttccaggctccttgatttcatcagtgtgatgacttatgacttccaaggtggctgggacacatctacagtacacaatagtcccctacacatagaatccaaggatcagggtgaaatgcattatttcaactgtgtaagaaagaaaaacctcaaatcatatgcagaggggagatggggaagggattggggagaatcttggttgtatattaaggctttctctttggggaacaattgctagactttgttcatcaaatacaacaaactgtaggaaaagagagatcagactgtaactgtgtctacatagaaagaagtagacataagagactccattttgttct

SEQ ID NO: 696825 - DNA, 639 bp, Homo sapiens
ggtgggtggattgcttaaggtcaggagttccagaccagcctgaccaacatggtgaaactctgtctctactaaaaatacaaaaactaactgggcatgatggtgggtgcctgtaatcctagctactcaggaggctgaggcaggagaatcacttgaacccaggagggcagaggttgcagtgagcgagatcgtgccattgtactccagcctggacaacaaaagtgaaactccatctcaaaaaaaaaaatttataatggaaaaagaacaagaaatttcctccagaatcctgttggcttaaaatcctttgttccaggctccttgatttcatcagtgtgatgacttatgacttccaaggtggctgggacacatctacagtacacaatagtcccctacacatagaatccaaggatcagggtgaaatgcattatttcaactgtgtaagaaagaaaaacctcaaatcatatgcagaggggagatggggaagggattggggagaatcttggttgtatattaaggctttctctttggggaacaattgctagactttgttcatcaaatacaacaaactgtrggaaaagagagatcagactgtaactgtgtctacatagaaagaagtagacataagagactccattttgttct

SEQ ID NO: 696826 - DNA, 600 bp, Homo sapiens
gacttctcaaggtccttctgcaatgagaggaaatacctgctcataagcaagctgaagtcacacctggttctgtcctcaggtgcatcatgactaagtccaacatgctgttctgaagaagatgcaggtgaggctgcaaagaacagcaaagacaagagaggccagggtgcacggagacagccagggaacttctaggccctcacagctgagaaaagggacacacttacagaaagtgcccttttagaaatctgytttttagtcatgggaccagcgctaagtttgatagctagaatttgaatgcactagataccctagacctaggccttgttgctcagaaaaatttaggccaggaactgggtatcctgaaaaccagcttgatatacagacatgtcttgttttattgcacttcactttattgtgctttgcagatattgtgtttttcacagattgaaggtttgcagcaaccctgtgataagaaattctatcaatcagtgctgtttttccaacagcatgtgctcattttgtgtctctatgtcacattttggtaattctcacaatatttcaaatgttttcactactattatttctactatggtgatctat

SEQ ID NO: 696827 - DNA, 600 bp, Homo sapiens
gacttctcaaggtccttctgcaatgagaggaaatacctgctcataagcaagctgaagtcacacctggttctgtcctcaggtgcatcatgactaagtccaacatgctgttctgaagaagatgcaggtgaggctgcaaagaacagcaaagacaagagaggccagggtgcacggagacagccagggaacttctaggccctcacagctgagaaaagggacacacttacagaaagtgcccttttagaaatctgctttttagtcatgggaccagcgctaagtttgatagctagaatttgaatgcactagataccctagacctaggccttgttgctcagaaaaatttaggccaggaactgggtatcctgaaaaccagcttgatatacagacatgtcttgttttattgcacttcactttattgtgctttgcagatattgtgtttttcacagattgaaggtttgcagcaaccctgtrataagaaattctatcaatcagtgctgtttttccaacagcatgtgctcattttgtgtctctatgtcacattttggtaattctcacaatatttcaaatgttttcactactattatttctactatggtgatctat

SEQ ID NO: 696828 - DNA, 1576 bp, Homo sapiens
  misc_feature 1495: n = A,T,C or G
tgaattgctgcaatctcatgataaaacgtgaacaaatgatgggttgcttcttatggatgagcaaagaaagtagtttcttgagataaaatctactcttggtgaaaatgctgtgaacattgttgaaatgaccaccaaggatttagaatattatataaacttagttgataaagtagcagcagagtttgagagaactgactccaattttgagagaactgactccaattttgagagaagttctactgtgggtgaaatgttttcaagtagcattgcatactacacagaaatctttcatgaaaggaagtcaatttcaatttgatgtagcagactttattgttatcttaagaaactggtacagccaccccaacctttagcaaccaccatcagtcagcagccatcaacactgaggcaagatgctccaccagcaaaaagattatggctcactgaaggtgtagatagttcttaacattttttagcaataaaatattttaaaattaaggtatgtacactgtttgagacataatgctatttcacacttaatagactacagtagagtgtaaacataacttttatatgcaccaggaaaccaaaaaacttgtgtgactcattttattccaacatttgctttattgtggtggcctggaactgagcctgcaacatctttgaggtatgcctgtatatactggcatttatctctgagctagatcaattctctcattcatggcagtgcaccatttcctaatttagatgcatacattttgttgtctgggtcttggtgaggatggctagagggacatcataaaaaggatcagggacaaacactcaggtggctgatgggtctcaacatatgaagcaagaaactcctgcccttcgtgggctttgtgcattccttggattaagcatcccttgaggcaggtctcaaagtggagatagagaagtggaagatgctatctgagaggttccttaggtctctaaggaaattaatataattgttgatttttagaactgtaaaaacctatgagagattataaaatgatttgcttggctgggcgcggtggctaatgcctgtaatcccagcactttgggaggccgaggcatgtggatcatgaggtcaggagttcaagaccggcctggccaatatggtgaaaccccatctctactacagaacacaaaacattagccgggagtggtggcacrcgcctgtagtcctagctactcaggagactgaggcaggagaatcgcttggactcgggaggcagaggttgcggtgagccaagatcgtgccactgcactccagcctgggtgacagggtgagactctgtctcaaaaaaacaacaacaaaaaaattatttgctcaaattaaacaatgagccagaaaattttagtggttgagagcattctactggtagaggaaaattaaatataaaacttctgaatcaccgtggaagaggaaagaagggaaaaccagtgctgaaccgaagcaaggaaacatagagcncaaaagacaaagcataacaagatgacaaaacccaaatatattacatatgacagaaatactgacagataagcctcccttatc

SEQ ID NO: 696829 - DNA, 594 bp, Homo sapiens
agatgttcaattcacctgcatatgcagtggggtctgcgctacagagaagaactctgaaattatgagactcagagcttatatagaatggttgacatatgtggccctcctcccttccagagagaggagagaacctggaatgtaaacaagtcctccctgggaaggggactttcacaatcattgaaggtaaacaaatggctctgggggaaagaggaaagcagctctctatttttagtaaagcttgtctgcttcctttgcccagaatcctcaaactgtgcaggaactctgagaaatccagggtataattatctcccaacaataatccccaaggtctcttttagctctgatattctatgtcaaaatcccttaaccatccccaacctggcttcatgtcycctcacctagttctgcaagttacagtaactgcacctcaaagcaagaccaccctctgctgctcatcccagggcctcacccaacacaagggatcaatcccctctctgatgtcctatgggtcatagacttaactccatccaattgggtaaatccattgagtcattaatctttcctgtttgtgtcttcccattcccaaaccacaga

SEQ ID NO: 696830 - DNA, 884 bp, Homo sapiens
aaggataactgtacaaaaaataaaatcaaaccctagctctttggagtctgaacttattataaaacacactagggaatggaaagagctttgcaaacaaaactctgacaccacccagcgctttgtcaggtcagaggaacatcaaggcaagcaggtgtcccaggtgccacgagagatggaggacagcaatggaagcagatcgtgtcctacagactatccctggttcacattcctcactgcccaatccatttccccatgaaactctaacttactggattctactccaggccccaaagcgccctgttatgttcacctggggagggtggacactggtggagtgagcagctctgccctaggctgcaggtccccattactggctgcagccaatactcactcctgagcagaggagccagcggcactcctgggctcacctctccagccaccscagccccacctaaattccccgtggttgtcaccagctattcttccagcattttgataacaacgcattattttattcagacaaaaaggccaaactttcatgcatgcatgccaatgtacttataagggtacactggatagtcactgaatacagttgtgaatcacattttttcttcatcatctcaaagaagccaaatggtgaagccatccaaatctccaaaggggaaacattggccaatccttaaatggcatttgtcagatcaatttctatcccctccagactgtcagcgccaccaccacctccacgcgtttctgtgtgagcactttccacctctggtgagtttcaagtggctgcatgtcagagtgatcctcacacctgggcttcagtagactgcatcctgtgccagagacccctgtgtctctgggctctgcctgggagctgcatg

SEQ ID NO: 696831 - DNA, 2162 bp, Homo sapiens
cagacaaggaagcgggcccacccagatctgcgggcaccaaagcctggctctcaataactgcagatgaggaggggcgggtgcagagctgaccaggccacagccacccagcaagctgtctcttcctcatagagatatgatgaacatgcaatggtgtcaagatgacctctttctgtgcccctgattactgaataaagaggggaaatggccgggtgaggtggctcacgcctgcaatccccagcattttgggaggccaaggtgggttgatcatttgaggtcaggagttcgaggccagcctkgccaacatggtgaaaccttgcctctactaaaaatacagaaattagctgggcatggtggcaggtgcctgtagtcctaactacttgggagggtgaggcaggagaatctcttaaacccgggagggggaggttgcagtgagctgagattacgccactgcactccagcctgggtgacagagcaagaccctgtcacaaaaaaaaaaaagaggggaaactgaaattcccaaaatggcccccacatcatcagcccagtgaccccaggaacccccagtcagtgccaccacatttgcccactttccgacctcaagtgtgtaatggacgtggcacaaatgtcctcccccactcccacagctccttggtgacttgtagaaggaagtcccttgctccctctcagctccctgtcctgcagcctcctctcccctgacagttccacagcccctccggctgcaagtctttgcccaaatgccaccttctctgtggggcctcctttgacagtcagttcaacactggtgcctccctgggatcgcgtctgatgcatgagatgcccagtaagacgtgtttagtgacagagagtggctcggagagtggcgctccactgcaggacataaggcccacccctcaaggttccttaacatgcgaccactctgtagtaccaagggttctgtggcctctctggtataaacggcttgaaaatcccatgcaggataagtgcgtagacaggcttcccatgacacggcaggtccattccaacaccgcgaggagaatccacttcagccccatcctgcacccgcttttccccgcgacggggcaagcttccaggagccctcctcctcacggtgatctcttacatcattcacggtagcaagtctagtgctttatatgtgtgaaaatttaagagctaactcattttaccagaagcccaagaggctgtccggtccacccaggtggggaccggagcccaccccgatctcaggtccaatatttgctcacgttcaggcagcaaaaaacatccttccactatgttccggtgagccagcagttcaccactgaagaaataaaaacaacaacaacaacagatccagccagttgaaacacttgttgatgctaagtgccactttagtgtgtgccgttcccggaaggctcagaacaaagcaagctgtccgttgaaacaaagctcccctgcaacagcggagatgcaaaaccagggactctatttccctgctgatatgccgggcagaatttggcccgcatcaccaaagtacggtcagctcacctgtgtaggggtggctcaggaaggaatgactgaagggtatacaaattactctgtggcttcagggggttgagtctctaattcaaggtcttgctgctaattctaaagtcatgcttggcaaagcacatcactctagagtttctacttttgcttcctgcattcccttgacatttcacatgccgctgcaacagaggggtggctggtctcctttttgcttgaatagctggagtccatacgctgggctggctttgacgctgcgcctggctctctcggctgcctacgccaccatgtggagaccatgtaaacacacaaaatgccatgcggccagcccgtgcctggaacacccaccaggcagcagagctcctccaagacagtcttcagcaggtggctgaacagcaacaaacagaaaagggacgtcctaggctgtatcagggaagggatctgatgtgaccatccacccaatgtctccaccagatcaaatccaaactgctgatatgcggggtagaatttggcccgcatcacacaaagtagagtcagcttacctggacccagggggctggcctcggaggtactgaagagcacagagctgcttatccagg

SEQ ID NO: 696832 - DNA, 2162 bp, Homo sapiens
cagacaaggaagcgggcccacccagatctgcgggcaccaaagcctggctctcaataactgcagatgaggaggggcgggtgcagagctgaccaggccacagccacccagcaagctgtctcttcctcatagagatatgatgaacatgcaatggtgtcaagatgacctctttctgtgcccctgattactgaataaagaggggaaatggccgggtgaggtggctcacgcctgcaatccccagcattttgggaggccaaggtgggttgatcatttgaggtcaggagttcgaggccagccttgccaacatggtgaaaccttgcctctactaaaaatacagaaattagctgggcatggtggcaggtgcctgtagtcctaactacttgggagggtgaggcaggagaatcwcttaaacccgggagggggaggttgcagtgagctgagattacgccactgcactccagcctgggtgacagagcaagaccctgtcacaaaaaaaaaaaagaggggaaactgaaattcccaaaatggcccccacatcatcagcccagtgaccccaggaacccccagtcagtgccaccacatttgcccactttccgacctcaagtgtgtaatggacgtggcacaaatgtcctcccccactcccacagctccttggtgacttgtagaaggaagtcccttgctccctctcagctccctgtcctgcagcctcctctcccctgacagttccacagcccctccggctgcaagtctttgcccaaatgccaccttctctgtggggcctcctttgacagtcagttcaacactggtgcctccctgggatcgcgtctgatgcatgagatgcccagtaagacgtgtttagtgacagagagtggctcggagagtggcgctccactgcaggacataaggcccacccctcaaggttccttaacatgcgaccactctgtagtaccaagggttctgtggcctctctggtataaacggcttgaaaatcccatgcaggataagtgcgtagacaggcttcccatgacacggcaggtccattccaacaccgcgaggagaatccacttcagccccatcctgcacccgcttttccccgcgacggggcaagcttccaggagccctcctcctcacggtgatctcttacatcattcacggtagcaagtctagtgctttatatgtgtgaaaatttaagagctaactcattttaccagaagcccaagaggctgtccggtccacccaggtggggaccggagcccaccccgatctcaggtccaatatttgctcacgttcaggcagcaaaaaacatccttccactatgttccggtgagccagcagttcaccactgaagaaataaaaacaacaacaacaacagatccagccagttgaaacacttgttgatgctaagtgccactttagtgtgtgccgttcccggaaggctcagaacaaagcaagctgtccgttgaaacaaagctcccctgcaacagcggagatgcaaaaccagggactctatttccctgctgatatgccgggcagaatttggcccgcatcaccaaagtacggtcagctcacctgtgtaggggtggctcaggaaggaatgactgaagggtatacaaattactctgtggcttcagggggttgagtctctaattcaaggtcttgctgctaattctaaagtcatgcttggcaaagcacatcactctagagtttctacttttgcttcctgcattcccttgacatttcacatgccgctgcaacagaggggtggctggtctcctttttgcttgaatagctggagtccatacgctgggctggctttgacgctgcgcctggctctctcggctgcctacgccaccatgtggagaccatgtaaacacacaaaatgccatgcggccagcccgtgcctggaacacccaccaggcagcagagctcctccaagacagtcttcagcaggtggctgaacagcaacaaacagaaaagggacgtcctaggctgtatcagggaagggatctgatgtgaccatccacccaatgtctccaccagatcaaatccaaactgctgatatgcggggtagaatttggcccgcatcacacaaagtagagtcagcttacctggacccagggggctggcctcggaggtactgaagagcacagagctgcttatccagg

SEQ ID NO: 696833 - DNA, 2162 bp, Homo sapiens
cagacaaggaagcgggcccacccagatctgcgggcaccaaagcctggctctcaataactgcagatgaggaggggcgggtgcagagctgaccaggccacagccacccagcaagctgtctcttcctcatagagatatgatgaacatgcaatggtgtcaagatgacctctttctgtgcccctgattactgaataaagaggggaaatggccgggtgaggtggctcacgcctgcaatccccagcattttgggaggccaaggtgggttgatcatttgaggtcaggagttcgaggccagccttgccaacatggtgaaaccttgcctctactaaaaatacagaaattagctgggcatggtggcaggtgcctgtagtcctaactacttgggagggtgaggcaggagaatctcttaaacccgggagggggaggttgcagtgagctgagattacgccactgcactccagcctgggtgacagagcaagaycctgtcacaaaaaaaaaaaagaggggaaactgaaattcccaaaatggcccccacatcatcagcccagtgaccccaggaacccccagtcagtgccaccacatttgcccactttccgacctcaagtgtgtaatggacgtggcacaaatgtcctcccccactcccacagctccttggtgacttgtagaaggaagtcccttgctccctctcagctccctgtcctgcagcctcctctcccctgacagttccacagcccctccggctgcaagtctttgcccaaatgccaccttctctgtggggcctcctttgacagtcagttcaacactggtgcctccctgggatcgcgtctgatgcatgagatgcccagtaagacgtgtttagtgacagagagtggctcggagagtggcgctccactgcaggacataaggcccacccctcaaggttccttaacatgcgaccactctgtagtaccaagggttctgtggcctctctggtataaacggcttgaaaatcccatgcaggataagtgcgtagacaggcttcccatgacacggcaggtccattccaacaccgcgaggagaatccacttcagccccatcctgcacccgcttttccccgcgacggggcaagcttccaggagccctcctcctcacggtgatctcttacatcattcacggtagcaagtctagtgctttatatgtgtgaaaatttaagagctaactcattttaccagaagcccaagaggctgtccggtccacccaggtggggaccggagcccaccccgatctcaggtccaatatttgctcacgttcaggcagcaaaaaacatccttccactatgttccggtgagccagcagttcaccactgaagaaataaaaacaacaacaacaacagatccagccagttgaaacacttgttgatgctaagtgccactttagtgtgtgccgttcccggaaggctcagaacaaagcaagctgtccgttgaaacaaagctcccctgcaacagcggagatgcaaaaccagggactctatttccctgctgatatgccgggcagaatttggcccgcatcaccaaagtacggtcagctcacctgtgtaggggtggctcaggaaggaatgactgaagggtatacaaattactctgtggcttcagggggttgagtctctaattcaaggtcttgctgctaattctaaagtcatgcttggcaaagcacatcactctagagtttctacttttgcttcctgcattcccttgacatttcacatgccgctgcaacagaggggtggctggtctcctttttgcttgaatagctggagtccatacgctgggctggctttgacgctgcgcctggctctctcggctgcctacgccaccatgtggagaccatgtaaacacacaaaatgccatgcggccagcccgtgcctggaacacccaccaggcagcagagctcctccaagacagtcttcagcaggtggctgaacagcaacaaacagaaaagggacgtcctaggctgtatcagggaagggatctgatgtgaccatccacccaatgtctccaccagatcaaatccaaactgctgatatgcggggtagaatttggcccgcatcacacaaagtagagtcagcttacctggacccagggggctggcctcggaggtactgaagagcacagagctgcttatccagg

SEQ ID NO: 696834 - DNA, 2162 bp, Homo sapiens
cagacaaggaagcgggcccacccagatctgcgggcaccaaagcctggctctcaataactgcagatgaggaggggcgggtgcagagctgaccaggccacagccacccagcaagctgtctcttcctcatagagatatgatgaacatgcaatggtgtcaagatgacctctttctgtgcccctgattactgaataaagaggggaaatggccgggtgaggtggctcacgcctgcaatccccagcattttgggaggccaaggtgggttgatcatttgaggtcaggagttcgaggccagccttgccaacatggtgaaaccttgcctctactaaaaatacagaaattagctgggcatggtggcaggtgcctgtagtcctaactacttgggagggtgaggcaggagaatctcttaaacccgggagggggaggttgcagtgagctgagattacgccactgcactccagcctgggtgacagagcaagaccctgtcacaaaaaaaaaaaagagggraaactgaaattcccaaaatggcccccacatcatcagcccagtgaccccaggaacccccagtcagtgccaccacatttgcccactttccgacctcaagtgtgtaatggacgtggcacaaatgtcctcccccactcccacagctccttggtgacttgtagaaggaagtcccttgctccctctcagctccctgtcctgcagcctcctctcccctgacagttccacagcccctccggctgcaagtctttgcccaaatgccaccttctctgtggggcctcctttgacagtcagttcaacactggtgcctccctgggatcgcgtctgatgcatgagatgcccagtaagacgtgtttagtgacagagagtggctcggagagtggcgctccactgcaggacataaggcccacccctcaaggttccttaacatgcgaccactctgtagtaccaagggttctgtggcctctctggtataaacggcttgaaaatcccatgcaggataagtgcgtagacaggcttcccatgacacggcaggtccattccaacaccgcgaggagaatccacttcagccccatcctgcacccgcttttccccgcgacggggcaagcttccaggagccctcctcctcacggtgatctcttacatcattcacggtagcaagtctagtgctttatatgtgtgaaaatttaagagctaactcattttaccagaagcccaagaggctgtccggtccacccaggtggggaccggagcccaccccgatctcaggtccaatatttgctcacgttcaggcagcaaaaaacatccttccactatgttccggtgagccagcagttcaccactgaagaaataaaaacaacaacaacaacagatccagccagttgaaacacttgttgatgctaagtgccactttagtgtgtgccgttcccggaaggctcagaacaaagcaagctgtccgttgaaacaaagctcccctgcaacagcggagatgcaaaaccagggactctatttccctgctgatatgccgggcagaatttggcccgcatcaccaaagtacggtcagctcacctgtgtaggggtggctcaggaaggaatgactgaagggtatacaaattactctgtggcttcagggggttgagtctctaattcaaggtcttgctgctaattctaaagtcatgcttggcaaagcacatcactctagagtttctacttttgcttcctgcattcccttgacatttcacatgccgctgcaacagaggggtggctggtctcctttttgcttgaatagctggagtccatacgctgggctggctttgacgctgcgcctggctctctcggctgcctacgccaccatgtggagaccatgtaaacacacaaaatgccatgcggccagcccgtgcctggaacacccaccaggcagcagagctcctccaagacagtcttcagcaggtggctgaacagcaacaaacagaaaagggacgtcctaggctgtatcagggaagggatctgatgtgaccatccacccaatgtctccaccagatcaaatccaaactgctgatatgcggggtagaatttggcccgcatcacacaaagtagagtcagcttacctggacccagggggctggcctcggaggtactgaagagcacagagctgcttatccagg

SEQ ID NO: 696835 - DNA, 1342 bp, Homo sapiens
gaccagcatttagcatgaccagcaaatagcaaaataaggcatatttgtgatagtttgtccctgaattgcaaattgtataatgaaaattgctcatgcaggaatcagcgtgaaaagctcagcctaggatatccggtaaaggatcttaggttggacgcagtggctcatgcctgtaatcccaacactttgggagaccaaggcaggaggattgcttgaagccaagagttcaagaccagcttgtgtaacaaacaaagaatccccaccctatctctacaaaagattttttaaaattagccaggtgtggtggcatgcacctgtagtcccagttacttgagaggctgagatgggaggatcagagaatcccaggagttcaaggttgcagtgggctacgatcaccagtgcactccagcctgggcattacagcaagaccctgtctcaaaaaaaaaaaaaaaaaaagaaagaaaaacaaaaaggatcttggttctggacacccaaagagagatggcagagagataaattctgagcagtgcgtacgggtcatgttgtctttgtttctgtaatcttccatcctcacaaatgaggcattacaatcatatccttgcctagagcacatccagctatgagaggagaaaactctgcttagttcctgctgccatacagcttcttgtatttttttttttttacacttaaggcagatggggtattgagttggaaaaaaagaaaaaagattatgtgcctcacactaaattccaatttttgtcctcagggtctctctttctatacaaaagcataagggttttgttgggtttgggtgaggatcactttcctgaaggggaacatttaatccctagctgtgtgtgtatttcacyatcgacttgttggacaatacgttcctgagactgtaaaatagtctgtccccttgggacaccagttgtctccagatgggaagatttgaccttcatttcagcagggaattggaagaaatgtcattttcttgtggtctgttaaacaatgtgacatcttgttttgcattggccttcggctccaatccatcccatcctcctttaaatcattcactcttgaagatattgccttagaccttttgcttttccttctcaaattggtggtggataatgatactggaatgttgtcaaattccttctaggaataatatattcgtttttgacaattgaaagggtctcagtcctaacccaaagatcctgtacaatgaagcagcggctctctgaaagctcgcgcacccctgcaggaagaccatgcctctctggaaagcagctactctggtttaatcaggaataagcctgatgatagaagaatagaactgaag

SEQ ID NO: 696836 - DNA, 1342 bp, Homo sapiens
gaccagcatttagcatgaccagcaaatagcaaaataaggcatatttgtgatagtttgtccctgaattgcaaattgtataatgaaaattgctcatgcaggaatcagcgtgaaaagctcagcctaggatatccggtaaaggatcttaggttggacgcagtggctcatgcctgtaatcccaacactttgggagaccaaggcaggaggattgcttgaagccaagagttcaagaccagcttgtgtaacaaacaaagaatccccaccctatctctacaaaagattttttaaaattagccaggtgtggtggcatgcacctgtagtcccagttacttgagaggctgagatgggaggatcagagaatcccaggagttcaaggttgcagtgggctacgatcaccagtgcactccagcctgggcattacagcaagaccctgtctcaaaaaaaaaaaaaaaaaaagaaagaaaaacaaaaaggatcttggttctggacacccaaagagagatggcagagagataaattctgagcagtgcgtacgggtcatgttgtctttgtttctgtaatcttccatcctcacaaatgaggcattacaatcatatccttgcctagagcacatccagctatgagaggagaaaactctgcttagttcctgctgccatacagcttcttgtatttttttttttttacacttaaggcagatggggtattgagttggaaaaaaagaaaaaagattatgtgcctcacactaaattccaatttttgtcctcagggtctctctttctatacaaaagcataagggttttgttgggtttgggtgaggatcactttcctgaaggggaacatttaatccctagctgtgtgtgtatttcaccatcgacttgttggacaatacgttcctgagactgtaaaatagtctgtccccttgggacaccagttgtctccagatgggaagatttgaccttcatttcagcagggaattggaagaaatgtcattttcttgtggtctgttaaacaatgtgacatcttgttttgcattggccttcggctccaatccatcccaycctcctttaaatcattcactcttgaagatattgccttagaccttttgcttttccttctcaaattggtggtggataatgatactggaatgttgtcaaattccttctaggaataatatattcgtttttgacaattgaaagggtctcagtcctaacccaaagatcctgtacaatgaagcagcggctctctgaaagctcgcgcacccctgcaggaagaccatgcctctctggaaagcagctactctggtttaatcaggaataagcctgatgatagaagaatagaactgaag

SEQ ID NO: 696837 - DNA, 667 bp, Homo sapiens
cctgtaatcccagctatttgggaggctgaggcacaagaatcgcttgaacccrggaggcagaggttgcagtgagctgagattgcaccactgcactccagcctggacaatagagcgagactccatctcaaaaacaaaaacaaaaacaaaaataaaataaaataatggttcttaaagtggggtccccaggccagaataatcagcataacctaagaacttgttacgaaggcatattttcagcccctcccaaggtctacagagtcagaaactcagggtgggagccagcatcttccaggcattttggatgcatactaaaattggagatccactggcataaacaacctgttatcttggatcttaggagaagacaaatatttatatattagtgtacatgaacatgagtaatctcattcaatcagtacaaaacaatttataaaacagaaattatcttagtgtatattattatttcattataataagttcatacaaatcttgatactatgaaaactaaaaatattcccatttcatatccatgaacacaaaatatttagaaaaagactgaaaagttacctgtcttaacactgtgaaaaaacaatttgtaagaaacaaaggtaacatacataacagattcctacttaagcctattatgtaacaatttttaaaaaactaa

SEQ ID NO: 696838 - DNA, 667 bp, Homo sapiens
cctgtaatcccagctatttgggaggctgaggcacaagaatcgcttgaacccaggaggcagaggttgcagtgagctgagattgcaccactgcactccagcctggacaatagagcgagactccatctcaaaaacaaaaacaaaaacaaaaataaaataaaataatggttcttaaagtggggtccccaggccagaataatcagcataacctaagaacttgtyacgaaggcatattttcagcccctcccaaggtctacagagtcagaaactcagggtgggagccagcatcttccaggcattttggatgcatactaaaattggagatccactggcataaacaacctgttatcttggatcttaggagaagacaaatatttatatattagtgtacatgaacatgagtaatctcattcaatcagtacaaaacaatttataaaacagaaattatcttagtgtatattattatttcattataataagttcatacaaatcttgatactatgaaaactaaaaatattcccatttcatatccatgaacacaaaatatttagaaaaagactgaaaagttacctgtcttaacactgtgaaaaaacaatttgtaagaaacaaaggtaacatacataacagattcctacttaagcctattatgtaacaatttttaaaaaactaa

SEQ ID NO: 696839 - DNA, 667 bp, Homo sapiens
cctgtaatcccagctatttgggaggctgaggcacaagaatcgcttgaacccaggaggcagaggttgcagtgagctgagattgcaccactgcactccagcctggacaatagagcgagactccatctcaaaaacaaaaacaaaaacaaaaataaaataaaataatggttcttaaagtggggtccccaggccagaataatcagcataacctaagaacttgttacgaaggcatattttcagcccctcccaaggtctacagagtcagaaactcagggtgggagccagcatcttccaggcattttggatgcatactaaaattggagatccactggcataaacaacctgttatcttggatcttaggagaagacaaatatttatatattagtgtacatgaacatgagtaatctcattcaatcagtacaaaacaatttataaaacagaaattatcttagtgtatattattatttcattataataagttcatacaaatcttgatactatgaaaactaaaaatattcccatttcatatccatgaacacaaaatatttagaaaaagactgaaaagttacctgwcttaacactgtgaaaaaacaatttgtaagaaacaaaggtaacatacataacagattcctacttaagcctattatgtaacaatttttaaaaaactaa

SEQ ID NO: 696840 - DNA, 583 bp, Homo sapiens
gtgagttcaaacatattgttaatgtaaagataaccaggaaaatagaaattggacatgtaactttcaaatcactagaaagtatcaaaggaaactttgataagacagcaagggagcwaaagaagctagaatactgcatttcatctgcttttaagaaaaacaaaaagaagttagaatatatagcaaagagataattttccaggaaactgtagactcaagagcacagcagatttgcatagcataataaccaagaaagaaaccaaaaatgttaaaaaatcatgaggaaaagaaaagaaagacaatagaccctcatggtttaggagcaatgtctctctattcatcaaaggtttaattaaagcctatgttatctgtgcaattatagaagacagaaaaattggaatgttctccagttaattttatgaggttaccactaccttaaagttaaaaattaacaagaacataatagatgtgaacaaataaagacaaatattgtttataaatatagttgtaaaaatcctactaaaacattatcacattaaacccaatgctatgtaaaccccaaagatgaatgatttccaagaattca

SEQ ID NO: 696841 - DNA, 587 bp, Homo sapiens
ggtgactggtgaagagacatgcccgcactttcttttattacaagccttctgagggcatgtaagagaagcccaggacagtctgccagattggcttctcccatcctgcacaggaacaggaactgccgggatcaaccagcccatggtgaggctgcagcacatggactcagaagccatactgatggggcyaagaggccaggaggccactctgactaagttttcattgtctcctagagtgggtaggattgtgtcctcccaaaagttatattcaagtcctaatacccctatacctgttatcttatttgaaaatagggtctttgctgatgtaatcaagttaagatgaggtcatactagattagtgtgaccctaatccaagtccttataaggaccggtgtccttataaggaaagagaaatttggacatagatatagaaggctcaggaaagaaggctgtatgaagacagaggcatagattgccatgaatcagctacaagccaagggacgccaaggattgccggcaaccaccggaaacaaggagagaggcatggaacacattcctccttagagcctccggaaggaaccagccctgtt

SEQ ID NO: 696842 - DNA, 1495 bp, Homo sapiens
ctaactcagaagagccactcttgggttacagaatttaaacaagaattaaatcaagaattaaaaaaaaaaaacagctttaataatgtatcatccttatagaggaggaagtgattctgcaaatatttgaaacgttaagctgaaaaaccatgaatcttgtggtatgtggtcttataaacaaaacaaacaaaaaccccaaaatactctgactatagaatttccattgaggtgagagaaagtcagactggggaaagggtaaagctgaaaagtcatattgatgttcattctttgccaaatgcaccactcccttcctgttgtagcttcctaatgcagccagatgatcataatatcttccaacaagatctaaactaatcccatgctgaccatcgttccattatttccttacataaatacaaggatataggaaagagcaaatattttatgcaaggtaggttatgtggatcaagtaggaaaaaaggaacaaatgcatatgcttgaaaaataggccttttgtgccaattagaccccaattgttgctgtagaaactgtcctatattttataaaatatgagttaaagagtagaaaattgaaaatggagtgctgagtcatttaatatatttcatctggaaactttcaccaaaatttgagagtttttttgtttttttgttttttttttttcccacactctcatagcttttggagatttagctgtagcaggtcatgggctaatttatgtaaatggaatttgtactcatacaaaaaaatgctttttgctttttaatagctgatcagaagagtactcttattatgtgtaaaagcatgagttacccattgattacaaagatactgaatacttattcacttacgatgccaatatttaaatgttaattcatttaaccaataaatatataaataacattttatgtgcatggcatatgaagtattataagcacattcagagcaaggtattaattattagcatgtcttttacagcgtagtactctaggatgtccaatgaactgagaaccccatagrtcaatgattctaatcccagctctctcaccttgagagtcacttaatttatttaaactttggtgttattaaagaactaacataagcatagtaaagggtttccaatttccccccttgccttctatgtgccttttatttggggtggggtgggagggcagctagccacctctccagccccataaattttgaccagcctataaacagctgtcagaaaataattttcgggtggtgtttgagattgtgctaataacctcaggcaaggggcatggaaatgggaaaggggcccaacctaaatttccattaaagttgaaaactgatgcctaagcccaaactacgaggactttttcctatcacagaagtcagcaaactatatagcctgtgggccaaagacctgcaccaggttttgtacatctcagaattgagaatggtttttatacttttaaatggatggggaaaaaattaaaaa

SEQ ID NO: 696843 - DNA, 615 bp, Homo sapiens
atagattcctgtctgacactaactatggtaggtgatacctcagtacctatccaaaataccaaaacactgcacctttctaatgcctggaaaatataaagtcttcttcttccctgtgttacattactattggtgccccgtaccaacccctktactccaaactccagctatagaaaacttgaccacttgatgaaaaccaacatcgtttaacaaacctcctacttcaaaatcttcatcttatctctaatgtacgtcaaatatagtctacaaggttctctggttataccatttgttcctacatcaagtaacaaaacgttttattttgccttctgactattctgtccaagtgtctgaaattgtctaaagttgatgctctctctagagcatatatccatgcctttcataaatgtctacttttgggctgtaatgttgatagatgccatgacttcttttacagttctgaagctgttcatgattttacacaatcatataataagaattccttgcctactattgaaaaaaatctctctggaatattattttaatgctactttatgacttacatcatttacaacttccttctgccgtaactattataaaattcattgctgaccaaaa

SEQ ID NO: 696844 - DNA, 1051 bp, Homo sapiens
ggtttcaccatgttttccaggctggtcttcaacttctggcctcaagtgatctgccctcctctgccttccaaagtgctgggattacaggcgtgagccaccacacctagcctgaaagtttatattttaaactttttatcaccccccaaagatgcccaattttatcatgttaccatttgtacatgttttaacctttaccggaaatagtaacatgcactaaatgacagtgaattactatacactatacgacagtgaacattttaaaatcactgaagatctctgcttagatcgaaatatatcatagatttttacataataactagccaaaaatatcagaattgtgaaatgtaatcacaaaataattaaccttcattctcaagaactctttctatatttttgtatttttgtgtactgtttcactacatttaaaaagagttaaaatgaataaaaagtagtcatgcatacctcatattttcagctgaatcttctggcattggagcaacagtttgtacagctggaaggtttttgctagtagcaccattcacaaaactagaagaggaggaagaggaggaggaccctgaatccacggcacctgttcccaaaataataatttttagccttaaacataaatttatttaaaaaaattttaattacaccattactatctgattttgaaagaattactcatcagattttcaaaaccgaatttgacaattaatcatttggccattagtaagtatgctaatgaacataattttatataacagatgttgcattgaaatctaattgatttacttacattaatctaacaaaactacatactacaaatggggtataaataaaaaacatcaagaaatgaaaaaatttttcgataaaatgatgctgataaaacaatgcaaayttaggggtgaaaaacttatctttttatagctacattgtaatatttttggttttcatcatttaagacatagtttggagtgaactatctgagcgtaaatttgtggcactgaagcatctaatgctccttttgataagatcactgcttaagaagggc

SEQ ID NO: 696845 - DNA, 619 bp, Homo sapiens
ccttcctccaaaaatcctgttttaccatgatttatgaagaatttcaatatgtcttacatattaaattactgaaattgccattttccaaactctctaaataaggaatatcatgaaagaaacatacagcaccttgttagtatagcactaaaaattatattaagctttggcacttcaaataataatataagcaaactaaatcactgtaatttaaaatgaaacataaaaaagctatatgtaactaacttacacattttgtttatattaaatccataaatgcaaaattaattaaatatcttaactccaaragggaaaaaaatacacaaaaagattttaaatcctcattaaagttcattttaaacaaaaatactgcaatgaattatttgcgattatttatatatgatttattttgtttgcttgctacactaagtgtatgaaaagaatacaacttcaggaattaaatattattactaacttatacgcccataagagacaaaatgaaaattaagagccaagaaaatcttctaattgatgttttgactacgctgtgtcaacatgtgggtctctcttgagtttatcctacttggagtgcattgagctttttagacatatatattaatga

SEQ ID NO: 696846 - DNA, 619 bp, Homo sapiens
ccttcctccaaaaatcctgttttaccatgatttatgaagaatttcaatatgtcttacatattaaattactgaaattgccattttccaaactctctaaataaggaatatcatgaaagaaacatacagcaccttgttagtatagcactaaaaattatattaagctttggcacttcaaataataatataagcaaactaaatcactgtaatttaaaatgaaacataaaaaagctatatgtaactaacttacacattttgtttatattaaatccataaatgcaaaattaattaaatatcttaactccaagrgggaaaaaaatacacaaaaagattttaaatcctcattaaagttcattttaaacaaaaatactgcaatgaattatttgcgattatttatatatgatttattttgtttgcttgctacactaagtgtatgaaaagaatacaacttcaggaattaaatattattactaacttatacgcccataagagacaaaatgaaaattaagagccaagaaaatcttctaattgatgttttgactacgctgtgtcaacatgtgggtctctcttgagtttatcctacttggagtgcattgagctttttagacatatatattaatga

SEQ ID NO: 696847 - DNA, 663 bp, Homo sapiens
tgtgctgactcgggatgagactgtggcttctgggactccctggcccctggaatctggttttgagaagcatgggctctagcttagggtggcagagttagcaaatgaaaatacagacgttgcacagcacgcacttctgctgaagtcaccatccacccttcatctgaaattcaaattcagatgggcatcacgccttttcagataaagaaactaaggcactcaggtggccgacttggtcaaagccctgtgaccagtaagagaasggaccacatttgaatctggctgtgccgccaagacaccagctttttaatctcagtgactgataagagactttgcaaagatgtcggagttggataaaagctgacccggaagcagtagcagccccagccaggtcataagtcctgcaggcctctgctagggccgacttaacgatccccaatgaactaaagagataggtgacacctttcggttataattgctccagttggctttgtgaagatgtccttgtattttggaagaaaacatatccatgttcaggaagagtcattctcagaatgatttactcaagcagagcttaggtggggattactgaatgtagcagaaagtggaagtaaattcctttcgaaatacctcaggatcaggaaaattcaaacaaagcatttggtt

SEQ ID NO: 696848 - DNA, 1859 bp, Homo sapiens
ttaagagtaaaccctgctgtggttcaaagacaactgctcttaattttttttttcttcttcttgccatatagaaagaggcaatttttttttctctatcttcttatcttcttttcctaccatacccttatggcttttattagccacatcaaagggtatagaattaattttgtgttcaaaattactcaataacaatccccatatatgagctcttacaggaaatcacataaagaaataagactcttaaagtgcctaactgacaagcaaaatttaaaagcaaactgccccctttactgttcatgtattcagaactaaagtgaagttggaattatgtgagagatgcagtgagagattcagcaagcattcttacagtgtaaacacagcagttcaagttgtgatgttcacccaacatcaaagccatctatccagaacatgcaggggcaagcctccgccagggaagacctgtctgtgtcaagtagattgctctaactccccaaaataaccagtgtgtgatttaaatcacaacagtatataataaactctggctttatcatgctaattccaagtgttcaaagccattactaaatttctgaggctggccaaaatatttatttaaaaaaaagcaaaaacagtaacttttctaaaaggcagcagcctcatgtatttcaaagatgtgtacacacaaccatgcatctaacacacctgtagggcaaagcaggcctcacctgggtgaggagagtgccccagctactagaattttaagatacaaatgaaactagattaaaagaaaaaaagccatctgtctcatcaaggttgaacaagatatatcaggcaaagaaaaaaaaatgcatagattcaaaatgcgaacagtattgtggtgtaatatacatacagtgaaataaacagattttaagtgcccagcaagaatatattttggagggaacatgcaaaaaatcagaaatatacttaggtgtggctgataacaaaatcactgggacatcataggcaactataattagcaatggatgactccgagcaggattggatccgcctcctaaattttaaatgattgctccaagctaaattctggggaacttctttggtctggtaatcagtctgggagtcttgtaggaacaagctttctcgtgatatttccactgcctcgtggtttctggcaaggttgagccgtctacagaaacaagattttctaacagtgttttgttatttccatttcctatctcatctgaaaccaagtgcatagacataaaaatgttgaaaatacatacataagcaaacttttcatcaacaaagttgtttctaaatcaactcaaatgaaattcatcaatagtactttgaagaatcaaggcagatcattactgattactggataaaacagaaaacttggataaaaataattttatattttttaatattctcctaactgtccagcattaagaawgtttaataattaagacattttagtaagttaaacacccaaaaaaagtcttaagattacaaggatttttcctacacatgattcttcaggctcaggttctcccctgtacccctcaaatggcctgtatggctctaattacctgtaaaacccttacatataggttatgttatcatgcattatgtgacattccactcataaaactatagtcctagagatagacaacctttaaaagaaaaaaaaaccttcatctacgaaaatacactaaacagaaaatggcaaactacaaatagagtacgataatactatttttaatgtttccttctctccatttattttaaatgagtaaaattgagtctctttctaaacgcacataaattgcctcacttaaaaccactggataggattt

SEQ ID NO: 696849 - DNA, 1355 bp, Homo sapiens
atttatcaaagaaaataccctagggcagagccaagatcctctgaagtaaaacctcacaaggacattctatcacagggaaaaaatagtaatcaggaacttcaaagtttagatcagagagtgtgaaataaaaacttttagcctggaaaaaatgtaaaagaaaatgctaataaaatcctacagtggtgtgaagtaaaataaagtaaaaattgaagaaatgtgtataggcccccctcatattgttgaccttgagcaatatgatttctggatcttacctgaaaaataaactggttgcatattatctgcctagataactgcatgtgttaattcatcatatagcatagcactacaccagcttaatgttggggtttctaataatattttgactttagaaaatttaatctgtagtatttcttttaggagagatgatatgacaaccgcttttatgttgaggcaattattatattatttgtgcataaaaacatactgattttattctctctaatatgtttgaagtgtgcatacaattcactcaaaagtagcagtaagacatgctataattaaaaccagatccagagcaagttatttaaaaaaaaattctactggaaattattaactaatcttttaagagagtattcctgttgttcattctttttgagtaaggttacaatgtaggtacttaatcaaaaataactactatttctacctccaattttgtttgtttgtttgtttgatggagtctggctctgtcgcccaggctaaagtgcaatggtgcgatctcggctcactgcaacctctaccttctgggttcaagcaattctctgcctcggcctcctgagtagccggtattacaggcagctgccaccacgcccagcgtattttttgtatttttagtagagacaggctttcaccatcttggccaggctggtcttgaaatcctgacctcrtgatccacctgccttggccttccaaagtgctgggattacaggcatgagccaccgcgcctggcctcccagcgttttctacgtcatatatcacagcacattaactgatccttgttttcaaaatcaaaagctgagagaaggtcaatgaaagccagaaacagactccaattaccctcatagatttcttctcaaggtgatgaagaaaaacctgtagccattggaaatacatatgtcagaacaaatcatcttcttctccaccatctcctcaacaacttcccctacaccaaagcagaatttgatgcacttgcctgagacgtccatgttttcaaattttcaaggaaggaacaggcaaaaattttagaatgcatggagtcaaaaattgttctacaactttgagaatatgaaatataccac

SEQ ID NO: 696850 - DNA, 520 bp, Homo sapiens
ttctatggtatcttagggctgagggagggtagccaaggaagcacaaaatcaaaaggagttcaggccccttctgtggttcagcccaccagacagcagaaaagtttgctggtttggccaagctagagctggtttggagtaggtgggcaagcaatagacaccattctgtagagagctgacagaggtaggaggtcatcagagcatgcaggccatgggggcttgcagatctgtgggaccacccaggtcacaggtaggctgctagcaggcaacttcacaggtggttttgcttctatttctagagagctgcagaatggttattaaaaggctgaggcaggaaagttgcagraggatcacgactggcattctgggctcatgctggggcagactccactggatatccgtgtgtgtgtgtgcgcgtgcagtaatccccccttattcatgggatatacactccaagaccctcactggatacctgaaatagtgaatagtactaagctgtaggtactatgtactatgttttttc

SEQ ID NO: 696851 - DNA, 691 bp, Homo sapiens
ggcaatctcataatgcacaggataacctaatagatctttccacctgttattcctctaagggaggactctttccatgaaaccaaagatgactaacttgagaggcaaagcacgactgcttaaaccggccatgcatcactggcaccaaactgctacaactgaaaatgyggaaagcaggctatccacattcaagcaaacccatttaattcccatactacatcccttcttgtaacatgctcctcataggggagaccacagtgaggaaatccctaggttctatgtttcaggtctcaagtgaaaaaaaagcaagaaaaaatgatctatgctaaggagaagagggagatgggaataggatggctttgcttagggtctatatgccaaaatgcagaggataaagagaaaagcgaccagcacttcgaaaaggaggttcatgttagaaggtaacatggcacagtgaaaatcacaggtgtctttggagccgaagtctttaaatttataacatgcaacttagtgtctataatctcaagcagtttatttcatttttctgagcttcagtttcccttataaactgcggacagtaccacctgtttctcagggttgccacaggatgccatgtgattatttcatgaaattgtctggaatatagtagctcagtaaaatatattccctctctgtcaatcctgagagccatttt

SEQ ID NO: 696852 - DNA, 1618 bp, Homo sapiens
tccagaagtggaataagtggatcatatgataattcagtgtttaattttttgaggaaccactgtactgtgccctacaatggcagcaccattttacatttctacaagcaatgcacaaagtttccaatttctctacatccttgccaacacatgttattttcttattttcttgctttctctgtttttgataatagtcatcctattgggtatgaagtggtatctcattgtggttttgatttgcatttccctgattattagtgatattgactgcatatgtaattttataagatattgccaaatccctctctaaaaggaaatgttgcattcttttttttttgtttgttagttaagcaattattttattgctcaagtacatagacaaatttatgcaaccagggcagaggctgtatatgattcatatttccagytgggagagaggactcacttggtcttataatatcgagccaaacagtgaatccggctctctatcagaatcagacagaatttagcatcctcatcctttctcttcctctcaagaagcttttgaacagcaactgctgccttaattaaatggtagagatcttcagggagattaggagcggtcccttagacttaagaattcttaagattttattgcctgtcacaaatcgtacttgtgcagcatcatgtgaatctctcaggatcccaccgatttgtgaaggagtcaggcccttcttggccagtttttaaatctgctccttcatgtcgtcagatgtcaacttcagcccctacttcagcaaccccacttcagtggggatgctgcagcgatagagcaaagctgactgagacagacccttcccagaagcgtgcatgtgacccatgatggcagctgtcaggcagcaaaaggaacattcttactaacgatgcatgagtacctatttcttcatagcctttcttaacagcatatatagtcacaattttaaatttttatcagatagatgagaagtggtatttcagtatagttttaatttcagtttgtttgtttgtttatttatttattatctttgagacggagtctcgctctgtcgcccaggctggggtgcaatgggacgatctcggctcactgcaacctccatctcccacgttgaactagttctcccaccttagcctcctatagctgggactataggtgtgcaccaccacacccagccaattttttgtatttttagtagagatgacgtcttgccatgttggccaggttggttttgaactactgacctctagtgatccacctgcctcagcctcccaaggtgctgggattacaggcctgagccactatgcccaaccttgttttacaattatgaatgacattgaacgtctttttcaaaactcacatataataaaattcacatttttggtatgttatattatgagatatgattttccattaattgttaagagttttttaaaattagtgatgatagccttttatctgaggtaaatgttgcaaataattttattccaattttttaatggtcttggcttagtttaaggtatttgccatgcataaaatttttatttttctatagtcaaatttatcaattttttttctttaattgtgtctagattttgggtaatagaa

SEQ ID NO: 696853 - DNA, 1618 bp, Homo sapiens
tccagaagtggaataagtggatcatatgataattcagtgtttaattttttgaggaaccactgtactgtgccctacaatggcagcaccattttacatttctacaagcaatgcacaaagtttccaatttctctacatccttgccaacacatgttattttcttattttcttgctttctctgtttttgataatagtcatcctattgggtatgaagtggtatctcattgtggttttgatttgcatttccctgattattagtgatattgactgcatatgtaattttataagatattgccaaatccctctctaaaaggaaatgttgcattcttttttttttgtttgttagttaagcaattattttattgctcaagtacatagacaaatttatgcaaccagggcagaggctgtatatgattcatatttccagttgggagagaggactcacttggtcttataatatcgagccaaacagtgaatccggctctctatcagaatcagacagaatttagcatcctcatcctttctcttcctctcaagaagcttttgaacagcaactgctgccttaattaaatggtagagatcttcagggagattaggagcggtcccttagacttaagaattcttaagattttattgcctgtcacaaatcgtacttgtgcagcatcatgtgaatctctcaggatcccaccgatttgtgaaggagtcaggcccttcttggccagtttttaaatctgctccttcatgtcgtcagatgtcaacttcagcccctacttcagcaaccccacttcagtggggatgctgcagcgatagagcaaagctgactgagacagacccttcccagaagcgtgcatgtgacccatgatggcagctgtcaggcagcaaaaggaacattcttactaacgatgcatgagtacctatttcttcatagcctttcttaacagcatatatagtcacaattttaaatttttatcagatagatgagaagtggtatttcagtatagttttaatttcagtttgtttgtttgtttatttatttattatctttgagacggagtctcgctctgtcgcccaggctggggtgcaatgggacgatctcggctcactgcaacctccatctcccacgttgaactagttctcccaccttagcctcctatagctgggactataggtgtgcrccaccacacccagccaattttttgtatttttagtagagatgacgtcttgccatgttggccaggttggttttgaactactgacctctagtgatccacctgcctcagcctcccaaggtgctgggattacaggcctgagccactatgcccaaccttgttttacaattatgaatgacattgaacgtctttttcaaaactcacatataataaaattcacatttttggtatgttatattatgagatatgattttccattaattgttaagagttttttaaaattagtgatgatagccttttatctgaggtaaatgttgcaaataattttattccaattttttaatggtcttggcttagtttaaggtatttgccatgcataaaatttttatttttctatagtcaaatttatcaattttttttctttaattgtgtctagattttgggtaatagaa

SEQ ID NO: 696854 - DNA, 1474 bp, Homo sapiens
cttgttttttcccttacatttgttttcccgaagcaggtaagaggacttcagataaaagaagtttattcatacagaataataaattatttatcattagttaatatagtttttttatcaaaaagatatgaatgaaaatacacactataatttgctttttcatgtgatttttgacatatttatataaaaatagatgctaaaattatgyttaataacatatagttgatatatggtattagaaaacaaactttttaaaaattcatattctcatcagagtctaataaaacaatgaattaaaaataaaactaagccttaaagaagtaagttgtaaaatgattaatataataatgcaagtcttaatctaaggttaagatgatattttatatcaatgttcttgaacttaatattgacatttaaataagttaaaatgacaaaaaaatggttaactacttaagatagcatactcccttaaaagctacagaaaaatcattttaatccgtcaatgttttaatgaatttaattgaatttttttcttttttttttattttgagacagggtctggctctgttgcccaagctgaagagcagcgggcacaatcatggctcactgcagcctcgacctcccaggctcaacattcctcctacctcagcctcccaagtagctgggagtacaggcacacaccaccacactggctgattttttttttttttttggtagaaacaaagtctcactatgttgcccaagatggtctcaaactcctgggctcaagcagtcctcctgcttcagcctcccaaactgctgtgattataggcgtgagccactgtgcctggctgattttaattttgtgattgtagacccaaggtaattttggtatgacaacttagtatcctaaatacatgttattctgttcttcaacttgagttacttaatgcctggtttgacataatgagatttgttcatttatgatttcataattatttcaggagtatattaatcagaaggtaagagaaacagtagtattctaaggccttaaagtcagatttaaaaaattcttattctcagacttaaaaagaatttttgttcaatatcggtcaaagaacattcccagagaatttgggagttggtgagtttagagtgcaaagaaagggagactaaaaatgccaactcacataaaggttgggaaggcaagataatcagtaggtcagatgcaagcataaaactaagtagaatgagctgcatctcaaactaagacaatgaacaaggacaggcaagaccaaagaggaagtttagtagatacacccaaaaaggagattcattgagaaaaatataggtgttatgtgtatgtgtatgtatgtgtgtgtgcatgcacctttgtgtgcaaattggatgtctgcaaaggcctgaacagtcatactgtatgtcagtttgccaatatcactagctcattattggctaattccctgatgattgtccattg

SEQ ID NO: 696855 - DNA, 1474 bp, Homo sapiens
cttgttttttcccttacatttgttttcccgaagcaggtaagaggacttcagataaaagaagtttattcatacagaataataaattatttatcattagttaatatagtttttttatcaaaaagatatgaatgaaaatacacactataatttgctttttcatgtgatttttgacatatttatataaaaatagatgctaaaattatgtttaataacatatagttgatatatggtattagaaaacaaactttttaaaaattcatattctcatcagagtctaataaaacaatgaattaaaaataaaactaagccttaaagaagtaagttgtaaaatgattaatataataatgcaagtcttaatctaaggttaagatgatattttatatcaatgttcttgaacttaatattgacatttaaataagttaaaatgacaaaaaaatggttaactacttaagatagcatactcccttaaaagctacagaaaaatcattttaatccgtcaatgttttaatgaatttaattgaatttttttcttttttttttattttgagacagggtctggctctgttgcccaagctgaagagcagcgggcacaatcatggctcactgcagcctcgacctcccaggctcaacattcctcctacctcagcctcccaagtagctgggagtacaggcacacaccaccacactggctgattttttttttttttttggtagaaacaaagtctcactatgttgcccaagatggtctcaaactcctgggctcaagcagtcctcctgcttcagcctcccaaactgctgtgattataggcgtgagccactgtgcctggctgattttaattttgtgattgtagacccaaggtaattttggtatgacaacttagtatcctaaatacatgttattctgttcttcaacttgagttacttaatgcctggtttgacataatgagattygttcatttatgatttcataattatttcaggagtatattaatcagaaggtaagagaaacagtagtattctaaggccttaaagtcagatttaaaaaattcttattctcagacttaaaaagaatttttgttcaatatcggtcaaagaacattcccagagaatttgggagttggtgagtttagagtgcaaagaaagggagactaaaaatgccaactcacataaaggttgggaaggcaagataatcagtaggtcagatgcaagcataaaactaagtagaatgagctgcatctcaaactaagacaatgaacaaggacaggcaagaccaaagaggaagtttagtagatacacccaaaaaggagattcattgagaaaaatataggtgttatgtgtatgtgtatgtatgtgtgtgtgcatgcacctttgtgtgcaaattggatgtctgcaaaggcctgaacagtcatactgtatgtcagtttgccaatatcactagctcattattggctaattccctgatgattgtccattg

SEQ ID NO: 696856 - DNA, 1474 bp, Homo sapiens
cttgttttttcccttacatttgttttcccgaagcaggtaagaggacttcagataaaagaagtttattcatacagaataataaattatttatcattagttaatatagtttttttatcaaaaagatatgaatgaaaatacacactataatttgctttttcatgtgatttttgacatatttatataaaaatagatgctaaaattatgtttaataacatatagttgatatatggtattagaaaacaaactttttaaaaattcatattctcatcagagtctaataaaacaatgaattaaaaataaaactaagccttaaagaagtaagttgtaaaatgattaatataataatgcaagtcttaatctaaggttaagatgatattttatatcaatgttcttgaacttaatattgacatttaaataagttaaaatgacaaaaaaatggttaactacttaagatagcatactcccttaaaagctacagaaaaatcattttaatccgtcaatgttttaatgaatttaattgaatttttttcttttttttttattttgagacagggtctggctctgttgcccaagctgaagagcagcgggcacaatcatggctcactgcagcctcgacctcccaggctcaacattcctcctacctcagcctcccaagtagctgggagtacaggcacacaccaccacactggctgattttttttttttttttggtagaaacaaagtctcactatgttgcccaagatggtctcaaactcctgggctcaagcagtcctcctgcttcagcctcccaaactgctgtgattataggcgtgagccactgtgcctggctgattttaattttgtgattgtagacccaaggtaattttggtatgacaacttagtatcctaaatacatgttattctgttcttcaacttgagttacttaatgcctggtttgacataatgagatttgttcatttatgatttcataattatttcaggagtatattaatcagaaggtaagagaaacagtagtattctaaggccttaaagtcagatttaaaaaattcttattctcagacttaaaaagaatttttgttcaatatcggtcaaagaacattcccagasaatttgggagttggtgagtttagagtgcaaagaaagggagactaaaaatgccaactcacataaaggttgggaaggcaagataatcagtaggtcagatgcaagcataaaactaagtagaatgagctgcatctcaaactaagacaatgaacaaggacaggcaagaccaaagaggaagtttagtagatacacccaaaaaggagattcattgagaaaaatataggtgttatgtgtatgtgtatgtatgtgtgtgtgcatgcacctttgtgtgcaaattggatgtctgcaaaggcctgaacagtcatactgtatgtcagtttgccaatatcactagctcattattggctaattccctgatgattgtccattg

SEQ ID NO: 696857 - DNA, 1474 bp, Homo sapiens
cttgttttttcccttacatttgttttcccgaagcaggtaagaggacttcagataaaagaagtttattcatacagaataataaattatttatcattagttaatatagtttttttatcaaaaagatatgaatgaaaatacacactataatttgctttttcatgtgatttttgacatatttatataaaaatagatgctaaaattatgtttaataacatatagttgatatatggtattagaaaacaaactttttaaaaattcatattctcatcagagtctaataaaacaatgaattaaaaataaaactaagccttaaagaagtaagttgtaaaatgattaatataataatgcaagtcttaatctaaggttaagatgatattttatatcaatgttcttgaacttaatattgacatttaaataagttaaaatgacaaaaaaatggttaactacttaagatagcatactcccttaaaagctacagaaaaatcattttaatccgtcaatgttttaatgaatttaattgaatttttttcttttttttttattttgagacagggtctggctctgttgcccaagctgaagagcagcgggcacaatcatggctcactgcagcctcgacctcccaggctcaacattcctcctacctcagcctcccaagtagctgggagtacaggcacacaccaccacactggctgattttttttttttttttggtagaaacaaagtctcactatgttgcccaagatggtctcaaactcctgggctcaagcagtcctcctgcttcagcctcccaaactgctgtgattataggcgtgagccactgtgcctggctgattttaattttgtgattgtagacccaaggtaattttggtatgacaacttagtatcctaaatacatgttattctgttcttcaacttgagttacttaatgcctggtttgacataatgagatttgttcatttatgatttcataattatttcaggagtatattaatcagaaggtaagagaaacagtagtattctaaggccttaaagtcagatttaaaaaattcttattctcagacttaaaaagaatttttgttcaatatcggtcaaagaacattcccagagaatttgggagttggtgagtttagagtgcaaagaaagggagactaaaaatgccaactcacatmaaggttgggaaggcaagataatcagtaggtcagatgcaagcataaaactaagtagaatgagctgcatctcaaactaagacaatgaacaaggacaggcaagaccaaagaggaagtttagtagatacacccaaaaaggagattcattgagaaaaatataggtgttatgtgtatgtgtatgtatgtgtgtgtgcatgcacctttgtgtgcaaattggatgtctgcaaaggcctgaacagtcatactgtatgtcagtttgccaatatcactagctcattattggctaattccctgatgattgtccattg

SEQ ID NO: 696858 - DNA, 1244 bp, Homo sapiens
ctaattcagctaagtaccacattcatacctaccgccaaggttcttgtaagtaagaactaaataactttatatataaagttatagtacatatatatactatatctatatagtttatatatatttaaaagtgactgtatatatacatatatatatatatatatayacttacaagaaccctggaggtaggtatgaagaccccttagcattgtacctgatagagagaaagggctcaggggctgttgagtatccctgttggtgctaccacgtctacatcccggcctcttcacaatcccttccaacttggtctttaatgtctgtgtgcatctctgcctgcttctccagatagtgagcaatttaagggcaggcacacagtgttatattagtcttggtatcgtcaataccaggcacttagcaaatgctcaaaaaatgttgaatgaataagtgaatgaatgaatgaatgaatgctggcatttgtccatgcacaatgtggctttaatcatacaaattcgacaaccatgggaccaagctttagaatccaaaccccagaagcgatctctggaaatagttgggtcctgaagggcggacaggtggatggaggataccaatcacccacctaggtttgtctcggaatttccaagtagcttctccttgcgacactgcaagaagctgaggtttcttttttctgagacaggatctggctctgtcacactagctggagtgcagtggcgcaatcttggctcactgcaacctctgcctcccaggctcaagccatcttctcaccccagcctcctgagtagctgggaccacaggcgcacaacaccacgcctggctaatttttgtattttttgtagcgacagggtttcaccatgttgcccaggctgatctcaaattcctgagctcaagcaatccacccaccttggcctctcaaatttctgggattacgggcgtgagccacagcgcctgactcgagaagctgagggtcgtacccagagagatggttgacaacctctggacccaggttcccacaagtggctgctgcctccaggtcagaggtagtgcctgggaaggcagcacatgtggtcagcagatttgggcatgcatcacagtgatgaggaagtagatggtcagcatccagtggcctttactatgtgccagatatgtgccttgtgtagtgtaaagtgctttacatcattttttcatttcatgctcaagtgtctgttattcttcccatttaccagggaaga

SEQ ID NO: 696859 - DNA, 1244 bp, Homo sapiens
ctaattcagctaagtaccacattcatacctaccgccaaggttcttgtaagtaagaactaaataactttatatataaagttatagtacatatatatactatatctatatagtttatatatatttaaaagtgactgtatatatacatatatatatatatatatacacttacaagaaccctggaggtaggtatgaagaccccttagcattgtacctgatagagagaaagggctcaggggctgttgagtatccctgttggtgctaccacgtctacatcccggcctcttcacaatcccttccaacttggtctttaatgtctgtgtgcatctctgcctgcttctccagatagtgagcaatttragggcaggcacacagtgttatattagtcttggtatcgtcaataccaggcacttagcaaatgctcaaaaaatgttgaatgaataagtgaatgaatgaatgaatgaatgctggcatttgtccatgcacaatgtggctttaatcatacaaattcgacaaccatgggaccaagctttagaatccaaaccccagaagcgatctctggaaatagttgggtcctgaagggcggacaggtggatggaggataccaatcacccacctaggtttgtctcggaatttccaagtagcttctccttgcgacactgcaagaagctgaggtttcttttttctgagacaggatctggctctgtcacactagctggagtgcagtggcgcaatcttggctcactgcaacctctgcctcccaggctcaagccatcttctcaccccagcctcctgagtagctgggaccacaggcgcacaacaccacgcctggctaatttttgtattttttgtagcgacagggtttcaccatgttgcccaggctgatctcaaattcctgagctcaagcaatccacccaccttggcctctcaaatttctgggattacgggcgtgagccacagcgcctgactcgagaagctgagggtcgtacccagagagatggttgacaacctctggacccaggttcccacaagtggctgctgcctccaggtcagaggtagtgcctgggaaggcagcacatgtggtcagcagatttgggcatgcatcacagtgatgaggaagtagatggtcagcatccagtggcctttactatgtgccagatatgtgccttgtgtagtgtaaagtgctttacatcattttttcatttcatgctcaagtgtctgttattcttcccatttaccagggaaga

SEQ ID NO: 696860 - DNA, 622 bp, Homo sapiens
tcattaatatcacagtgtgtaaactgtgtgtaagcactggatattatagaaatatgagagcgatgttatttcagtaatatcacagtgtgtaaacacaggatgttatagaaataacagagtgatggtgtttctttaatgtcacacagtgggcaaacactgaacgttatagaactatcaaagtgatatttcataaatatcatcaaagtgtgtaaacactggatataatagaaatatcagagcgatgatatttcttttcttttttttattatactttaagttttagggtacatgtgcacaatrtgcaggtgagttacatatgtatacatgtgccatgttggtgtgctgcacccattaactcgtcatttaacattaggttatatctcctaatgctatccctccccctccccccaccccacaacaggccccggtgtgtgatgttccccttcctgtgtccatgtgttctcattgttcaattcccacctatgagtgagaacatgtggtgtttggttttttgtccttgcgatagtttgctgagaatcagagaaatgcgaatcaaaaccacaatgagataccatctcacaccagttagaatggcgatcattaaaaagtcaggaaacaacag

SEQ ID NO: 696861 - DNA, 577 bp, Homo sapiens
tcagggctaagcaatatcttaaatatggagattggctgaatattatatgtgtaccgctttttttaattcaatcaacgtctttctccttcagcccatccagaaaacaaccaatgccacaaaatccaattaggagttgtggaggaagtaggaatactaagtacacacagctgtaaagatcaagtaactacaccaaactttacttgactcctttaacaactttgccacatcaaactttatttggctcctyaaaggaactcattttaacagaggtgctggcacacagcatagctcaaaaagatcaagtttttgttctttattgatgttgctataaagcacactagcttgtctgatgtaagctcctgggactggacactggtctggtaattaggaagcagaattcccctccgggcttcgtcctgaataggctgtgatctcgaccaagtcactttacctatctaggttaaagtatgctcatttccaaatgagacgacagaaccaggtgatcttaggtcccttcaagtgtcaggattccaggactatgtgattacatgactgtatccctctttcatcaatgtag

SEQ ID NO: 696862 - DNA, 577 bp, Homo sapiens
tcagggctaagcaatatcttaaatatggagattggctgaatattatatgtgtaccgctttttttaattcaatcaacgtctttctccttcagcccatccagaaaacaaccaatgccacaaaatccaattaggagttgtggaggaagtaggaatactaagtacacacagctgtaaagatcaagtaactacaccaaactttacttgactcctttaacaactttgccacatcaaactttatttggctccttaaaggaactcattttaacagaggtgctggcacacagcatagctcaaaaagatcaagtttttgttctttattgatgttgctataaagcacactagcttgyctgatgtaagctcctgggactggacactggtctggtaattaggaagcagaattcccctccgggcttcgtcctgaataggctgtgatctcgaccaagtcactttacctatctaggttaaagtatgctcatttccaaatgagacgacagaaccaggtgatcttaggtcccttcaagtgtcaggattccaggactatgtgattacatgactgtatccctctttcatcaatgtag

SEQ ID NO: 696863 - DNA, 680 bp, Homo sapiens
ggttttagcacaagagcaagcataaaatacgcaattgaaatgtgttctttggaagggccttcattcttggataaaagttaaacatcacatagtgacagatggcagtgttttacagagtgcatacataataataataataataaaagtggcatttcactggtgaactcttttggacaattctgaatttttgagtttattcacacttttttttctgttgtgtgtgatattattgtacattttaaattragtaatgttccaaatttttatgtcagcttttaaaatattaactaaagtttttttaattatagtgtaagttctgggatacatatgcagaatgtgcaggtttgttacataggtatacatgtgccatggtggtttgctgcacccatcaacccatcatctacattaggtatttctcctaatgctattcctgccccttccccccaccacccgacaggtcctggtgtgtgatgtccatgtgttctcagtgttcacctcccacttatgagtgagaacatgcggtgtttgattttctgttcctgtgttagtttgctgagaatgatggtttccagcttcatccatgtccctgcaaaggacatgatctcatccttttttatggctgcatagtattccatgttgtatatgcaccacattttctttatccagtctatcattgatgg

SEQ ID NO: 696864 - DNA, 602 bp, Homo sapiens
tcattaagaattcctgccatccaaaggtgctacagcctctcacccgaaactgtcagttactgaaatgtcagctcagctcrgcctgggcgtgccacattccttccacaaccgaggctgcatgctgcaagcaccccaccccttccctggcatatgcagcagactgataaggccgacttcacagagaacgttccaggctgttcccagccatatgggattaacgccttttgagagcaccagaaaggaaaaatctgggaaacgtgccattaaaaaacaaactccaatcttaccagcctatctatcagttccactaactgcctaaaaaccacaacagagacgacttcctaggaatgcaatcaactgactgcttatctcaaaggagccaactgtctctgattttgccaatcaagtctgttcacatagagactgaaggaggggaaatgaagtgctaagtatattctctatatgtttaaggacaacttcccatttaaggtaacttaaaaaaaaaggtatatatttgcaaaatattattagaggagactgaagacgtaggctatttataaatgctgcaacgcagcagtcaaacgttagctgcatcattcagc

SEQ ID NO: 696865 - DNA, 602 bp, Homo sapiens
tcattaagaattcctgccatccaaaggtgctacagcctctcacccgaaactgtcagttactgaaatgtcagctcagctcggcctgggcgtgccacattccttccacaaccraggctgcatgctgcaagcaccccaccccttccctggcatatgcagcagactgataaggccgacttcacagagaacgttccaggctgttcccagccatatgggattaacgccttttgagagcaccagaaaggaaaaatctgggaaacgtgccattaaaaaacaaactccaatcttaccagcctatctatcagttccactaactgcctaaaaaccacaacagagacgacttcctaggaatgcaatcaactgactgcttatctcaaaggagccaactgtctctgattttgccaatcaagtctgttcacatagagactgaaggaggggaaatgaagtgctaagtatattctctatatgtttaaggacaacttcccatttaaggtaacttaaaaaaaaaggtatatatttgcaaaatattattagaggagactgaagacgtaggctatttataaatgctgcaacgcagcagtcaaacgttagctgcatcattcagc

SEQ ID NO: 696866 - DNA, 642 bp, Homo sapiens
caaactgattaattcatttcaacttgttagcgcaattttgcagaggtgagcagggacttagctttaagaaagcaaaagattcatactgcattgcatcaaaatccagaaatgcagagcaatattgagaaaacttacttctgattgcttcccaaatactatcttgctgctacttaccttttaacctgcaaaattcagatgagaggtatttaagttccttattgttactatgactcaaaacaggaaatggttataatgtggcccatttttataaacctcatttaagtaaataactcatctgatttataaaaaggcctgccttggatttatcacctataaacactagaaatttccaatgtttatattttttattttgggatatcaagatactaaattttttttttktgaaaaaggtccgacttagaaaacaaagactgtacacaaagaaaacatataaagagagctgttttttaatttttttttttgagacagagtctcgcactgtcacctgggctggagtgcaatggtgcaatctcggctcattgcaacctccaactcctcggttaaagcgattctcctgcctcagcttcccaagtagctgggattacaggggcccaccacaacacccggctaattttttgtatt

SEQ ID NO: 696867 - DNA, 636 bp, Homo sapiens
ctatgagtactaatatttagatagtcctaatcaataagaaatgaggtagcaattccacttctgggtagttatccaaaacaattgaaagcagggatttggacagatactttttgacccacgttcatagcagtgttatcgacaatagccaaaaggtggaaacagcctaaatgtccgttttgttaatggataaacaaaatgtggtatttacatacaatgaaatattatccaaccttaaaaaggaatggcattccaatacatgctacaacacagttgggtcttgaagaaattatgccaagcaaaagaagccagacacaaaaggacaaatgttgtatgacttcacttagataaggtacctagagtagtcaaattcattgaaacagaaaagaaaatgatggctgctgatggaaagggagaatggaggattattgttgaatggatacagagtttcagcttgggaagatgtaaaatttctggaaatggaaggttttgactgttacacaacaatatgtatgtactaatgctacttaatggtacaccaaraatgattaaaatgataaattttatattatgtgtatcttaccgcaataaataatttagaaatgtggaatcaatgttgaaagaaagataatttgttca

SEQ ID NO: 696868 - DNA, 609 bp, Homo sapiens
cccccccacacccctcttatcacgagtcctrcgggaaaccagctgcctatgggtaaccccactcaagcagcactcaagcagcctatgggaaaccccaggaaagcagagtctctgcccaaccaatccatcagattacggcagccccagccaacatcttgactacaacctcatgagagactcggagccagaaccacccaattaaacaacttctagattcctgaccctaagaaactgtgtgaaaaaataaatgtttattgtcttaagccactaagttttgggggtaatttgttaccacaaaatagatgactaataggtaatagtactagataacatctagaggtatggtacgggaaaacggggagctggcgtaacacatgcctaaaaatgtgggagaggctttgcagccaagcagtactggcccttccgtaggctctaggttagagcttaagggaaagtgaggaaaatcacattggaaactgcaaagagagatcctttttatgcaatagcagaaattttgcaacattgtcacctgtatcaacatggaaagtagaaaataaactgggtaatctagataaggggatttccaggaaaagcactgaaggtgcttcc

SEQ ID NO: 696869 - DNA, 939 bp, Homo sapiens
aaataggattgctgcacatgtaatcagttaagatgagatcatactggattagagtgggctcctaatccaacatgactggtgtctttatgaggaaagatgatgtgaaggcactaggggaaaaccatatacaagccaaagtactcctgaggccactgctctcagaaggaaccaaccctgccaagaccttgatctcatacttctagccttcagaattctgagacaatgaatttctgttatgtaagccagccagtttgtggtactttgttatggcagccctagcaaaccaaaatagtttgtcacacatttcaatgttacaagttttgaggcccataagaaattattaatattcatttacatctccagcactttaagtggaaatcttggagtaccaggtataatctcagayatcctaccttagctatgtaagaaacggcctgaacagataatatcaaagtataaaactcttaaagactagcttagcaaaagtatattttttacagagggagtttcttatcttcagctatatacagcattacgttttgcaaactaatctgtataactctgttcctaaattttacatgtgaagatgtagccatcttccactccttgttgtattagttgtcagcacacattgttcacccacagttagatatataatgcctagtatggatacatagtcatgagttgaatacataaatgcctttcattggtggtggggttttgtaaaatcagtggatatcttcatgaaattgcctgtggtaagtatgaaaactaaatttagatatatttatggcctatggacaacataaaatggaagaacactggtagaacaaatactataacaatgtctttagaatttaatgtctatatacatttcatatggaaatgctttttcaggtctttattcaaataaagaattataaagttagactaaccatt

SEQ ID NO: 696870 - DNA, 939 bp, Homo sapiens
aaataggattgctgcacatgtaatcagttaagatgagatcatactggattagagtgggctcctaatccaacatgactggtgtctttatgaggaaagatgatgtgaaggcactaggggaaaaccatatacaagccaaagtactcctgaggccactgctctcagaaggaaccaaccctgccaagaccttgatctcatacttctagccttcagaattctgagacaatgaatttctgttatgtaagccagccagtttgtggtactttgttatggcagccctagcaaaccaaaatagtttgtcacacatttcaatgttacaagttttgaggcccataagaaattattaatattcatttacatctccagcactttaagtggaaatcttggagtaccaggtataatctcagacatcctaccttagctatgtaagaaacrgcctgaacagataatatcaaagtataaaactcttaaagactagcttagcaaaagtatattttttacagagggagtttcttatcttcagctatatacagcattacgttttgcaaactaatctgtataactctgttcctaaattttacatgtgaagatgtagccatcttccactccttgttgtattagttgtcagcacacattgttcacccacagttagatatataatgcctagtatggatacatagtcatgagttgaatacataaatgcctttcattggtggtggggttttgtaaaatcagtggatatcttcatgaaattgcctgtggtaagtatgaaaactaaatttagatatatttatggcctatggacaacataaaatggaagaacactggtagaacaaatactataacaatgtctttagaatttaatgtctatatacatttcatatggaaatgctttttcaggtctttattcaaataaagaattataaagttagactaaccatt

SEQ ID NO: 696871 - DNA, 1391 bp, Homo sapiens
gctatttctgccttataaaagtcagtcatcgacccaatagttagaatcctgatgtgaattgcacccttgctgatagatggtccagctcccactagaaaatagaaaacaactcttgtttttattaaacggatctcatgaacacctcagatctactatcatgtggctgcccatttttattaatatgtgcttatgttaattcttatatgtagaataaacagtccattgccaggaaaatattttatgtaagcataaccatctatatatgaaattaatgtattttcttgtttcatcataaactttccttatggcttcaaaactaatattttagaagctaatatttgtctcctggggtgagttactctaggtactactcttaaaatgttccaaaagggttatgaattatatagactgtgaaaaaatattcaaaatacattgtgtttcatttcaatttgaaaatttgaattgaattgaaattaaaatgaaataaaagttaaatacattacatttattttggcaataaatgtaggtctataagaaaaataaaaatactatgtatgagggaatggtctctagttttatgtgttaatttattcaaattattgtgacattattgtattatttggtatcatgttaaatattaatttaataagcattaaattacaaaatttatttcacttatttttttaaatctgggcagaataaattaaatttctcattttaaattttctttggatagtcaccatcgttgaatggcattttgaaaaaaaagtggttaaatttgaaattgtaaaacataattgtcacaagcagagagaaaaaactgggaaaattttaatttatgaaactttataccacttttgtaatgttctaaagtaaaatttcatccaattgtgattttaaaagtaatataaatagtggatgttcttttgaattgagaggaatacattataaaaatcatcctgaatggtgctgtatataactctgtaacatatttctcrtagatggggagaaggtaggcttgagttggaatcgaactctaaagtcttaataagagagtggtggaaaggcaatgggtaaatagccaagaaagatttagtaacatgcctgtaataacagtacacatataatcaggttctctgtttagaatgtctaaagaattagcctatagttcatgtttttggtaatcatagcaacaataattttgcagccatttgtggaccaaaaaagtgcctttgggcaagccttaggattaaggcaggaggttgtgaaactctagtggagcccaaaaactaggagggctgttttgagaggagaaacccatgcttaagtgtcagacttactgctgcagggtcctcgctccagaccaagaaatggactcatctccttgtgga

SEQ ID NO: 696872 - DNA, 1660 bp, Homo sapiens
tgaatttttgcaagtcgctacagataatgacgggctctgcttacaggaggaatatgcaccaactgcagtggagcagattcttttgaatgtaaaactttgaccatgggattagtgaatgaactctcagcactttcctcttttcaaactcctgcaaaatgttggcccatatagcatcctctttgaagtacaagtattgtgtggatgtactcagggttccatgtgattctaataatattaattcttttttaagattatcactgaaattaaaatataatattacctgccccccacaaaaaaaagaagactccaggcccctgagaaaacatgcagcccacagcttgagaaatatcaccgtatagaatgctgctctatcaggccacctcccagtggatagaacagcagcaacacagggttgggatggagaggccatctccaagccccaagaacaggcttctttccattcttttctgcctcaccgcttgtcatcacatgttctcatcagtggatggaccaagccattgccaatcggctcctgcctggctgcagaggggccatcgtccacctttaccagatggtggtgatgaagacaaggctaaggaactctgggcattgcgtctctcactttgccgtgcacactgttccctgcagctggtgcccaaatgcacattctgactctgtaggcctggagtggggcccgagactctgttttttaaacaagctcccaggtaatctatccaatgccactgactcaggactcacatttcaagaagcaagcatctaagacctgctgggtttccttctagaaatagccttagaggaggccaattttccatcttttgcctcaagttattagaaaattgccttacccttgtgttttacttgggcctgaggcattttggcttttatgaaatagagcagggaattattaagtagattaaacagattccaagattacttcaatctgagagaaagcaaagtttcactagactcagagggtatttatattacaggaatttttcataccactagttggcatgaagtttcaataagagtaacagcacaagaatcaatatatcaaactctagaaaccctaaattaattataaatatacttggggaaaaaatcaataaatcaaacaatttagaagcaaatgaaatgattttgttttccttttgtggttggatttcagtgactgccaaaagctttaaggtgcctttatatcagcctatttctatactgatattaatggctaggaaatattttgatttttaattaaatgctacatattgttggcaaaaactaatgacaaagctatttycttcatgtgaagcctatgaaaatcctgaattgttgtaaatggaaatccaagtcaccgtagttttagcagatggtgggttattttccttacatagcaaaatttctggagatagacaacctagaaccagcaggttggtgatgtcctggtcactgtcttggcaattctccaggccttcttctcatcatcacacaatggctacctctgttttagatgtcaagtttgcatttaaggcaggaagaagggggttgaggacagcatcagccttatccatccatttaaccaggagagccagacgtttcccagaagtccctagcagactcccgccgatgtatcattggccaa

SEQ ID NO: 696873 - DNA, 654 bp, Homo sapiens
cttctagccacagacctatgactttagttctggccatcatcagccctggcctgtgtcacagcacttcctaattgatcagtctattgcccttttcccctcccctccactctcacccaaatccattgtctccccaggtaaatgtcactatcagcaaagggaaatagcactggctccacactgcagccagtttgatctctaaaattcagacctgaytatgccactttcttgcttacgattctcaaaatctacttcaaactctttaattttatggataagctcctttacaacctgactcgttcctttaccattcatatagctctcctctcatcttcccccctccagaatccaaactcttcccacactggatgcagagatttctcagaagtttctttaggatttctaccaatgtctgattcaaatttatggtttaaatacattttagttatttaacaaaatatacaagaaaaagcattcatgtaaatgtattacataacacagttctatgtattaaggaccatcattaattttggtatcgagttaattcttcagtatggaacttctaccttctctgtgagtatacgctgccatggcttaaatgtccccttcaaaatacatggtgaaacttaatcaccaatgtgcaattttgagaggtgg

SEQ ID NO: 696874 - DNA, 654 bp, Homo sapiens
cttctagccacagacctatgactttagttctggccatcatcagccctggcctgtgtcacagcacttcctaattgatcagtctattgcccttttcccctcccctccactctcacccaaatccattgtctccccaggtaaatgtcactatcagcaaagggaaatagcactggctccacactgcagccagtttgatctctaaaattcagacctgactatgccactttcttgcttacgattctcaaaatctacttcaaactctttaattttatggataagctcctttacaacctgactcgttcctttaccattcatatagctctcctctcatcttcccccctccagaatccaaactcttcccacactggatgcagagatttctcagaagtttctttaggatttctaccaatgtctgattcaaatttatggtttaaatacattttagttatttaamaaaatatacaagaaaaagcattcatgtaaatgtattacataacacagttctatgtattaaggaccatcattaattttggtatcgagttaattcttcagtatggaacttctaccttctctgtgagtatacgctgccatggcttaaatgtccccttcaaaatacatggtgaaacttaatcaccaatgtgcaattttgagaggtgg

SEQ ID NO: 696875 - DNA, 654 bp, Homo sapiens
cttctagccacagacctatgactttagttctggccatcatcagccctggcctgtgtcacagcacttcctaattgatcagtctattgcccttttcccctcccctccactctcacccaaatccattgtctccccaggtaaatgtcactatcagcaaagggaaatagcactggctccacactgcagccagtttgatctctaaaattcagacctgactatgccactttcttgcttacgattctcaaaatctacttcaaactctttaattttatggataagctcctttacaacctgactcgttcctttaccattcatatagctctcctctcatcttcccccctccagaatccaaactcttcccacactggatgcagagatttctcagaagtttctttaggatttctaccaatgtctgattcaaatttatggtttaaatacattttagttatttaacaaaatatacaagaaraagcattcatgtaaatgtattacataacacagttctatgtattaaggaccatcattaattttggtatcgagttaattcttcagtatggaacttctaccttctctgtgagtatacgctgccatggcttaaatgtccccttcaaaatacatggtgaaacttaatcaccaatgtgcaattttgagaggtgg

SEQ ID NO: 696876 - DNA, 654 bp, Homo sapiens
cttctagccacagacctatgactttagttctggccatcatcagccctggcctgtgtcacagcacttcctaattgatcagtctattgcccttttcccctcccctccactctcacccaaatccattgtctccccaggtaaatgtcactatcagcaaagggaaatagcactggctccacactgcagccagtttgatctctaaaattcagacctgactatgccactttcttgcttacgattctcaaaatctacttcaaactctttaattttatggataagctcctttacaacctgactcgttcctttaccattcatatagctctcctctcatcttcccccctccagaatccaaactcttcccacactggatgcagagatttctcagaagtttctttaggatttctaccaatgtctgattcaaatttatggtttaaatacattttagttatttaacaaaatatacaagaaaaagcattcatgtaaatgtattacataacacagttctatgtattaaggaccatcattaattttggtatcgagttaattcttcagtatggaacttctaccttctctgtgagtataygctgccatggcttaaatgtccccttcaaaatacatggtgaaacttaatcaccaatgtgcaattttgagaggtgg

SEQ ID NO: 696877 - DNA, 612 bp, Homo sapiens
taaaaacaaaaatgttcaaagtaaatgtatactagtaaaaaaatgtcatacttatctgttctatatatctgagccccaagaaaaatttcatttaaaaagacaggtttcagtaatttttattttttaatgtgagaaccattgacacctcagtacagactctatcttcctcttgatcccagtaaggtgttcatactatgtcctccaagtgcagagaagagaaccaccagatgcccacatctatgttttctgttccagccaggattacctctgatccaaatggagacctgtccatttcctgttggcatttcctgttggcatttcccrtatgttctcaggggagctaaggtatggctgattcttggcagaatgtccccactgtctctgccctaccctttcccctcctctcaccaggtcgcacctgtaagatgcctctgggtgttaatagcatggccacataaattctttccttttgctgcactccctctgccccatctcatctcacaatacacacacattagtctattaattccaaagactccaaagaacagaacttactcagcagaactaataagattgcaacaatgtcagacagtaccttgctatgcatgattt

SEQ ID NO: 696878 - DNA, 483 bp, Homo sapiens
atcatatccaagcagcttgctgctttagttaatgtcttcaaaagatgagacgttttagctgttattaaaaaaaaatcattatgggacagttctttactgcaaaattggatatcctgtagatcaaatcatstttcctaaaatagtcttacttaggattcctggtaaaatagggctagtccattccatgtcttcatgtcatgttatacagaggcccaactcaatcctttgatgtctgaggtcatattcacttccagggtaactcatgtttctaggcaatatattttagatttatttatttgttctgaaaatatgcattgaatccccacaatgtgctaggcaatgtgacatatacagacaattctcaacttagaatgatttgacttaatgttttttttattttaccatgtagcaaaagcaatacacattcagtagaaactatacttcgaattttgaattttgatcatttcccacaatagtgatatg

SEQ ID NO: 696879 - DNA, 1682 bp, Homo sapiens
taaagtaagatatctcaaaatgtgtccagtggggttgggagaaaaatgagataaagtcttactaactttagaaatgtagagtcattaattcttagtagctgtatttgctgtcactttcattcataaggaaagataaagagatgcagccattttattgtgctaagcacatcatttattcctttatttctgattataaaaaaatctatgctctttgtggataattctaagatttaataaaatgccaaagaatccaaatcacctataaatacacaaccaaaagatctactcatatatgtgtgttataaaattggggccatcctactttatggatttccctaacatattcatacattataaaccgcttctcatatcgcaaatatttttctccattatttgtaatggctagatagtttgcytttgaatgggttatttcttggtttgtttacctagcccttgctgtttaaaatcagatttgcttccattaaaaaagaaaaaacactgttaccgaagggattttactacactcatcttagcatttttgtagttacttgtgctgcagaacaccctctacttgagttttgtgacaccgtcattgttttccttgtttttttcccctgtcctttcattgtcttttactgattatgcttcttgtccttgatcccttataataatcaccattgtactgtgctgtctaatattatagcctctacccaaatatggatacttgaatttaaattaagattacataaaatttgagtcagtttctcaagcacatgaatcacatttcaagtgtttaaaacatcttatgtaccccataaatatatatgcctactatgtacccacaaaaataaaaaactttttaaaaatttaaatttaaatttaaaataaataaattttaaaaacataaattttaaaaatttttaaataaaatatttttttaattttaaataaaaatttttaaatgggaacatatgggtagtgacttctatattggacaacatagatatagaacattttcatttccataggaagttctattggattgttatgtcaaaggatgttctgttgcaaaggaagagaaactcccaccatgaagctcaaaagcagggaatttgtgctgaaatcttacaggaaaatgacatgaaatagaaatgcatgaagtatagctgagctgtaccaccagaaggtgtttgggtagcacctctctttttcccttgctctggggcccaatggctcttctctcagtttctcacttcacatctgctacaaactcctctcgggataccagctgattcttctgccttgccatagcttctccatggatgtggttcttatgataggacttagcctgactctatatgactttacaactctaatcaatttatctgactacatttcttatatctcttagttcaaattatccagatatctgattggtttaacccacattggtttcccctcaccccaaattatatgtcctcccttaatccaatcagaaaggcccagattcttaggttgcatgctcaatatgagactgactgaaaatacagcagtaaataaaatagcaaagcccaggctctcaaagaactcccattctagcagggaagatagaaaataagacatgcaaacaaataaatacgtaatatattattattagacagagacaagtgcaatggagaaaa

SEQ ID NO: 696880 - DNA, 1682 bp, Homo sapiens
taaagtaagatatctcaaaatgtgtccagtggggttgggagaaaaatgagataaagtcttactaactttagaaatgtagagtcattaattcttagtagctgtatttgctgtcactttcattcataaggaaagataaagagatgcagccattttattgtgctaagcacatcatttattcctttatttctgattataaaaaaatctatgctctttgtggataattctaagatttaataaaatgccaaagaatccaaatcacctataaatacacaaccaaaagatctactcatatatgtgtgttataaaattggggccatcctactttatggatttccctaacatattcatacattataaaccgcttctcatatcgcaaatatttttctccattatttgtaatggctagatagtttgcctttgaatgggttatttcttggtttgtttacctagcccttgctgtttaaaatcagatttgcttccattaaaaaagaaaaaacactgttaccgaagggattttactacactcatcttarcatttttgtagttacttgtgctgcagaacaccctctacttgagttttgtgacaccgtcattgttttccttgtttttttcccctgtcctttcattgtcttttactgattatgcttcttgtccttgatcccttataataatcaccattgtactgtgctgtctaatattatagcctctacccaaatatggatacttgaatttaaattaagattacataaaatttgagtcagtttctcaagcacatgaatcacatttcaagtgtttaaaacatcttatgtaccccataaatatatatgcctactatgtacccacaaaaataaaaaactttttaaaaatttaaatttaaatttaaaataaataaattttaaaaacataaattttaaaaatttttaaataaaatatttttttaattttaaataaaaatttttaaatgggaacatatgggtagtgacttctatattggacaacatagatatagaacattttcatttccataggaagttctattggattgttatgtcaaaggatgttctgttgcaaaggaagagaaactcccaccatgaagctcaaaagcagggaatttgtgctgaaatcttacaggaaaatgacatgaaatagaaatgcatgaagtatagctgagctgtaccaccagaaggtgtttgggtagcacctctctttttcccttgctctggggcccaatggctcttctctcagtttctcacttcacatctgctacaaactcctctcgggataccagctgattcttctgccttgccatagcttctccatggatgtggttcttatgataggacttagcctgactctatatgactttacaactctaatcaatttatctgactacatttcttatatctcttagttcaaattatccagatatctgattggtttaacccacattggtttcccctcaccccaaattatatgtcctcccttaatccaatcagaaaggcccagattcttaggttgcatgctcaatatgagactgactgaaaatacagcagtaaataaaatagcaaagcccaggctctcaaagaactcccattctagcagggaagatagaaaataagacatgcaaacaaataaatacgtaatatattattattagacagagacaagtgcaatggagaaaa

SEQ ID NO: 696881 - DNA, 613 bp, Homo sapiens
aattggtggcttgaatacatgtaaagcaactcagtttcctcttagctatgtttcctccatcctttccagaatgatgattcgtcttataaagaagataaagacagaggattggagcaggaattagcttagccttggcaaaaagtgaaagggaagagagttgtcgcaaccaacatcgctctaggaatccctcctgtaggagcggagagcctcgaatctaaatttgaaatatataggattgattttcaaataccaacacttactatttaggccaagagagaagctacagctggacactgcaaatattgtagatttgaagtcctcagtagctgagttcattactttgttaatgggacaacatcatttcttttaatattgttaaaaaacttacaatgcttacttctataattttcactgatattatctcataataattttaaagggcattcatttgatgttttctacttactacgcaatctttgtgaataatattaaatatgtgagctttgtgaagagagaaatgctaaaatgtaytaaaagttatattctattattcctaacttgaaattaagagctcctactatgaagctatttggatttctaatttcccccctca

SEQ ID NO: 696882 - DNA, 587 bp, Homo sapiens
agaataaagaatgctccttgtgcagtgaggaaggcgtcacaaagaaggcaatgattaccctgggccttaaaggataaggactctataaaaaggaatattggtacatttttatagtgcattctttatagtgccaatgaggcctcttccttgccccctgcaaaaagaaaaaaaaatcatgattataagctagtaacagtgctttgatctttagtgtcaagaaattctatcttcagaaagtctgttaaaatgtgaaagaagtttgytcattaactcttttataggactctcctgttaacatcccatgactggtatgaagttcaaatgaaaagatcacattctttgtaaattgtaaagtgcaatgcaaatatcagtgatttgtgatgttgcttatattacagtaataacatcattaataaggattattttatcaattttctagactttagcaatacaacatggagaaaatttacacatagaactggtttaaaaaattggttatgtaatatcatggtggatacttccaaaaaggcgtattagggaaaaataggcttggagcttggcataaagaaaaattgttttgtgctacc

SEQ ID NO: 696883 - DNA, 620 bp, Homo sapiens
gttttatataaaacctatgatttttaaatacactactaggtggaatttgataatattttgggtaggatttttccatctagattaatgaaatatattgggctatacttttccagtcctacattgttattgtaaggtttgggcatcagggttatgctggcctcgtaaattaagaaatttttccctctgttttctgttttctggataattttttgttagaatgtatttttttctcttcattacatgtttgaaagaattttccagagatgtcatctaggtctaaagatttctttgtaagaaaagcttaaaattacatgtttttagtagatattggagtgttcatattttttatttttgtgaattattacttgtggtttttcaagtaatttgtcctttttttccaaattaccagcatcaaagtgttagtaatgtcctttattttcttctraattctgtaggacctgtagttatatataatgttaatatattaatatatcacaataatatttttaaagtttttgcttttgttattttttttgtgtgcctattttctagtgaattgacttttggggctatattgattatctgtttttcatctactttctttgtacttgctcttctgc

SEQ ID NO: 696884 - DNA, 668 bp, Homo sapiens
attgatgtacagtatgacacttcagggactctcttttgagtctgcagaaatgagacatttgatacaaaaatgctgccaaatattcaacagcattttttaggcaagaagctaaagtctacatccatatgatttagacaattttaataagaaaaccaggtcaaagttaccttttgtgtctttgttttacatagacaatgaacaacaggaaaatgttggcaatggtgaaagatgttatgtgtggtggatggtggtggtggtgtgtaacatgagactttttgggggtggggcggggaatatagcattttccaattaaggaatcatgggaagcattcatagaacactgctattggtaaaaggcaaaatgtatttggggtattttaatcaccctgaagaaatatgtattttaagttgttacttttttttttcaatctttacattttaatttttctcttaaatttttttttcttttttttaaattattattatactttaagttttagggtacatgtgcacaatgtgcaggttagttacatatgtatacatgtgccatgctggtgygctgcacccactaactcatcatctagcattaggaaaagttgttacttttaaataactaatacatttagattttatagaagaaaattacattgagacattttttaacttta

SEQ ID NO: 696885 - DNA, 1122 bp, Homo sapiens
gttaatcagaatctgtaacactagtttttccgtcagcatcacctctcctgccaaatggtattgagttgggtttgtacaaagacagtcctttctgtttctagggtcagactgcagctctacttcccatagctatactcaaaagattataagatgggccattcagaatgtttatacttatatctgggaaatccaattcctactgaagtctaaagagatctgtgtcagctctaggtgctctcttttgatgggctggatttggcaaatgtacattctagtctgggctgaggctggagtttttgtcgttgaaaaggaaataaaatcttctgccttttgcaaactttgaccagaattcatgaaggaataaatatatatttataagcaatgattacrcattagctgatgttcagaaaattaagagaagagaaagactttcacacaaaagaaaagcttgtgcaagacctgaaccttgagaatgtacatgttaatcatagtaaatgcaaattcccagtgcaaagagcaaaaatcaactttgggcaatattggttacagtaaatatgaatgtttttctcctgatcaccaaactggatcgtatataaaatgtagttgatgctgagggttgataactgagttatcagctttctggtatgttggagaaatcatgcatttagaacataacactgagtttattaaattcatcgtgttttttttttaattactttttagagatggggtcttactctgttggtcaagctggagtgcaatggtgctgtcacagctcactgcagcctccaactcctgggctcaagcaatcctcccacatcatcctcttgagtagctgagactacaggcataaccccactcctactttaagtttgcagtttaattagtagcaaaggcattcatagacccttaaaattataaaacgatatacagttgttaaacaagaaaaaggagagatagacagacagacagagaactattcaaaactccaaacttccaatattgaacatctctggatgtttgtggatactgtaagtttttcatatttttgttaaaaaaaaaaaaagcaaacatcactaacaaggaagatagtcccaaagagttctggactgattagaaatc

SEQ ID NO: 696886 - DNA, 2178 bp, Homo sapiens
gtgagtcagtttctacactgtatgctgagaattcatagtctgtgcccaggcaaaccttatgttttagtggttctgtagggtaggtctacttttgcaaaaggtaaataagctgtgggctttcagcagaaatatcttctatatacctgtttttgcctgatttcagtttgttagaacatgaggttgatataatttttacttattttttaaagtattgccatgatacacaaaatcatggcccctgcatacctttcctgttttgtcactgtataacatttttcacatagcaccctgtacttcaactattttattttattttattttattttattttattttatttttttgagactgagtctcgctgtgtcgcccaggctggagtgcagtggcacaacctcagctcagtacaacttctgcctcctgggttcaagcaattctcctggcacagcctcccaagtagctgggattgcaggtgtgcaccaccacacccaggtaatttttgtatttttagtagatacagcattttgccatgttgtccaggctggtctcgatctcctaacctcaagtgatccgtccaccttggcctcccaaagtgctggaataacaggcaagagccaccgcacccaaccacaactattcttaatcacttgcattttccatcaagttctgttgcctcagatcatctgacctttcccatacgtgtaatatggttaacctggtatatgttaatatcaagttgttaaattgttctaggtactagtgaacttaaacttcagtaatggtatcagaaacttatcaaataatcatacaaatatattttcaattatagttacataatgatggcataagaattcaaaatatttttctctgaaacaaattttataaagataccttctgaatattattcataaacctcataaaaattaccttgacaatagcactggggataggaaatgaatgtttttcttgggattcataattctaccctaacagaacaaatcttaagtaaaaattgcccctttggaaacctagtgtttgcctatattgtagtcatccccagaaaagatgagtgaaaaagcaaatgaatgtgttccattatgtcgagatatcctaagaaaacttasattgtttccagaagatagttaaggaataattttagttttataagttccaataatagtaattttaatcaatacattgaaattatcacttgttatttttctgcagttatttcctggaaccatttttatttgaaatctgacacctttccacaatccctttgaagatgtagtacacaagtgaatagtttaccattaaaactgctttttcctttaaaaatttttggaatagtataatggtgattgtgtaattaaaatttcaaggtgcacatagagcctactacagaaaacacgctaaggctgaattatgaatacaggcccctttgggaaaagcttctgatcgtttcagctacttcattgtgtggattgagtatttgctctgcagaaaatatcattcctttatgtcacacactggctttgagattatcagacttggtttcaataaaacttttcgagtgatgtaatggccttcctttgtaggcaagtacagtgacattctaacattgaggcttcgagtccttaggtgcatggaccggggagaatatttttcttggtggttagtgctttcttgtctccactcacctctactttttcaaaacatttaatagttgaaaaaagcaaactgctctgcttattaactaaaaccactccaggtcacagtaggaagccaatgttatagaccaaataacatttcaaaattctgcaaagtccatggcaactggtctgagaggacaacttaaaataataaaagagcattcaaagactatgagctcatttggaagtatgcttttgctcttgaaattgcatttgtttttctatgatatttatttaggtggaagttcgtaggcttgtcacttttcacaaaaatagttatacatatagaattgggattataggacatctaaattagaagaaaataacctggtttctgatcttgggcttggccactaagttttgaatgaaatcatctatctgttggtgaagcacaattacctcatgagtgaaataatggaattgtcttagagatgtggtgttcaaactgtgatcaacagacacctacttc

SEQ ID NO: 696887 - DNA, 931 bp, Homo sapiens
aagggccatgtctacatgagtgatttatgatttctgttgtaataaatgaggttggcagttgtcccagtgagccygtggcaggctctgaggtcccttgggttgtctgtctcaggagtagccttggcagggcccagggagccctgtcatccagtacatgtagcgttcctagcagtgaggcagagccttccctctgcagccagcagatcagccgcagtgggtggctggcacctgggaaagggagatgcatgaggaccaggcactgggtggggaaagccggtcttgattgactccttcactccatatgtaacttgttaggtgccagtgcctggtgctgactgctggggatacagggataaatgggacagcgaaagttctaccaactctgccaagacatgcactggcaacccttcctggagcctcttgggggtctgtctaggtgctctcagagagagggacaagtgggggtgaccacaagtgctgacatgggcagtccttacgggctggaacttccggcagacctgatttaaattcagactttactacgtcctggttgtgtgaccttggacaagtcatttctctccaaggctgagtttttctgtaaattggaactaatgatatactcaaatcctggcctagggactgcctgacaaatagaacctgttcgtaggtagtagctcagattactgtcaccacaaatgggtcataggacacgaaggcttatgggtacacacccaaaggaggagggctgaggggcattcttggagcctgagaggggttctagttggggtgaacccatgaggggcattgaagctagactattcctgaaggtaggagataaactggcctgaatgaagcagcttgtcacccaccttcttttctggactcatgggggctgctgggttgcatcattcctggacatttaatgtcctcc

SEQ ID NO: 696888 - DNA, 729 bp, Homo sapiens
gaatggtgaagggacggggcatgagaggaagtcaaagggcataaaagcatcagcctggcccaggtctgaggatgctgtgagttactaattctgctggtgcattcgaggtgctgtgaccaaggccaggagctctggcatagaagcaaaagccagcgtcrgttcctgtgcccagccctgcgccactatgcccacagcatccatcaccttgggtcctggcgccctgtgagtgaggagagtgctgacatcgcctcccactcacagggggtcgtggaggctccggagcttggtgaccccgtggtgtcctagggcgtgtagacacaggcctcttccatgccagggaggcgtggcagatctcaagcccacccactcttcccccaccctcggacaccacaacaaaaccagagttgtgcatcaagacagctggaaccagaccaccggaaacactcagaccaccggcaccaagggttgtctgttttcagaacttctgttgttttgagcacagcccaaagggacagctggcccttgggaaccacgttgggccgtctgttagggagaagtgcactgcctgggcctgaaggcagtgggctgtctggcctcctgagtgcccggggagcccacgcccacgcccaggagggaggggcccactcggtgcatccacgcagaggcggctgcgaactcaggcacggccgcccttgtctcctgctgccgctgccacctgcagcacagacg

SEQ ID NO: 696889 - DNA, 371 bp, Homo sapiens
catctactcatgggtaactgtaagggtctcaagccgctctagcccctcacatgattcatgcttgcactttgcaaaacacccagtgcgcctgtgaaactgagaaaagtgaagccagccccttctagagcttgatttgaatggggcagatttaaggaaggaaagctgaatttygaagtttgcaggaaagttgtagaggggttagcagtaacgtagtgcagggagtaagaagctggagatataaggacacccaatgggtaaagaaaggcccagcagcaggcaacagggctgagactcaggacaaaaaaaaaagtcaagaaatttccagcagtgggaatgtccaaaaaacttctaaataaaagcattttaagctg

SEQ ID NO: 696890 - DNA, 1598 bp, Homo sapiens
accctatttttcaagggacatctcaggaacccatcctttctgatccagaaatatacacttaggttcctcctcaccaagaggaccttagcattcccctctggttgactaaactttaagacaggcaggcttcttgactctaggctcctaacaccccttttctttaagcatttactttacaaaacctgtatttgtaaatcatttctctgtcctttggggaagtaaatctttttaaaggcctcttgccagttttacaactaaggaatgtctttcttaaggacccagagaccattctctgaaatgtaataatcaagaaggatagtgcccctatctcccagtttctatgggaggataggagcctaacgtcattaggtgccttgctccaagttgtaaaactacctcttttcaagaagattccaaaaatttaactttaactttgcataaggccaatgagcaaacacaggtggttttgacactacaaagtctacagtatttcttactgtatttaggttggctggtgaaactttcctgtgtgatcattttgctttctaagaagcagctcttgctctatccagaaaccctaaatattagttttttaggtagattttatggtgtgattccaccataaaatctcttagagccttgtcctgagtgctcatataagattgggaccttatccaagaatggtgcaaagttaaaaacagattactctgttgaactgcaccgaagggtcacaatgtatagaatgcaaatgttttgcttgagtgaaggtagcaaagaaatgaaagacacaaccttttaggaatttaacataactataggaataaaaatgtaaacatacagttattcagtgaacaaggcagccaaagagataaaaagacaaaacaacacagccagaatgatatacttacacaactggtatatttaaagtaaatgaagcatatgtattatttgttagttattatgctagattctacatttatctcatatccatccatccatccatccatccatccatccatccatccatccatccatctcttcctccagacttttgaatgactaatttgtacctttgccaggtgctatggctaaaatgataaacaagacattctttcactcaagaagtttataaggtattagaggacacaggtgggtatagacattgcccactaaaatgtgatagtgctaaatatacacagttatggaagactcaaggttgagaatcttactctacctgatgggtctgggcaatgtgacagaagtggtgaacttaagcctggaggaaaaatgaggttctctagggcaaaagaataactaacatttagtaaatgtccatcatatgacagacgttgtgttataygctttcatgtgtattatttcaaagcctcaaaatattcttacaaagtaggttttaataatcccattttgcaccacaggcaaaggagcttctgaaagtctcaggcctagtaagtgtcagagtgactaggtcaaatacaaatcaaaatggtttccaagctgatgctatttcaattatatcacatgtccccaaagagaaatttcatccaagcagaaaggaagttccatccaagcagaaagaa

SEQ ID NO: 696891 - DNA, 1025 bp, Homo sapiens
tgagaagatctccactagctgttgctggatttcaggatggaggaagactcaagcagagagacctggtggccactagaagcttggaacagccctcagttgatagcaaggaaatgaggactcagtgacacaacctcaaagaactgaattctttcaatgacctgaatattaatgaaatgaaatttctcctagaacctctggaaaagaatgcagccctgctaacactgtaatttcagctcagtgagactgtgttagacttctgacctacagaagtcgtgagacaataaatttttgttgttttaaaccattaagtttatggttccttgttacagctgcaatagaaaacgaatatacttgcacacttctttttttttttaaattagaagttaatatcagagctggggaaagtagcaaatggttctcaactggttctaagaaaagatttaatcaatattttcacacaaactcagtaaatcaaatggataaactagagaaacccacagataaagacacaaaacccagtgtctttagtgctctgaatagcagaaaacaagacgatagatctgcgctttatgttgaaatttttataacttcctccgtgtttatttattgcattttatcttgttttgtctgaaaagtgattggcactgatactcttaaactgtaaaaaaaatctttgttatcacctttgtgggaagacagggaaacaaagaagctctttgggacaagcaggtggcagttaccaccaaaggtgagaaaagcatctgtacccttggaatctggggcaaaggaatcaggagagcatgggagctttcctgatgtaagaagrgtgcctgtaggtgttaagagcagaaaggcttatgctcttttgtgcttcacttattcattgacttattcattcaataaatacttactgagtgcctccaagtgttaactgctggcttacccattacagaactcccagtctaatggggctgtgtaaaccaacagttgcatagtggaaaatgccaagataaagctttacaggt

SEQ ID NO: 696892 - DNA, 614 bp, Homo sapiens
ataaacattgacataatttgatgatagggtcatgtcatcaatattctgcttccatattctctttcagacacattaagtgaattggtttaaccctcatctagataaagtaaartgagtataacttcttgtataaggtgtaagaaaggggtccagtttcagttttctgcatatggctagacttaaacttccacgctataatagtgggagactttaacaccccactgtcaatattacacagatcaatgagactgaaaatttacaaggatattcaggactggaactcagctctggaccaagcggaccgaatagacatctacagaactctccaccccaaatcaatggaatgtacattcttttcagcaacacataacccttattctaaaattgaccacataattggaagtcaaacactcctcagcaaatgcaaaagggcagaagtaatagcaaacagtctctgagaccacagtgcaatcaaattagaactcagggttaagggactcactcaaaactgtacaactacatggaaactgaacaacctgctcctgaatgaatactgggtaaataacgaaattaaggcttaaataaataagttgtttgaaaccagtgagaacaaa

SEQ ID NO: 696893 - DNA, 582 bp, Homo sapiens
gtagatgcagttaaacgataaccagccattgttccctagtttgcctttctataataatctactgctccagaggtcacaagatttgtatcttccctaattgctctgatagataacaacactattgtcaaaacctaagattagtctttgagatatttttcagacttttgtattctggacactgactgactccacctggacctgtgactcacaccactgaactaattcaactggttctgtgatccccacccaggaaytgactcagcacaagaagatagctaaacctgctataatatcatccccaagtcaatcaatcagtgtctcccatttcctagccccctgccctccaaactgtccttgaaaaaccctaacttccaacttttgggggaggcttgtatgagtaacactcccaccctgctgcttggctagccctgcaattattaaactcttactctactgcaataccgctgtcacagtgagttgtttttttctctgtagtgggcaagaataacccatagacacacccatgtgtgtctatttctaggcttttcattttattcagttggtttactgagctatttttac

SEQ ID NO: 696894 - DNA, 655 bp, Homo sapiens
tttacatacagatttttgtgttagttagtattctttactcctgttcagttatctaagaataggtttacttagttgtatggtaaatatatgaatgactgtacaaaaccaccaaactgttttccaaaatgaatgccgttctgcatttctaccaacaatgtatgagttcagatttagtcacatcctttccagcacttggtattttgttttttttttaaatttgtctgtttactctcatcattctaataagtgtgcagggctatctcacttgattttaattkaatttccctgattattaatggtatgagcatattttcatatgtttaattaccatttctataccatttttgaattctcttcaaattttttgtccatttttaatttatatttttgccagactgataaactgagcacagagatatcaacagttaagtagataaagaggacaaattactaatatctgaaatgaaagaagggacatcattcagattctacaggtataaaaatgataatttgaaaattatgaacaactttatactaataaatttaatgacttaaatgaaataagcaaataccttgaatgatatttattaagatggtgacaagaacaaagagaaaatgttaaagctctttatctcttaaagacattgaataccta

SEQ ID NO: 696895 - DNA, 756 bp, Homo sapiens
tatcattgaacatggccactagaatgtaagcctctgaaaacaggagatgtcaaagtctctgtatcccccatagagctatgcaagcctatcacaattctccgtacataacaggtcctctataaatgtttgctaaataaatgaatctgcataagttgtagttcgtttttcccctatctagctaggcaaccacagccggacgcttcagaatcatgagatgcaaataaaaggcctaggagaggaattcatttttcacccacagtcacgctgccaaaagaggaaggatgttggttatgtaacagtggaaaggaaaagaaacagacgagatacttaccagcaaggtgtccagtgcatcaattagagtcagagaaaaactgcaaaaggacagaaatcccagccgcttagtaagaaaatcaaataccagatattatggctgccctagatctgatccccctaaaactaaatgaggcaaagtaatgcctctgcctgtcccacttacagtcacaacagagaaaccacagtgaaaatcgcaggtattctctgacccacttaatgcacctgggagggttggctgatgtagctcaattgtaattaaatacatcacctatagtctggcattctcctctaccattgggaggcagtataagattgcagcttaaagcacaggcctttcaccaattttcacctctaggaatttaattcacagtgaacagctgtttgagagtgttcatgrcagtattgcttagaacagcaagaggc

SEQ ID NO: 696896 - DNA, 620 bp, Homo sapiens
gtgtcccctgcttcaccttttgacatcagaggccgagaacttcccctcgggtcctgccagtgccaccacgttttgaacactgtgtcccatgaagcggcatgggactcagctgcgcacgtgcacgcttctctcataaacacgcaggactcctcctgggcttattaaaataagcaggctcagcccccactcagcagaaattcctcttccctctgcccctctctcgaagggtctgtttctggcttctggctggaggctacacttcccagcctgtcagaaaggccacctgcaggctgcagccctttatgagaaatgaatctctcctttccagtctcaggaacctcatcactcttcagctgacatctcctatcacragattgtcaccaagaccagtgaggggcaaagggagtgggtttgacgttttgttttgttttgtttgagacagggtctcactgtgtcacccaggctggagtgcagtggtgcaatctcaccacactgtaatctctgcctcctggggtgaagtgattctcccacctcagcctcctgagtagctggaactacaggcacacaccactacacctggctaaatttttgtattttttatagagacaggtcttactatg

SEQ ID NO: 696897 - DNA, 475 bp, Homo sapiens
  misc_feature 375, 376, 377, 378, 379, 380, 381, 382, 383, 384, 385, 386,387, 388, 389, 390, 391, 392, 393, 394, 395, 396, 397, 398,399, 400, 401, 402, 403, 404, 405, 406, 407, 408, 409, 410,411, 412, 413, 414, 415, 416, 417, 418, 419, 420, 421: n = A,T,C or G
  misc_feature 422, 423, 424, 425, 426, 427, 428, 429, 430, 431, 432, 433,434, 435, 436, 437, 438, 439, 440, 441, 442, 443, 444, 445,446, 447, 448, 449, 450, 451, 452, 453, 454, 455, 456, 457,458, 459, 460, 461, 462, 463, 464, 465, 466, 467, 468: n = A,T,C or G
  misc_feature 469, 470, 471, 472, 473, 474: n = A,T,C or G
gtttttaagcaaagtctctgcagactttttgagaccaaggaatcttcccacatgtagccccaaatcccttttctgggtttgtacaaagcgtctaaggtgttgaagcccccatggcagctgcaaggcgtgttttgaagtctcctcccaggaagcccctgtcctgaaggacgggttcaattccctgcctccacctgcttaagagagaatctctaagcaccctcttctccttcctcctaggcagcgagagcccrggagagttcctgagacgatgcaatattgataaagcccattgtgctgtaaagttcagactgagacccccagccggcacatttggggtgctgttcttagtgaaaacagagctttcagcgccccacnnnnnnnnnnnnnnnnnnnnnnnnnnnnnnnnnnnnnnnnnnnnnnnnnnnnnnnnnnnnnnnnnnnnnnnnnnnnnnnnnnnnnnnnnnnnnnnnnnnnc

SEQ ID NO: 696898 - DNA, 612 bp, Homo sapiens
caaaaggacccatgacttagttctgaccaaaaccatgagcagaagtctactaggtagggccgggggttctaaaagagsttttcccctttgtaaaaagagaagcaggcactgtcatattatctggattagatctgcttagtacagctgtgcctcacttctcactctgaggagagttaccgtgaggaaaagtgcaacccgatgaagatagctagggtgcgagctggaagaaactgggtcttctatgacattactgaagaactaaattaaccatctctggagcttgcatacctctggatttcttgttatggagcataataaattttcctattattaagccattgtgagttgcatcttttgttacttacagccaaaggcatttgaacgatagagactatggcatacactgtcccttagtcctggtggctgccactggcctgtagaatagagccacggcttttatccaccagatatactgtaggtaaacatgaattaatgaattagttttttctttacttcattcatacacccaacaaacttcattgaaaacttatgtgtgcgggcactgcactaggaggagagatcagaaaggcaagctgccaaccccgaagaagc

SEQ ID NO: 696899 - DNA, 612 bp, Homo sapiens
caaaaggacccatgacttagttctgaccaaaaccatgagcagaagtctactaggtagggccgggggttctaaaagaggttttcccctttgtaaaaagagaagcaggcactgtcatattatctggattagatctgcttagtacagctgtgcctcacttctcactctgaggagagttaccgtgaggaaaagtgcaacccgatgaagatagctagggtgcgagctggaagaaactgggtcttctatgacattactgaagaactaaattaaccatctctggagcttgcatacctctggatttcttgttatggagcataataaattttcctattattaagccattgtgagttgcatcttttgttacttacrgccaaaggcatttgaacgatagagactatggcatacactgtcccttagtcctggtggctgccactggcctgtagaatagagccacggcttttatccaccagatatactgtaggtaaacatgaattaatgaattagttttttctttacttcattcatacacccaacaaacttcattgaaaacttatgtgtgcgggcactgcactaggaggagagatcagaaaggcaagctgccaaccccgaagaagc

SEQ ID NO: 696900 - DNA, 599 bp, Homo sapiens
caaagggagaagaataatatggaggaaaaacatgcaagaaaaataagggatggagtagaaggagcataggggagcctatcatatatctccctaccaaaaaagcagatcaggaagcttgttttgaagaacaagaataatatttatcaaaaggaattatgtcaacctcaggatagaatcccaaactgtagcttgcttagtatatgaaaacttttatgtgcactgataaaaggatagaatcatggaatagtggtagaaaagactggaaaagcaacatcaaatacatgtatacatgcacacatacacacacaatgaacagttttagcagaattcctcatcaatgttttaagacatatgctgtagcacaggactaaattcgagtagaatttgtgataaggaaggaagggagaaaaggaggaagggagaggtagaggaagggagggagcagmtaaaagagtagggaaggagaaagaaacgtaagagatagaagctgccaaattaaggttaagagattaagtgtgtgttaaagttacactgaaaaatcaaacaaaagcaacctgcaggcaatccacagagttctattggcgatagactacagtgcc

SEQ ID NO: 696901 - DNA, 1258 bp, Homo sapiens
taggtcctctgcccttctgtcttctgtcatgtgaggacacagcaataaagcaccatcttggaagccaagagcagccttcaccagacactgaatctgctggcactttgaccttcgacttctctgcttacagaactgtgagaaatacatttktattatctataaattgccgagtctgtggcattttgttagagcagcagggatagactaagatagtccttcaataaatatttttaattgcctaccacatgccaggcatcatctaaagtgctataagagaaaaatagaagaaaaagctttgcttcaaaagctattcacaaataacccttgctcagggcagagtagatcataaataccatgacacagaaaccaacaaggctgaggttctgttcctgccccagacggtgactgagcaagttaatttacctttttttggttcacatccgtggactgataataataattctcccatgcctgcttcacctgagaacaaggaggagagctcagaatacctgagtggacaatgatgggaaggcaccatgagaactgtaaagcaccattgatgcaggagaggttatgatgaaaggatgatgatattggtattgataatggtgaagatgatgattatgatagtaaaggggtgggagaagatatggtaattatggtgaataagatgaaaacaataaggattatagcaataattcatcatcatgattcattcaacaaatatgcactgagggccaactatacgttagacaccatggatacagtaataaatgaaagaatgtacttgtcttatttttcactgggaggaaaatcaataagtgagtgatagtcacataattactagagttttagactgccaaaaaaaaaaaaaaaaggcagagagaagggatagaaaatggtgggaagtggcaatgctaacagagatggtgattctggttacagctggaatccctcggcaaaattaaaaacttatatgagagtcaagtccaagaggcagtttctagtgggctccagcctttgtcactgcaggcggtgcttggtggcagacatgtgttgttatgggatttgtgtgggcctgagtcgggtacatggagtccaagatgtataagaaaagatcttatagatgagatttctcttaggtacattctgagcccaagtgaccaacagtctgggaaaacaaagaccctggttgtttctttcatatgaaacatgtttatgaagcttgtcttccttgtctccaagaagaatttctgtg

SEQ ID NO: 696902 - DNA, 1258 bp, Homo sapiens
taggtcctctgcccttctgtcttctgtcatgtgaggacacagcaataaagcaccatcttggaagccaagagcagccttcaccagacactgaatctgctggcactttgaccttcgacttctctgcttacagaactgtgagaaatacatttttattatctataaattgccgagtctgtggcattttgttagagcagcagggatagactaagatagtccttcaataaatatttttaattgcctaccacatgccaggcatcatctaaagtgctrtaagagaaaaatagaagaaaaagctttgcttcaaaagctattcacaaataacccttgctcagggcagagtagatcataaataccatgacacagaaaccaacaaggctgaggttctgttcctgccccagacggtgactgagcaagttaatttacctttttttggttcacatccgtggactgataataataattctcccatgcctgcttcacctgagaacaaggaggagagctcagaatacctgagtggacaatgatgggaaggcaccatgagaactgtaaagcaccattgatgcaggagaggttatgatgaaaggatgatgatattggtattgataatggtgaagatgatgattatgatagtaaaggggtgggagaagatatggtaattatggtgaataagatgaaaacaataaggattatagcaataattcatcatcatgattcattcaacaaatatgcactgagggccaactatacgttagacaccatggatacagtaataaatgaaagaatgtacttgtcttatttttcactgggaggaaaatcaataagtgagtgatagtcacataattactagagttttagactgccaaaaaaaaaaaaaaaaggcagagagaagggatagaaaatggtgggaagtggcaatgctaacagagatggtgattctggttacagctggaatccctcggcaaaattaaaaacttatatgagagtcaagtccaagaggcagtttctagtgggctccagcctttgtcactgcaggcggtgcttggtggcagacatgtgttgttatgggatttgtgtgggcctgagtcgggtacatggagtccaagatgtataagaaaagatcttatagatgagatttctcttaggtacattctgagcccaagtgaccaacagtctgggaaaacaaagaccctggttgtttctttcatatgaaacatgtttatgaagcttgtcttccttgtctccaagaagaatttctgtg

SEQ ID NO: 696903 - DNA, 1258 bp, Homo sapiens
taggtcctctgcccttctgtcttctgtcatgtgaggacacagcaataaagcaccatcttggaagccaagagcagccttcaccagacactgaatctgctggcactttgaccttcgacttctctgcttacagaactgtgagaaatacatttttattatctataaattgccgagtctgtggcattttgttagagcagcagggatagactaagatagtccttcaataaatatttttaattgcctaccacatgccaggcatcatctaaagtgctataagagaaaaatagaagaaaaagctttgcttcaaaagctattcacaaataacccttgctcagggcagagtagatcataartaccatgacacagaaaccaacaaggctgaggttctgttcctgccccagacggtgactgagcaagttaatttacctttttttggttcacatccgtggactgataataataattctcccatgcctgcttcacctgagaacaaggaggagagctcagaatacctgagtggacaatgatgggaaggcaccatgagaactgtaaagcaccattgatgcaggagaggttatgatgaaaggatgatgatattggtattgataatggtgaagatgatgattatgatagtaaaggggtgggagaagatatggtaattatggtgaataagatgaaaacaataaggattatagcaataattcatcatcatgattcattcaacaaatatgcactgagggccaactatacgttagacaccatggatacagtaataaatgaaagaatgtacttgtcttatttttcactgggaggaaaatcaataagtgagtgatagtcacataattactagagttttagactgccaaaaaaaaaaaaaaaaggcagagagaagggatagaaaatggtgggaagtggcaatgctaacagagatggtgattctggttacagctggaatccctcggcaaaattaaaaacttatatgagagtcaagtccaagaggcagtttctagtgggctccagcctttgtcactgcaggcggtgcttggtggcagacatgtgttgttatgggatttgtgtgggcctgagtcgggtacatggagtccaagatgtataagaaaagatcttatagatgagatttctcttaggtacattctgagcccaagtgaccaacagtctgggaaaacaaagaccctggttgtttctttcatatgaaacatgtttatgaagcttgtcttccttgtctccaagaagaatttctgtg

SEQ ID NO: 696904 - DNA, 433 bp, Homo sapiens
aatttaatccttytaaaacttctggtttgggggaggtttgggtgttttgcttgttttttgtttttcccacagctggagtattagtctactaatagactaatactatttctaggtagtatttccaggtagaaatggaactattaaatttttcctctacatttttaaacgaggtctgatccaaacaataaaagattcaaaacaaagtaaaagtacatcgtttctggcctagatgttttcttcccaacaaaaccccaaatccttggtgcctagggatttgttaagtatgtcgtcaaactgtcatttaggacagaattaaatgaaatccacattatatacttttcattaaaacatcagcatttagatcagtcaattacatttcaacaagcagtgaattcatcccgaaagtagaaagggaaagaaactaatatatatt

SEQ ID NO: 696905 - DNA, 433 bp, Homo sapiens
aatttaatccttctaaaacttctggtttgggggaggtttgggtgttttgcttgttttttgtttttcccacagctggagtattagtctactaatagactaatactatttctaggtagtatttccaggtagaaatggaactattaaatttttcctctacatttttaaacgaggtctgatccaaacaataaaagattcaaaacaargtaaaagtacatcgtttctggcctagatgttttcttcccaacaaaaccccaaatccttggtgcctagggatttgttaagtatgtcgtcaaactgtcatttaggacagaattaaatgaaatccacattatatacttttcattaaaacatcagcatttagatcagtcaattacatttcaacaagcagtgaattcatcccgaaagtagaaagggaaagaaactaatatatatt

SEQ ID NO: 696906 - DNA, 696 bp, Homo sapiens
gccaccgcacccagcctggatatgcactaactcaaaattatcaatatctcctttctctaagtacagaatacgttaaagtggctgttgcataaaccttaatgttaacaaattcaagtggatggatgggtgctaagtaaataatacagtaagtctcttccatggaggctacttatcagaattactaagttaaattaaataccacaagtaatttcatttgggagataaatagtcaagaagaataagaacaatttgggggtcaggggaaaagaatgagggggactaatcttaatattaaacatttctaaaatacagtgataaatgtgktattagacataataatagactttgttagaaaatattcagcttagagtaccacctctaggaatgtgtattagtttaaatgtatgattaaaaagtcatcacaataaatataaggaaagaaatcatcagtcatgaataatgatggaacttttgcttagctaaaattaatagaaaaaaatcaagttgattactactcttaaataaattccagctcatgtaatactgtttcagtgttttctgaatttgttcaaatcctcaggatatgtacatagtacatatatatatttttttttattttttttttttattttttattttttggcagagtctctctctttcgcccaggctggaatatagtagcactcacttcagcct

SEQ ID NO: 696907 - DNA, 631 bp, Homo sapiens
tgttgtcaaagtactggctagaaaaatggttaatggtgaaaatcggcaatagcagaaaaacaggatactgatgaaaatgcagtgcatggtgttgctgctcaaataacacttcttgactacagtggctttatctacatgcatggatgaattagagagggaaataagactaagcttcatttctctgtgcagtctagcaaggtcttctcaactgagatttcaaaaacatgttggaagaaagcttactatacttttatccattaactctgaaatattagttaaaaacattatattccgaaaatattacatttagcaaatcagccatttgagtgtttcactttgccagattttctgagctttggtgacccatctttgtacrttaaataggaaaaaaaagaatgatatattttaaggcagatttttgcttcactaaaagctaaaatgattaacttgcgaacaaagaccaagttggacaagagcctttttaattttggaaatttttgtgggaaggcctggaaataaaaagtgacaagtgaatgagttggaaattacaacaataattacacaactttgaacttaccatcataaattgtagatacttgttagaatgcatactgcagtttcagcaaagcaa

SEQ ID NO: 696908 - DNA, 600 bp, Homo sapiens
atgcctgtaatcccaacactttgggaggccgaggtgggcggatcacgaggtcaggagatggagaccatcctggctaacacggtgaaaccctgtctctactaaaaatacaaamaacttatacgggagtggtggcgggcgcctgtagtcccagctactcgggaggctgaggcaggagaatggtgtgaacccgggaggcagagcttgcagtgagctgagatcgcgacactgcaatccagcctgggcgacacagtgagactccgtctcaaaaataaataaataaataaataaataaaagatatggtatagaaagcatcaaagggcagagaagtgctctagtcctggccttgccaatttttaaacatagttttaactatgggaaagtcatttaaccatttcagtgcccttaatccaaagataatactatccagccaacttgttttgataaaccgaagtattaatatgggcgaccgcacaaatgcaaaatgttattatggggagggaggggaatacatctatctaccttgatgcagtttagtgaaacttcaatgattctgtctccctacattttcctagatctaaaataaaatctaaagtttatag

SEQ ID NO: 696909 - DNA, 600 bp, Homo sapiens
atgcctgtaatcccaacactttgggaggccgaggtgggcggatcacgaggtcaggagatggagaccatcctggctaacacggtgaaaccctgtctctactaaaaatacaaaaaacttatacgggagtggtggcgggcgcctgtagtcccagctactcgggaggctgaggcaggagaatggtgtgaacccgggaggcagagcttgcagtgagctgagatcgcgacactgcaatccagcctgggcgacacagtgagactccgtctcaaaaataaataaataaataaataaataaaagatatggtatagaaagcatcaaagggcagagaagtgctctagtcctggccttgccaatttttaaacatagttttaactatgggaaagtcatttaaccatttcagtgcccttaatccaaagataatactatccagccaacttgttttgataaaccgaagtattaatatgggcgacygcacaaatgcaaaatgttattatggggagggaggggaatacatctatctaccttgatgcagtttagtgaaacttcaatgattctgtctccctacattttcctagatctaaaataaaatctaaagtttatag

SEQ ID NO: 696910 - DNA, 668 bp, Homo sapiens
tatttatagctatttatttgtagctatttatagacaaagccacaatgggaacccgtatcccttatgtccagtgcaccagttatatgtgatattctgagacaataggcaaatgaatttttatataaagaaagtagttcacttttcaaacttaaaagggaaatatataagaatgcagtcatcttttacatgttcaaaataatgagaacaatatttagcaaatacttagaacctgtcccaccagctaaacgtgttaggcaacaaaaagtagtagaaataagaaaaatgtaatctcttgcctcttgcagtactccatgatggaggtttgttgttttgttaattactgtcacagaagagaaaaagaaaacttcggataatctactttttataattcagaattaactgtatcatcctttagtggaatatttaaggcagatcatgcacttcatatttcatcttttatatgaaaatattggttcacattttgagtttaatcaratattcaaagcaagatgttaaaaattaaatttttaatggaaatgaatgggcttaatattctacaacgttcatttattcaacagaattgtattgagcagctattatgtactatactacatggtgtaagcccaagatatgagccaagaaaaattaagtattctacataaataaaa

SEQ ID NO: 696911 - DNA, 611 bp, Homo sapiens
ctgtccaaaaatcacaaagtaaggcatgaagctaggattaaagctcagatttatttactctctggctagtgctctttaaaaacctaaagcatttatatgttatttccttaaaagctstctatgaaatagtttttcttacaaaggcacttaaaactggaacccagtgtacttttcataaatcagtaacacttgaacactcgaaatctgacatgcagaatgatatttaaaaacatctttataacaagtgaagataaaggaatacgtcatttgcattattaaaaaataataattaaactgggaatcttgccaaacacctgtataatgattccttctctggaatctattagctctcccttagttctccctttcaactcattcattctaatcattattcaagatctgactgaagtttatcttctgtcccaaagcttgatacattgactccagctgaaaatgtcctcttccatctaaattactactgtacttattttctatactggtaacttatggacaaagaaggtgctcaataaatatatgttgactgatctgcaggcacattattaacctacagatgatcttctaatacaggcttttttttttttttctaacag

SEQ ID NO: 696912 - DNA, 611 bp, Homo sapiens
ctgtccaaaaatcacaaagtaaggcatgaagctaggattaaagctcagatttatttactctctggctagtgctctttaaaaacctaaagcatttatatgttatttccttaaaagctgtctatgaaatagtttttcttacaaaggcacttaaaactggaacccagtgtacttttcataaatcagtaacacttgaacactcgaaatctgacatgcagaatgatatttaaaaacatctttataacaagtgaagataaaggaatacgtcatttgcattattaaaaaataataattaaactgggaatcttgccaaacacctgtataatgattccttctctggaatctattagctctcccttagttctccctttcaactcattcattctaatcattattcaagatctgactgaagtttatcttctgtcccaaagcttgatacaytgactccagctgaaaatgtcctcttccatctaaattactactgtacttattttctatactggtaacttatggacaaagaaggtgctcaataaatatatgttgactgatctgcaggcacattattaacctacagatgatcttctaatacaggcttttttttttttttctaacag

SEQ ID NO: 696913 - DNA, 931 bp, Homo sapiens
tattacatttgtgaagaaatcctgttaatggcacactgtttttgttaaagtattaaagcaggatctctagggaattctatcagcaacatgtttatgaacttagcccaaatcagtgcatggagctaaggtataataaaaatatgtgtgtttagaattatcaaatattagtgctgtgagacagtagatatcactgttaggtgtggtggctcatgcttgcaatcccagcactttgagaggctgaggtgggctaattgcttgagcccaagagttccagactgttagtggtggaagagatccaagtcaccatcccccaatccatacacgtctgcagcaatttcaattcttgcctcctcagaagaaagaatttgactgaggggcataaagcagaaaaaagagacctaggtgagttccagagcaggagtggaagttaattttaattaacttcctttttaaagctttttaaagcttcagaacaataaaaaaaaaataaaagaatccttggaagagatacaagtgggtgcctgaaggtcaaagagagaaaacaggagtgaccttataggctggaactttataggcttcatcctggaactttataggaactttatcctggaactttataggctcactttttycccatcattcttcccttagggtgggcttctgcatgcagtgtctttcttacccttgggaattgagcacaggcaatgtatttaaggggtcataggcatgcccttctgaggccttcttcccttttctggtagcatgtatgtaagcaaaatggatgtgctgcaatcaagaacaggccgaggcaggcatctggtccaggatgactcagagagtttggagtgcaggtgcacaactctacccattatgtaacctgtttgtgtaagctcatcacctggctctgagccactattgtctgtgaggtgca

SEQ ID NO: 696914 - DNA, 676 bp, Homo sapiens
ttcagagctactcttagtctctcaattaatactaaatggtaatacatacatgtaaaatctcaaacagtcaaaaaaaaaaaaaggactgtctgtggttgtagtgacattagaataataaatcagtttcttctattaccttgaagctgctctcattctatccacctgcaaaattaaaccacacacacacacatgcatgctacctcccgtagactaaaaacatgccctattgagcatctaaccccagccaagtacatctgcttctcttctggaatgttctttcccaggaaattgtaggtaactccatccactccatgcagccagaaacacctgcatcttcttcaccagtgcccccccttctaattaacaacaaagttacctcaactcccccttcttaayaccagctctatctttttcatcatccaatagcccaatcaaggccaccaacatctgtcctaaattatcagaataggcctggaatatgcctccaatcttgccctctgcaaaccattttctaccagaataacctttctaaaacatggacacatacataatcactgccctcacttgctcccatggttcccctttccctcaggacggcaagaggtctcctgctggttaaaccctcccaatgtggctcctgcccacttctcctgccccctacttctctcttcctcca

SEQ ID NO: 696915 - DNA, 665 bp, Homo sapiens
ttgaactcctgacctcaggtgatcagcccgccttggcctcctaaagtgctgggattacaggtgtgagtcaccgcgcccggccaggtttctcagtttctataatgagcacatattcctttgatacaggactaagaaacctcataaatatcattgaagaagaaaccttaatgttcttttccaccagtctttccttttcccttagggaggatgggattcccatgtgtttggtggtgctgcggggtccccagcagtctayagagagagagagagagagagagagagagagagagagagagagcaggcgggtcttgctcaggtggggcaccctgacagcaattgtagaagatccaggcagggatccaagagtgtagctagagccagcagagaatgcttcctgggggcagaggcagtggagctgacctggaagggtgatgaagctggcacaagacaggaatctgctctgcctgccccctcactaagaactgcctgccctgagctggacttcagcagtcctcttcctgtagtgggtccccttccccctcaagagactttgaggttgcaggctgggaagttggaacttaggttcccagggtcctccattagaaaggggcctgagagatcatctgattttccacacaaataggaactatggaaggtttaaggca

SEQ ID NO: 696916 - DNA, 1150 bp, Homo sapiens
ggtaaacatctattttgaacaattataagcaaatgacttcatctgtaacacacaaagccactgtggtctgagattgtgtatctctctttctctccctctctccttccctctcttcctccttctaatttctctctctctctctcactttctttctctctatctcacatgtgcacacacacccacactttctgcgtgcccaaataacacgtttttctgtctaaacttgaatagttgagaattttcatctgcgtataaagcttaagtacttacacggactgtcatggaattttggatatttaattaaagacatttgggattataaaaaacaaaagtcatccaacttcctgtaggatactttctgttttatataagctagaattgttgagattaaatagtaatatggtttggctctgtgtctccacccaaatgggttatggggctggtttcacccatgctgctcttgtgatagtgagtgaattctcacgagatctgatggttttaaaagtggcaggtttttcctgcactctgacttttctctcctgctgccatgagaagaagatccttgcttccccttctgccatgattgtaagtttcctgaggcctccccagccatgcagaactgtgagtcaaataaacctcctacgtttataagttacccagtctcaggtagtgtctttatagtagtgtgagaatggactgatacagatagaatgctaagaaatgagaagaaagcctgtctgagctttcgaagggagtacaccaaccctgaggccccagccccttgggggctttgcactgcatgttgatgatgatgatgatgatgatgatgatgatgttgatggagccatcctcttcatcgtgcatctctgcatggtttgttctcctgcttccttcagttcrcttcttgaatgtcatctcctcccccagcttcaattgtagttcataagaattgttacccactgaaattaccaaatgtgtttgtttaccaattgatgatccatgtccccttcaatgttgtgagttctaggagggcagggaccttgcctctcccattcattgttctgtccccaatgcctggcacatactgagtgttcaagacatacgtattggaagagcgagatggagtctgtcacccaaattgcttcaccca

SEQ ID NO: 696917 - DNA, 1150 bp, Homo sapiens
ggtaaacatctattttgaacaattataagcaaatgacttcatctgtaacacacaaagccactgtggtctgagattgtgtatctctctttctctccctctctccttccctctcttcctccttctaatttctctctctctctctcactttctttctctctatctcacatgtgcacacacacccacactttctgcgtgcccaaataacacgtttttctgtctaaacttgaatagttgagaattttcatctgcgtataaagcttaagtacttacacggactgtcatggaattttggatatttaattaaagacatttgggattataaaaaacaaaagtcatccaacttcctgtaggatactttctgttttatataagctagaattgttgagattaaatagtaatatggtttggctctgtgtctccacccaaatgggttatggggctggtttcacccatgctgctcttgtgatagtgagtgaattctcacgagatctgatggttttaaaagtggcaggtttttcctgcactctgacttttctctcctgctgccatgagaagaagatccttgcttccccttctgccatgattgtaagtttcctgaggcctccccagccatgcagaactgtgagtcaaataaacctcctacgtttataagttacccagtctcaggtagtgtctttatagtagtgtgagaatggactgatacagatagaatgctaagaaatgagaagaaagcctgtctgagctttcgaagggagtacaccaaccctgaggccccagccccttgggggctttgcactgcatgttgatgatgatgatgatgatgatgatgatgatgttgatggagccatcctcttcatcgtgcatctctgcatggtttgttctcctgcttccttcagttcgcttcttgaatgtcatctcctcmcccagcttcaattgtagttcataagaattgttacccactgaaattaccaaatgtgtttgtttaccaattgatgatccatgtccccttcaatgttgtgagttctaggagggcagggaccttgcctctcccattcattgttctgtccccaatgcctggcacatactgagtgttcaagacatacgtattggaagagcgagatggagtctgtcacccaaattgcttcaccca

SEQ ID NO: 696918 - DNA, 537 bp, Homo sapiens
ctatagatgttgcgattgttttgtagacaatatggttctaaacccaaaggagactcagtgggcttggttcctggcacatcaaaggtaaacaaatgcatttaggacaaaatgaatagtggtagatgccccccatgaagggccagatgtggggagtaggctgactcagcagscacaacaaaagagagacatcctcaccagaacctcctcctcatgcgctttcagagcccttagtcacacacagatgtgtagtgtttctaaacagtgagcctggtactagaaagacctcgccatttctgtatacacatggaggggagtgagtgaaaaacttcccagctcaaatgccccttccctgtatggtcaacttgagagcaaggagtcgcccaggtacaacctggttttctgcacaggatcttgtccatcatatgtatttgataaatgtttgatatgagatccaattccagaggcacaaattgtgtttttttggtgaaactgatgtggttttctgcacatcataggaagtgtatttttcatggctgg

SEQ ID NO: 696919 - DNA, 592 bp, Homo sapiens
tgtcccacccaggtggggcagactggctgccctgggagtcccaactggcctgttagtaccacttccaggctcaagcctcagcccagcttagaacagggttgcccggcacccaggagcccccctcccccaactgccagaagccagggcacatgcacccagtgccacccacagggacgcagtgaccagagccaaccggagatttcctggtggggctcaggggaacaagcagtgtctcctgagctgtgtgtacccccagcccctccacccaagtaagccccctccctagaggaggcccacagctgctcaccatgggcctttcagggtcttgccctccctcactcccgccagcaggccacgcacatgatcctggggtccttgggcagggtgtgcactgccgcaccaggtccaacaccagccaaccgcttccctggasaggctgcctggaggactgcagaggggcaggccaggcggaggcttttgaagttggctcctccaagctgagggagggagcaggagagggaaggaaaggccacgcaatcccagccctgccccctccctctctccactccctatcacttcaattaacctggcc

SEQ ID NO: 696920 - DNA, 801 bp, Homo sapiens
  misc_feature 701, 702, 703, 704, 705, 706, 707, 708, 709, 710, 711, 712,713, 714, 715, 716, 717, 718, 719, 720, 721, 722, 723, 724,725, 726, 727, 728, 729, 730, 731, 732, 733, 734, 735, 736,737, 738, 739, 740, 741, 742, 743, 744, 745, 746, 747: n = A,T,C or G
  misc_feature 748, 749, 750, 751, 752, 753, 754, 755, 756, 757, 758, 759,760, 761, 762, 763, 764, 765, 766, 767, 768, 769, 770, 771,772, 773, 774, 775, 776, 777, 778, 779, 780, 781, 782, 783,784, 785, 786, 787, 788, 789, 790, 791, 792, 793, 794: n = A,T,C or G
  misc_feature 795, 796, 797, 798, 799, 800: n = A,T,C or G
attggtgcatattgcagcaacaatatggaaataattatctttttaattggtgttggattaaatttaatattcatatagaaaaaaatcttgaaaccttatctctaataatagagacaaagtgggttatatatctaaactcaaaatgtaaaactataatacttctggaataaaatatagaagcaaatcttcattatcttttgatatgtaaatattttttaaaaagacacaagcttgctaaactagattgcattaatattaagacaagttaatcaaaagacaatattatagttactatcaccagtgatatgatgtggttattatgtacctcctggtgtgctgtgaagagacggatacttcatctctgtgatgttctttcaaaaagaaacataacttcagtctaataatgaaaaaaatcagacatacccactttgacagacacgctaggaaatacccgaccagtatgcaaaactgttaaggtcatgaaaaataaggtaagacagaaactgtcacagacctgaggagactaaggagacatgacagttaagtgctatatggtagcctgcattggatcctggaagagaaacaggacactaatggaaaaaattggtgaaattcaaawgaagtctgaagcttagttaataaaaatttaccaatgatggcttcttaattttgacaaatacaccatagtgatgtgagatgcnnnnnnnnnnnnnnnnnnnnnnnnnnnnnnnnnnnnnnnnnnnnnnnnnnnnnnnnnnnnnnnnnnnnnnnnnnnnnnnnnnnnnnnnnnnnnnnnnnnnt

SEQ ID NO: 696921 - DNA, 1028 bp, Homo sapiens
cccctgggctgggactggggtttcccggatgccccaggtgcagacaaggccctcaaggagctcacagtatggaggggccaacagtcaaagcgattcctaagccatgcgagtggccccggtaacagagcagaggccagctggtccttcctgttgtgagagtgggtgtctcaacggaagcaccaggaggccctatggggtgaagccctagtgagcaacatctgaacttcataaacaaatgcagacgtgaatgagctttaaatggcttggagctctggattagactaccactgacactgcgcctcaggaaaattctttaacatctctgtaccacgatagcctcattttattattatgttgctgataactatgatctaaaacatgaactatgattctttacttccatttcatggaccaggaatctggagctcagagaacttagaagatttgcgccaagtcacatggctttcatatggatgacaaccaaagtgtgtgacttgttattctttggagataataacagaaacaatgtcatagaggtcttcttatggattaaattaattaatccatctgaactgcttaaaatagtatctggcatcactatgaaaacaaaagamgtattaaggatcacaactgttagtattatcaagccattgatgccacatctggtgttgtgatagacatggggagaaggaggcaatgaggacatttttgatattctcccgctcttaccagtgttcacatccgtggagggacaaaggttctctggtcctgtagatttgagagatactcaccttcgggatgattctctggagcctgccaaaagtcatctgaggacgttcaactgaaagagaatacattagaatttttctttgttggtaaagattcccaaactctagacagacttctgtcgcatcagggcattctgcagcagaggtttatgagtctactgattcttgaggagttatttgagatttgcttctgaattatgtttagtcatggttggttcacttatctgtggcatcaattca

SEQ ID NO: 696922 - DNA, 651 bp, Homo sapiens
gtgagtgttttgttttgtcttttaatttgtggaggtgatctagtcaacatttggttgaattcagtgctgtggtatgcagatatacggattgctaacttactgaatttaggatacaacctcttaaagtgtaggaaaggagtgcatgtgggagaggtaaagcaggagaagttaccaagtttctagaaaatactggcctcagatccggtgtgtggtatacagtagatactcagtgaatcaaatccctggcactgataattgatgtgtgggtccaggacagtcagcatgattagtagacttaaattagtgctggtggctcccataggacattactgcttccatttaccattcttcttttgtccatatcagtattttacaacatatggtctgcacattacctgtatcagaattcattagctgagttaatggttaaaaattcagattcttggaatcctatcctcagagattctgattcagtagctctggggagaggcctaggaatctgaggtttgttttttttgtkggggggaatggtgggaatctgagttattaacaggcacccctgatgaatctctgaccccctaggattgagaattgtcctatagaaccttctggtataaaacctgctccctagatgcaccctagaggtttgca

SEQ ID NO: 696923 - DNA, 1054 bp, Homo sapiens
aacccggagaatccagtccaacccaagatcaaggggctggctccaagccaagaacaggaaaagmagccaggagagtgaaagaaggaaaggaggaaagactggcccaaagtcagagagttagagagcttattgtatacaagatcaggtgcctgaagggctctcatattgggctccagccacacaggtttgaatagtcaacctggcttaaaggaacacataagagtgaaattgaatgatccaaggaaaaataaatgccagaaaaactctgtctccactctcagctatctcaactatcaatctcatttctcacacactcgtaaacaaatttgtttatgagatgcctgtccacatttgggaatcatttgggaatacttttttttttttttaaagagctagctcactgcagcctcaaactcagagacagctcactgcagcctcaagctcctgggctcaagggatccttccacctcagccccccaagtagctgggcctacaggcacacgccaccatgtctgactaattttaaaattttttgtagagacagagtctcactatgttgcccaggcaggtctggaactcctgggctccagcaatccttcacctcagtctcccaatgtgctgggattgcaggcatgaatcatcatgcctgaccacagataacttttttaaaaatataatttctgacagagtttcaaagaagttgtaggggagatccaatagaagaaaaaaaacgatcactttcagtaaggaagagaaaggaagaaaatatgccaatatttttggtgatccactatgtgccactcatggattctcaccacagccctgaatatttttatccccagtctttataagaagaaaccaagactcagaaaagtccatccctaggtaatacagcagagacagatacaggcccagatatgactccaaagcttcctcttgggagaattagggaagtttcaaggcagaaatggcatgtggtctgaagatgcaagatagctaggagaagctaaaagggagttgccaaaagtgagcaaatgaagaaagacggaaaatg

SEQ ID NO: 696924 - DNA, 697 bp, Homo sapiens
tgctggtctactcactcttgagtgaagctctttctttgaaaaagctatctgtgtttaaaatctgtgtgattcatcttttctccatccattttgaggctccaaggccagtggaagagttctgactcaggtccagttgcagggtacaagccagtaagtcatgttgtttcttgataccactttcccgtttttttttttaacatcatagccagtgtgtcaagttggtttgcgtcccccaggaagcaacaccagtgactgttagtaaaggaacactacttggaaagaccattttgaaggctctagttaaaagcaacaacttaaaatgaaaaatttttaagcygctttattttgaaagatttttgttttcaaaaattaaacattgtagttcttcaagaactctgtagttggaaatattttctctcattaaaaacgcaaagcctctggaggaaatgatactctgagctttgtagcacaaatcaatgccaaatgaaggccataaaccatgttttgttctgcacttggcacagtctccaaatatcttgaacaaacaacggcactgtgcttcagacccagggacccttacttctctggaaatttatgattgtccattataggaaagtagaaatgctgaggattagcaagtctggactaggattggaggagaaacaaagaaattattaaaaacataaacaatttgaat

SEQ ID NO: 696925 - DNA, 1477 bp, Homo sapiens
tgacctttgcgatgccttaattgtgaaattgaatagtggctcatgggaacctatttaattattatattttatattttacatatacatttatccagatagtcaaggaaagaacaaagtggggagaaagagaagagaaagagagaagatgaagagagggaatggagaggatggaggcaagagaaaagcaggagctatggagtcagacatcaactctaacaattaataaatgtttgaagttagataagttctttagtatctctgagccttatttttaaatatcaaatgtaaatttcactgttgggattgagatgagtactaaatgagattaattcaaataactacacactcctgttgtttggttatttacacgcacactcctgtttctccctgcccaactccttttctacttaaaataaataaaaattttggggcggggtgcggggtcagggaaaggagagatgctgcagatcatcactattatcttcctttcggtcatttctgtaggcaggacactgcccgtgattacaaagcaggtgatgtcagtggctttccagatcccagtcccctcagaaacccagtgaccctaggttctagaatacaacactcctaactttcttcttcatggcttgaactgatgcctagtgctttcaaagattaaacattttttttttttttagcaagacctaattaggaaaatcacaattaggtgcaaatatgatttaatcttcccttgggaagggtaggttactttccgaaaaagtagttagttaactaaaatgaatctttaagtggtgaaatgtgagatggaagtattttggagcacagttgcactcaccaccaccccttaccttttctcccttggggagaaaagcaaaactaatcagcttgccagctgccaaggacccccacatcactctgaaagtgaagctttaatggctcaataaacacaaacattcataaattcagcaacatcaaacatcaactggtaggggctcatgcctaaacatactgccttagcacccagttgagtttagctcagtggctttcaactggaggagatctttacctccagggaatggtaggtaattctggagacatttgtagtctcacaactggagagtagggtacacaaattactggcacctagyaggtgaaggagacaaggatgcttgttggaaacatcctacaatgcacaggacagacctaataacaaacaactataaggtctcaaaatgtcatatgtgctgcctatgaaaaatctgggtttgctgtacgtgtgccacattgagctagctttcttctgacctcagagtcccaaactagctgtttactataaaggaattttatgtcatggggctcattataccttaatgcagggattattaagccaaagatctgtgaactggcttaaggcaattcataaaatccatgaaattatatgtaaattttgttcacatgtgcagttttaaaacatgag

SEQ ID NO: 696926 - DNA, 2702 bp, Homo sapiens
  misc_feature 822, 823, 824, 825, 826, 827, 828, 829, 830, 831, 832, 833,834, 835, 836, 837, 838, 839, 840, 841, 842, 843, 844, 845,846, 847, 848, 849, 850, 851, 852, 853, 854, 855, 856, 857,858, 859, 860, 861, 862, 863, 864, 865, 866, 867, 868: n = A,T,C or G
  misc_feature 869, 870, 871, 872, 873, 874, 875, 876, 877, 878, 879, 880,881, 882, 883, 884, 885, 886, 887, 888, 889, 890, 891, 892,893, 894, 895, 896, 897, 898, 899, 900, 901, 902, 903, 904,905, 906, 907, 908, 909, 910, 911, 912, 913, 914, 915: n = A,T,C or G
  misc_feature 916, 917, 918, 919, 920, 921, 1494: n = A,T,C or G
ggaccagtgtattaaacagcttttgctagtgtattaatttcctagggttgctataacaatgaccacaacttgggtggtttaaaaagaaaccaaaaaatatttttcacagttttaaaggtttgaagtccaaaatcgaagtgtggacagggccattctccttctgaagcctgtagggaagtattcttctttgcattttctaggttcttttaacccctgagattccttgacttctggcagtgtaattaattccattctctgcctggtcttcacatttcacatggttgtgtagccaaggtatctataactggtaaaaatttgattttccctattaggacactaataatgttttattaagggaccaccctactccagtaggacttcctcttaactaattacatctgcaaataaccaattcccaaataagtgcacattttgaggcactaagaattcggattcaaggtatctttctgggagacacaagtcaacatataacacctcagttttgctacatatgccaatagtcaacagaattttcttctgaacatgctttttgcccacttatttgcaggtaacttgaacttattatcatgcttctttggaagagaaatgtatttagtatcatttctccaaatctcttgtcctgagtaaataacctgctaagaaccaactaaattaatttagatatttaacaaagcatttcttggtgaaactttagattttgtgtatttcctgaagctgaatgtttagcaacctttgacactagatttttatctttgattcattggctgagtaaaaattgcatctctcaaccgcgaaagtccnnnnnnnnnnnnnnnnnnnnnnnnnnnnnnnnnnnnnnnnnnnnnnnnnnnnnnnnnnnnnnnnnnnnnnnnnnnnnnnnnnnnnnnnnnnnnnnnnnnnacattgctgtatatcctgagttaaagttcttgtagcagagagaaaaggtaaaggatggaagcagacagtggtgctgcagtgcttagcttttctggtagggcataccactaaataattttgttcatttgtaaaaaaaaaaccaagtaatatttctaagctggtaaatgagttgcagagtgttacttctcacaaatgaacacagcagtaacttgaaaattaacaggaatgtataatcctcttacacaatggtcagtgaatctttaagaattcagcaaactatatattagataaatctattataaattacatgagaagtaaagatataaaaatcaggaaaataattacctcttcaagaagtctggatgaaaagaggagagagaacaagtttaataaatagtggactgagtcgggtatatatgtatttgtgggtgtttcattgtagttctatggtttggtgtggttttaacaaaaacataaaaaagaatatacttacagactgacaaggaaggaggagaggctgaacattcattttacacaggaaaaagaataagtattaggtcaattgcttagtgnaagagttatttattcaagtgagaataatcactttaataatagataaatcactatgggtaatagaagaagtagttgaaaatctacaagtaagaggattgctatgtagaactagaaattttttttttaccctttagaacttgacatgggagagttaccaattgaaacagcacaatggtgtcatcaacgtttaattgataaaatgtaaaaagaaaaaaaaagaaaggtactagtgcttttagaaaaagaaatataaacagtaaaatgagaaggtataaaacagaaatgaagaacatgtaattgaagcatcatttcagatgtggagaaagagaagaaaattgaagttagaaatggtgttaagaagatattttctttagataaacagaagggaagcayagacaattattaagaaatattacacgacaaatttttggaacccctacagctgcagcgggaaaaaaaaataacaaccctaaatgtagccaaagaataatgaacccaaattgtggcaaacctattaatggccccccaaaattattaccaatctcctaatttccttttacaataacatttatgcaaaactcgaaatattgtacagttagatttctgaaccaacaggtgtgcactagatgtatgtgtgtacatgtatgtatgtgacatcattcaccaagaaggtgaaagaaaaatctctacactaaaaactgtaaatgattcataaaaggaagtaaaaaaatacacaaataaagaaaagatatcccatatttatggattgaaaaattaatattgttaaaacattcatagtacctaatctacagattcaatgtaatctctatcaaaaggccagttagttacctttatcatagaaatagaaaaacaaaaacaaaaacaaaaaaaatgattttaaagttgtaaaaaaccacaaaggagccttaatagctaaaacagtcttgggcaaaaagaacaaagctagaggaatcacactacctgacttcaaaatatactacaaagatatagtaaccaaaatagcatgatactggcataaaaacagaaatactgaccaatgtaacagaataaagagctcagaaataaatccatgcatttatggccagttggtttttgacaaaagtgccaagaacacacaatgtagaaaaattttaacagttggcaaaaattattttttaaaataaaactctcttcaacaaatgatattc

SEQ ID NO: 696927 - DNA, 619 bp, Homo sapiens
tcagaaactcaagtcttagatacagaaaaccagygaaaagttaagtaaatcttaactgaactcccaggaagtgatgtaaagttttaaacattttcccgtattcagatatatcattgagcagtctccaaatgtctctttgctctagttccatatgttatctttcccaaatttctctcatataggctcttaccctacttgattcagcaacttaacacgaggttccgtttttcctctctaggcttcatttaattttctcctctactaattatcataatctccaggtgtgcacatgtgcatggatacatccgtgtgtgcacacatgctacgagagtgagcaagccataatctagaaatgtccttagacgagaaaaagactgcaagtatgtgaccttgctgattcttctttgaatcctgtcacactaagtttggattccagagccacccttcttttgcatgtgacctggaacgaatcacataacttttctatgtctcacttttctcatctgtatagtgggaaaacaactgcctctttgggttgatgggggtggggagtgttcaatgagacaatggaaatgaagaagaaaacatagcatgaccctaggaggtgttggatagattt

SEQ ID NO: 696928 - DNA, 480 bp, Homo sapiens
tttcttttcttttcctgaacattttgagagtaaactgaagatatgatgcccctttgcccctaaatatttcagtgtatatttcctaaaaacaagaaattatcttatgtttgccttttaaaacaatcattttggcttctatgtagaagagagtttgcagagagagagactgtagacaaggggatgggcaagggacctcttcagcagtgaaggcaagagctggtaaagccaggacagcctagggcagtgacctagagatgggtcaatgggacttggcaagtggatgtagttagaggtagttcccagctgctgccagggctgccaggaggatggtaggtgtggcgagagcagggggaagggatgasaagttcagtcctggacatgctgaaatcaatgagcctttgaaacactagataaaggtttttaaaataaatgtatttatttttaaattgacaaataattacatacacatatttattaatt

SEQ ID NO: 696929 - DNA, 2241 bp, Homo sapiens
attccaggcacagctttattttcttgtctacaactatcttctttatttttttcctatggtattcatcaacttcttaatagaatataacttaattattgtatttattatccactgactactataactgaaatgtaagcatcaagaagcaagmgttttgctgttttgttcactaatatatctgtagttctaggaaggatgcctggcacattgaattcgttttcttaaatctcatgaaaattaaaagtatttttatgtaaatataaagaaacatgggtaattgaaaaataggtcattctagaggaaatgttttctataagaaaaattttattctcagttatttattgtgaagcaatgtaattgaaattatttctaatcagctcaggagaaaagtcaatacatttgaaaaatctacagagataaatgtgtagacattatctaatgatctctgcactgttttgattgctttttcagatttattgaattttaaaattgtttttatttttaaaattagatacagtatatgaaagtttataacaacattaattttattcaaaaagatttttaagcatactacctgacactttcattaattttgaaacatgggtttttcttttcttttatactctacttattctttaacgatattagtctattttgtaagtcagtacacatttcaattcctggcctcaactaaagaaaatagcttatgctggttagtcactcaactagagcttggagtagcactcaaatccttgttgaacaaatgaattgctaaacactagagtgatgcattaaaagcatactgagcttaatgaacctagaataaaatgaggagagtaaccacgattattaaaggtcatcaacagttcagcaaatgtagaagcttgtccctatatttcatctttataacgtgaagacttattttcacaaaaggagtctcattaggtattcttaatatgtgtgtagagtcattagccttcaaaataaaaattgttgataaagttgtcacacatagaaaatcactttgagagagccacgagcttgagagtatacatatcaattatttgcccaatgaactaataatcccttggcaatctttcctttttaaatatttaaagaagtgatctaagtcccaatatcaggagacgaaaggcagaggatcatgtagggactcatggttagtgggagagactggctagaataaaggaatgtataacagatttttaaaaataataattcacttgaaattttattgatatttttctcatcagataatactgtatcaatttgcaatttctggcacgaagtggctgccaatagacgtttgcggaacaaatgggatatgtaaacacataaggggatacaacaaacaaaaatattttagttgcttttcttcacaaattaaatgctacagaattgcacattttacttatgaacaaaattcttgaatgtatacaggcatagtgaatatattatgcttgttttattactaatatttcataatcagtagttatgattaaattgataatattttagttgttgttttgagaaattattttcttttcacttttaattctgttatgcttcatatttcatattaatattgtagataatcactttatagtaaaactatactaaaatattgttataggatagtagcaaaaataaacatatagtgttgtatattaaattatctgtgcactcataaggaaacataagttccaaattggcacacttaattatacttaaagaaatgcatgttttttactgtataaaatacaggcactgtcattttaattcatgggcttttatatcattcagatatccgcaagttactgaattgttttcttaaatctaatgaaaagtaaaagtatttttatgcaaatataaaaagtcataggtaatttgaagatagctaattccagaggaaatgttttctgaaagaaaaatttgattctcaattaattattacaagccatataattatttctaatcagccttggagaaaagtcaacacatttgggaagtctaaatatgagataaaggtcccagaatgtattagttattaattgttttacattgtggactctaagcttatgttaaaaataaagattaaccatgcatgtaataaaaatctttattgcaaatagcaggaatcattatatgacataataattgtgtttaaattataattttctaaattttttaaacagaatccaattatactatggtacaaaccaa

SEQ ID NO: 696930 - DNA, 1559 bp, Homo sapiens
tgagatttattcacatcacaagaacagcatgggaaaaatccacacccatgcttcaattacctcccaccaggtccctcttacaacatgtagggattgttacaattcaaggtgagatttgggtggagacacagagccagaccatatcagccataggatgtcagagctgaaagaccaacttttaatctgtacaattcagttgtgagaaaactgaagctatcagagaagtgacctttatggggtcatcactcaatagatcgagcagtaggaccttggtgctctgccactcaactgggtttctgccttcaggcagggccctaactcccttcttcaccaataacctataaccaggttagatgtcggtgacctttctagcttttgacttaaagtgagagatgtgtgatttttcctttcacttgaacacttagcagccattgcagtgtgattaattggcctaatctcaatactgttgtgtgtttcaggaaatatggaggcctgaggagagggagagaggtgaaaagcaggttggtggagcagtcagaacacatgcaatatttatgaactaggtttgcagtcttattggtgcacagttcatggtggcccaatataattataatggtatcatcaaagatcaccattacagatcaacataacatatattacaagaatgaaaagtttgaatattgtaaaaattgccaaaatgtgacacagagatacaaagcaagcacatgctatttgaaaaatgtcactgagttatttgcttagcagaggtgtgttacaaactttcaacttacaaaacaacaatatttatgaaatacaataaagtgaaaccaaatgaaattatttatgggtggtattcacattttgctgcattagtgcagagtcagagtagcctacatttagatgtaactaaaacgctgattttgtcaagcaggtatggcaaagtgagatggagcaaggaatctaatagtatttagtaaggagttataatcagtgatcataatatttattgtatataggaaagaagagaggttatcaaagaaggaaaagatatgaaaagtagcatcattgcacggaagtcctgcatgacaaaaaaattgttggtgttggggcactaaagggaagaataagatgggatcagaacagatgtaaacatttaatacgactggaatttcaaatctaacatccatgctagtttttgaaaatgattatcctatgtaagaggttttcaagcaaaacggtaataatgaagttaaaaatataattttgaggtcttctgcaacaaattcatgaacatgtctgagttgtcacacacattggatgaaggtaaggtttgaggaagaagggattgtgcatctgaatttgcacattcctgagatttcatgttagacttctgcatcaactaggtgatgagccagaaatttyttaacaagggatcattttatgagacaatgaaataaattgtattatttaaaaacaaaaaggataatctttttaggaacaggaaaagtaaatttttatattcttcattcacttggaataaaaaagatgaaaaatatcat

SEQ ID NO: 696931 - DNA, 685 bp, Homo sapiens
tttaaaggcataaactgcttctatgatatttttgataattgtttgttagtagtggcaaatctgtatggatctgcggcaactcgattcttgcctcctcagaggaaataattcatccaaggggcatgaggcagagtgagrgagaccaaggtaagatttagagtaggagtgaaagtttactaaaaagttttggagcagggatgaaatgacgtaaactacactcagaagggggtcaagtgggccacttgagagagtcaagtgcccggtttgacctttgacttggggttttatttgctggcatgcggccagggttttgcatttcttctcccttgatgttttgttggggcaggctgcccccatgggcagtggcctgtcagcgcttaggaggggcggcatgtgcactgtgttcactgaagttgtgcacgtgctcatttaaggcattttaatcttaccagtcaggagttcccagaagaatgtcatataccagttaaactttgtcattttgccttttagtgctcatgcttgagtacatcacccaactcctgagatcttattgggaaattactcattgtcagcttcaaatgttttctacctactgggagacggcctttcatggcagcagctgtgactaatgattattttagagagacagtttaacaaccacctgatcatcacctgatggtggggg

SEQ ID NO: 696932 - DNA, 868 bp, Homo sapiens
tttagaaaaacaatggcataatatataaacaagtatagaatgttaccacacatctattgtgaggtaaaagaaaaacattatataacaaaatataaaatgcatgagtaagaaagcttcaaaaataagaaatacagctatggaattaaaatcttccttagaagaaggaaagataatctattgtgaaataatggaaataaatcacaaaacaaggtcaattagtaaagaaataataaaacagaaaacttacaacaaactattaaatagagaaaccttgaaaaatggtcttccacattaagacactagaaagaagctagattattgaatccctctttagtctttatataattatcttaatttaaatagtaaaaattcaccacaacagaaaccaagcaatgaaaagggatacaaccatatgccactattcaaaacatgctagcaaaagtaagaaaacaacatcctagtaatcgcagtttygtggagtgcagcagcaggcatgtgtgtataggagaggcatggctgatgaggcaaagaatacctcaatacacttcccttctgttgccctacactacagaaagcggcttcaaaggagtacctgccctccaacatgcacacaagtactttagtactcttcctaggtcccaagcaagtggtggtagatgtcaaagagaattcacatatactttttaaggaaaataaagcaattggcatctctgcctattaagcaaaaaaggaattgaaaaaaatgacatttcagctatgtaattatattatagggtatataacaagaaaaagtaaattggaaaatataatgcaaataacagaaaaataagcatatataaacttcatgctaagaagtctttaaaaatat

SEQ ID NO: 696933 - DNA, 655 bp, Homo sapiens
aacatcagcaggaagcagttacagaagatgaacctccacccttctacaagccccttaagattaaggaggagtatataatctctgatggggaaatgaggtaggagaccagaaggacttattttccagtcacaaccccattgaacagagcaggatctggtcaaaacaaggtgcagtgaagaagcctgctgaaaccagcagatgatgatgaaagtgacctctagttgctctyactacttatgagcataaagacactaccaccgggaccatggccagtttacaaatgtcatggcaacacaccttggcaatggcctggaagttactttatacggttctggaaactccctgccccttttccagaaagttctgaataacctacctcttaattggcatgtaattaaaagtgggtctaaaaacaactagctagcagcccacaggcaccaactctgggcacattgcctatgggttagccctgctctgcaagtagcagcaccagttcaataaaagttgctttctttcaccagcggcttgcccttgaattctttccttggcaaagccaaggaaactacagtctggaagaaatttcccgggctacaaaccagttttgaggctcgcctgccctgcatcactatcattgtttccttgggtttcccaggaa

SEQ ID NO: 696934 - DNA, 1396 bp, Homo sapiens
gaataaaatatggttctttcaaataagcaaacaaaatttagtaatctgaaaagcagaaatattgagcaaagagaatgcaatatgcactaaaaatatataccattatatattgtatatataaaaaatagaatggagatggttaatggttacaaaaatatacttagaataaataagatctagtatttgatagcacagcagggtaactacagtcaacagtaatttactgtacattttaaaatagctaaaagaatataattggattacttgcaacacaaaaaaagagtaaatgcttgagttgatggatactccatttttcctgatgtgattattattcattgcatgcctgtatcaaaatatctcaaatactccataatcatttatacctactatatacttgtacaaatgaaaaattaaaaaataagaagtgttcatttaaaacatacttataatggttaaatttgtgtgtcaactgagtaggttaaggaatttctagataggtggtaaaacagttttgggtatgtttgtgaggatgttttaggaagagattggcatttgaatcagtagattgggtaaagaagatctattcatctgttgaaggcctgagtagagcaaaaaggtggagaaaggacaaattttcatctcttttctgaagctgaaacatgcatcttctcctgcctgtggacactgaagctcctggttcgagtccgggactcaaaccagtgtgtcccccaaacacccacaacctgcagggccctcagccttggaccaagacttacactattggctcccctggttctcaggttctcagatttggactgaattacaccactggctttcctggttctccggctcacagatggcatctgatggaacttctcagcctccataatctcatgagccaattcccataataaatattctcttacgcctacacatacccagttggttcaatttctctggaaaaccctaagatcatactaattccatcatatttaatgtacatgttgaaatatgaaatactgtttaaaaatgaacatttattaagttttctatgaattaaatacagatataatcaaaattagcaagtttggtggttccaaagtctcctaaatgtgacagaaagaacagttaagagaggaaaaaaaaagaatgtgatatctagaaagagaaaaacttttccagtgaaaacctaaaaattcttaaccacaagttttcacttaacattaaagtatatttagaagtagagamggtaggagcatttaagctctctctcccaagaacctactatatttttattactactgttttttaaacttttattttaggttcaaatgttactaggtgaatttgcatgccacagggttggtttacagattattttatcacccaggtaata

SEQ ID NO: 696935 - DNA, 627 bp, Homo sapiens
cacatggtcatagcagcactacttagataagcaaagacatgaaaatcacctaggtgcccattgaaaatggattggataaagaaatgtggtacatatataccatggaatgctacacgttcattaaaaagaacaaaatcacgtcctttgcagcagcatggatgcaactagaggccaatatcctaagcaaattaatgcagaaaaaaaaaaaataaatatcgcatgttctcacttataagtgagagctacacttttgctacatatggacataaagaagggaagagtggacactgagaactccaaaaggaggaagggagagaggggcacaagagctgaaaagcttcctattgagcactatgttcactatcttaatgactgcrccaacagaagcccaaaccttagcattaagcaataaatccttgtaaaaaatctgcacatgtaactgctggatctaaaattaaaatgtaaatttaaaaagtgaattcaacagaaagattttgtaataatgaaaaaaatctatgtttttaaaattttacttctctaccctttattgtacatgctcgaattctcaagtacataccttttcaatagaactctactatatcacagccaaagatgtgaactacatgg

SEQ ID NO: 696936 - DNA, 1401 bp, Homo sapiens
tgacaaaatgaaaaaagtacaacttcaatttagagtataaagaaaatcaaaaattgctggaaggcccacaaatgattaagcttttactctaaagaatttactagaaaaatggaaacattatatactgggaaagactttcccgcagagctgggttaataggttcagataagcccgtggcctaagtaggttcttcactacttagctttttccttcaaggactcctccaggtgtgtctgctgtgacagcagttttaagagtttaacaacacagtgccttttgatctcatttcaactgctgtgattaaacagacacacatcacttgctgtgccacggtgaaagaagcttgtggttcacctttgctgaattagtacccactgagcactgcaaatatttaaaatgtcaatccatttgataatgtcagggaggcctgcaaataccacaaaatggcatgaaggaagcattcaacacagacaaaaaacaaaacaaaacaaaacaaaacaaaaaaacacttaacatctctctccttcaagataaaatgagagttaaatrgaaatagtaaacctctgatgaagttactaaggtgggcaatgtaatagctccaagtgagacatgggcatgtaacttactgttttgtatgttcttgatcttaaacccagtactatttttggagaattaatttatattgacataagattatggagttcttaccacaaaattcaactgatgtcatccttagacaatctgtggatacctgccccaagagctcagctctaaatggaaacttcaagtctcaagtgacatctttacttcatcatcaaatatttaattctaaaaccacagaggacatcattctggtgtagagtttggaaataaatatcaggaaaaccacagactacccagtaacctcatgatcttttcataaactcctgctactgaagtcaagctcaaaatgcaactatccttttgatgtaatttagtttggttagattataactgttgatacacaataaataggatctcaaacatttttggtttcttctacttatatttgtattcattagagtaaaaggctaaattgcccttcaaaaatacccaacttatttctcagtgagggaacattgagaagtaagtatccaaagtcattggaagctctgctccatgggatagttagggtccaggagggcaggtctgacatatgcacagaggaattccaagaccttttggtttgctgtcattcttgcctgaagaaaaaaggaaagagccctagatttcctcttaaaatgtagaagaggcgaggtggctcatgtctgtaatcccagcactatgggagaccaagttgggaggattgcttgagcccaggagtttgagaacagtctgcgcaacatactgagaactcatttc

SEQ ID NO: 696937 - DNA, 646 bp, Homo sapiens
gaaagaaaggattgtcgtatgattgcatgatagtgtttggattgtaatatagctaagaatttattctcctcctttaaaaagccttatatgattcagcagctatcttctgccraaatcactgatacagatgattgttttttaacttctaacccctgagtaatagagattgtcggttaaatgcagtcagtcaatattgtctagtattgtaactctataactacattagaatctgctgaggaaggtagaaacaagtagcagggatagtgttacataaagggagggagaaattaccgcaatggcattcatgtctcttatcacctttattaaggtctaatgaagtagagtataagcagtttgtccttattgcctctaactagctatctggttggtgctactgcaattattgttggtgtgtgtgtgtgtgtgtgtgtgtgtgtgtgtgtgtgtgttattgttgacctgttctttcctgctaaagcttttgagattttaaacagaaggtgatcactaaaattgtagtaatgaaatcactgtgtctttctgtgtcgataaagtgattggctagatacttatacagatatgcattgcttaatgatggggatatcttctgagaaatgcatcattagggtatttcattgttatatga

SEQ ID NO: 696938 - DNA, 646 bp, Homo sapiens
gaaagaaaggattgtcgtatgattgcatgatagtgtttggattgtaatatagctaagaatttattctcctcctttaaaaagccttatatgattcagcagctatcttctgccgaaatcactgatacagatgattgttttttaacttctaacccctgagtaatagagattgtcggttaaatgcagtcagtcaatattgtctagtattgtaactctataactacattagaatctgctgaggaaggtagaaacaagtagcagggatagtgttacataaagggagggagaaattaccgcaatggcattcatgtctcttatcrcctttattaaggtctaatgaagtagagtataagcagtttgtccttattgcctctaactagctatctggttggtgctactgcaattattgttggtgtgtgtgtgtgtgtgtgtgtgtgtgtgtgtgtgtgtgttattgttgacctgttctttcctgctaaagcttttgagattttaaacagaaggtgatcactaaaattgtagtaatgaaatcactgtgtctttctgtgtcgataaagtgattggctagatacttatacagatatgcattgcttaatgatggggatatcttctgagaaatgcatcattagggtatttcattgttatatga

SEQ ID NO: 696939 - DNA, 646 bp, Homo sapiens
gaaagaaaggattgtcgtatgattgcatgatagtgtttggattgtaatatagctaagaatttattctcctcctttaaaaagccttatatgattcagcagctatcttctgccgaaatcactgatacagatgattgttttttaacttctaacccctgagtaatagagattgtcggttaaatgcagtcagtcaatattgtctagtattgtaactctataactacattagaatctgctgaggaaggtagaaacaagtagcagggatagtgttacataaagggagggagaaattaccgcaatggcattcatgtctcttatcacctttattaaggtctaatgaagtagagtataagcagtttgtccttattgcctctaactagctatctggttggtgctactgcaattattgttkgtgtgtgtgtgtgtgtgtgtgtgtgtgtgtgtgtgtgtgttattgttgacctgttctttcctgctaaagcttttgagattttaaacagaaggtgatcactaaaattgtagtaatgaaatcactgtgtctttctgtgtcgataaagtgattggctagatacttatacagatatgcattgcttaatgatggggatatcttctgagaaatgcatcattagggtatttcattgttatatga

SEQ ID NO: 696940 - DNA, 609 bp, Homo sapiens
aagatataattgaaacttcattttcttggtaagacagcattataataattaattttatattattaaaagccaaagtaccagtggaaatttattttagagtttgatataccaaggacctgcaaatgagagcagagaaataggcttcaacttttcctaatgtttatatattgccttgagtattttagttttttaaaaaatacatattggaaggtaaatgtagggagtgttcataaaatattgtctatataaagcaactatataagaaacatgcctaacttgttcgtcatgtatagagagctctattaatataaacaaggcttctttgaaaaatctttctgtctgtgtaaatggtagtaatgactatttattaacagttttctgtatactttctttgagaagccaattttgctttgtttaactgaataacaacaaccctaaaggagagaccattcttggtaaataaggggaaaataaattaacacggaggttgtataggcagtctgaataatgattagaaaaaatgaaaagcatcacaaaaattactctgagaagtataattgartggaattttttattattggtggccagaaaaatctacagggaaggtca

SEQ ID NO: 696941 - DNA, 610 bp, Homo sapiens
atggtggcaggcgcctgtaatcccagctactcaggatgctgaggcacgagaattgcttgaacccgggaggaggaggttgcagtgagccaagattgtgctactgcactccagcctgggcgactaagcaaaactctgtctcaaaataaaaaaasaaggagggaaggaagaaaagaaggaaggaaggaaggaaggaaggaaggaaggaaggaaggaaggaaggaaagaaggcaggcaggcaggcaggcaggcaggcagttcaacaccaacaaaagttacaaaaagaaaaattagataattgtccacaccatgcatgtaaactcacactgattgaagtggcaacatttggtttgaatatttgaatattttttcagcttttcttaaggcatactcatgtatcagaattacctaggatgtttccaaaaaatgtggatttctgagtcccacccagtagtagataaccatattaaataccccttaatctgggggtgggtgtatcttagaaatctttattataacaaaccctccaactaactgctttgcctatgaaactttagaaccactgagttcagataggtccttcacttctttcctaacatattaactaatgaaa

SEQ ID NO: 696942 - DNA, 610 bp, Homo sapiens
atggtggcaggcgcctgtaatcccagctactcaggatgctgaggcacgagaattgcttgaacccgggaggaggaggttgcagtgagccaagattgtgctactgcactccagcctgggcgactaagcaaaactctgtctcaaaataaaaaaacaaggagggaaggaagaaaagaaggaaggaaggaaggaaggaaggaaggaaggaaggaaggaaggaaggaaagmaggcaggcaggcaggcaggcaggcaggcagttcaacaccaacaaaagttacaaaaagaaaaattagataattgtccacaccatgcatgtaaactcacactgattgaagtggcaacatttggtttgaatatttgaatattttttcagcttttcttaaggcatactcatgtatcagaattacctaggatgtttccaaaaaatgtggatttctgagtcccacccagtagtagataaccatattaaataccccttaatctgggggtgggtgtatcttagaaatctttattataacaaaccctccaactaactgctttgcctatgaaactttagaaccactgagttcagataggtccttcacttctttcctaacatattaactaatgaaa

SEQ ID NO: 696943 - DNA, 610 bp, Homo sapiens
atggtggcaggcgcctgtaatcccagctactcaggatgctgaggcacgagaattgcttgaacccgggaggaggaggttgcagtgagccaagattgtgctactgcactccagcctgggcgactaagcaaaactctgtctcaaaataaaaaaacaaggagggaaggaagaaaagaaggaaggaaggaaggaaggaaggaaggaaggaaggaaggaaggaaggaaagaaggcaggcaggcaggcaggcaggcaggcagttcaacaccaacaaaagttacaaaaagaaaaattagataattgtccacaccatgcatgtaaactcacactgattgaagtggcaacatttggtttgaatatttgaatattttttcagcttttcttaaggcatactcatgtatcagaattacctaggatgtttccaaaaaatgtggatttctgagtcccacccagtagtagataaccatattaaataccccttaatctgggggtgggtgtatctyagaaatctttattataacaaaccctccaactaactgctttgcctatgaaactttagaaccactgagttcagataggtccttcacttctttcctaacatattaactaatgaaa

SEQ ID NO: 696944 - DNA, 1283 bp, Homo sapiens
atgagctgtccctactcctatccaaggccagctccctccttgtgactagatcagaactccacccacttgctcttcaccctcatcataatttccctcccaactgaatcctttcctcagcattctcaccagctacaatttctcccttcttcataagccaaaccaaaccaaaccatcacaacaaaaaccttcctgtgatgccctcccgcttgctaccgcaccccattccgtttccctggacagccaactggctctccarcacagggctgatggaacagagctcagccaagtatttgtgggatacagaatttaatttcttttgaggacagaccatgtgcaggttgatgtgtacagcagaagttctaagggctgtgaagctgattcaagacagaggacaggactcatagagaccaggctttctggcagcaatggactcctctgaggtcatctcatacagagttggcgcaactgataactcactgaactaaaaaatgctggcccaccatgcttctactacacactgaagatttgccacaccaagggctcatcctcatttactcatatccattgagatccctgcatcccacaaaatgaaatacatcagctgcaggtcagcagatggagtgagacctcaggagcatctgttggtatttatcattggtttttgtgtaaggcagttttctttcctgagtcttttcaatttatctgtagtagttataaggggctgattttataagagaaacagttctgattatgctcttccaattgattaccttccgaaggtcggtctggagttgtcgaagaattaattccagctgattgactttcccggtcagtggtgatggagaacgctccctagcaaataaggatagaattagaaagattcaagagagtcaatcgagcatttttgttggtcaagttttcactcgaaaaaattatttcatgtgcttagagcccagcaagcagatatattatattatgtcagaatgggaaagtgtccatattgctgatctagtggaaagcccattctgggactttactgatttaaaaagagatgcagaaactctatagatatacgagttggtaggaaaacaaaagatatattatttaagttggtttatccaatggagacaaggaagacccaaatgaagtcctgggaaccagtcaatttccccaatttgcctttccctatgataacaatattatgaagctcgttaccaatgtgaacatgcaagttaatgaagttaattccaagttctatattcagctcacatagaagttggaat

SEQ ID NO: 696945 - DNA, 582 bp, Homo sapiens
tttcacccccaaatattttattatgaattttgagggttttttacataaatataattctgtccaacaatgaaaaaatattccttaacatcttttaatattttatcccaatttcctttctttttctttttatttatttatttatttatttatttatttatttttgagatggagtctcgctcttgtcacccaggatggggtgcaatggcgtgatcctggctcactgcaacctctgcctcttgggttcaagtgattctcctgccttagcctcccgagtagctgggattacaggcacccaccaccacgcctggctaatttttgtatttatagtagagatggggtttcaccatgttggccaggctggtcttgaactcctgacctcagatgatccgccgtcctcagcctcccaaagtgctgggattacaggtgtgagscactgcccggcctatttttctaaaacaaggtctgtacagttggtttattcaagtcagaatttttaaatcccatctattgtatttggtttatgtatctcttgtctcttttaaaaataattttgtatgccaggcattaatttgattcagagtg

SEQ ID NO: 696946 - DNA, 626 bp, Homo sapiens
cacaattaaacccacagcaggaagccaggggtgggagggtggcagaggtcaccaccatgtttatgttcatatgaaacaaatcccgtggtgggaaagagatgtgagtgggggagaagcaggtgtcaggggctccagggaggctgtggctgcagtcctaggagagaggtcagcagactgaactagggtggtggtgaatctgtggaggggtttgaagaacagtgaggaagcaaaaagcatacaaattggtgaccaactgataggagagagggaagagtgtcaagaacaartggtaggttcccaacattcaggacagaatgggtgtgatgactttcaagagatgtgatgggtgaccagccttgtttaggggtacaggataggctgacgtggaagtccatggtcaccatccatctccagagttctttcattttgcaaatctgaaactctgtacccattctcacctccaccagaccctggcaacctccattcattttccgtctctatgcatttgactcccacgtgcctcatgtaagtggaattgtacaggatttgtccatttgtgtcacatgtgtcagaatttccttccttttgtggctgaataatattcccttgcatgagtacaccacatt

SEQ ID NO: 696947 - DNA, 640 bp, Homo sapiens
tcctgcagtatttatgaagtgcctactgcatgcgccgggccgtgccagatgacgtaggggggtgaaaggaagagaaggcgagacctcgccctcgaggagctgtggtttagaggcatgaggatgggccatgcgactcccttgctcgaaaagcaagaaaaggtgcagtcgagagacctagaagaggcggcagccctttcctctgctgactcgcagctcagcctcgcaacttggcatggagggttttagttgttaaaaactaaacattattttattacatattccatatttgttattatttattcagagacagggtctcaaamtgaggcccatgctgcagtggtgagatcatggcttattgtggccttgacttcctgggctcaagcgatccccccacctcagcctcccaaaatgctgggattacaggcatgagccaccgcacccagtctatttccttattacaaaattctcagcatggagtttttcattcatctttatgttgtacaatatcagttttaagtttcagtgcatttaactcgtggaatcacagaaatgacagttttcataacttacacatgcgtatttctttttttttttttttttttttttgagacagagtcttgccctgtcgcccaggctggag

SEQ ID NO: 696948 - DNA, 584 bp, Homo sapiens
gcaaacgggactggcttgttccttgagaagtggctgtgtgtcttccaggaagttgcattcctaggaaatttgctgaacgaacaagtgctaagaactgaaaacgctaggccaaaaggatggggtctctttaggctggggttatccctcctcaaggaaccatggcaakcgttactgtcaactctgcagtggcatctttcgtactctgttgggctgtcttcaacagtgccaccacgtgggagcaggacgccacggcaggaggggaacacgcgggccttctgtctgcatttgcctgtgagtaccttaatggacccctgtttccatatgattcttactcagaggaatgaagggaaagcgcgggaaagaggaactggacttccagaaaaaactcttatgggaggtgcgagatggaggaatttgattatttaattctaaaaaaagggaccatatttacatcctaatattttgaaagcattcatcccagttatatgacgagtctagtcactctagtctggatcaggtttgttgatagccttttaaaaacagatagcaagttctgaaggctgagttcagagttggtgagcacg

SEQ ID NO: 696949 - DNA, 584 bp, Homo sapiens
gcaaacgggactggcttgttccttgagaagtggctgtgtgtcttccaggaagttgcattcctaggaaatttgctgaacgaacaagtgctaagaactgaaaacgctaggccaaaaggatggggtctctttaggctggggttatccctcctcaaggaaccatggcaagcgttactgtcaactctgcagtggcatctttcgtactctgttgggctgtcttcaacagtgccaccacgtgggagcaggacgccacggcaggaggggaacacgcgggccttctgtctgcatttgcctgtgagtaccttaatggacccctgtttccatatgattcttactcagaggaatgaagggaaagcgcgggaaagaggaactggacttccagaaaaaactcttatgggaggtgcgagatggrggaatttgattatttaattctaaaaaaagggaccatatttacatcctaatattttgaaagcattcatcccagttatatgacgagtctagtcactctagtctggatcaggtttgttgatagccttttaaaaacagatagcaagttctgaaggctgagttcagagttggtgagcacg

SEQ ID NO: 696950 - DNA, 1800 bp, Homo sapiens
tgcctatatttcctgtcaatcacaatgaggatagttaagtgcaatttaatatgcacttaactatataagtgcactccagcctgggtgacagagcgagaccccatctaaaaaaaaaaaaaaagaatatatgatattttacttatgactgtttcttggtacttctttctgtcttttttttccccctaaaactgcagcttttggttaattatgaccaattgtgtttcttactttttaatttccttctttctcactttttttccttccttctcaccttccttccttccctttttccttctttcttttctactttttctccagaacctactctattctgtggactkttctaggcactgaggacacatggtaaacaagggaaaatcctcccctctgggagctttcgttgtaatgggggaaacagacagttaaggtatatgcacttaactatataactaaataagttaaagtaaaaagtactttattgggctagaaactttcattttattagctttgaaactttgtcatatgacttttgatgaaggtatctatggactgtgattttgggtgatagaagtcagatttgtggtttttatcagcgttttttaaaattctataatatagtgttttatttctgctgagtgttaatcctttgtgattaaatgatgctgaataactttatgtcagcattcagcataaagtgggagcctcaggctgactgtttaaaactattagtgtctgtcccaagagctagtacatagaacttcaaatgtggcacaagtaaccaaatggaaaattgtagttttctcagagggatggaagttataaaagcatttcatttaactctgtaaacactagtctctgtctctctctctttatttgtgagtattttttattagattaccagactaatgtttttatgtaatatttgataagttattttagtaggatagttcagggaatttataaagcagttacatccattttatctaatttctttcaggtaacttgcccaggagtcgtgcttaaagacaaagaggacatctatcttagcatctgtgtgtttggccaatacaaaaagacacaatgtgtcccagccacttttcccctggtcttcaatgccagaatggtgtttgaaaaggtgagttcaaatatcagatcaagtattaacaaacaaaacatcaaagtggttccaatttttgaataaaagcctataacacaaattattactgctgactgtgtgctttggtttaattcaaaaggacatttgtaacctaagcctggaagcttgaaaatttgcattaaatatgcattgaatcagttgccttttttcccttgattagcttattcctaaaattgatttagtggactttatgtaacatagaatcttgatttctaaataatgattttcattaaaagagagcaaagtcattaatagataagaatatatcagccgtgtgcggtggctcatgcctgcaatcccagcactttgggaggccgaggcgggtggatcacctgaggtcaggagttcgagaccagtctggtcaacatggggaaaccctgtctgttctaaaaatacaaaaaatagccagctgtggtggcacctgcctataatcccacttactcgggaggctgaggcaggagaattgcttgaacctgggaggtggaggttgtagtgagaggagatagcgccactgcactccagcctgggtgacagaacaagactccatctaaaaaaaaaaaaaaagaatatatgatattttacttatgactgtttcttggtacttcttcctataagtctttgca

SEQ ID NO: 696951 - DNA, 1187 bp, Homo sapiens
tttgattgccttattttttgaaagacagtttcacagggcatatcattttaggttgacggtgattttcttttgacatgttaaaggtgtacagtttaacagcttccatttcttctgctgacagtagtcrtttttggctgatctgttgttattaagtgtagtttataagatattatctttaaaagttttttttttttttaacattttactatttatcctgctaggggttcacaacagttcttgaatctctgatctatttttttctgttcattttgaaaaatttacattcactgtctcttcaaataatatcttcctcaaaacacacacacactctctctctttctgtgtgtgtgtatatgtctcagaattctatctacatgtgtgtcaggccttctcactgtgcctcgtatatactttattccttttatatactttccattattttactttctacacatcagtctgaatattttctagtgacgtatctttcagttcactaattcttatttttcggctgtgtcttatcaactgtaataaatcattacattgatttttaattttctgccaatgcctttataagttttaggttttctactttattctgctttatgtttttcagttctctggccagttacttcagtttagtatgtgttttcttaaacatattaatcatagttcactcaaagtccatatctagtaaatgcaatatttggattatctaaactaattactatttctattatctgatttttctctttaccttgtttcttaatatgcctgttaattttttaattgaatgtcaggcatgtacacttaaaaagttctgattgccttgccactttctcagtgatgtcatggaattttagcaacccagttaactatatatgatataaaagtcaaggataaaaagttaatgcagatttatgagaattttttttctggataatgtctgaatcttactataatatatttgaatcaatcagattcttggtttctaattttgcaaacataagcctgtgaagtaatccaaatatcagaaagacttcatttattagtcccttccattacatcttgccttatatataaatacgctattattctatattaactttatttatacccctggtgctacaaacattttctctttattaaaatccatctcctattacatgtcatttatcattctttta

SEQ ID NO: 696952 - DNA, 1187 bp, Homo sapiens
tttgattgccttattttttgaaagacagtttcacagggcatatcattttaggttgacggtgattttcttttgacatgttaaaggtgtacagtttaacagcttccatttcttctgctgacagtagtcgtttttggctgatctgttgttattaagtgtagtttataagatawtatctttaaaagttttttttttttttaacattttactatttatcctgctaggggttcacaacagttcttgaatctctgatctatttttttctgttcattttgaaaaatttacattcactgtctcttcaaataatatcttcctcaaaacacacacacactctctctctttctgtgtgtgtgtatatgtctcagaattctatctacatgtgtgtcaggccttctcactgtgcctcgtatatactttattccttttatatactttccattattttactttctacacatcagtctgaatattttctagtgacgtatctttcagttcactaattcttatttttcggctgtgtcttatcaactgtaataaatcattacattgatttttaattttctgccaatgcctttataagttttaggttttctactttattctgctttatgtttttcagttctctggccagttacttcagtttagtatgtgttttcttaaacatattaatcatagttcactcaaagtccatatctagtaaatgcaatatttggattatctaaactaattactatttctattatctgatttttctctttaccttgtttcttaatatgcctgttaattttttaattgaatgtcaggcatgtacacttaaaaagttctgattgccttgccactttctcagtgatgtcatggaattttagcaacccagttaactatatatgatataaaagtcaaggataaaaagttaatgcagatttatgagaattttttttctggataatgtctgaatcttactataatatatttgaatcaatcagattcttggtttctaattttgcaaacataagcctgtgaagtaatccaaatatcagaaagacttcatttattagtcccttccattacatcttgccttatatataaatacgctattattctatattaactttatttatacccctggtgctacaaacattttctctttattaaaatccatctcctattacatgtcatttatcattctttta

SEQ ID NO: 696953 - DNA, 1187 bp, Homo sapiens
tttgattgccttattttttgaaagacagtttcacagggcatatcattttaggttgacggtgattttcttttgacatgttaaaggtgtacagtttaacagcttccatttcttctgctgacagtagtcgtttttggctgatctgttgttattaagtgtagtttataagatattatctttaaaagttttttttttttttaacattttactatttatcctgctaggggttcacaacagttcttgaatctctgatctatttttttctgttcattttgaaaaatttacattcactgtctcttcaaataatatcttcctcaaaacacacacacactctctctctttctgtgtgtgtgtatatgtctcagaattctatctacatgtgtgtcaggccttctcactgtgcctcgtatatactttattccttttatatactttccattattttactttctacacatcagtctgaatattttctagtgacgtatctttcagttcactaattcttatttttcggctgtgtcttatcaactgtaataaatcawtacattgatttttaattttctgccaatgcctttataagttttaggttttctactttattctgctttatgtttttcagttctctggccagttacttcagtttagtatgtgttttcttaaacatattaatcatagttcactcaaagtccatatctagtaaatgcaatatttggattatctaaactaattactatttctattatctgatttttctctttaccttgtttcttaatatgcctgttaattttttaattgaatgtcaggcatgtacacttaaaaagttctgattgccttgccactttctcagtgatgtcatggaattttagcaacccagttaactatatatgatataaaagtcaaggataaaaagttaatgcagatttatgagaattttttttctggataatgtctgaatcttactataatatatttgaatcaatcagattcttggtttctaattttgcaaacataagcctgtgaagtaatccaaatatcagaaagacttcatttattagtcccttccattacatcttgccttatatataaatacgctattattctatattaactttatttatacccctggtgctacaaacattttctctttattaaaatccatctcctattacatgtcatttatcattctttta

SEQ ID NO: 696954 - DNA, 2479 bp, Homo sapiens
ttgttttatttttcttttctggtggtgttttggaaagacaacagccaatattttacaaatgaagaaatctgcccaaacatacagttattatgaactactttcttgaagagccaacagttaaacccagctgtaactaattctgaaggtcctattctatccacagatgtatacgtttaagcataagtgttagattagataaaggaaacacaagcttttactgtatattcttagaagttcacaagtaaacaactttaaaagagatggcagattaaaaatggcagtctataaatgcaagggaaattcaagtccttaagtcaagtcaaaatttattcactgccatctgttcttcacagtgacacagcaataaagtgcataaataaatgagtcacaggctttaaaagagttgcccaaatgagtcttcaaacagatacaaacaaaaaagaactgaaatctaagtattgattgttaaccataagcggagcttagaattttccacatgatcctaagaaaaatctcctaagccctcttgagtcagtgttcaatgtgctctataatcatagacttctgaggcctgagcattgaatggttattgaaaatacaaaacatcaaataaaaatgcaaaagtatttctgtttcaaatgcattgaagatactttgttgacttcgaaataaagcaaaacagaaagactgcgagacacagagaaaggtgaagtttgatcaatagtcccagtttgattcattctgaaaggaggtagagaagaggtaaatgcaaaagcagagtcaaatgaaggaaaacaacaaaccatttgccagaaaatataagacacattctgtactgaccaagggctctcagctcagcaagaggggttccagggtcaggatgaaaagctggggtcagggtgtggtgagtattgacactccaccattaaagagagtccagatggacacagactagagggtacaagcaatttccacagcagggaaagtttctctcaactcctggtagggagaggaaccatcaccttaccattaaaaatatttgagaatgcaaattgtaccgttgatgaatgagttaataacaataacaggtggctcatgcctgtaagcccagcactttgggaagtcaaggagggcagactgcccaggaactcaagaccagcccgagcaacatggcgaaaccccatctctacaaaaaaaacacaaaaattttctgggcatggtggcgcatgcctgtagtcccagctactcaggaggttgaggtgggaggatcacttgaacctggaaggtcaaggctgcagtgagccataaccacaccactgcactccagcccgggtgacagagtaagaccctgtctcaaaaaacaacaacaaaaaagtaaaaaaccaaaaataaataaataacaaaacaaaaataatagctaacattttcatgtagtgcttgttctgtagcaggcaatgttctaagcactttacatatattaacttatctaagttcaccctatgagtacctatgaggtaggcactgttatcgttattctatatatgagataattgaggcatagggagattaagtgacttgcctgggtctcacaggaatggcagagccaagatgaatcaatcaattaatgcagccacttgtgatgctctgccttagcagatagaaacacatgctattttttgcccttataatgtagaaatagactttacactcagcagtccacttcagacctcagtactgagtgctcgtcagtattcatacagaatagagccttctcacccttgctgtatcgcattttgtgcttatttatcacttacaacacacacaatttgtcacattttatctcccatttctttcttattgtatatatttatggggtacaatgtgatgttttaatatatatatatatatatatatatatatagtggaatcattaatttaagctaattaacatatgcattacctgacaaactatcattatttgtagtgagatcatttaaaaatactcttagccattttcaagtgtacagtacattagtattaactgtagtcaccatgctgtacaacacayatctctagaacttattcctcctgtgtaactaaaactttataccctttgaacacctgccatttcattagaacatcacacacacacaaacgcacatgcgtgcgcacaggcacacacacacacacacctgggttgtcctacttaaactgtgctcttgggagtgtatttaggtagttggctaaaactgatttatttatttatttacttatttatttataaaacagggtctcactttgtcacccaggctgggatacagtggtgtaatcatagctcactgcagcctccacctcctgggctcaagcaactctctcacctcagcctcccaagtagctcgtcctacaagcacacaccaccacacccagctaatttaaaaaaaaataaaaaattggctgggcatggtggctcactcctgta

SEQ ID NO: 696955 - DNA, 2479 bp, Homo sapiens
ttgttttatttttcttttctggtggtgttttggaaagacaacagccaatattttacaaatgaagaaatctgcccaaacatacagttattatgaactactttcttgaagagccaacagttaaacccagctgtaactaattctgaaggtcctattctatccacagatgtatacgtttaagcataagtgttagattagataaaggaaacacaagcttttactgtatattcttagaagttcacaagtaaacaactttaaaagagatggcagattaaaaatggcagtctataaatgcaagggaaattcaagtccttaagtcaagtcaaaatttattcactgccatctgttcttcacagtgacacagcaataaagtgcataaataaatgagtcacaggctttaaaagagttgcccaaatgagtcttcaaacagatacaaacaaaaaagaactgaaatctaagtattgattgttaaccataagcggagcttagaattttccacatgatcctaagaaaaatctcctaagccctcttgagtcagtgttcaatgtgctctataatcatagacttctgaggcctgagcattgaatggttattgaaaatacaaaacatcaaataaaaatgcaaaagtatttctgtttcaaatgcattgaagatactttgttgacttcgaaataaagcaaaacagaaagactgcgagacacagagaaaggtgaagtttgatcaatagtcccagtttgattcattctgaaaggaggtagagaagaggtaaatgcaaaagcagagtcaaatgaaggaaaacaacaaaccatttgccagaaaatataagacacattctgtactgaccaagggctctcagctcagcaagaggggttccagggtcaggatgaaaagctggggtcagggtgtggtgagtattgacactccaccattaaagagagtccagatggacacagactagagggtacaagcaatttccacagcagggaaagtttctctcaactcctggtagggagaggaaccatcaccttaccattaaaaatatttgagaatgcaaattgtaccgttgatgaatgagttaataacaataacaggtggctcatgcctgtaagcccagcactttgggaagtcaaggagggcagactgcccaggaactcaagaccagcccgagcaacatggcgaaaccccatctctacaaaaaaaacacaaaaattttctgggcatggtggcgcatgcctgtagtcccagctactcaggaggttgaggtgggaggatcacttgaacctggaaggtcaaggctgcagtgagccataaccacaccactgcactccagcccgggtgacagagtaagaccctgtctcaaaaaacaacaacaaaaaagtaaaaaaccaaaaataaataaataacaaaacaaaaataatagctaacattttcatgtagtgcttgttctgtagcaggcaatgttctaagcactttacatatattaacttatctaagttcaccctatgagtacctatgaggtaggcactgttatcgttattctatatatgagataattgaggcatagggagattaagtgacttgcctgggtctcacaggaatggcagagccaagatgaatcaatcaattaatgcagccacttgtgatgctctgccttagcagatagaaacacatgctattttttgcccttataatgtagaaatagactttacactcagcagtccacttcagacctcagtactgagtgctcgtcagtattcatacagaatagagccttctcacccttgctgtatcgcattttgtgcttatttatcacttacaacacacacaatttgtcacattttatctcccatttctttcttattgtatatatttatggggtacaatgtgatgttttaatatatatatatatatatatatatatatagtggaatcattaatttaagctaattaacatatgcattacctgacaaactatcattatttgtagtgagatcatttaaaaatactcttagccattttcaagtgtacagtacattagtattaactgtagtcaccatgctgtacaacacacatctctagaacttattcctcctgtgtaactaaaactttataccctttgaacacctgccatttcattagaacatcacacacacacaaacrcacatgcgtgcgcacaggcacacacacacacacacctgggttgtcctacttaaactgtgctcttgggagtgtatttaggtagttggctaaaactgatttatttatttatttacttatttatttataaaacagggtctcactttgtcacccaggctgggatacagtggtgtaatcatagctcactgcagcctccacctcctgggctcaagcaactctctcacctcagcctcccaagtagctcgtcctacaagcacacaccaccacacccagctaatttaaaaaaaaataaaaaattggctgggcatggtggctcactcctgta

SEQ ID NO: 696956 - DNA, 642 bp, Homo sapiens
tggatgccctcaccctctgaaataagcattttctcccgggacatcaaggagctggggactccaagcattttcctcaccactctggtcatctcccacatttaggaggaaagttctacttccatgaggcctttgcttgcctcatttcagaaataggggagggccttctcataaaatgactttttatgccttagttaagagcatatgtttaatttaccactcacttccctctcattatccatctatgtgcggatcacagtactaggtggtatgaagtgagactgagaaagtaagagatgaagaaacttaaaaaaaaaaagctgtaaaaaggacacaggtaaaatctaaccttcggctgggcgcagtggctcacgcctgtaattccagcactttgggaggccgaggtgggtggatcacaaggtcaagagattgagaccatcctggccaacatggtgaaaccctgtctctactaaaaatataaaaattagctgagggtggtggcatgcgcctgtagtccaagctacccgggaggtggagcttgcagtgagccgagattgcgccactgyactccagcctggtgacagagcaagactccgtctcaaaaaaaagaaaaagaaaatctaaccttcgaagaaatggaatgat

SEQ ID NO: 696957 - DNA, 581 bp, Homo sapiens
gaccagcctggccaatatgggaaaatcccatctctactaaaaataaaaaataaaaaaaaatagcctagtgtggtggcacgcacctgtagtcctggctactcagaggctgaggcaggagaatcgcttgaatctcagaggctgaggttgcaatgagccaagattgtgccactgtactccagcctgggtgacagagcgagactatgtcttcaaaaaaaaaaaaatatatcgacctctaagaatcayatttatcttgagctacagagttcgaaggacagaatttttttttttcaattaatgttaaggtctggaagtttgactttggctcttaacctttggctcacatacctaatttggttactatgtgtttactacatgcaaaaagacttccttgggcctatgaatcatttctagtaaatggagctaataataactttccatcagaaagctctttgtcccatttttgtatcagaaatgggcaagaaaaaagtgaaacaaaataaaacaacaacgtgaagatttttttaaatcctgcccctgggatgttgatgagggcagagacaagcaatttacctgcacacaaa

SEQ ID NO: 696958 - DNA, 1361 bp, Homo sapiens
gcacggacaatgtccacactcttctgttcatactgcctgccactggcctgggacaaggagccgaatatgggtgtggatgggcccagacggtaacctccttccccacactgaccagcaaagaaagtcagcagacctgtccattttgaaaaattacttccagagaacaagggcagtgttctcactagcatcagagaaccacagtctgaaggggctctcagtgccttggcttcccccatgtaccctgttgccttacgccatctggaagggcttcatacagcaccttcagtgccttagctctacatttttcacagcagtgggtagggtaggaaatagttactgtggtgcctcgggcacccccgattccttcgcccttggtttggacgtgtggggaacgggccgtgggtatcaggggatctgggctccagcccagctctaccccttccctgctgtttctctctgagctttgggttccttgtcctcacccaggccagctcctcagatgctgattgtgccgctgccctgacctgggtgggccctagggcccctgagagggatcagatctgggcctgccgttgagaaacacacagtctgatggaggagtcagactgactgacgatcacagcacagggcagtaaaaagggaaatgcaaggacctggacacagaggggcaccatctgaggaagcaggggagggctctgagggaggcggtgtcctcaagagtcactgtaaggtcaaatatgaaagctggagggaactgttattatcctccagaacattcctcccctgagctgtgggtctgagcagactgggagctggagagcctacactaatgagggtgcacttcagcctctttatcagatggagagtacaggggaggaatcctctgggagggagaggcttcctggaggcctggagatcagctgggaggaagaaagcgctctgccctggcttttggcaaaactagaaagcctccaacaatttccaaaaccctctcccagccaagaattaatttgttcctcccaacagccctctggggtgagccacgcaggggtgaatgtgcctgaaataacaagtccaataccacacagcgatcaatggcccaggcagggctgatacccatgtctgtctccatgtcccccttggcagtctgatgaagsctatgaacccctattcagaatagtgggtttttttttgtttttgttttttgtgttttgttttgagatggagtctcactttgtcatccaggctggaatctcggctcactgcaacctctgtctccagggttcaagtgattctcctgcctcagcctcccaagcagctgggattacaggcatgcgtcaccacgcctggctaatttttgt

SEQ ID NO: 696959 - DNA, 617 bp, Homo sapiens
tgcactggcctgagagtgtgtacatggccaccgagcttccccctggccaggatcgggtaccagtttgcagtaccagcttctgcagctggagaagcaaagaaaggatgcracatgcatcaaatccctctgagtgcctggtcaggaaggatgttttctcttttcttccagaatgaggctcttgtgtcttgatcagagagaagcgacctacacggttggacagcaaatccaggaacaaaccagtggcccacataccagccaggctcttcctcactctttgtggccacactttctgtttaggtcttcgttggtttgctgtctgtttgttttactaggcgatctttcagacacacaaagcgacatgaagaataatacagggaccacccacatagtttacaaaataaaaaaattggctgactctgggttcactgcttgggagttagccctgctctgaaaggaacagcttaaaaaataaaaaagtaaataaaataaaatgtaaaaaaaaaaaatttgatccggtttgaagtcccttgcatactcctccctcctccccaagaggtactacactcctgaatttggtatttattattcccatattcttatttatgctcacatatgca

SEQ ID NO: 696960 - DNA, 617 bp, Homo sapiens
tgcactggcctgagagtgtgtacatggccaccgagcttccccctggccaggatcgggtaccagtttgcagtaccagcttctgcagctggagaagcaaagaaaggatgcaacatgcatcaaatccctctgagtgcctggtcaggaaggatgttttctcttttcttccagaatgaggctcttgtgtcttgatcagagagaagcgacctacacggttggacagcaaatccaggaacaaaccagtggcccacataccagccaggctcttcctcactctttgtggccacactttctgyttaggtcttcgttggtttgctgtctgtttgttttactaggcgatctttcagacacacaaagcgacatgaagaataatacagggaccacccacatagtttacaaaataaaaaaattggctgactctgggttcactgcttgggagttagccctgctctgaaaggaacagcttaaaaaataaaaaagtaaataaaataaaatgtaaaaaaaaaaaatttgatccggtttgaagtcccttgcatactcctccctcctccccaagaggtactacactcctgaatttggtatttattattcccatattcttatttatgctcacatatgca

SEQ ID NO: 696961 - DNA, 629 bp, Homo sapiens
ttttttttttttttttaagtttattttcttattatagaaacttattctcaggagaaacatgcatatgtatgagattattctaattttgtaaagatataaacatatacctttaaaaaaatcttcaaaaatacacgagaatataaataaaattggtgtcatctgggtattgaggttttctttatattctttctgtgttataatttttaaattttttaaattatgaaatataactacataagtatatatatgtacagtttaaggaataataaaatgaacatccatgtattcagccttccgtctttttttttttaataccttgctgaattcagtttgaggcttttaaaaattttatatttttacatctctatttatgaatgctgttagccaccttaggttactttttatcccccatccttatctsatttggatgttaaagttatattagcatcataaaaagggagtccgatgttggacattcttattctgttgtatgcaacctgaattattcagagatttctagggttttatctctccctagtatgctgcaggttcactgttgtggatcaaacatggatcatttttgttcattctgctaaatcagtatttatgataatcagtatttatcataa

SEQ ID NO: 696962 - DNA, 1551 bp, Homo sapiens
tttgcctatgcctttttaaatggctgatttggggccagccttatctttattatccagtccttcatatgaatttattttggcacttggtgtttttatttttcaagaactttctttgttctcttatttttttttctttattctcggcctgggatttcttctttttttttgagatggagtttcgctcttgttgcccagtctggagtgcaatggtgcgatctcggctcactgcaacctctgcctcccaggttcaagtgattctcctgcctcacccttccgagtagctgggattacaggcatgcgctaccacgcccggctaattttgtatttttagtagaaacggggcttctccatgttggtcaggctggtctcgaactcccgacctcagatgatctgcccactttggcctcccaaagtgctgggattacaggcgtgagccactgygcccgcctttattttttatttttatttttgtttgagacagagtctcactctcatccaggctggagtgcagtggcgtgatctcagctcactgcaacctctgcctcccaggttaaagcgattctcctgtctcagcctcccgagtaaatgggattacaggcatgtgcaatcacgcctggctaacttgtatttttagtagagacggggtttcaccctgttggccaggctagtctccaactcctgatctgcctcacctcaagtgatctgcctgccttggcctcccaaagtgctgggattacaggtgtgagtcactgcgcctggcctgctctgggatttctaattcaaatctttatttttatttttaaaagtttgtgtattattttggcttcttaaccacttctttttatttattttggtttatcttaaatattgttgtttttccatagttgtaagtacctggcttgggtttcctttcattttaaagaccctttccccaagttgtcctctctcctgactgggagactccatttatgtctggctaagtggagagggtgtactaacaggcagcttgtatggactgaagatgggaggtctgggggctcatacaattgccacagtaagactttattttctgagtggaaacaacttctttcctttttcagatttgctgtttacttttatccctcctccctcccctttttctgcttggtattgtgaaagcttgggattttcatgctctacttctctccagccccaacatcttcataatgtgctcttcgtgggcaaacttgcctctttttagggagcagttctcaggaggaggtcatgactggcccaactgttctataggcagtccttaaatttctaccctaatggttatgtcagatcccaccgttgcttttaatattagttaacccaagtttgacagtttcctttgactgtattgggaggaacagaactcacgcctatggttttaactattatttttccatttttctgtaaattcagacatctgctttctgttttagaaattcttcaagatgtatgctctgccagtgacatccttatttctcattgctggtgtggatttattttatttttaatgttttatca

SEQ ID NO: 696963 - DNA, 492 bp, Homo sapiens
  misc_feature 2, 3, 4, 5, 6, 7, 8, 9, 10, 11, 12, 13, 14, 15, 16, 17, 18,19, 20, 21, 22, 23, 24, 25, 26, 27, 28, 29, 30, 31, 32,33, 34, 35, 36, 37, 38, 39, 40, 41, 42, 43, 44, 45, 46,47, 48, 49, 50, 51, 52, 53, 54, 55, 56, 57, 58, 59, 60,61: n = A,T,C or G
  misc_feature 62, 63, 64, 65, 66, 67, 68, 69, 70, 71, 72, 73, 74, 75, 76,77, 78, 79, 80, 81, 82, 83, 84, 85, 86, 87, 88, 89, 90,91, 92, 93, 94, 95, 96, 97, 98, 99, 100, 101: n = A,T,C or G
gnnnnnnnnnnnnnnnnnnnnnnnnnnnnnnnnnnnnnnnnnnnnnnnnnnnnnnnnnnnnnnnnnnnnnnnnnnnnnnnnnnnnnnnnnnnnnnnnnnnnagtggtatgcgcaactctgggtcaccttaaagacaaagcttcttgccatgggcttcactttgcctttttccactggctgagaagagccactgttgcagcagctgtgcacccagagatggaagcttcatatggatgaggccatagattccatctttgacttcagtaagagggaactaaacatctaacatttaaaattctgaatattggaattttttttgttttggcagcttagcctgtacccttgtcaaatattattccataagtacctccaactagagtccacaactgaaaacaccctgttctcccctttaaagcakctaagactagctaatggactgtcctcccttttaaaagtaaatggctggggccgggcacagtggctcacacctgt

SEQ ID NO: 696964 - DNA, 1666 bp, Homo sapiens
tctgcagggttgcccattggtactaattagtaattgattaatatgtgctgttgttgttggattttaaaaggtatatttcccattggctgggcgcagcggctcacacctgtaatccctgcacattgggaggccaaggcaggcagatcacttgaggccaagagttcgagaccagcctggccaacatggtgaaaccccatctctactaaaaatacaaaaattagccaggcatggtggcatgcgcctgtaatcccagctaccagagggactgaggcagaggcatgagaatcacctgaacccaggaggcggaggttgcagtgagccaagattgcaccactgcactccagcctgggcaaaagagcgagactccatctcaaaaaaagaaatgcttgaaagtgaaaatctctaaacatctaatggaagtgccaagaatattatgtttatattaaacattaattttcttttttccttgctaaccaaatacccagttatccatgcctaaggaaagaaagtccagctggttgaccaaatacccagaagtcaggtacctccctctcttcaggggtaattactcaaatcacagcctattgttcagagatgtgtgatctcaggcatgctggattcttcaggtttgtcctgctttaaatcacaagtattttaacaaccttacaagaaatggttctttgttctttggtatcctatagtatgcttgtaagcttctgaatttgttccggttaaattgaatagatgcgtgcgtgttgggggaggaggggatgggggctgggggctggcagtgggagagagaaattagrgagactgagtgttccatgacagctccacgagtgaaagctggaattgggcttcattggaaaagacacagttggggaaatacttgagaataataaccttgaataattacaagaaaatgagaaaggaaaaggagataatagtagctaataatgaagcaatgttgttattgaacatggtggcatatgcagttgaacctgtccatgcatggacttatttagggacttagttcatttgatcctcacagcaacccctgagagggatactgtcattatcccaccttacagatgaagaaattgagacttaggaaggtatccaaaatcttactgctggaaagaagtagagtcaggatttgaacccagatatcctgagggatacttggaaaatcctatttagcaggcccagacttctaggccatttgccaaacattcatactttcttcaactgaaaaaagatgagcttgacaaactgtcaccaatatgtctttttttttttaggaactgtaaggcaattactattaaatagttttaaaagtaataaaataaatatacagagagcaaaacaaataaagcaaatgtggtaagatattaacaaatggggaatctgggagattggtatatgagggttctttgtactattcctgcagcttgttggaaaatctgaaattgccaggtgtggtgactcatgcctactgtaatcccacctacttgggaggctgaggcaggaggattgcttgagcccaggaatttgggaccagcctgggaaacatagtgagacctcatttcaaaaaaaaaaaaaagccttaaattatttaaaataaaaagaaattccaaacctgtgactaatgtgcctaccaaaaaaa

SEQ ID NO: 696965 - DNA, 1666 bp, Homo sapiens
tctgcagggttgcccattggtactaattagtaattgattaatatgtgctgttgttgttggattttaaaaggtatatttcccattggctgggcgcagcggctcacacctgtaatccctgcacattgggaggccaaggcaggcagatcacttgaggccaagagttcgagaccagcctggccaacatggtgaaaccccatctctactaaaaatacaaaaattagccaggcatggtggcatgcgcctgtaatcccagctaccagagggactgaggcagaggcatgagaatcacctgaacccaggaggcggaggttgcagtgagccaagattgcaccactgcactccagcctgggcaaaagagcgagactccatctcaaaaaaagaaatgcttgaaagtgaaaatctctaaacatctaatggaagtgccaagaatattatgtttatattaaacattaattttcttttttccttgctaaccaaatacccagttatccatgcctaaggaaagaaagtccagctggttgaccaaatacccagaagtcaggtacctccctctcttcaggggtaattactcaaatcacagcctattgttcagagatgtgtgatctcaggcatgctggattcttcaggtttgtcctgctttaaatcacaagtattttaacaaccttacaagaaatggttctttgttctttggtatcctatagtatgcttgtaagcttctgaatttgttccggttaaattgaatagatgcgtgcgtgttgggggaggaggggatgggggctgggggctggcagtgggagagagaaattagggagactgagtgttccatgacagctccacgagtgaaagctggaattgggcttcattggaaaagacacagttggggaaatacttgagaataataaccttgaataattacaagaaaatgagaaaggaaaaggagataatagtagctaataatgaagcaatgttgttattgaacatggtggcatatgcagttgaacctgtccatgcatggacttatttagggacttagttcatttgatcctcacagcaacccctgagagggatactgtcattatcccaccytacagatgaagaaattgagacttaggaaggtatccaaaatcttactgctggaaagaagtagagtcaggatttgaacccagatatcctgagggatacttggaaaatcctatttagcaggcccagacttctaggccatttgccaaacattcatactttcttcaactgaaaaaagatgagcttgacaaactgtcaccaatatgtctttttttttttaggaactgtaaggcaattactattaaatagttttaaaagtaataaaataaatatacagagagcaaaacaaataaagcaaatgtggtaagatattaacaaatggggaatctgggagattggtatatgagggttctttgtactattcctgcagcttgttggaaaatctgaaattgccaggtgtggtgactcatgcctactgtaatcccacctacttgggaggctgaggcaggaggattgcttgagcccaggaatttgggaccagcctgggaaacatagtgagacctcatttcaaaaaaaaaaaaaagccttaaattatttaaaataaaaagaaattccaaacctgtgactaatgtgcctaccaaaaaaa

SEQ ID NO: 696966 - DNA, 1171 bp, Homo sapiens
ctcatgcctgtaatcccaacactttgggaggtcaaggtgggtggatcacaagatcagggggtggagaccagcctggccaatatggtgaaaccccatctctactgaaaatacaaaaattagccgggcatggtggtgcacgcctgtagtcccagctactcgggaggctgagaatcgcttgaacccgggaggcagaggttgcagcgaaccgagatcgtgccactgcaccccaacctggatgacagagtgagactccgtctcaaaaaaaaaaaaaaaaaaaggaaagaaagaaagtgactctctactaaaattagccgggcatggtggcgcgtgcctgtaatcacagctactagcgcggctgaggcaggattgcttgtacccgagaggcggaggttgtggtgagccaagatcgcaccactgcactccagcctgggcaacagagcgagattccgcctcaaaaaaaaaaaaaaaaaaaggaaaaraaagtgaatatttcaggtgtgggagcagcaagaatgaagggagaaaatcactaacccctaacctctgctctttccttcctatcatctcagtggagtggaaggggaatagtaggatgactctgggcttgaccagggggccgagttctactcagccttattccagctgtaggatttaggcaagttatttgaactttctgaaccttggtgtcttcatctacaaaatgaggaagatgacacctaccataatgagatgtgaagattacataaaataacacaataaagtccttagcggagggccacagacaggcaatgagtagtaccatggttactactgtgattctttgactatatgataggaagctgtgtgaaaaatacctgcaccaattgggaggcagctgcaactggcacagaaggtcatcctgtggaacagtgagatgcaggggccagacagtggagaacactgaatcccaagctgaactcttggtgctgtaacatcgctaaaggatcttgaccagtggacgcatagaacattgagtgcctgtgacaggagagaacccgaaggcctgaagaccaacaggaaggaacaccctgccgccacctggccctcctcaggcccctgcacatctccccatcaatgcccttttcgtgccctgttgtagtgacctgtttcagacctctatatggccatttcc

SEQ ID NO: 696967 - DNA, 598 bp, Homo sapiens
gtttgagttagggggactggacgctttataacctttaattcttcctgtgaaggaatgtgaggcggctgtccatttctcaaggttcctatcaaaatggctttcgctcacattttgtagttccattcacagagctgtgacccatttcttgctgggttttacttcaaaggattttttagccagaaagttaaaaaaaatcaagtggacataattaaaactcttatacttctttatgcctgtactgcagaaaaaataataataaaaataatgacagttctagcaaccatgagcaaaatttttgcatgccattggaaaagcgagggttggtcacgcctctggtctgtccgctgcatggtgataagctgaggcatccccatttgaggctgaggtgatggtgtggtgcaggccgcagctccaggcccygcaaacctcacaggggaggccgtggcccaggctgcgtcctgcagtgacgctgccctggggtctccaggcagctctcctgggacccgcctgcttcccctccactgccttcctcctcctccctcctgggcctatgtcctagataagcctgttaaattagccccataatacttaaaatgct

SEQ ID NO: 696968 - DNA, 374 bp, Homo sapiens
tatcattgatggacatttgggttggttccaagtctttgctattgtgaatagtgccacaataaacatacgtgtgcatgtgtctttatagcagcatgatttataatcctttgggtatatacccagtaatgcgatggctgggtcaaatggtatttctagttctggatcccataagcagggattttttkttgttgttgttatttcctgatgtatctcaagtgcctagagcattgtctggtacatggcacataaagttagctaggtagatgctagttgaaggatgaatgataaccagttacatgcagcagcatgcacccatgtgtgtggtgatgaatatcagagcctctcaacatttaatgactctcattatttttttt

SEQ ID NO: 696969 - DNA, 703 bp, Homo sapiens
tcagaatctattctgtggaaggcacaggagcctaatgccatggagaccagaataccatttttactatagataaaggtgtttgggggttgtggcataagcgagaaggctgaatgagctggcttgaactcctctgaaataagctgatgccccagaaatgtaggcctcctctgctagactttccacataatgaaaagacagctgggaatgtatgttctgcaggcaagcaggcaagaatctggggggttccttcctccagactcatgaatcagatcagtcattctggttcccattgagaggaatgagaaagggatggggctggaagccaggaggacttctccatggatatctctgttttgttgttgttgttgttgttgtttgtttgtttgttttctttttcttctttgagacggagtctcgctccgttgcccaggctgaagtgcagtggcatgatttcggctcactgcaacctccacctcccagattcaagcaatcctcctgcctcagcgcccccagtagctgggattacaggcacgcgccaccatgcccggctaatttttgtatttttactagagacaaggtttcatcacgttggccaggctggtctgaaactcctgacctcgtgatccacccacctcggcctcccaaagtgctgggattacaggcatgagccaccgcaccckgccagatgtctctttacatcaac

SEQ ID NO: 696970 - DNA, 703 bp, Homo sapiens
agagaaagtggaagaaaagacaaaatcatgaagttagaagaaagctgggttccaatccaggctctgcgatgattagttatgtgaacttgagctagttatttaatttctctgaacacgggcttcctcttctgtaagacagcacctagaacgtttaaattggtaagataattatgtgaaatcgtgtatgtctccttctgtcatggagacgtaactgaataaacctcggttcccctttgctcttctagcttctctttctgtcccccatttctcccaatttgcaagatataaaaggtaaagctgagccatttagacaatctgccaattgtgttattctggatcctataaaaagcagaagtcaasttgggattaaatgtgcaaagattttattagaggaaacggctctgtgagagaaaagggagaaagatgggagactcagaccaggaagcaagtctgacccggagtgaagaagagaatgagacggttgggtggaagagccctagactgctgtgccatctaagaaaaagattcgaggaggctgttggggcctctttgagccagccagagtcagctcccagcccctacatctcccaggaacggtcctgcctcagaatcccagccgtgctcacccttggctgcagcacacatgggaggtgtggccttggcgtgaaggagatttcaggagcagtatctaggcccttggtca

SEQ ID NO: 696971 - DNA, 703 bp, Homo sapiens
agagaaagtggaagaaaagacaaaatcatgaagttagaagaaagctgggttccaatccaggctctgcgatgattagttatgtgaacttgagctagttatttaatttctctgaacacgggcttcctcttctgtaagacagcacctagaacgtttaaattggtaagataattatgtgaaatcgtgtatgtctccttctgtcatggagacgtaactgaataaacctcggttcccctttgctcttctagcttctctttctgtcccccatttctcccaatttgcaagatataaaaggtaaagctgagccatttagacaatctgccaattgtgttattctggatcctataaaaagcagaagtcaacttgggattaaatgtgcaaagattttattagaggaaacggctctgtgagagaaaagggagaaagatgggagactcagaccaggaagcaagtctgacccggagtgaagaagagaatgagacggttgggtggaagagccctagactgctgtgccatctaagaaaaagattcgaggaggctgttggggcctctttgagccagccagagtcagctcccagcccctacatctcccaggaayggtcctgcctcagaatcccagccgtgctcacccttggctgcagcacacatgggaggtgtggccttggcgtgaaggagatttcaggagcagtatctaggcccttggtca

SEQ ID NO: 696972 - DNA, 761 bp, Homo sapiens
tactagaggctgtgaacactagtgaggagatgaggataaatagaaatggttaatgggtataaaaatacagttagaaagaaagaataagatctagtgttccacagcataataaagtgactatagtttaaaataatttattgtatatttcaaaagatccagaagagtagacttggagcattcacaacacaaagaaatgataaatgtttgaggtgatggatatttcagttacccagatttgatcattacacattatctatttgtattaaaatatcacatgtaccccttaaatatgtacaactattatatatccaattatttttttaaatattgaagaaatgaaagaccttccaagaccagattcttcaatgagaattcatctctttgtcactaattctatcactcaatttcttcataacactataatagcacccacacaatgtatataaattcaagtcctaacattgttccttgcatttattaggcattcaataagtatttatggagttcaaggatattccttcattgcaaataacataatgtgtaatgtactgagccattcttctattcaaytaaatattaatttagtttcttttactacagtttataagtcagattggaaataatatgacaaaaataatactgccataaaagtttgaatcatatatttttatcaaaatactaaacttattgatgttatgaatagtaataataatatcacaataatagctaggattagggagttaacatttgccaggaacata

SEQ ID NO: 696973 - DNA, 654 bp, Homo sapiens
tgtaacaactttatttgaagagttctttgtttttcctacatatattaagggtagttatttttttctttttgggtattgggatgttgttaggaatatatgaaataaacgattattccatttgtcaagaaaacactagtgcttaatttttaaaatatataaaatatcatatgtgaataattactcaaatatcttctgttacaaataatgggagttacatagtcttatactactttgaaattccagaagttggaygcttacagctagaagaatgcacaaaatgtatgttaaaaatcacataaaatacatatgttatggtaaagtgaaatattagtactttgaagttatctagtaacttattgtatagaataatacattctgctaaaatgactccagaattaataggttagtgagtcaaaatgtaagatagttaagctctgaaaagtcagatatcaagattctatttatcttctctagaaaaactagaaactgaagagagttacataaattgcattttcttccttatttgagctttacataacttctcttaccagtcttcaatgaaaaaatttatatataaaatattgcattattgctcaataagagttatgagaatgggaaatcatctataataattaaaaccaattctcattcaga

SEQ ID NO: 696974 - DNA, 935 bp, Homo sapiens
tggactttcctaagtacccatttgaggactccatgctatgtctctcttcagggtcaatttctaaacttattttgggtatttcaacactgatccttctaatatagaacactgccctagaaacagaggaaaagaagagtgtgtgtggagaccctcttgtcactctgcacctcttacaatcgttctttctccaggggcccctcttggccctttttcaccttaggaatcaggtagaagagatggcatatggtaagtctgtttgtttttaattgggttcattttttatttgttcaattattatatatattttttgagatggggtttctctatgttgccaaggctggtctcgatctcctgagctcaagagagtcacctgtctctgactctcaaaatrctgagattataggccctgagccaccttgcccggcctcatcttaaaaaaaaaaaaaagaaaattgtcttaatatgtttcattctgtatttcttaatgaaacccagttattggggaaaacatgtgttcaactttagcttcaaagtgggttaaagaaccatggtaccttttacatgacttcaacttgctgcttccccaaacacatcatcacagagttaggcattttattatggtccagatatctctcacccttaacactttcttattttttatttattgtttttgagacagaaccttgctttgttgccaaggttggagtgcagtggtacaatctcagttcactgcaacctccacctcccgggttcaagtgatcctcccacctcagcctcccaagtagctgggagtacaagtgcatgccacaacacttggctaatttttaaaggtttctgtagagatcagatctcactatgttacctaggctagtgttgaactcctgggctcaagcaatcctactgccttggcctcttaacgtgctgggattataagc

SEQ ID NO: 696975 - DNA, 1112 bp, Homo sapiens
ttcctatatcttcctttgagcttatgggaggttctaagactggaattgcagagctaaattagtaaagatgagttttagtgaggattaatacatgaatgaatgaataaatacataaaatcaagccaagcaaaaatgaaaacttttcaaccaacacacttgcagtttattttaccaaaaccatacaggtgttttgttttgttttgttttgttttgtttaagagacggggacttgctatattgcccaggctggtctccagctcctgggctcaagtgatcctcccacttcagcctcttgagtacctgggactgcaggtgtgtgctaccacacacagactattccatctttacatgtagctcagaactcagtaacaacttgatcacaggaactgaatcttatgttttcttttagttttaacatcgaagttgaaaagatttgcaaagagagtcagggcacagtggctcacacctgtgatcctagaattttgggaggccgaggggggaggattgcttgagaccaggagtttgaaaccagcctgggcaatatggcgagaccccatctctataaaaataaaattaattaaaaattatttttaaaaatcaataaaaataaaaagatttgcaaaggggaaataaacagaatatttgcttgactaaattagggaagggaaaggtatgtgtcaaagatgactactttagaatctcagctagaaagaaaaataaagggagggytgtcaagaatggcctcctggctgggtgtggtggttcatatctgtaatctcaccaatttgggaggcctggaattagagactagcttgagcaacatagtgagactcttttcctacaaaaaaaaacaaaaaacagaatggcctccaattagtggtaggaaaacaagttcaggggtttgagaagcctataatgccaaagtgaatatccaacattctcctcattatgtaaattctgacgtcctaaagaaatcatagttgttaggtcggacacaatggctcgtacctataaccccagcactctgggaggccaaggtgggaggattgcttgagctcaggttgagagcagcctgggcaacaaagtgagaccccatctctacaaaaaaatca

SEQ ID NO: 696976 - DNA, 1112 bp, Homo sapiens
ttcctatatcttcctttgagcttatgggaggttctaagactggaattgcagagctaaattagtaaagatgagttttagtgaggattaatacatgaatgaatgaataaatacataaaatcaagccaagcaaaaatgaaaacttttcaaccaacacacttgcagtttattttaccaaaaccatacaggtgttttgttttgttttgttttgttttgtttaagagacggggacttgctatattgcccaggctggtctccagctcctgggctcaagtgatcctcccacttcagcctcttgagtacctgggactgcaggtgtgtgctaccacacacagactattccatctttacatgtagctcagaactcagtaacaacttgatcacaggaactgaatcttatgttttcttttagttttaacatcgaagttgaaaagatttgcaaagagagtcagggcacagtggctcacacctgtgatcctagaattttgggaggccgaggggggaggattgcttgagaccaggagtttgaaaccagcctgggcaatatggcgagaccccatctctataaaaataaaattaattaaaaattatttttaaaaatcaataaaaataaaaagatttgcaaaggggaaataaacagaatatttgcttgactaaattagggaagggaaaggtatgtgtcaaagatgactactttagaatctcagctagaaagaaaaataaagggagggctgtcaagaatggcctcctggctgggtgtggtggttcatatctgtaatctcaccaatttgggaggcctggaattagagactagcttragcaacatagtgagactcttttcctacaaaaaaaaacaaaaaacagaatggcctccaattagtggtaggaaaacaagttcaggggtttgagaagcctataatgccaaagtgaatatccaacattctcctcattatgtaaattctgacgtcctaaagaaatcatagttgttaggtcggacacaatggctcgtacctataaccccagcactctgggaggccaaggtgggaggattgcttgagctcaggttgagagcagcctgggcaacaaagtgagaccccatctctacaaaaaaatca

SEQ ID NO: 696977 - DNA, 1112 bp, Homo sapiens
ttcctatatcttcctttgagcttatgggaggttctaagactggaattgcagagctaaattagtaaagatgagttttagtgaggattaatacatgaatgaatgaataaatacataaaatcaagccaagcaaaaatgaaaacttttcaaccaacacacttgcagtttattttaccaaaaccatacaggtgttttgttttgttttgttttgttttgtttaagagacggggacttgctatattgcccaggctggtctccagctcctgggctcaagtgatcctcccacttcagcctcttgagtacctgggactgcaggtgtgtgctaccacacacagactattccatctttacatgtagctcagaactcagtaacaacttgatcacaggaactgaatcttatgttttcttttagttttaacatcgaagttgaaaagatttgcaaagagagtcagggcacagtggctcacacctgtgatcctagaattttgggaggccgaggggggaggattgcttgagaccaggagtttgaaaccagcctgggcaatatggcgagaccccatctctataaaaataaaattaattaaaaattatttttaaaaatcaataaaaataaaaagatttgcaaaggggaaataaacagaatatttgcttgactaaattagggaagggaaaggtatgtgtcaaagatgactactttagaatctcagctagaaagaaaaataaagggagggctgtcaagaatggcctcctggctgggtgtggtggttcatatctgtaatctcaccaatttgggaggcctggaattagagactagcttgagcaacatagtgagactcttttcctacaaaaaaaaamaaaaaacagaatggcctccaattagtggtaggaaaacaagttcaggggtttgagaagcctataatgccaaagtgaatatccaacattctcctcattatgtaaattctgacgtcctaaagaaatcatagttgttaggtcggacacaatggctcgtacctataaccccagcactctgggaggccaaggtgggaggattgcttgagctcaggttgagagcagcctgggcaacaaagtgagaccccatctctacaaaaaaatca

SEQ ID NO: 696978 - DNA, 984 bp, Homo sapiens
agctcctctctatttttactgattctactgaagcactcaatatatgtccactgaaagagaacaagtggtcccaccagcaatcacttaacataaggggccctatgaggaagagccttcaggccactgtacccataggctactggccaccccataaaggatgatgtgtcaggtccccccattgtctggctaggtggtggtccatctggatggccatccgtgtgtaaagacccactcagaagggactcttggcagtactttgaggcttctagggagggaattggggctgatcgtggaagctcacgcctgtaatcctagcactttgggaggctgaggcaggagcatacttcagctcaggagttcaagactggcctgggtaacatagtgagaccctgtctctataaatttttttattttattttattttatttatttatttatttatttatttatttatttatttatttttgagacggagtctcggctcactgcaacctctgcctcctgggttcaagcaattctcctggctcagcctcccgagtagctgggattacaggcgcacaccaccatgcctggctaatttttgtatttttcagtagagacagagtttcaccatgttgsgcagactggtctcgaactcctgaccttgtgatcctcccatcttggcctcccaaagtgttgggattacaggcgtgagccaccgtgccatgccaacatttttttttttaaaggaagggagttggcctgtccagcagaaatgttcttagcatgtcattcaactgccttaaaaatctagtttcagcccactttccctgtctttgctgtcattcctctttcttttatcttttttttttttagacacagtctcactctgtcacccaggctggagggcagtggtgtgatcttggctcactgcaacctccacctccaggttcaagtgattctcctgcctcagcctcccaagtagctgggattacaggcgctcac

SEQ ID NO: 696979 - DNA, 877 bp, Homo sapiens
ggcacattatgtctactccttattacaattacacaaggtaattattatcatcttcatttcatgaaaagggaaacagaagtttagaaatgttatataatttgcccaaaatcacacactctaaattgctaagctgaagagtgaactgcaggagtgatggattctaaagctcttactctgtctacctatactttctcttacactacatactatacggaagtgtttccttttttttttttttttttggtactacgggagtctcacaatgttacctgggctgatctcaaactcctggcctcaagcagtcctcctgcctcggcctcccaaagcactgggattacaggcatgagccagttcacccaaatgggcaatgttttctaattattttgtgtgcattagtctctgctgaatttgttcatgaaatcagatactatataatttaagagttgtattcagtcactagttctggagatacaggagttgaggccaggtgtggtggcttatacctgtaattccagccccttgagaggccaaggtgggaggattgcttgaggttgggagtttgaaaccatcctgggcaacataccgagactccatttctacaraaataaaaaaattttaaaattttattgtttaaaaaaaatttattattttattattatgttgggcacacacctgtcattctagctcccaggaggctgagctgggatgatcgcttgaccccaggagttagaggctgcagtgagagcgcaagagtgacagcacaagagtctgtctctaaaatccaaaaacaggaacatagcctctttttgctatttcctctgccatccccaggtgggggccttttccttgtgttaaccagatggcttctggaagtcca

SEQ ID NO: 696980 - DNA, 636 bp, Homo sapiens
tttacttgtggtttagacttcagtcttcagagccccactcaggtaacggatacaatctcatgatattctcttctgcccaagttcacagccaactctgtgtggcatgcattgcttttatgaataaaattgttgccattttagctatataagctggagcgtttgagcattaaactactagggaataagaggtatcaagaaagttgacatacctttctcctcttgaaagactgatttccctgagagaaaaaggaaccttcccaggaggtattatcctaacattttaaaggctttctctaggcctctcccaacagaaaagtgacaagagaaagatggaatatggcaggattgtcgccacgggttggcaggagtcaggagcatgtggtcctgactcagctgtcccattaggcagttgagaccatgggcaggcaggtcactaccctttcaagactgtcacccttgtcttcacaccacgtgtcgaatgggaggcttctgatggagaacaagtaaaatagaatgtctgctatttaagttaataaacaatatatgtctccctttttgttctcttgaggacttgagagtagacactttggactttaaatatccctcaggttttttttttwaaaaaagccttttcat

SEQ ID NO: 696981 - DNA, 658 bp, Homo sapiens
tatattctaaatttagatatagaaatttggaaattgcatttcttcaggtctaattatatgagtcgtaaggctaagattgcttagatgaaaaaacaatgaacatgagtgtatgattttttgtgaatgtagatatatgaacatgtatgtgtatatatgtgcatggatatctagataagagtgtgtgtgggtgtgggtctctatttatacttccagttacagttccataccacagaggatttattttccctttccaaatttgtaactcttgacttccattttattcacaatatattttcttatgtgttaaaccctgtaatgcttagaaagtagttcagaattgcaaagccayacctttgaaaaaaacaatcttactaattagagctcagcacttgcttagagttttttttgtctttagtttgaatactatattcagaagttacttaggttaattctcctcttctctgttagagtgtggttatgttattcacttgaaacatggtttgattcctttgtttctgtttgtattcaattttagggttttcctcccatccttgttgattttgtctaggcaaaacattgacatggtttcaaaagtcaagatgtacataaagatatattcagaaaggtttccaggattttcactaaaatatatcctgga

SEQ ID NO: 696982 - DNA, 852 bp, Homo sapiens
tgttgtggggtggggggagggggagggatagcattgggagatatacctaatgctagatgacgagttagtgggtgcagcacaccaacatggcacatgtatacatatgtaactaacctgcacattgtgcacatgtaccctaaaacttaaagtataataataaataaataaataaataaaataaaatatatctacttatgtacacatattattttttctcttctgagcacaagtttaaatatacttttctccttattacattaagaaacataacaatttaaaagtgaatcaatgagaaagttacctattttggtgtattcatttctatgccatatttttccatttcttatttcttagagacacrtatcatattttttttgttcttggtttactcattgcatacaaaagccagtcaagatgtacataatctgtgcctttattagaaaacttttatttaatttccataccattctgataggtaagatcaacttggcaatagaggagcctagagttggcctttgcatttgtggctggtgtattgtgacataatggatgcaggtagaagtgaattaacaggggctacactaacaggaaggtatagatgttgtgcacgtagccaaaggatacaccaaaggtgagaagtgaggagataagatgagcaggacagataggacaagaatacaggcatgacctgtgtcatagattttagcctatgcaagagtcccaaaatgccaggagaattagaatattgagttacatggactgattagttcatatgttggtaaaataagaacacgtaactgatttatattcctcatgtcctgttgtacagatcaatatttgaaaaaccagaat

SEQ ID NO: 696983 - DNA, 1235 bp, Homo sapiens
tcaaagaattgtgagctgctgtgatcaatgttttccatgtggataatggtgtcattcagagtggtgtcaagagtcatggaaagataccttctcttcgtgtaaataaaacatcatagatcagttggcagaactcataagtgcccaagataggggaacagactaaaaaactgatacaatttctttggtgtgtctgaggacaggagtcttttgttacaaagcctccacccccacagccatgctgctttgcttttctaatccactgctttgctcctgggaatgatatgtattagccagccagaccatgtacccttcccttcctgctgtctcctgttaatctatttaagttttgtaatttgcactaatttgcacatattagatttcttcctggctttcttcagccttcagcatgcactagacaaagccattgaacgraatattctaatatcacatctcttctctcttttgaagcctctctacaaaatgtaggctgataatatgatcaaaagttaataatcagagtttacgtgatgttcttttttagcttcttttaattttccatttccctcagtgattaagactgtatgtttgtttgccctccaacgtcatttacagaggagtttttatcttttttcctaagtattgtcacatctaacagatttccataacctttgtattcttttaataatttgtgttgtggttaacttttagactgaaaactggacaactttcccattagaatgtgtctatgtccccctcaacagattggagagatagctgctccatgcttctaggaaatatctgcagctatcctgctgctatgcaagattttactggtgccgctgtcatattgtcagaaccgttcccactggtcctagagtgacagagtagttatttaacctaaatcttatcaaggagtgattaaatctatatctgagcagacatggattttagacggatttctactgagaactatcttgagttcagtgttgctcagtatttacattaccaccctaaaataaaggaaccattcacctgtcggtttttatggaagatgccacaaagatattgcaagtaatttggtgggaagatattaaaacttcatgttttgtaattcaaccttgatattagaaagaacaaataaatccagtatagtcacactcacctcaaagacatatgtaggcttttaaaattatatttaaacaataaattagaaatatcagaatacataatgatat

SEQ ID NO: 696984 - DNA, 1409 bp, Homo sapiens
catctcctccatgatcatcatcatcatgtggcttaaaccagtaatcagtttttttctttcttatgattctcattgcctgggctcagctaagcagttctctctggctccatgtggagttgcctgggtctgcagtgtcctgaatgtgacttactttgggctgagacctcatttaggcctgagagcccgagcaattctgtgctcttcaatgtgctccatgtgatgtgggcttctctcaggggagcaacagactccagaagagagagttcaaaaaaaatcaaaagctgcctggcatcttatgtcctagcctcaggagtcacatagcatcacttctgctgtattctgtggctcacaggaagtcacagggcaagtccagatccacaaggagtagaaaaagtctccattttttgatgacaaagtcacactgcaaaagagcatgtgggatgggaaatgttgttgcagccatctttggaagtaatctctgccacatgttattaaagaagttagaagaagctcactgtgtgtacatgtgaaaagatgtccaagatacatttctatgtgagaaaagctgggtaaagaacagactgtataatgtactaataattatcagtgttaggaagtgtgggaaaagaatatatttgtatttttatttatatattttagaagtctctgaaacacacccaggcataacagtgggtacctgttgaggttgaaaatttggtgactaggggacatagtgagaggcttttcactgtaaaatgttactacacattttwaaaataattcgaatctcctaaataagtaacttctgtagttaaaaaagtcagctatatggttgaactttaactgtagttccatattagaatttggaatctcagcatttaaaagaattttagatgtcatttagtcctatcatctgcattatttaaagtaagaatctacatggtttatctgaaattcaaatttaactgggcatcctatatttttaaaaattttattgaggtacaatataaaaaaataaaaataaagtaagaatctagtctgttgatttcctaaagtgtggtcattgaacttatctgtgaaaaattacctctaagatagtgacttctgttgcataaccatttgaaaacactccaaccaaaattttttatttttgaggaacctatcttaattgaattaactgaattgctgattaacaagacacactatttaacagaggaattggtgcaacagttttatgacatctttctatatttcacattttactgaatcataatttaaaatatattaattttatatctagctttatctaaaacttatgtatatttgaagtactgaaatctgattattgaaaaaaattggactgaccaaagctattaagaataatatttctaaaggtatttttcttttta

SEQ ID NO: 696985 - DNA, 1506 bp, Homo sapiens
gtaatcccagctaatcaggaggctgaggcaggagaatcgcttgaacccaggaggcagaagttgcagtgagccgagatgatgctattgcattccaaccagggcaacaagagcaaaactccatctcaaaaaaaaaattacactaaatgtaaatgtaaatggcctgaataccacaaactaaaggacaaatayagactgaaccaataacccaaactcaaccacatgctgtctacaagagtatatttaaaatatactctttaaaattaaatatgcactttaaaattaaaaatacaaataggttgaaattagaaaacatgaaaaaagatatatcatattaatggtaaacataaagaagctgtgtggctatgttaatactttaaaagtagactacagaacagaagctgccaaggattaaaagagtcattgtataatgataaattggataattaatcagtaatggggtttaaggtggacatgaattttggcagacagtattcaacttattatacaatactaaccaagcaaaaaatagagaaaactttaaagtattaggtataacagttgattactccagaaactacaaatgttgaggataatatggaattttatgaaaaaacacgtcaataatttgataatatattaaataattcctagaaaatgtaatctgtcaaaaatgaattgaaaaatgtagaaaatttaatatttagactaatataattaattaataatatacaaaatatattaaagaaattacatttataatcaaaggtttcccttgaagcaatttattaacccatttgggtttttgtgtgaatttcatgaaacgctgaagaaaaataacacactatcctttacacacacctttaaagtgcctagaggtatagagatggcttcctaattcattttgtgaggccctgttattgaaatctggcaaagatactgtcagaaaccaacaaatgaatgaatcctcaataaaacataagcaaatccaattcagcaaaatatgaaaaatgatcttactttaagatcatgtaggctttacacaaggaaagcatatatgaaggtgaaaaatcatataatctgaattgatgaaactatttgataaaagtcaacactcatttatgacaagaactctcagcaaactagactgataaaggtatctctgaaaacttaggtaccacatataatggtgaaaaactaaatgcttttacacataattgagaacaagacaagaacatatattcctagcatatcttttaaatattgtactagaggtctcagctagtgcatttgtgcaagaaaaacaagtcaaaggcatatgcaaaagtatatatatatatatatatatatatatatgtatgtatgtatacacatgtctgtttgcatacacatagagatgtctacataaaatattgtaagaaataaaaaaaaccctactaggattgacaagtgaacttaacaaggctgaaggacacatagctagtataaaataaaacaaacgtatttcta

SEQ ID NO: 696986 - DNA, 1506 bp, Homo sapiens
gtaatcccagctaatcaggaggctgaggcaggagaatcgcttgaacccaggaggcagaagttgcagtgagccgagatgatgctattgcattccaaccagggcaacaagagcaaaactccatctcaaaaaaaaaattacactaaatgtaaatgtaaatggcctgaataccacaaactaaaggacaaatatagactgaaccaataacccaaactcaaccacatgctgtctacaagagtatatttaaaatatactctttaaaattaaatatgcactttaaaattaaaaatacaaataggttgaaattagaaaacatgaaaaaagatatatcatattaatggtaaacataargaagctgtgtggctatgttaatactttaaaagtagactacagaacagaagctgccaaggattaaaagagtcattgtataatgataaattggataattaatcagtaatggggtttaaggtggacatgaattttggcagacagtattcaacttattatacaatactaaccaagcaaaaaatagagaaaactttaaagtattaggtataacagttgattactccagaaactacaaatgttgaggataatatggaattttatgaaaaaacacgtcaataatttgataatatattaaataattcctagaaaatgtaatctgtcaaaaatgaattgaaaaatgtagaaaatttaatatttagactaatataattaattaataatatacaaaatatattaaagaaattacatttataatcaaaggtttcccttgaagcaatttattaacccatttgggtttttgtgtgaatttcatgaaacgctgaagaaaaataacacactatcctttacacacacctttaaagtgcctagaggtatagagatggcttcctaattcattttgtgaggccctgttattgaaatctggcaaagatactgtcagaaaccaacaaatgaatgaatcctcaataaaacataagcaaatccaattcagcaaaatatgaaaaatgatcttactttaagatcatgtaggctttacacaaggaaagcatatatgaaggtgaaaaatcatataatctgaattgatgaaactatttgataaaagtcaacactcatttatgacaagaactctcagcaaactagactgataaaggtatctctgaaaacttaggtaccacatataatggtgaaaaactaaatgcttttacacataattgagaacaagacaagaacatatattcctagcatatcttttaaatattgtactagaggtctcagctagtgcatttgtgcaagaaaaacaagtcaaaggcatatgcaaaagtatatatatatatatatatatatatatatgtatgtatgtatacacatgtctgtttgcatacacatagagatgtctacataaaatattgtaagaaataaaaaaaaccctactaggattgacaagtgaacttaacaaggctgaaggacacatagctagtataaaataaaacaaacgtatttcta

SEQ ID NO: 696987 - DNA, 2325 bp, Homo sapiens
tggcattacatcagcaatgcaataataaggtaataaagttatcagaacttcccttccaaaatatggcattttaatccctgaagmgtgaatagaaattaaataatactcaaactttttattaatttttaaaagttataatggatattccaattattttgtgtaaattacattaccaattctaaaagttgcataaatttttaaatttctggaaggaagactgttgtgatttgacttgcaaatatttttagcaaacaaaacaagcttcagaagttgacaaaaatgggtatagaatgtatacaaatataaagtgttagttagcatactgggatagctaaatcttctgtgaagctgagagatttgtgcatgcaagaaaataccaatttagctgctattgtttgcaaactttaaaaatgtatctcttcccttctatctgtgctcccaccagcttagaatgccttcattttatccatctttcattattaaaaacaaattctctctggtactcaaactcaactcaatctcagtcttttaaaatactcttctatttaaaaaataacaaaatctttaaagtggattctaatggctaattgtagttttcttaagcataaatcactcagatactgtgttctctgagttattatatgattccgaacgtcctttttattacctttgttctttcagacttggttggataaacaattcatgtgacacattttctttctccagaactttgtaggatttaacttcaaatattgctgcaaagaagtttcaggggatcctgattttgtcttctggtatgtgacatgggttttctggaggtagcttgaaaaaggctttatctttgaagttcaatagtggaccaagatatgttttggctttaagtgttttgtaaaaattttgcctggattagagtgtgttctttttatttttagttatttttcccaattatctcaccaaaattttcttgttttatattctttaatatgtttttggtttcatggttggctttgttttcacaggaattcagttattttaagtgggtttatctctcttgaatgtggtcacattgttcgttccttccttccttccttccttccttccttccttccttccttccttccttccttccctccttccttccttccttccttccctccctgtactctgttagaggtaaactgctgcactttttatttacaatccctctttcctccaaaatatttgaggcagcttataaaaaacagatattctaaaactatttaagcaagggcaaatgatgtgattatgagctttgagtgttttgtatttatttattcttttctccttcttttgtacgtttttcttcattctctatatttattatgattataaaaaacaatttagagcagcaattttattttagctttgtctattgtattccttcttccttaaaattgattaatatgtttcataatattcttgctttggacatcaattttacttaatgcttgatgcttctattaaaacatatttccattttctttttttaaattgaaatgatcttcttcttacctatttctatagcataatgcaatgcatttatggagatgttttttccttcctgtgctatgcttttttcatacatgttttttcttgacttgtgcatattttatgctattttttacttaccagttatttattgattttttccccctataatgtctttcaattgttggcactcagattgttttagcattgcttatacttaatgtgaattatttggcagaggtaatctgatttcctaattttgctgataaaatgaaaaaaaaaagttttttatttcttttccaccatgattgctatctacttttgttgctttgagctacaagttgagagtatgggagatgaaaaggtgataagctaaggttgtgttgaacatcttaaatcatgattttctgtagacattaaggtttgcatattgttcccacagtgaacccctgcaaacttaactatcctcattttttcttaatttcctcctttccactctccctcccaggaactactttcactttttttcagttagaaaaaaaaaatacaagagtacaatttcaatttgcttcttcaaagtttggcagtcagtgaaaatcattcgtatattatcaactcagcattattacttttagaatgctggtgaaagtttagaagccagttacgttgcccacactgctctgctctattctagaatcttctgttgcttcattttggtttctttgcttgttaataatgttttatagtttcagttgtgcagcactcctttttcattgctgctgatcatgatttatttta

SEQ ID NO: 696988 - DNA, 2325 bp, Homo sapiens
tggcattacatcagcaatgcaataataaggtaataaagttatcagaacttcccttccaaaatatggcattttaatccctgaagcgtgaatagaaattaaataatactcaaactttttattaatttttaaaagttataatggatattccaattattttgtgtaaattacattaccaattctaaaagttgcataaatttttaaatttctggaaggaagactgttgtgatttgacttgcaaatatttttagcaaacaaaacaagcttcagaagttgacaaaaatgggtatagaatgtatacaaatataaagtgttagttagcatactgggatagctaaatcttctgtgaagctgagagatttgtgcatgcaagaaaataccaatttagctgctattgtttgcaaactttaaaaatgtatctcttcccttctatctgtgctcccaccagcttagaatgccttcattttatccatctttcattattaaaaacaaattctctctggtactcaaactcaactcaatctcagtcttttaaaatactcttctatttaaaaaataacaaaatctttaaagtggattctaatggctaattgtagttttcttaagcataaatcactcagatactgtgttctctgagttattatatgattccgaacgtcctttttattacctttgttctttcagacttggttggataaacaattcatgtgacacattttctttctccagaactttgtaggatttaacttcaaatattgctgcaaagaagtttcaggggatcctgattttgtcttctggtatgtgacatgggttttctggaggtagcttgaaaaaggctttatctttgaagttcaatagtggaccaagatatgttttggctttaagtgttttgtaaaaattttgcctggattagagtgtgttctttttatttttagttatttttcccaattatctcaccaaaattttcttgttttatattctttaatatgtttttggtttcatggttggctttgttttcacaggaattcagttattttaagtgggtttatctctcttgaatgtggtcacattgttcgttccttccttccttccttccttccttccttccttccttccttccttccttccttccctccttccttccttccttccttccctccctgtactctgttagaggtaaactgctgcactttttatttacaatccctctttcctccaaaatatttgaggcagcttataaaaaacagatattctaaaactatttaagcaagggcaaatgatgtgattatgagctttgagtgttttgtatttatttattcttttctccttcttttgtacgtttttcttcattctctatatttattatgattataaaaaacaatttagagcagcaattttattttagctttgtctattgtattccttcttccttaaaattgattaatatgtttcataatattcttgctttggacatcaattttacttaatgcttgatgcttctattaaaacatatttccattttctttttttaaattgaaatgatcttcttcttacctatttctatagcataatgcaatgcatttatggagatgttttttccttcctgtgctatgcttttttcatacatgttttttcttgacttgtgcatattttatgctattttttacttaccagttatttattgattttttccccctataatgtctttcaattgttggcactcagattgttttagcattgcttatacttaatgtgaattatttggcagaggtaatctgatttcctaattttgctgataaaatgaaaaaaaaaagttttttatttcttttccaccatgattgctatctacttttgttgctttgagctacaagttgagagtatgggagatgaaaaggtgataagctaaggttgtgttgaacatcttaaatcatgattttctgtagacattaaggtttgcatattgttcccacagtgaacccctgcaaacttaactatcctcattttttcttaatttcctcctttccactctccctcccaggaactactttcactttttttcagttagaaaaaaaaaatacaagagtacaatttcaatttgcttcttcaaagtttggcagtcagtgaaaatcattcgtatattatcaactcagcattattacttttagaatgctggtgaaagtttagaagccagttaygttgcccacactgctctgctctattctagaatcttctgttgcttcattttggtttctttgcttgttaataatgttttatagtttcagttgtgcagcactcctttttcattgctgctgatcatgatttatttta

SEQ ID NO: 696989 - DNA, 615 bp, Homo sapiens
tgtaagaaattgctaaatttcctagaggtgawtacctctaggaaacagggatgagagtgaaggtaatatttcacttttatatctgttagacatttttatcaagattcccattacttttataataattattaataaaacaacgcatgagttagaccaagagaaaagccacaaatcagctgagttatgagtcaataagggccttttgtatataattagcacatttcaaagcagtttgtatttcatggaaaaaaatccagaaatccagataaaaagtcagagtcaccttgaattgggattgaaataagcatacgtagcactcctcccttcaattaagtttgaaaagttcaggtttacagggaagtggagcccagggagcccagggattaagcattcaggagtcagaatctgattttctaggactgaaacctcccatgctattaacaagcttcgaaacaagctgagtaagttactttctctttcttggtctcagtttccccactgaaacatgaggaaaaaaagagtactttttacctcattgagtaattgtgagggttaaagagataattcatgcagcactcagcacagagtctgaagaaagtcctctataaatgttaa

SEQ ID NO: 696990 - DNA, 615 bp, Homo sapiens
tgtaagaaattgctaaatttcctagaggtgattacctctaggaaacagggatgagagtgaaggtaatatttcacttttatatctgttagacatttttatcaagattcccattacttttataataattattaataaaacaacrcatgagttagaccaagagaaaagccacaaatcagctgagttatgagtcaataagggccttttgtatataattagcacatttcaaagcagtttgtatttcatggaaaaaaatccagaaatccagataaaaagtcagagtcaccttgaattgggattgaaataagcatacgtagcactcctcccttcaattaagtttgaaaagttcaggtttacagggaagtggagcccagggagcccagggattaagcattcaggagtcagaatctgattttctaggactgaaacctcccatgctattaacaagcttcgaaacaagctgagtaagttactttctctttcttggtctcagtttccccactgaaacatgaggaaaaaaagagtactttttacctcattgagtaattgtgagggttaaagagataattcatgcagcactcagcacagagtctgaagaaagtcctctataaatgttaa

SEQ ID NO: 696991 - DNA, 653 bp, Homo sapiens
aagtttaatggaatcacagttccacatgactggggaggcttcacaatcatggtggaacttccatttggaaggagggtggagacagatgataaggaagaatgccattcttaatagagggtggtggtcccagagggcctcttggaggtggtgtgatttaagttatgatggatggcagctcwgccagcaaaggactcaggaagtgcacccaggagagggctcaggcaaaggcgggggaagtgtgtggtgctcaagcatcagaagagccatctgtgtgcctggaagcttagtggagaagggaacaaggtgacaagagatgacaatggaaggaggcagtgtccagaccgtttggtgcctgggagaccccattcaggagtcacttgggttgtaattccagaacaacaggaaactgctaaagggaagaccacagttagactcctgcttttaggagctcacattggctgctccgctgagaatgaactttagggagacaaagtggacttaagttgcccacttaataagttgccctagtccaggaagaaaaggatgaaaccccgagggaaagggcaggcggcccctgatgggagactctaacgctggtattgaggggcggattactgtcttggggttttaaacaactgttaaaagagatcctt

SEQ ID NO: 696992 - DNA, 653 bp, Homo sapiens
aagtttaatggaatcacagttccacatgactggggaggcttcacaatcatggtggaacttccatttggaaggagggtggagacagatgataaggaagaatgccattcttaatagagggtggtggtcccagagggcctcttggaggtggtgtgatttaagttatgatggatggcagctcagccagcaaaggactcaggaagtgcacccaggagagggctcaggcaaaggcgggggaagtgtgtggtgctcaagcatcagaagagccatctgtgtgcctggaagcttagtggagaagggaacaaggtgacaagagatgacaatggaaggaggcagtgtccagaccgtttggtgcctgggagaccccattcaggagtcacttgggttgtaattccagaacaacaggaaactgctaaagggaagaccacagttagactcctgcttttaggagctcacattggctgctccgctgagaatgaactttagggagacaaagtggacttaagtwgcccacttaataagttgccctagtccaggaagaaaaggatgaaaccccgagggaaagggcaggcggcccctgatgggagactctaacgctggtattgaggggcggattactgtcttggggttttaaacaactgttaaaagagatcctt

SEQ ID NO: 696993 - DNA, 623 bp, Homo sapiens
ctggtctgcagttggaaggaaggcaatgctatcacagacagttcactcctaaaccacaagctactgcagccttctcaagcatgagccaagccccattaatctgattcaaaacctacagagattgcatatcaatttctcaatgtaatcccattggagtttttcatgctagacttgggattaggggcaattgccccctttacacacactctctcgtttcataggttgaactcaacaagatagctcactgcaaagaagtcctctccaaattctacttatcacgcccaataatagccactttttagatcgttaaaaagatctaaaaaaatcgtgtggcttgagagtcattcaatcagtgaactgacttacaattcattttagaaggtgtcatctagtgtctttggcctcaattgaaagacaggacaagtcccattttaatgtcctgttataggaataacctaatgaaatatttgtacatacacaggttgaggttagatggcaacaagagtgttgtaacataggagctgcaatatygacagcttgcttaatccaaatagaaagtgattctgctaatacaggcaccttcaatttagctcacccttagaaatgaattgacattattcttt

SEQ ID NO: 696994 - DNA, 632 bp, Homo sapiens
tatcaaatatttagtagcatctattctagactgcttagaatggcctgcagaaggcagggccagagtgccagctcagaaacaatattctgaaagaatagaattgagtgccagccttcacaatgcattgtgtatatttagtcagagattcctacatggtgttgtatacgcaatagaaagaatatatgsggcccagaaccaaggaagagaagctgggtggcctcacttatcatcacacttgatgatccactgatctgcttccctccctgcaactatctgttctctaggcaggtcttggtccacaaagagaatgcatctttgccaggggacccagtataagttccatagacctgcaagctgccctcagggcatctgggacatcttctgttcaaggacaagcaggtaaaaagaagagtcattttggcaggagtaattgaccctggatagcagggggaggtaaggctgctgagccccagtagaggcatggaggattatatgaagaaactagaggattcacttgggagccacttggaaccacccaacacaatcgtaactgtgaatggatatgtgcagcagtgttaacctcctgggatgaagatgcaaaagatttaaaacaaacattacagcaagggctc

SEQ ID NO: 696995 - DNA, 1711 bp, Homo sapiens
cagaatctctcaatttacaggtaagaaaactgaagcccaagatcgtttaagagacttaattaaggcagagccagggatagagcatggatctcctaaattccagcccagtgctttaccaaagcggtttgtcctgatcattcaattaaaacaaacaaacaaacaaagaaaattctttattgaatacctgtaaaatttacaggatgtcagattttaaagagctttataatctaaaatattttatctatttaaaactttgctttttctattttaaattgcatttaaatgtattttatgatgattttgtaaaatttatagatatatatgggcttctttaaaagatgttaatacaggaatatacctaacaaaaattatttctgtatctctcccatttaagtcaacctaccatagcagagataaccactcaactgttacatttccaaccagaagctttgtgatacgttaacatatatgtgtatttatgtgtgtgttatctttaaaagggattcatagttctgtgatttatgcattttacttaacattatctcatagactatattaaatrtcaacaatacggctacaatatttgatatagtgacatgtaagtatccttttagggatacgccattttttaaaaaaacaattttccttctgtgaccttttatattgtattatattctttctttaaaaaacaatgttggaggaagttctaatacaggtattgtggcataagccccttatagctcatctttcctactgataacaactatgaacaataaacaaaatgcagaaaaaaaaaaaaactacctgaggactctgaactgtaaacaaaagctagcaaattgtgaaggggagataaaccttgaagaagtgacctacagggaggtgacttcctccttgactttctcctttcttgagtggatttgactaggccttatcagggagtgaagcagcctgcaggatgcagctaaaaatataatagaaatcctgctgtctcatcagcagacagagttaccttcgaaaggagctcaggaaggtctgacagtgaagtagaaatcacagaagaaagaaagctgaagaatccctatttaagtgtgagaacccatacaaacctcagcctaatccttaatccatatgtgtaggaccaactcaaaccagcaaagtaaagacttgggaaattgaattgagaattgaaatacttgcataaatcttaacctaacccctcaaccatgcctggatgaaacagatccaaaccagttagcaaaggctttaaaaactgaagtgagagttgaaagactgcccacagaaagcaagacagaatttacactctgaacctaatcatgtgtattgcgtcctaatgaaaagcattaactttcagcaggtgattgcaacgatacacagtttctacacaatttaacattcaagatgctgagaaggcaattcaaaatcacacacgtgaataaccaagaaaatattctttttttttttttttttttgagacagagtcttgttctgtcacccaggctagagtacagtggagctgtctcggctcactgcaagctccgcctcccgggttccagcaattctcctgcctcagcctcctgagtagctgggactacaggcgcccgccaacatgcccagctcattttttgtatttttagtagagatggggtttcactgtgttagccaggatggtctcgatctcctgacctcg

SEQ ID NO: 696996 - DNA, 1711 bp, Homo sapiens
cagaatctctcaatttacaggtaagaaaactgaagcccaagatcgtttaagagacttaattaaggcagagccagggatagagcatggatctcctaaattccagcccagtgctttaccaaagcggtttgtcctgatcattcaattaaaacaaacaaacaaacaaagaaaattctttattgaatacctgtaaaatttacaggatgtcagattttaaagagctttataatctaaaatattttatctatttaaaactttgctttttctattttaaattgcatttaaatgtattttatgatgattttgtaaaatttatagatatatatgggcttctttaaaagatgttaatacaggaatatacctaacaaaaattatttctgtatctctcccatttaagtcaacctaccatagcagagataaccactcaactgttacatttccaaccagaagctttgtgatacgttaacatatatgtgtatttatgtgtgtgttatctttaaaagggattcatagttctgtgatttatgcattttacttaacattatctcatagactatattaaatatcaasaatacggctacaatatttgatatagtgacatgtaagtatccttttagggatacgccattttttaaaaaaacaattttccttctgtgaccttttatattgtattatattctttctttaaaaaacaatgttggaggaagttctaatacaggtattgtggcataagccccttatagctcatctttcctactgataacaactatgaacaataaacaaaatgcagaaaaaaaaaaaaactacctgaggactctgaactgtaaacaaaagctagcaaattgtgaaggggagataaaccttgaagaagtgacctacagggaggtgacttcctccttgactttctcctttcttgagtggatttgactaggccttatcagggagtgaagcagcctgcaggatgcagctaaaaatataatagaaatcctgctgtctcatcagcagacagagttaccttcgaaaggagctcaggaaggtctgacagtgaagtagaaatcacagaagaaagaaagctgaagaatccctatttaagtgtgagaacccatacaaacctcagcctaatccttaatccatatgtgtaggaccaactcaaaccagcaaagtaaagacttgggaaattgaattgagaattgaaatacttgcataaatcttaacctaacccctcaaccatgcctggatgaaacagatccaaaccagttagcaaaggctttaaaaactgaagtgagagttgaaagactgcccacagaaagcaagacagaatttacactctgaacctaatcatgtgtattgcgtcctaatgaaaagcattaactttcagcaggtgattgcaacgatacacagtttctacacaatttaacattcaagatgctgagaaggcaattcaaaatcacacacgtgaataaccaagaaaatattctttttttttttttttttttgagacagagtcttgttctgtcacccaggctagagtacagtggagctgtctcggctcactgcaagctccgcctcccgggttccagcaattctcctgcctcagcctcctgagtagctgggactacaggcgcccgccaacatgcccagctcattttttgtatttttagtagagatggggtttcactgtgttagccaggatggtctcgatctcctgacctcg

SEQ ID NO: 696997 - DNA, 1711 bp, Homo sapiens
cagaatctctcaatttacaggtaagaaaactgaagcccaagatcgtttaagagacttaattaaggcagagccagggatagagcatggatctcctaaattccagcccagtgctttaccaaagcggtttgtcctgatcattcaattaaaacaaacaaacaaacaaagaaaattctttattgaatacctgtaaaatttacaggatgtcagattttaaagagctttataatctaaaatattttatctatttaaaactttgctttttctattttaaattgcatttaaatgtattttatgatgattttgtaaaatttatagatatatatgggcttctttaaaagatgttaatacaggaatatacctaacaaaaattatttctgtatctctcccatttaagtcaacctaccatagcagagataaccactcaactgttacatttccaaccagaagctttgtgatacgttaacatatatgtgtatttatgtgtgtgttatctttaaaagggattcatagttctgtgatttatgcattttacttaacattatctcatagactatattaaatatcaacaatacggctacaatatttgatatagtgacatgtaagtatccttttagggatacgccattttttaaaaaaacaattttccttctgtgaccttttatattgtattatattctttctttaaaaaacaatgttggaggaagttctaatacaggtattgtggcataagccccttatagctcatctttcctactgataacaactatgaacaataaacaaaatgcagaaaaaaaaaaaaactacctgaggactctgaactgtaaacaaaagctagcaaattgtgaaggggagataaaccttgaagaagtgacctacagggaggtgacttcctccttgactttctcctttctygagtggatttgactaggccttatcagggagtgaagcagcctgcaggatgcagctaaaaatataatagaaatcctgctgtctcatcagcagacagagttaccttcgaaaggagctcaggaaggtctgacagtgaagtagaaatcacagaagaaagaaagctgaagaatccctatttaagtgtgagaacccatacaaacctcagcctaatccttaatccatatgtgtaggaccaactcaaaccagcaaagtaaagacttgggaaattgaattgagaattgaaatacttgcataaatcttaacctaacccctcaaccatgcctggatgaaacagatccaaaccagttagcaaaggctttaaaaactgaagtgagagttgaaagactgcccacagaaagcaagacagaatttacactctgaacctaatcatgtgtattgcgtcctaatgaaaagcattaactttcagcaggtgattgcaacgatacacagtttctacacaatttaacattcaagatgctgagaaggcaattcaaaatcacacacgtgaataaccaagaaaatattctttttttttttttttttttgagacagagtcttgttctgtcacccaggctagagtacagtggagctgtctcggctcactgcaagctccgcctcccgggttccagcaattctcctgcctcagcctcctgagtagctgggactacaggcgcccgccaacatgcccagctcattttttgtatttttagtagagatggggtttcactgtgttagccaggatggtctcgatctcctgacctcg

SEQ ID NO: 696998 - DNA, 882 bp, Homo sapiens
atcattggatgatttggatgataaaaaataagttccagaaggcaaaatatacaggcgtagggaggcaagagcctttctggagagtgactgaaataaataaccataaaatctaggaaggagaactgggagctgtggctcacacctataatcaatcccagcactttgggaggctgaggcaggcagattgcttcggcccagtagttcaacatcagcctggggaacatagggagaccccatctctacaacaaatacaaaatttacctggacatggtggtgtgtacctgtagtcccagctactcaggacgctgagatggaaggattgcttgagctcgtgaggttgaggttgcagtgagctgtgatcgcgccactgcactccagtctgggtaacagagcgagaccctgtctcaagaaagaaaaaaaaatctaggtgggtaggsaagagaataaagaagttccaagggagtgaaaatagagtggtcaaagcaccagaggtctcagtgaaattcaaatactagaaagtgggaataagaatgaggaaataggacccataggtgaatattgatgtacaaagctaagatattgatgttaaagatttcagaaatagacctgttcagggtaatgtttatttccagtggggatgctgaagtggggtggaggccatttaattagagaagatcaaagcagtctgtaatgcttgggtggcagatggggtcatccttgctgtgtaggacaatggcaacaggagtagccgtggaggagaagagccagaggccagagacctcaatggagcagtggcagggccatcagtgaatgacagcattagagaggggtaagcttcaccagggttctttcagaaagcagagcctgaggcgatggcttgca

SEQ ID NO: 696999 - DNA, 615 bp, Homo sapiens
tgaaataaactgtgaatgttggactgatctcaatttattaattttttattcttatactgctcagtagggtgaggacctcaaaaggagagccaaattgattatagaaaaaaaagtgttacattttattttttgtatttttaaatgtactgtaattgaatttacaatgttggcatatagtacatttttaacatgcatgtctgtaaccaaatctgtatctatctatctatctatctatctatctatctgttaatccatccattcatcyatccatccatccatccattcatctatctatatttctcttatgactatatatcacttgggaagaattgaacattttatatgtaatgtgaatgatttttcttagattaaaataaaagctagaattaaaaacctaaataggtcaaaattcaaatactgaaaacaataaaattaaaacattatatttatatattggaaagcccctttattttatttaaaacatattcaaactctatacctcaacattattaactctttgttgttcttacagtatatcattatttagaaaattattttaataattaaaaaatacatttataacaattttatttagaaaaaatggctcttttgcag

SEQ ID NO: 697000 - DNA, 1066 bp, Homo sapiens
attactttaaaagtacagaaggaaaagtacagaaggaaaaggtgggtgtattgacaattaaatttaagaatgttatcaaatgctcattcttggtgaaatttaggtttatactttgtggctaactataataaattctctcttactcctagtactgaatatttgtgtcctacggcctatacaaattcatctgctgaaacttaatccccatgatatttgaagttgaattatttgactacttacataatttattaaagtgttatgtgaatgaaaaatgtaattgacaaatgatggcttttgtttccttaaaaatctaagttcaattaattaagtggagttcaaatattaaattgttcagccccgaaaaaaaattaaaagctgctgttaaatctgatatagatgagattactgtaaaatatttagggggaaaagtaaaatttaaaactattgtcattaaaattcctttgcaaaggtctttaagttaaagaaaacttaaatagaaccagaaactacagatgatgtattgtagttacggcaaagcatcatgtgkaacttctaagaacttttactgaaagagaagtctccactatacatcaataattggaaaatatagtttaaagtcaacatatttaaatgtataatttaaactttatattgtatttattaatttactatagtaaaaccacatagaataaaatttaccatggttaaatcaagcttagcctaaagctgcctccttgcatattttaagttcagcctaaaggtttctctgtacatcatgaactgtaagctagggtcataaacacactgtagcctactcttgtgacaatagagtttttgccaatcaaacatggccaactgttgaaaccgtgtttaaacaacgcaaacacctggccacaaccaatctggctgtttctgtacctcagttccatgtatgtcacttgtctatttttgttcacccatcttctgccacctagatgtgctggagtctctgagccagctctggcttgggaggctgcccgattcacaaattgttttttgctcaattaaagtctttttaaatttaatt

SEQ ID NO: 697001 - DNA, 2158 bp, Homo sapiens
tgctgtagctaccactaattttatttatagcaataattcagaaattttattttttcttttataaaatatttatgagatgtaaaatatcttctttatgctaaattctgtatgatggatctccattaatggagtgaaatgttggaaaattaaatttatttctgttcatccaattttaaattttgagagggtaagcaaaaatcttatttctttgagcttggaaatttttcaatcagttttttttttattctttccttgacaagacttatgctttgtgctttgatgggtgtgttgatgttttaaaaaaatatattattaataactatttaaaactatatayaagaatagtcaaggctacaaaactctgttgttcacttggtgactttgacaataatcaccatagatttcagcttatgagataggtaatatggaagtaaaatactttaaaactgtttcttacagaaatggttttcaatatgtcagtttatttctacagtacatagcagctctgtttttggcagcttgggtctatgaccagttaacccagctgtcaagagaattgtgctaatgaagccaaaaaatgggttcaaattcccaattgggtcaattaactttccttgactcaaggctactaatggcactcctggggccagtcaatttgaatttccacttattggctggaataaaaaaattgcaaagtgatcgcacaattcaaaactcttctatttataataatttactttatcctcatcacagcactaaaatatagatgacatgccatcttacagaagaaataatgatatctgggcaaattttttgacttactttagggtcagagttccagaagggagaatattaatccataacacagatttttttaagtgagcaggcttatagggagtttataagtattgactaaatttacatagttataaatcagttgagtcgggaattaaatccagcaatcaaaccctgtatcctgcactattaagtctagatcctgtacttttttattgtaaaagtacactttctggtacactttgtagatttttataagagctgcacactcttttttttttttttttttttttttgagacggagtctcgctctgtcgcccaggctggagtgcagtggcgggatctcggctcactgcaagctccgcctcccgggttcacgccattctcctgcctcagcctcccaagtagctgggactacaggcgcccgccactacgcccggctaatttttttgtatttttagtagagacggggtttcaccgttttagccgggaagagctgcacactcttatactgaaggcatacatataaacacaagttaaactgttttatttttaccaagttctattgccctgtgaaactcaggaaaattgtattgttgaatttcacaatgtttaaattatttttctccaaacactaagaattagacacaagagaattgccttcaggttcatattaatttgttccatgtatgaacatgatcaaacacttattttaacttttacctatagagtgatctttgcacaacctgctggggtacattcacttatgagttatacatctctaacccgtgggaccatgttagactccattaaagttatcagtgaattccatgcctggggaatggtgtctgagctccaaggattaataattatttgaaagttcacaaagtgtggaactgacaactccaacaacttaacgattagaaaacaccaagataacctaagggtcccagtgtactattatttccgctgtataatgtgaacatttctttgatagactacaacaaccgtgggggatagaatctgttcataacataattacatgattattaggttaaaaacatgaaaagaataaaaccatacagcatgttttaattatttaatgatgatttaataggacaatgtgatttcaggcagaattatagaatcaaaaattaatttcagtgttccatctgaatacctatatccatgcaaccacctagccaattctgaaaaattagacaatgaaaaaataaataacatcttcatggaagacattacttgctcaaatattagctttggccataaatcctttaaaaatacattgataaacttgcatatgatatatatttatgcaacttaaatatttttaaataccaaatac

SEQ ID NO: 697002 - DNA, 2158 bp, Homo sapiens
tgctgtagctaccactaattttatttatagcaataattcagaaattttattttttcttttataaaatatttatgagatgtaaaatatcttctttatgctaaattctgtatgatggatctccattaatggagtgaaatgttggaaaattaaatttatttctgttcatccaattttaaattttgagagggtaagcaaaaatcttatttctttgagcttggaaatttttcaatcagttttttttttattctttccttgacaagacttatgctttgtgctttgatgggtgtgttgatgttttaaaaaaatatattattaataactatttaaaactatatacaagaatagtcaaggctacaaaactctgttgttcacttggtgactttgacaataatcaccatagatttcagcttatgagataggtaatatggaagtaaaatactttaaaactgtttcttacagaaatggttttcaatatgtcagtttatttctacagtacatarcagctctgtttttggcagcttgggtctatgaccagttaacccagctgtcaagagaattgtgctaatgaagccaaaaaatgggttcaaattcccaattgggtcaattaactttccttgactcaaggctactaatggcactcctggggccagtcaatttgaatttccacttattggctggaataaaaaaattgcaaagtgatcgcacaattcaaaactcttctatttataataatttactttatcctcatcacagcactaaaatatagatgacatgccatcttacagaagaaataatgatatctgggcaaattttttgacttactttagggtcagagttccagaagggagaatattaatccataacacagatttttttaagtgagcaggcttatagggagtttataagtattgactaaatttacatagttataaatcagttgagtcgggaattaaatccagcaatcaaaccctgtatcctgcactattaagtctagatcctgtacttttttattgtaaaagtacactttctggtacactttgtagatttttataagagctgcacactcttttttttttttttttttttttttgagacggagtctcgctctgtcgcccaggctggagtgcagtggcgggatctcggctcactgcaagctccgcctcccgggttcacgccattctcctgcctcagcctcccaagtagctgggactacaggcgcccgccactacgcccggctaatttttttgtatttttagtagagacggggtttcaccgttttagccgggaagagctgcacactcttatactgaaggcatacatataaacacaagttaaactgttttatttttaccaagttctattgccctgtgaaactcaggaaaattgtattgttgaatttcacaatgtttaaattatttttctccaaacactaagaattagacacaagagaattgccttcaggttcatattaatttgttccatgtatgaacatgatcaaacacttattttaacttttacctatagagtgatctttgcacaacctgctggggtacattcacttatgagttatacatctctaacccgtgggaccatgttagactccattaaagttatcagtgaattccatgcctggggaatggtgtctgagctccaaggattaataattatttgaaagttcacaaagtgtggaactgacaactccaacaacttaacgattagaaaacaccaagataacctaagggtcccagtgtactattatttccgctgtataatgtgaacatttctttgatagactacaacaaccgtgggggatagaatctgttcataacataattacatgattattaggttaaaaacatgaaaagaataaaaccatacagcatgttttaattatttaatgatgatttaataggacaatgtgatttcaggcagaattatagaatcaaaaattaatttcagtgttccatctgaatacctatatccatgcaaccacctagccaattctgaaaaattagacaatgaaaaaataaataacatcttcatggaagacattacttgctcaaatattagctttggccataaatcctttaaaaatacattgataaacttgcatatgatatatatttatgcaacttaaatatttttaaataccaaatac

SEQ ID NO: 697003 - DNA, 644 bp, Homo sapiens
catatatcttaggaagtgaaacatttacctattcttctagatcaggggtatgacactttttctggaaagggtcagatagtaaacatattaggttttgtagcctgtcaggtctctttcayagacacttaaatctgtttctgtagcacaaaagaaaccaaaggcaatgagcaaatacataaatgttgttgtgtttcaacaaaactttaggtacaaaaacagtaaatgaactgtatttgacactcaggctataatttactcattcctgttctatatcactgcattgttctattatctcttctaattagactcattaatttaaatgtacttatctttttgatagagtcggtagattttacattctccagtttcatagttaagctgtgtgtgtaagattttaactatttcagaagaagtagcagcatctaaatattgattgtgagactgaagcttcctaattctcatttcacattggccaatgactattaaatatttataagaggtgataacttttgtaaaataaaatgttaaaaaactcaccaaactattgtagaatgttgagatctaacataccattttaccacaaaagaaaagataattgagaggtaccatagttcccaggaggtaattttcaggtatgacaattg

SEQ ID NO: 697004 - DNA, 688 bp, Homo sapiens
ttttattttattttattttgtttattttattttcttatgttccttggtacatgtgcaggatgtgcaggtttgttacataggtaaatgggtgccattgtggtttgctgtacttattgacccatcatctagatattaagcccagtgtgcattagctgttttccctaatgctctcccacctcatgccctcccccaacaggccccagtgtatgcttttccccttctgtgtccatgtgttctcatcgttcaggccccacttattaaaaacaggctgcattaggttttctgttcctgtgttagtttgctgaggataatggctgtcagcttgatccatgttcctgcagagaaaatgatctcattcctttttatggctgcacagtattccatagtgtatatgttccacattttytttatccagtctatcattgatgggcatttgggttgatttcatggctttgttattgtgactagtttctctttttaagcttgttgtaatttagatgtagcagacagcaatgtcttcaatacttctatcagtacttgatatggtttggctgtgtccccattcaaatctaaacttgaattgtatctcccagaatttccatgtgtagtgggagggactcaggagggacccatggggaggtaattgaatcactgggctggtctttcccatgctattctagtgatagcg

SEQ ID NO: 697005 - DNA, 1989 bp, Homo sapiens
gagaatcgcttgagcctaggaggctgaggttgcagtgagccagtatcaaatccctgcatgccagcctaggtaactccgtctcaaaaaaaaaaaaaagttaaaagatacagatagggctctggggaaaatcaaagcaaaataagatagaaaatattgatcccatcctactttatgactctgcataacttgaaagtgacttttaaatagttaaatgggccaggcgcagcagctcatgcctgtaatttcagcactttgggaagctgaggcgggcacatcacttgaggtcaggagttcaagaccagcctggccaacatggcgaaaccccagctctactataaaaatacaaaaatcagccaggcatcatggcacacgcctgtaatcccagcactttcggatgctgaagcgagcagatcacttaaggtcaggagttcgagaccagcctggccaacacggcaaaaccctgtctctactaaaaacacaaaagtagttgggcgtggtggtgtgcacttgtaatcccagctactcgaaaggcatgagaactgcttgaacctgggagatggaggttgcagtgagctaagatagagccggtggcgccactatactccaacctagactgagactctggctccaacaaaaaaagttaaatacttcaatgctatcaaatgatacttacaacgaaagtttatcaccatttcatagataaaactaaagtaaatttggtactgggaaaacaaaagaattcaagactctttggatgaaacagtcatacaattgtcattatrtgaaatgtaacttattgaaatcgaaacaaaaatctacattttgattggatgtactatattataaatatgatttataaaaccaatgagaagagttaaaaaatagcattctaatcactagctaggcatagttactagcattctaatgctaatagttattagcatcctaatcactagctaggcatagtttccgcacctggccgaaaaattattttaaaaggatcaaaactatgcagtttcaaatgaaatacggaaataccaggccgggcccggtggctcatgcctgtaatcccagcactttggtaggctaaggtgggcggatcacctcaggtcgggagtttgagaccagcctgaccaacatggtgaaaccccatctctactaaaactacaaaattagccaggtgtggtggcgcatgcctgtaatcccagccactcggaaggctgaggcaggagaatcgcttgaacccaggaggcggaggttgcagtaagccaagatcgcgccattgcactccagcctagacaacaagagcgaaactccatcttaaaaaaaaaaaaaaaaaaaaaaaagagaaatatataaaacaactctattgacgccttgataggaaatatcaagaataaagtccattacttacgtttgagggttaaacatgttagagagttggaaacattgtgttgcaagtggctgaacagaggcagctgcagctaaagctgaagctaaaaaaagaaagagaaaaattagtttcatggaaaatgcatgaaagtatccctcataaatactttaaaacgaaaccaaaaacccaccccaagcatgtaactaggatgtcactggagttattttaccttatttaatattgctactaatgtatgttatcagtagcttttaggtgccagaaaactgaggtaacctaatacttgaaacagacattcagaaatttgggagtcctattttaacagggaaattaaactttatgtgttatcaaaatcagttcaattagacaaaatctcaatacacatcaatccaaacagatgaaggataaaatagatttgagtttatacccaaataagaggggataataaaacaaaatcctttgaaatgccaaataaatctatatcctttcctatttcttcgctttctgcccacgaagttttttaaatctacaaattattaaagaattaagacatataaaatcatccaagtgtttaaaga

SEQ ID NO: 697006 - DNA, 645 bp, Homo sapiens
aacggtgttgtggtgcttcactatcatgagagtgaaagtctagacttcccacttggctttgctggtgtatttgagggtgggtttggttggaatatagtgattactgtctaaacatgttctgtcttgctagactatgcctttgttggtcctttgactagagagagcaagctttgtctgctctcattggcacttctgagttggtaacttcttcagctgagagtctggagtacacaaagtgaaaagaaaaycaggaaactcaccactgtctcatctcctgggtcccaaagtctttagccaacttgccttctttgtcagcctttcagtcttatgtttgttttacacataatgtccaaatttttcagttgcactgtgtggtataaatagagaaaagaaagtctactccatatttcaaaatcaaaagtttaaaaagatccctttaaataaaatataaacaactttactatttattgaggtgtttgttctagttttgcttaggttggagaagttgcatatgctgtagccacagataaacctcatagtaagtcctcagtatgcagcctgtcagggtaacttgccttgaagagactgttcatcctactgaaaatgttgggtgggtccatttcatcttttttaaaaagaggtaaa

SEQ ID NO: 697007 - DNA, 645 bp, Homo sapiens
aacggtgttgtggtgcttcactatcatgagagtgaaagtctagacttcccacttggctttgctggtgtatttgagggtgggtttggttggaatatagtgattactgtctaaacatgttctgtcttgctagactatgcctttgttggtcctttgactagagagagcaagctttgtctgctctcattggcacttctgagttggtaacttcttcagctgagagtctggagtacacaaagtgaaaagaaaatcaggaaactcaccactgtctcatctcctgggtcccaaagtctttagccaacttgccttctttgtcagcctttcagtcttatgtttgttttacacataatgtccaaatttttcagttgcactgtgtggtataaatagagaaaagaaagtctactccatatttcaaaatcaaaagtttaaaaagatccctttaaataaaatataaacaactttactatttattgaggtgtttgttctagttttgcttaggttggagaagttgcatatgctgtagccacagataaacctcatagtaagtcctcagtatgcagcctgtcagggtaacttgccttgaagagactgttcatcctactgaraatgttgggtgggtccatttcatcttttttaaaaagaggtaaa

SEQ ID NO: 697008 - DNA, 1826 bp, Homo sapiens
tgctctcatatggactgagatgggatagtagccagggcatgagagggccagggttttccagcaacaggcaacaaggctatttccttgtctgggagtcaacattgatgggaagaagggatggtggtaaaaagcactcaccagggagcatggaggagctttctcaggggtttcaaggcgtatctctgacaaaagatgcaaccaaatacaagaagaccctagagtaaagcatcaggaacacagaggggaagacctagatattcaataaggaattctgctggtcactttggtctgttttattgaggattgtttatatgctttgccctgatactaatctgattatgttaagcagctatatcatattctatcatgggattatactttgatgtttttaactcatttcttattcatgtatatttagttcattactctttttttgctgttatgtataatatgcatacagcattacaacttgtgctctagtttcttaggataggttcgcaaaattgggatttgtgaagtcacaggtgaagacattgttaatttgacagatatggcatagttacaatacctagaaattttgtatcagtttaaagtctcatccaacagtacgtgaaagaccttcattatacttacaaacagtaggcataaatctttcgtagttttactcatctaatatgtggcaatccatatctaattatataaattaatgtttatgaataaagtgtactagtttctcacaacttactagttattggcacatctttttgtaaaagctttaataaaatttttgagcttttttaaattaagttggcactggcattttcatttgcaaaaatgttttgtatattatcagtaaggaatttatgactgtttcatgttttgcaaaatgtttctaagatagaaaccatgcctgttttgcgtacaatggcccttctgtcaatttgcacaaattccagcccagagtggacactcaataaatatgtgctaaagacaatagatgcacagtgatatagaggctgtgaatgcaaaagctcctgcctgactgaaacctttccagcattgacttactagctaacgttgcctccttgtctacctgagcttcaagagtgtgtcttgttctatccataggcaaagacacttcctccttggtaaaacttcatctttctggtacatgcctcccagatcgtcgatggaactcttacccacatgagcacaactcttcctttatagagtattgactaggaatgataattgtccaagaaaagtcttcagtgataaaatacacaattacttgtatatttcagctttgttctgttggtaattatttgaatgataagtaagatatttgatgatatttcttttgtgtttggctcatcatagatggtgtccttcaattatttgcatgtcagctcattcaggtgagacgtcctccttctagagaaggaaaatttttcaaaagtcgattcatcctgaacaaaatataaccatcaaagcctaaatatgacaattctgttgttcttaaccatcccagccagtgaggaagactgtaacacaaaagtcaaacaacattttcttcaatgaaataactcagcctttgaaggtaatcttwgccccttcttaacattcctggaaaaagcctgacttatcatctcctgtccagagacaagactcatcttggtgctgaggcaaacacagttatgacttctacctaatagctgaaatgtaacagctgtaacttgtcaaacattgggctggacactgaatctcctgcattatctctctctacgagataatttgtgaaacacctgacctacatggtcaccgtg

SEQ ID NO: 697009 - DNA, 648 bp, Homo sapiens
tcatgttttatcctgggactatcctatcctgggatagcataaggtgggatgtctgcagagacctacctggcattcaagcgagtgcacactggaagtgtgagggaatcagtgccccatggacagtccccttgcctggttgggacaggagatagtgagtcratcaaatgttccccttttccttcccttaacagacaattctgaggctccttggaaggtcctggcaagatagcatccttttattggctttttttttcctttgagggtcagtttaatattccaagctgtttttactcataatacttttggcaccaaatgtgtgggttgtttccatgccaacaaccagttctccaaccttccagataccaactgggtatcctacaattgaattcaattcctacagtaactaactggagtcgtgtcagattccgcagactcactcccacaaaactgccttcgtttcagatgccagttgcaagtatcttgcttccatcagtacttctgaccaactgactattaatcacaggttcctatgaccccttcctcaggttttataatttgctagaatggttgataaaacttgggaaaagactttatttattatcactgctaattactaaaggagagaaatgaacaggcagctgaggagat

SEQ ID NO: 697010 - DNA, 950 bp, Homo sapiens
tgtgtgtttttagttgaggggtggatattagcttaatgccatggtactgaatctgaattaggtcatttactctttctcgagatacagaaatgaaaatctcatgaatccttggaaatcagaaattctgttaggtaaaaagagaaaggctggcacctgatcccagactctggttttcacagttggaaagaatcttacagattcttgaatttccaatttccagttatcttttttaagatggaatcactctgtcacccaggctagagtgcagtagtgtgatctcaactcactgcaacctccacctactgagttcaagcaattctcgtgcctcagcctcatgagtagctggaatcataggcacgcgccaccacacccagctaatttttttgtattttattagagatggggtttcgccatgttggccaggctggcctcaaactcctgacctcaggtgatctgcccgccttggcctcccaaagcgctgggattayaggcatgtgccaccgcacccagccaatttccagttgtcttctaatggctctgcattcaagtactgctcccctcaaatggacaacagattcaaaccttgactctttgaattatttttaaagtatatattgagacagaaatgttttccttaggaactacaacatcactattttcattaatttaaaattaccttaaagacatttgcaaataatagtactttcattaaatacattaataaaaaccaaaggggagggagaataaagcaagcttatttcagagatttagttaagagagagacagagtgcacgagacagagacagagggaatgtgcctgtctaaagtcctagggtcaaagcaaagcgactactcatttaaacattcctgctctacctgcctctattctattacagcatgagaactgatctgcctaatgatcctagtgaaaatcctaaatgatcaatgat

SEQ ID NO: 697011 - DNA, 950 bp, Homo sapiens
tgtgtgtttttagttgaggggtggatattagcttaatgccatggtactgaatctgaattaggtcatttactctttctcgagatacagaaatgaaaatctcatgaatccttggaaatcagaaattctgttaggtaaaaagagaaaggctggcacctgatcccagactctggttttcacagttggaaagaatcttacagattcttgaatttccaatttccagttatcttttttaagatggaatcactctgtcacccaggctagagtgcagtagtgtgatctcaactcactgcaacctccacctactgagttcaagcaattctcgtgcctcagcctcatgagtagctggaatcataggcacgcgccaccacacccagctaatttttttgtattttattagagatggggtttcgccatgttggccaggctggcctcaaactcctgacctcaggtgatctgcccgccttggcctcccaaagcgctgggattataggcatgtgccaccgcacccagccaatttccagttgtcttctaatggctctgcattcaagtactgctcccctcaaatggacaayagattcaaaccttgactctttgaattatttttaaagtatatattgagacagaaatgttttccttaggaactacaacatcactattttcattaatttaaaattaccttaaagacatttgcaaataatagtactttcattaaatacattaataaaaaccaaaggggagggagaataaagcaagcttatttcagagatttagttaagagagagacagagtgcacgagacagagacagagggaatgtgcctgtctaaagtcctagggtcaaagcaaagcgactactcatttaaacattcctgctctacctgcctctattctattacagcatgagaactgatctgcctaatgatcctagtgaaaatcctaaatgatcaatgat

SEQ ID NO: 697012 - DNA, 2198 bp, Homo sapiens
tgcaactaaaattggataaatgtaattaagaaaattggtattgtagaggtttcattgttctatagaattagagaattctaccaactgaatttataacctgagcatgaaaaccagatcctttttcatatttaaatattaaccagagtaagccatgtactaccttaacaataaaaataaaattaaacaaactcaaaaagtttgaagaaataaaatgataaaagctaagtgaattctttgagctgcagcttttttaccgtgctgcrcagttgcccggcttaggtcagaaccttttcaagaaaggttccatcccgccacggctctttgaatttttcttaaatcttttatgtttaaagatatctaattatattctattttaatacttggataaattaagaatttttaaaaattcttcatttttgtaaagtattaataaagtaattttttaaaagtaaaagaataaattcaagcattccaatctgttaaaatatcctttacaatgtactaaccggattatattatcgtgtgtttcgcctcatttttgttatacaaattttcatgtattaagatgatccatggcaggtcacagtggttcacacctgtaatctcagctctttgagaggccaaggagggaggattgcttgagcccaggagttggagaccagcctgggcaacatagggaaaccctgtctctacaaatatttgtaaaatttgctctcagatactcaaaaggctgaggtgggtgaactgctggagtctaggaggctgaggccacagtgggccagtgatcccaccactgctctccagccctggtgacagagagagatgctgtccccaaaaaagaaaaaaatccacgtgatatttacttccctagcacatgacatcatgttgctgtatcctgatttgactatcagttattgtatttttaaatattttggttttctttttgtttctttttttttaaatttattttaactgtaaatcatacatagtatgaacccctatatacagattaggctatttacttaggatctgatcccaaagttcagcagaagttgaacaatacaaattataacatattcccagattgttctttagagaaaataaatgaatgaactgacaatatatgcatacatgttacattctcccacccactcaccattttatataacagcttaatttttttattttaatgcttaaaaatagatttaatttgcaactctccaactgcttttgcagtgatgcattttttccacaggacagttttcttttttattgttatttggaacaagggcatgtaggcaaaagatgtaaatgctttccacagcctgttgcttccccagtggttctccacctcacctgcatgttgctgtcaattcaagaactttaagaaaccctgatgcccaggacaccccaattccagttaaatcagagtcctgggagtggaactcaggcatcagtacattttaaagcttctcaaatgcttctatcagccatccaggtttgggaatgactcatctcaattgatcatggagtctcagctgggtgtgatgggagattggaaggaaaacagtaggcttaactttattatatggggcaatcggaattaagctgtgttgtcagccttcctcccatctagtgccctcaaacaaacccttccctggccctgaatcttctctcattgcctatgtccttgcctgtcacagtctttctgcattgaaacagtccatgaaaaaggtctcctgatctaaactaccctgtaattagcctgataagtacctcatctcctacttgtatgctttttctgatctgtttccctgtagagtgaaatcttactttctgaacatccaaatcctgatgaggttttactgtcaatgaacaactgatatttttacgtgaattaagagacacagcaattccacttcatcccagtgtttttaccagctacttggacacactcgcctactggatttgacctctgtgaataccaatgctggcctgggtgtcagtatttgctagaagcccctgtgtgggtttgtcttcccttagctttagccaggaagacatctggcctcagcaagcacactgctgctgtgattcttttgcttctattaagtgcaaatgaatgcactttatgttgatggtgtattgcataagactaatttctggatcagcgaaaaagagctctttttcatttatca

SEQ ID NO: 697013 - DNA, 2198 bp, Homo sapiens
tgcaactaaaattggataaatgtaattaagaaaattggtattgtagaggtttcattgttctatagaattagagaattctaccaactgaatttataacctgagcatgaaaaccagatcctttttcatatttaaatattaaccagagtaagccatgtactaccttaacaataaaaataaaattaaacaaactcaaaaagtttgaagaaataaaatgataaaagctaagtgaattctttgagctgcagcttttttaccgtgctgcgcagttgccyggcttaggtcagaaccttttcaagaaaggttccatcccgccacggctctttgaatttttcttaaatcttttatgtttaaagatatctaattatattctattttaatacttggataaattaagaatttttaaaaattcttcatttttgtaaagtattaataaagtaattttttaaaagtaaaagaataaattcaagcattccaatctgttaaaatatcctttacaatgtactaaccggattatattatcgtgtgtttcgcctcatttttgttatacaaattttcatgtattaagatgatccatggcaggtcacagtggttcacacctgtaatctcagctctttgagaggccaaggagggaggattgcttgagcccaggagttggagaccagcctgggcaacatagggaaaccctgtctctacaaatatttgtaaaatttgctctcagatactcaaaaggctgaggtgggtgaactgctggagtctaggaggctgaggccacagtgggccagtgatcccaccactgctctccagccctggtgacagagagagatgctgtccccaaaaaagaaaaaaatccacgtgatatttacttccctagcacatgacatcatgttgctgtatcctgatttgactatcagttattgtatttttaaatattttggttttctttttgtttctttttttttaaatttattttaactgtaaatcatacatagtatgaacccctatatacagattaggctatttacttaggatctgatcccaaagttcagcagaagttgaacaatacaaattataacatattcccagattgttctttagagaaaataaatgaatgaactgacaatatatgcatacatgttacattctcccacccactcaccattttatataacagcttaatttttttattttaatgcttaaaaatagatttaatttgcaactctccaactgcttttgcagtgatgcattttttccacaggacagttttcttttttattgttatttggaacaagggcatgtaggcaaaagatgtaaatgctttccacagcctgttgcttccccagtggttctccacctcacctgcatgttgctgtcaattcaagaactttaagaaaccctgatgcccaggacaccccaattccagttaaatcagagtcctgggagtggaactcaggcatcagtacattttaaagcttctcaaatgcttctatcagccatccaggtttgggaatgactcatctcaattgatcatggagtctcagctgggtgtgatgggagattggaaggaaaacagtaggcttaactttattatatggggcaatcggaattaagctgtgttgtcagccttcctcccatctagtgccctcaaacaaacccttccctggccctgaatcttctctcattgcctatgtccttgcctgtcacagtctttctgcattgaaacagtccatgaaaaaggtctcctgatctaaactaccctgtaattagcctgataagtacctcatctcctacttgtatgctttttctgatctgtttccctgtagagtgaaatcttactttctgaacatccaaatcctgatgaggttttactgtcaatgaacaactgatatttttacgtgaattaagagacacagcaattccacttcatcccagtgtttttaccagctacttggacacactcgcctactggatttgacctctgtgaataccaatgctggcctgggtgtcagtatttgctagaagcccctgtgtgggtttgtcttcccttagctttagccaggaagacatctggcctcagcaagcacactgctgctgtgattcttttgcttctattaagtgcaaatgaatgcactttatgttgatggtgtattgcataagactaatttctggatcagcgaaaaagagctctttttcatttatca

SEQ ID NO: 697014 - DNA, 2198 bp, Homo sapiens
tgcaactaaaattggataaatgtaattaagaaaattggtattgtagaggtttcattgttctatagaattagagaattctaccaactgaatttataacctgagcatgaaaaccagatcctttttcatatttaaatattaaccagagtaagccatgtactaccttaacaataaaaataaaattaaacaaactcaaaaagtttgaagaaataaaatgataaaagctaagtgaattctttgagctgcagcttttttaccgtgctgcgcagttgcccggcttaggtcagaaccttttcaagaaaggttccatccygccacggctctttgaatttttcttaaatcttttatgtttaaagatatctaattatattctattttaatacttggataaattaagaatttttaaaaattcttcatttttgtaaagtattaataaagtaattttttaaaagtaaaagaataaattcaagcattccaatctgttaaaatatcctttacaatgtactaaccggattatattatcgtgtgtttcgcctcatttttgttatacaaattttcatgtattaagatgatccatggcaggtcacagtggttcacacctgtaatctcagctctttgagaggccaaggagggaggattgcttgagcccaggagttggagaccagcctgggcaacatagggaaaccctgtctctacaaatatttgtaaaatttgctctcagatactcaaaaggctgaggtgggtgaactgctggagtctaggaggctgaggccacagtgggccagtgatcccaccactgctctccagccctggtgacagagagagatgctgtccccaaaaaagaaaaaaatccacgtgatatttacttccctagcacatgacatcatgttgctgtatcctgatttgactatcagttattgtatttttaaatattttggttttctttttgtttctttttttttaaatttattttaactgtaaatcatacatagtatgaacccctatatacagattaggctatttacttaggatctgatcccaaagttcagcagaagttgaacaatacaaattataacatattcccagattgttctttagagaaaataaatgaatgaactgacaatatatgcatacatgttacattctcccacccactcaccattttatataacagcttaatttttttattttaatgcttaaaaatagatttaatttgcaactctccaactgcttttgcagtgatgcattttttccacaggacagttttcttttttattgttatttggaacaagggcatgtaggcaaaagatgtaaatgctttccacagcctgttgcttccccagtggttctccacctcacctgcatgttgctgtcaattcaagaactttaagaaaccctgatgcccaggacaccccaattccagttaaatcagagtcctgggagtggaactcaggcatcagtacattttaaagcttctcaaatgcttctatcagccatccaggtttgggaatgactcatctcaattgatcatggagtctcagctgggtgtgatgggagattggaaggaaaacagtaggcttaactttattatatggggcaatcggaattaagctgtgttgtcagccttcctcccatctagtgccctcaaacaaacccttccctggccctgaatcttctctcattgcctatgtccttgcctgtcacagtctttctgcattgaaacagtccatgaaaaaggtctcctgatctaaactaccctgtaattagcctgataagtacctcatctcctacttgtatgctttttctgatctgtttccctgtagagtgaaatcttactttctgaacatccaaatcctgatgaggttttactgtcaatgaacaactgatatttttacgtgaattaagagacacagcaattccacttcatcccagtgtttttaccagctacttggacacactcgcctactggatttgacctctgtgaataccaatgctggcctgggtgtcagtatttgctagaagcccctgtgtgggtttgtcttcccttagctttagccaggaagacatctggcctcagcaagcacactgctgctgtgattcttttgcttctattaagtgcaaatgaatgcactttatgttgatggtgtattgcataagactaatttctggatcagcgaaaaagagctctttttcatttatca

SEQ ID NO: 697015 - DNA, 2198 bp, Homo sapiens
tgcaactaaaattggataaatgtaattaagaaaattggtattgtagaggtttcattgttctatagaattagagaattctaccaactgaatttataacctgagcatgaaaaccagatcctttttcatatttaaatattaaccagagtaagccatgtactaccttaacaataaaaataaaattaaacaaactcaaaaagtttgaagaaataaaatgataaaagctaagtgaattctttgagctgcagcttttttaccgtgctgcgcagttgcccggcttaggtcagaaccttttcaagaaaggttccatcccgccacggctctttgaatttttcttaaatcttttatgtttaaagatatctaattatattctattttaatacttggataaattaagaatttttaaaaattcttcatttttgtaaagtattaataaagtaattttttaaaagtaaaagaataaattcaagcattccaatctgttaaaatatcctttacaatgtactaaccggattatattatcgtgtgtttcgcctcatttttgttatacaaattttcatgtattaagatgatccatggcaggkcacagtggttcacacctgtaatctcagctctttgagaggccaaggagggaggattgcttgagcccaggagttggagaccagcctgggcaacatagggaaaccctgtctctacaaatatttgtaaaatttgctctcagatactcaaaaggctgaggtgggtgaactgctggagtctaggaggctgaggccacagtgggccagtgatcccaccactgctctccagccctggtgacagagagagatgctgtccccaaaaaagaaaaaaatccacgtgatatttacttccctagcacatgacatcatgttgctgtatcctgatttgactatcagttattgtatttttaaatattttggttttctttttgtttctttttttttaaatttattttaactgtaaatcatacatagtatgaacccctatatacagattaggctatttacttaggatctgatcccaaagttcagcagaagttgaacaatacaaattataacatattcccagattgttctttagagaaaataaatgaatgaactgacaatatatgcatacatgttacattctcccacccactcaccattttatataacagcttaatttttttattttaatgcttaaaaatagatttaatttgcaactctccaactgcttttgcagtgatgcattttttccacaggacagttttcttttttattgttatttggaacaagggcatgtaggcaaaagatgtaaatgctttccacagcctgttgcttccccagtggttctccacctcacctgcatgttgctgtcaattcaagaactttaagaaaccctgatgcccaggacaccccaattccagttaaatcagagtcctgggagtggaactcaggcatcagtacattttaaagcttctcaaatgcttctatcagccatccaggtttgggaatgactcatctcaattgatcatggagtctcagctgggtgtgatgggagattggaaggaaaacagtaggcttaactttattatatggggcaatcggaattaagctgtgttgtcagccttcctcccatctagtgccctcaaacaaacccttccctggccctgaatcttctctcattgcctatgtccttgcctgtcacagtctttctgcattgaaacagtccatgaaaaaggtctcctgatctaaactaccctgtaattagcctgataagtacctcatctcctacttgtatgctttttctgatctgtttccctgtagagtgaaatcttactttctgaacatccaaatcctgatgaggttttactgtcaatgaacaactgatatttttacgtgaattaagagacacagcaattccacttcatcccagtgtttttaccagctacttggacacactcgcctactggatttgacctctgtgaataccaatgctggcctgggtgtcagtatttgctagaagcccctgtgtgggtttgtcttcccttagctttagccaggaagacatctggcctcagcaagcacactgctgctgtgattcttttgcttctattaagtgcaaatgaatgcactttatgttgatggtgtattgcataagactaatttctggatcagcgaaaaagagctctttttcatttatca

SEQ ID NO: 697016 - DNA, 1628 bp, Homo sapiens
ggggaagcatttcaggcagaaagaacagcccatgcaaagactcaggttggagggagtgtggtgccttcaaagacgggagagatcttcacatgctggagtgaagagagtgaggtggagatgcagctagggagccgagtggggccacccccaggggccttgagactgggccatgagttcgaatcatgtcctaaggaagatgggagagtgatccaattcaccttctggggtgatcctcctggcagagatacagggagagggttggagcccagaaatttattccttactgttctgggggctggaagtgcaagcccaaggtgctggaatagatgctgtggggagggcagagcggaccatggtgctcatccaggctgaagggtggctgcacagattcttccgggtttcccaagaacaagaagcagcttcaggaagctgaattcatagcagagaagcaggaaggaggcttttctaagcccagcgccctgcagggaggatgctggtgctggtgtctgcaaggcttggcccctaacagggtttgccctacagatggagcagaactggacagagatgcaccctggcctctagctttgggagcagggatcccggtccagcatcttggcattagttggggcccctcctggaggtgcaggggagcgtcctttccgctcatggtccccagtctcagcaaaacccttggtcccagctcctgaagacctatgttcttgctgcttcctcccacaccccaggccaagccacactcttccaagcctccagcatgaagagtgccgacccttccctccggggccagctctccacacccacggggtctccgcatctcaccacggtccaccggcctcttcccccaagccgcgtcattgaggagctgcacagggcgctggccacgaagcaccgccaggacaggtgaggccctgccccatgagggagacctgtgctgccagaatccctgcctggccagcctcaggctgtgcagctcatgccacgcccagggccttggctgggtgtcccgttctacagtcactttctgaacaaggaagtcacattttcattttgcacctcgctctgcagattgcatagctgatcttggttcccacattctgggacggggtgcacagtgaatgtgcactrtgggaacctggccacaaagtcctgtgcgtgagcccctcaggacccagggtggggtgggagctttgcaggagagactgacttagagaaaagtggccgttccactttgtcccaggacactgagggcttcatagttgtcactgggcaagagtgtaaggcagcctgtgcctgcagcttactcttattttggatcacatgtgtctcatggactgtgaaagattagaggtaaaataggtaataggagacagtatgggttggaggaatattagacaaacaaaatgtccttctcagtttttgtgaagtcctcgccctgaacattgattgcatgtattttggcaggttttattacttgcatgttctgtgcttttcaaaacagcatgttgtaaacagccatttgccttgaactcaaatcctcatgctccttctggtgtgtccaggataaaaaccaagaggtcacatgcattttggggctgcctctgtgatattca

SEQ ID NO: 697017 - DNA, 629 bp, Homo sapiens
aaacagtgagcattctttgtggttaacgatgtgcttcttttaagcacaccccagccaacggcgacaaagaaatgtttggaaagcaaattgaaaggctgtaagggagagatgaagagagtgtgcaaccctgacacagctcagctggtgctttgttaagagatatttataagtcttcagattatgccccccaatttccaggcaacgaagagacytctccaagtgtcgtgctttgtgcattagtaataaggacacatgctccacagtaatgctggaacacaggatgatgctcttcagctgtgtgcttcttcctggcggagcagatgatttcataattagcctgaggaaacaggcagacctaacagccaaggaaacaatgcacctgaattgacaaacgaagttcaaggctttaggcaaccaatggcatatttctagagtgttggaaggagaggcaagagtctacttcaaagaaactgaatggtggtttattgatttttcatttgtaatagagccatattaaaataaagttactggtgaaggggatgaattcattacacattgtcatgtttctggaagtatttgatccatacgtaatacaaaaaaactgcgtatggatgactcacaatgctttt

SEQ ID NO: 697018 - DNA, 1282 bp, Homo sapiens
cagttgtacctcaataaagtggcatttaaataaaaaacgttaataagaatattcctattattcatttctgaccttcaagagaacaacagactctgttgagcgcttactatatccagtacacggtgcctacctatattgttctcggttaaagtttatgacagctgagaaataggtgctttctcactgttgaagcaattatagcttggagacattaggtaaattgcccagggtcagcagccaggaagaagtgagatatcaggctgtctggctccaactctacttgctggtcagccttcaattgtacttcttcctcagtgtgatgtggctgagtctgtgttggaatctcaaaatcacctgtccagggattttactaaccattatttttttttctatgtttggctgttacaagttggttattttacgttgaaaacagatgttttctgctaaaagagaagatagctattcttagttatttggagacagttctttaaaggtactctgtgtgtgtgttaggttgatctgccatgccgccacagcctggccagtctcatttgtcagacagcatccatttgctggtgaagtctgacgggtggtaacattatgtattaatagcccctgataccaaattcagcctacaattttatgacaaactattctttactgtaaagcttttttcttaaataatccactagatggcagcagacccacgtggaacagaatggatcttcattgctgtagaagagccagaaacgggacactgttttgtttttgatgacccagtagtgcatctttttcggatgtgtaggaaatggtattatttttctgttatgaaaaatgtaacatactctttgaagtcacgtctgtggaagtgagtagtggtacagatagttcaaaattgtagataatgcaaaaataattttttctttgtattctcgtagagacacatgttgatttaatcctacctgtatgcattagatgaacttttcttcaagaaactgtttattcttaattctttttatggttggaaagactgcggcttgtttcatgagtttttttctttaattggacctatgccaatcaaaatagaagakgactgtcctataaattcatagcacctaaggctagataatgaagtgaaatcctacagactggacttgggagaaagtaggaggattatttatttttccagatcaccatactgcttgtcatctgactagaaacctcttatctccctttctctaagcttatttttctcaagcatttttgaacatggtcaattggg

SEQ ID NO: 697019 - DNA, 460 bp, Homo sapiens
tatgcatgcaaaactatacaagaattacaatactaacactagcatcaacaatatgagtagtataacagtttaagatattttgcagttcttttgttcatggaactaggaacatatagtcaaattactgtgttgtaaagtaatttacgatagtttatctttctaaggttaggctgccaaactgccttggcatcatcggaatttcctatggccctcttgcactcaatttaagattgacagttctctcccagtttcagctactgtccatggaattgcctatgaagctctccagggagaacctaattgtgatagcagttttctacagttctctggatcatcaaagtcttactgtcaaccctcttcttcctcttgattgcttctggaaatacatcggttctgtagctagtggtgkttttttgctctgcactcatattttggcaaacactggacttctttgtcatct

SEQ ID NO: 697020 - DNA, 577 bp, Homo sapiens
tgatgacaccttttaaaacatatattacagaaattttctatgtttgtgtaggaaaattagaaaatcaaaagaaccaaagccaagaaacattgaaaatacctataattccccttcactatgatcctacttcacaccactcatgttttgatgtttttctttmcagtatgcattatatatatttatatatgtacatccataattgttttcataaaaatgagttcatcttgcaatctattattctcaactttccaatggttttttggagtccccaaatacattgcaaaagattcaaacaacataaaaatgaatagagccccttccccatcagccctcacactcatgcatccccttctggctgctgccgttccctgctccagtaaacaatgctgccgtcaacatcttcccagggctccagctcacatccctttctctggagcagacacagagaagtggaactgctgactcaaagcatgggcacactctttattttgataaatacaccagtttgttctctaaatagctgtactgatgtgttctcctgaaattggaacagctgttttcccacacctgctaacat

SEQ ID NO: 697021 - DNA, 577 bp, Homo sapiens
tgatgacaccttttaaaacatatattacagaaattttctatgtttgtgtaggaaaattagaaaatcaaaagaaccaaagccaagaaacattgaaaatacctataattccccttcactatgatcctacttcacaccactcatgttttgatgtttttctttacagtatgcattatatatatttatatatgtacatccataattgttttcataaaaatgagttcatcttgcaatctattattctcaactttccaatggttttttggagtccccaaatacattgcaaaagattcaaacaacataaaaatgaatagagccccttccccatcagccctcacactcatgcatccccttctggctgctgccgttccctgctccagtaaacaatgctgccgtcaacatcttcccagggctccagctcacatccctttctctggagcagacacagagaagtggaactgctgactcaaagcatgggcacactctttattttgataaatacaccagwttgttctctaaatagctgtactgatgtgttctcctgaaattggaacagctgttttcccacacctgctaacat

SEQ ID NO: 697022 - DNA, 1403 bp, Homo sapiens
ttgggcattaaaacacatttttaaactgctcataggtaaaagaataaattataataaaatttaaagcaattataactaaataataaagaatatagaacatatcaaaatatgtgggagacagcaaagttaataccttagagaaaaattctgaacataagtagtaaaattagaaaggaaagagctgaaaatcaatgtgctaagcatctaaattaagaaattaaaggtgaacagctaaataaatgcagaggaaatagaagaaagggataagacaagaactaaaattaataaaataagagagctaaagtactttgtaaaaaaccaaaagctgtttctttgaaaaacataaaaatagacaaattttgtgatattgctgaaaagaaaaagagactaggtgccactgaaatagtaaggatgaaaaaagagatagatgtacagatatagaagagactggagcataataaaggaatattatgaccaactttatgacaaatctcttgaaaatgtaccaaaattatatttacatatgtgtaatttacatctacatctctatatatgaaaatactttttaaatgaccagtcaccgctaaagtattagctaaacataggcactggatataatgtagggaaaagtttgaatcatagaatcttaccttatccaatacttagcacaatgagcagaaattattaaaactagagtatccatttgggtcaagtttaactccatgtgataaaaatccccaaagagtagtaagtttaagaatgtgctgctttttttcttccaaataaaggaatcctggtggcatcatgtagctgtcagtgacctaggcttatcccagattttgactcctttattcctgtagtaaaattcttgttctcattttccaagacggtggttggagttctatccattacctttttatattaagccagcagcagaatgaagaggagaaaagagcaaatggaacatgcctgctatcttttagggatatttagtagcaaatgccggaaaatatttctgcccgtgttttaatggccaaacttagtgacatgaacacacctgcttacaacagacactggcaaatggaatttttattctgagcagccatgtatacagcgataggacaaatattctacggaagaaagaaagaagatataatgagtgtagacaaccactattctctgatataaccaagcaatgaactctctggcagcatccaaacatggaaagatattcaaccacataatatacattttgaaaagtaactgattctggtatgttgcagtttagtcytcatttccttctgtacctctccaatgccataaagtggaaagaggatgaattgaaaacattctgagaattcttattatttctcaatttagagaaatgcagattaataaggcaa

SEQ ID NO: 697023 - DNA, 1760 bp, Homo sapiens
tgctgtgtaatttaacttttctcttcccaaatcctatatctttattcaagttacatccctatgaaaccttttttttttccccttagtcctctattttgccctcagtaatgccatacagtacaccatacaataaactttttaatgatgcaataccttgctttgtttactttgcttgtgttatgtgttttttttttcccccaactaggttgtaaactccttcgggataaggagaaaatcatatatctttctcatcctcagggcccatctaaatattgagcatataataggtaccaaataaatcctgttgattatcagcttgaatattaaagattcatcagaagtaattgtttcttaagctaaaatatgactgtcctataactcagcaggataatataaagttagaaagtaaaatattaaaagcagaagaactctgtgaatggaggatttctaaagcagccctttagcagatgttcatatattaaaataagatatgctaagcaggaaaataactgtcaatgagcatggcaggtgttgagataaacccctgagggttgacaataaaaagttaaaacaaaaacgacacaaaggaatcacaactaatacgaaagtaaaagatacctctaaaggatatattcatttttagattaacagattacattccccaaaataataccttcaatgatcactttatctggaaaacaagcaggtgtggaattaatcacctttgcatgtccatatgattttatattatttatatctgtttacatgaactggacaatttaattgatttaaaacttaagattttaatatacccaccctggagatattatatttcattaactaagactgtttgtcatcattcatacatttatcctgtcagttactaaataccttcgctatccttttcatttaagagtctgtacctccatccattcctctcttcccatagtcttaaccatggccaagacttctctcccatcaagtttgaactactgccttctcctctcagcctctattacagaatttctgctacctgaagaattgcccagttaatctttattattattattatatattttttgagacaagagtcttgctctgtcgcccaggctggagtgcagtggcgcgatctcggctcactgcaagctccgcctcccgggttcacgccattctcctgcctcagcctctggagtagctgggactacaggtgcccgccaccacaccgggcaaattttttttttttttttttgtatttttagtagagacggggtttcaccgtgttagccaagatggtctcaatcttcagacttcgtgatccactcacctcggcctcccaaagtgctgggattacaggaataagtcaccgtgcccggccccagttaatcttaaagcaatgctttcattctgttagcaataccccacatttttcctgtgcacacacatacgtcaaacttgcaytgattctttctcacctattgcataaaatctgagtactttggctttgtccgaaaatatctgaatatctgaatagtactaccaaactactttcaactttattgcttggtgacccaatgcaataccttataaacaggtcacgcttcacttcatgtctatgaatttagttctatttaatgataatgcatgctgatagatttaagtgggaagtttagagatgtcaaaagtttagtttaaaatgcattaaaaatgagatggatgaataaagaagtgattagatgtagaaatgattactaaattgtttg

SEQ ID NO: 697024 - DNA, 600 bp, Homo sapiens
taaacaactaagcaagctctatccatcgatgtttaactggagtacttttcaattgcaaatatttcttacttgagtgaaaatatgaatttttcaaaaaaaaaaagacagtaacaacatcaacgacaacaaaaataaaaacaagggaaaagatttcctcatgccacatggactttcaacatggagatggtaaaaactctcttttcccaacatacagatgtgcataattccggctgtggaaattatgcctttatggcagaaaaaaaaacattacctctgtcattcaacatcctgttacrctatggttggaaaaaatctttttacgtggtaaaaaaacacaacaaagcatcttcagtacaactctctgctgctttgacactgaaagcatatggtgaaaatagacaatggcataaaatctacaaaaagcaaaactgtacaagcttttgtcacaaccattgacactgaaggcacaggagatactgtgaagagtcacattaaagaaagtggcaatcactttcttatttacagttagtaaagacattaaaaaatggtattgctcacacatttaaaaaatcagaagacaaggcagacactttactactg

SEQ ID NO: 697025 - DNA, 661 bp, Homo sapiens
aaacatttttttgtatttttagtagagacggggtttcaccacattggtcaggctggtctcgaactcctgacctcgtgacctgcccacctcrgcctcccgaagtgctgggattacaggtgtgagccacagcacctggactatttctcgtaaatgtcaaggaacaattttatagtgttaatacatttactttaagcatctactctatttagctgagactatgctttttctgctacggtgacaaaagtccatccaaattgctatgcttaatacattctttattaccaaagtcccaataaaagtagtaattcaaaaaaactaaaactcaaaaaaaaaaaaaacaaccttcagcattatgtggaatagctgtattttaattaaatgtacataaatcctttttacaaagcttcttgcctactatgaatggaaatgtctttcttcttctgcaatcatgctccttcccttcactagagattcttcacgctgccccatgcagtttaatacagtcatgtccttgttcaattattagattcctaattttaaacataagaattttaaatacacactaaatgcataatgtggattaatcagagagcgtaggtcttagaagacacaggatattgaaaagtttgaatttaataggcaatatagctgtgatgcataa

SEQ ID NO: 697026 - DNA, 1512 bp, Homo sapiens
tgtctaactctttttaaagaccctttaggttttgaaactgcaattttgtattacagtggcaatacaccccatcacccctcaacactaaacaagtcagcgattatatcaggagaaaagtcatgtcaagttttcctctttaagaaagaaaggaaggaaaggaggaagaaagagaaaaagaaagaaataaaaaagaataaagagggaagaagagagaaaagaaacaaaagaatgtaaggaagcatgtgaagaaatagaaacatttcaattttacatccttattctaaattcaggtctcataacatttttcatttggaaaaaaaattcacgtattttgttggtgtcatagctgtttattgcctagtttcagccagtaaactgctttattaactgttactacctactaaaaattacatttctctatggtgtttcaagtgtcattcatcatttagacaagaaatgaactggaatgtggctcccaaagtaactcagtatcatccagtagtataatattttataacacaaatttatattttgtttccaaaagataaaattattttccactgataaatctttatyactttttctctaaatgtatcagaaggggcaaggaataaagaaatactgatagcaccctaggttgttttgatgcagtttattgaggaagagaaaaaagcctgattggattctagggccctaacactgtgctggctgcttcataaacattgtcattatgtctgatgtttcctcctttattgttcccttttttactttaaaaactaatgttcacgccgggtgcggtggcttacgtctgtaattccagcactttaggaggctgaggcaggcagatcacttgaggtcaggagttcgagaccaccctggccagtatggccaaaccccgtctctactaaaaatacaaaaatgagacaggtaaggtggcgcacacctgtaatcccagctactcaggaggctgaggcaggagaatagcttgaacctgggaggcagaagttgcagtgagctaagactgcgacacttcactccagcctgggtgacagagcaaaacttcatctcaaaaagaaaagaaaatgagcaactattttatgctaaatattggagataggtaaaaggaagacagaagagatacaatgaataataaagccatgtccctgacattaaaaaatttcaaacatagggaaggatgtataaaggcacttacaaaatgtgtacacacattacttctagttttggcaagaatggttgattacattttctatttttaaaaaacccaactatctaactacagaaaatctatatgttggatggaatgggatataaaatgctcttaaatatataaccaagttctgagcttgcaaaatataaagccaatttcccaaagctagaaaaggagattggaggatatagaggcgacacaaaagagagtttattactaaaacatcatgttcaagaatatttaaataaaattccaggattaatgtaaaataagcattgaataaa

SEQ ID NO: 697027 - DNA, 567 bp, Homo sapiens
tgagatattttacattttcagacaatgcttctgaaatccagtatgtattttatactgatagcctgtctcaaaatggactaattgccctccaagtgttcaatatcgacatatggctggtgggtgtggaaggtcagcttcattcactctcctcaggcctgactggctatgtattttcataagtgaagaatttyctggtgaattcatgcgatgcgttcatcagagaataagaaacgcaaaccatactgatagtttagaataatgtacaaattttataaaaggctaggcgaaaagacccctgtctcgttaggcctctctgctgcatttgccactgtagactacttcttaaagctacccactgatgccttctctcctatttcagtgacgagtgcacattttgcttctcagttaggtcctctttttctgcccttcagtgttagtgttttacaaggtactttttttaaaaccccttctttgttctcattctacagactttcccaggagtatttcaagctctcatatatgctgatgttactcaagtcgtacctctaagctttgcatctgttttaa

SEQ ID NO: 697028 - DNA, 762 bp, Homo sapiens
attaaattatcttatgtaatatggctccaccactaagttgtacatatgtagagggtagtaatcagtcatgtcctatctacttttgtatctctgatatmtagcacagcgctttttataaggattttctgaactcaactgcaatcaggctagaaacacaaccattttgtatgttcactctcacatacaaacgtgttcacatgtacacgcaaacagagtcagggctacttaggttaaacacaacacatatgaagagaccaaaatattttctcaaattaaaagttgaatatatgtgacaacgatgcagctcccacaaaacttgatttgtgtttcgactgccttatttaaaaattatatgacactttcaactctaaaattccttgtctgcacctgaaacattgcgtttagttcttggtaaacagacacaaaaagagccatagtgattagtgttgaaatatcctcatacaatccacggtaccaattaacctctctaaccctcagtctcctcacctgcaaaatgaggaaattaggcctctgagaaccttcttggatctcagatgtttttaattaaatgccatgtcaagataaggaataaagaacagaaggagtagagtgagaggaaataaaacaaaacttgcttacctctcaatgtgtgcttcatgcacctattaaaacacagatacatcattttgattaaaacaaatttatgaatctaaacttttcaaaatgcgtgagtgtttatatgacattacagaaatacaggag

SEQ ID NO: 697029 - DNA, 623 bp, Homo sapiens
ttttttgtatttttagtagagacggggtttcaccatgttagccaggatggtctcggtctcctgagctcatgatccgcctgcctcggcctcccaaagtactgggattacaggcgtgagccatcccgcccggccttgttttttttttttttttwaaaaaactattggtatatttgtttgtttagatagcaagtaaatgctagctatataacaggagtgagaacgatttttaacttctgttaggatttaaattatgcatagcacttatttattaaagattagtatcaacaacacaaaactcttctgctggctctggactctaactggatttaatcactgggtctgttactaaatgcttgagagaacttaagcttttaatctctgtgtctcattttagtcttctttaaaagtgagaataacatgagtaaactcattgctgtggatggctttcctcatgaggcagactctgggatgaaaaataacatgccagaagtattaggactactgatgggatcagagcaggtgaaggcaaagaaagggaggggggttggcagagggtgaagttttacttcaatgccagaaaagagtgtgactttggctaagttgctctccctatggttaaatgg

SEQ ID NO: 697030 - DNA, 650 bp, Homo sapiens
tattaacttactaataaaaatggttgattactgatcagaagcattttcatgaaaatgatagcagatgcgtattagattccgagacagacaaaatatgccaaagcaaatcagtttgggtgaattgttccctcatcaattcctgttttaaggcagagttatatatttattgtctcagaaacagactaaaatgattaaaggtgaattggaagagaaataggaaagtaagtgggtagattataggtttttcctagtaaaaaccttcttctcttttataagttaaatgaagagtggaattgttcctgggatatagggacttagcatctctgcatcagtatttgtggatgataaaatatcctgttgttataagagtgagtaggaaacaaccttgtctatatcaataccatctttatatcattaattcatcccgtgaaaaatataccacatgcattctagtaaatatagtaattttaataagatarcatattataataatgtggaaaataaaatgatacccaatttcagagacttgcttacatatctttgatgggtattgagatcagaatgtaaaataactatgctagaagttttttcttgtttatgaactaaagttgtttgcataaccaagtaaaaatgtgtcactgaattacata

SEQ ID NO: 697031 - DNA, 685 bp, Homo sapiens
aagggcaaaacaggagagaaaaattgaaggaacaaaaaagaggaaagggaatacagagaagggaggaaaagattttaaaggagaaatgttaagagaggaaggaaaagagggagagattgaagccattcaagtaaggcgtataaggcatgagagatatgtcgcctcctttctccctaaagggagatctcaggatctcggtagttagaagtcaaaaaaggggcactgatagagaacgaggcctcaaagtgattacacagcaggtatgaagacaaacttccatggcgtgcccttgtcgttttgtttaagagcagctctgcttaactcacttctaaatatcaagtttgtgatttatttaaagaatcctaattsttcttgagatgatgacctggattgtctaacaaacctgaatattcctgccagtgtttggcttgaacatatagttattttaaactatccatttatttattccttcacttagcaaatattgaacaaatacctccccaccgctccaccgtgtgccaggcactagactaggtaataaggaaaaaactttgaccaaattgtctgttgtcagggatcttaggttccagcagaagaggaaaccaacaataaacacaataaataagtgtaccaaatggtgtgttagaagtgacaagtgctaagggaaagaggtaagaaaggaggg

SEQ ID NO: 697032 - DNA, 647 bp, Homo sapiens
agctttcctggatctctgatgagaatgagaattgtggtcatgggaagcatatggccatgacattcatcccttactcaagataagctgaggagcaaggtcaacacattgcatcagacctcaaatgaagactggaacatatcaccctaaccgcatgggactaggatggggtgagcactggggcaggagcagtggtgtgtgatggaggggtggaggaatctttctccactccaagatgggatcagaaatgtaggaggaagccaaaaagagcaagctcaccactcttggcatattttttccaccttgacattgatagctagacctcactcctggttgggaaattttctaagctaccaagaataggaaaaaaatcaaccataactaaagccctttgagatattcttccttgtcttcatgaacaggacaatattaaaacattacagaaagtytggaaaacaaagggaaaaaaaagctgatagccctgcccttcaaatatacaactcattgcatttttagtaatgccccctttcagtttttaatctatttgcatatataatatattagctagctaaaattggaacataaacaatatatatcttgcttattcatcttacaacttaatacagaaattttctgttactttattactt

SEQ ID NO: 697033 - DNA, 647 bp, Homo sapiens
agctttcctggatctctgatgagaatgagaattgtggtcatgggaagcatatggccatgacattcatcccttactcaagataagctgaggagcaaggtcaacacattgcatcagacctcaaatgaagactggaacatatcaccctaaccgcatgggactaggatggggtgagcactggggcaggagcagtggtgtgtgatggaggggtggaggaatctttctccactccaagatgggatcagaaatgtaggaggaagccaaaaagagcaagctcaccactcttggcatattttttccaccttgacattgatagctagacctcactcctggttgggaaattttctaagctaccaagaataggaaaaaaatcaaccataactaaagccctttgagatattcttccttgtcttcatgaacaggacaatattaaaacattacagaaagtctggaaaacaaagggaaaaaaaagctgatagccctgcccttcaaatatacaactcattgcatttttagtaatgccccctttcagtttttaatctatttgcatatataatatattagctagctaaaattggaacataaacaatayatatcttgcttattcatcttacaacttaatacagaaattttctgttactttattactt

SEQ ID NO: 697034 - DNA, 647 bp, Homo sapiens
agctttcctggatctctgatgagaatgagaattgtggtcatgggaagcatatggccatgacattcatcccttactcaagataagctgaggagcaaggtcaacacattgcatcagacctcaaatgaagactggaacatatcaccctaaccgcatgggactaggatggggtgagcactggggcaggagcagtggtgtgtgatggaggggtggaggaatctttctccactccaagatgggatcagaaatgtaggaggaagccaaaaagagcaagctcaccactcttggcatattttttccaccttgacattgatagctagacctcactcctggttgggaaattttctaagctaccaagaataggaaaaaaatcaaccataactaaagccctttgagatattcttccttgtcttcatgaacaggacaatattaaaacattacagaaagtctggaaaacaaagggaaaaaaaagctgatagccctgcccttcaaatatacaactcattgcatttttagtaatgccccctttcagtttttaatctatttgcatatataatatattagctagctaaaattggaacataaacaatatatatcttgcttattcatcttacaacttaatacagaaattttctgttactktattactt

SEQ ID NO: 697035 - DNA, 600 bp, Homo sapiens
gtgtgctgagtgctggtcccctgggcccacttttctttctctatactttgtctctgtgtcttatttgttttctcagtctctcatcccacctgacaagaaatacccacaggtgtggaggggctggccccctgcattgagctttgtggagaacataaaaatgaatgagattttgtacctactcttaagaggtctacattctactgagttagataagtatataactaatattgatacaatatagttcatgataacatttaaggtttataaacgaatttatgagaagcaggatagttactactctatggggtgaattgtaatgaagagaacagaaatcaagaaaggtgaaaatatgcatgcaccacccccctcacctgtattatctrttataatttctgtcaatgtaatgtttgctcagataatttgtgatggaagaaggaaggatgggagggagggaaggatggagtaaaggttctagttagggcaagaaagatattgagagtgactctgaaaaatgatcaggattttcatatacagaataaagaacaaaatggatgtgacagcgtgagggcagaatgctttagaccagtggcatttgggaaa

SEQ ID NO: 697036 - DNA, 642 bp, Homo sapiens
gatgcttcctttaagacacgtactctgtcaagttaatgaagtatgatcttggattgtcttctatgaggtatctgtagagtcacatctcattctgtaaacagtgtttgggaaacatcttcatctgaaaattatggcaaagtctccttttaccattaaacagagactagcactgtcaggctggggcaactgtttgagagactgatgcttgatacggacacagctgtcagggattccattttctcatttaggtttgcatttattgctctcaagtctgtgactgcaggataaataaggcaggagtycccaaaatacataaaattagggactagaactctgacaatttgcacaagttctgtccacttcttgcctgtaactctgaagctgaatagtacatctatacatgccaaatgtgttcaataataaatggtttgctttggactgtacttcctcccatttagatgaacttccaggaactgcaatgtcaagaaaatatcattactatccattgtacagttacatcttgaataagatacagggaaaaaaacaactgaaatatactgggaatatatttttattagtctgatttctaccctctctaagctattctgttagataagtaggtcaatttacacatccttaatg

SEQ ID NO: 697037 - DNA, 616 bp, Homo sapiens
tgtccttccaggtttagcataagtgtttcttattttgggaaacttctgaccaccaccgtccccatcccaaccctcacttaagtgcctcaggtgggctgccctggcctccgtattcccccatcagagcacgatcacattgctgtgcgtagaacctcttcacatgttttttttcctccaccaaacagaactccaagctcctagatcctygagggcagggtctggggatgcattcattttgtttcatcccacagatacggagttcctcctgcggcaccattgtgctgcaccccactgctcagctgacggggtccaggcctgctctctgtgtagtgggcagtagcagtatctaaataaattcctgatagagcatcaggcagtaatatgcaccctggagagacctacagcagggtcaggactgcgaaagcggagtaggggtactgcctgctctgggaccaaccaggccccacacaggcctgagtgtgggcttgctaaatggagtcgctgagcctttgaacattctcagcaggtccgttcttgaactggttctccagcagctctcagtgctgtttccacctgaaatgcctgctgggtctgtgccctttgctttggccccaga

SEQ ID NO: 697038 - DNA, 1595 bp, Homo sapiens
agagggttgttcatcaagtaaaggcaagtaaataagtatataaattatatatatgtcaaaaacaaattactagaataagtatgttaccaacattaatgctttttgggggcaatttttggctacaggatcctagtaatagttatcagaaaacaagggtttctcagattacagtttttttgggaaatgtgtttggtaaatgctactgcagtagttatgatacgtaaaaatgattagcttccaaaagtttcaccatgcaccataaaacgaggaataaagatataggccttattcctttttttctgtctataggaattgtttcttttgggacacacagggcttgtcattcagttgcatctggaaagagcccaattctaaatataacttgaatttccctttgaatataatagggccatctaatttacattttatcatgcctgtgtttctcagaacattaggtttctattcatccaagtagaataatttttcatatcgaccatagcagaaaacaagtgtaacttcttttttagtttgtattacctgactctaatctctcttcagcacaaccctcaagcattctcagccacagaggagagtaaattgaaaaatcatagaataatttttaaatatgagcacagctgcactgaaaacccaattctaaaaaggggcctccctgcattttcctctctttcataacgtttgacagtaaaataatgcctgccagtgacaaaggcgctcaagctttcagtgagcagagctctctattcagcccaaacacagacaccaggatgattgactagggtttctgcctctcctctgactcccagcatccagcacacacagaggcaggtcctctgtaccttgttggctgtccggatatttcaaataaacatcaatttctcagcacctctaggacacttcagtggaaccactctttgatctctacactaaaattattggttaaaaaaagatactactaataaatttttcctttattattctatagaaaccatattatgaaaattaacaaaaaccaggcatcatctcatgtagagtttctacctattattttgattaggcttcatcttcactgcttcttttaagaattttctttgtggcgttctctgtatttcttgaatttgaatgttggcctgccttgctaggttggggaagttctcctggataatatcctgcagagtgttttccaataacaaactgtctctcagaccacagtgcaatcaaactagacctcaggattaagaaactcactcaaaaccgctcaactacatggaaattgaacaacctgctcctgaatgactactgggtacataacgaaatgaaggcagaaataaagatgttctttgaaaccaatgagaacaaagacacaacatatcagaatctctgggacacattcaaagcagtgtgtagcgggagatttatagcactaaaygcccacaagagaaagcaggaaagatctaaacttgacatcctaacatcacaattaaaagaactagagaagcaagagcaaacacattcaaaactagcagaaggcaagaaataactaagatcagagctgaactgaaggagatagagacaca

SEQ ID NO: 697039 - DNA, 663 bp, Homo sapiens
tgtgtgctggctgcctgttaagcattttcatggtattctggtgaggtaggaattatgttctggcctcctccactctcccacaacacttatcctgtttgtcagaaaaccctgttggctcttccttccaaacatcagaatctcatcgtttcttacctctatcactgctgtcatccttgtccaaactaacatcatctcttacctggagtctccttgtccttgccccattgggtttattctcaacataacagccaaaatgatcctgttaaaagatatcagattttgtcactcccctgctccaaatcctcacatgatttctcagatcactttgtgtaaaagtcaaatatsttgcacaaaaattgtcaacctagattcgttttgagtagattttatatattctaggccctctgtatctgtggtttctctatccctggattcaactaacaatggatagaaaacaagggaaaaaaaaaaaaaaaaaaaaaaaaaaaaaaaaaactaagtcagtactgaacatgtatagacttttttctctttatttcctgaacaatactgtatagcaactatgaataccaaggaatgatgtatataaattatatatgtgtgtctcaaaaagcaacttgtaaaattatagactttttaattacataagaaattccttacccc

SEQ ID NO: 697040 - DNA, 674 bp, Homo sapiens
atgtgcaacattttctaatttgcctctaaattctaaaatgagccaagttacagaggcaaggagagtttgatgagtgattcatggatatttatgtacataatatgtctgctatttaatgactttctcatcttaggcaaatcacaagatcttcctaaatgrcatttatttccttaatataggggtaataatagtatttcttatctcacaatgttgttaagagaatcagagataattaacaggaaagccttggcaattataaataaaatatatgttttacttttccttttttaaaagaaaccttattgtttaaagagatatgaacagtgtatacaatcaaaagcaattctgattataatacaataatcaagaacatacaaaaacagacaataatggagaataaactttcattgtttatattatatataaatgcaggtaatctatattaagcaaaatgttgtaattaggtagtgccttagataaaattgattaacattatagagtcttcacttaaatcttcaaggatttccagctaacaagatcatctgaaagataaaatgataaagtaactttcctttcaaaactgacccgaacgactaggataggaagaaggtattcaagaaaattgtgatatttctctcagtattttattaaatgccaagtaaacaaagtaaaaa

SEQ ID NO: 697041 - DNA, 561 bp, Homo sapiens
gaatggtagtgtgggttcagagctgctaggagacccagatctggttcattcttctccctgtaaaatgcccgctttggcatcttagtatattatgggcattaatgtctgaaaagtcactagaaatcttcagatgctagttgctgtagaaatgcaaggcaacgtataatatttctttcaaatcctaagacattgtctcctttgtggaaggctagatgattttttctttttttggcagttaaaaatgttcactacatcttcttacattatcagtcataagtgaggtggttggttcttttgtaaataacgcatctaagwtaaagtggatttagtatcagcataggctagttagcaaagcatggtttgtttcccagtcaagtctatgcctgaaagctcagctagccatctcgaaaatgtatgcctttggttaaaagagagcccaagaaagagccagcagttgtaactcttggattttgttgcccaccaccaaaagtacaattcagatatatatatatatgtatatatatctcagattaggaaattcacctggaaatttctcttagt

SEQ ID NO: 697042 - DNA, 561 bp, Homo sapiens
gaatggtagtgtgggttcagagctgctaggagacccagatctggttcattcttctccctgtaaaatgcccgctttggcatcttagtatattatgggcattaatgtctgaaaagtcactagaaatcttcagatgctagttgctgtagaaatgcaaggcaacgtataatatttctttcaaatcctaagacattgtctcctttgtggaaggctagatgattttttctttttttggcagttaaaaatgttcactacatcttcttacattatcagtcataagtgaggtggttggttcttttgtaaataacgcatctaagataaagtggatttwgtatcagcataggctagttagcaaagcatggtttgtttcccagtcaagtctatgcctgaaagctcagctagccatctcgaaaatgtatgcctttggttaaaagagagcccaagaaagagccagcagttgtaactcttggattttgttgcccaccaccaaaagtacaattcagatatatatatatatgtatatatatctcagattaggaaattcacctggaaatttctcttagt

SEQ ID NO: 697043 - DNA, 622 bp, Homo sapiens
acagggaaagagagaggtaatctctcctagtactctgaagaaaaggggtatttaggctctttgcctatcatgaaacaagaggcttatgtcttattgctgatgaattgcaagtgtaattacagagcattgctaaaccacattaagtcccaagggctgaataaaaaaatatacaccatctacaaaagccatttaaattatctctgaaaaacctagtagtcaagtatgaaatcagtctgtgagcagatataaaccattgctggttatccattaaaattagctccacaatgctaagggccagtctcyaaaagaaaaatgaatggcctgtggctatatctaatgtgctactcacaagtttctgtactgttacagaaatgaacaacaacagttgaactttaaagataaacagttttttttatcggattcctagagaataatggtgcttatgtacaattcttgaaatagagcctacagccgcccaaaataaaatagtctctttcaagatcttggaaataatgacatcataggcagattgaaccagcaatccattaatagtatcctttatagaaagctgtctcaggggaacacatggctaagtagattggcattgtttataaacataaca

SEQ ID NO: 697044 - DNA, 2663 bp, Homo sapiens
ctttgctgtcgtcaatgacaggatctaggctcagcagggtgagcaccctgggaactttgccctccctgggactggctcctaccacctgacactgtcaaagcacagtgggttcctcctgggtttccttgtgtttggctttttggcatctgccattgatagaaggagcacgcatccccatctgtctgtgcctgctgtctacccctctcctctgtttctggctgagtttccagcttatgaggtagagatggtatgtttttttcttaaaaaacatcatgttacattttaaaaacttatgaatttagcaactacctagtttaaaggtttatttctaaggtctttgagtagcgcagtctaacacattgccaagaaaaagaaggtacttcatagactcagactaattggcaatctttatgcttcctgcattgaaagttcttgtcctccagaggggattgagcctgatctaacttgtctgcatcgagtccttctctcaggagactacatctctgggaaggcaggggccgtgcctgactcacttgtgtattcccctggtttaacttagtgccggctcaaagaggacaccaagctggtcaaagaggtcatgttcagccctgagttgtagtctgggattcaggccgcctttggaagacgttccaaagatctcagaaggcccttgggggtgttggcattgcataacaggcatgggtttggattctgtggaggttgtttcccaagatggctgctacaatcctggccagtcccgatgcccttttgacatgtgactttgtctctactcctatccacaggtagagttcattgcccttcccctccagactgggctggctggagaaaccatgtcaagaaagagggaccctaagaatgagcctccacaagcaaagagaagccttggaagatgaaagaccatgagtagagagaggctctgcggagggcagacatctgagagaggccatctggggtcttccagaggagagaacacgtgcaacatgcatgaaactgggctgagcatcctcgccgagccctgcccagccaacccacagaactgcaagtaaatggggcgggtttcactttaagccaccaagtattgggcgagtttattacactgcaataggtcacagatacaaaccaacataaattcaaactccatttctacacctactaatactgtgatggtgaatacattttttttagcctctcgcctcataygcaaaatgagaataataatgcccatttaatagaattagaaccttgccagccacggctcccacttgtagaaacttgccagccacacctcccacttggaattgcccatagcccagttgcagggctggtcttaggtggtggagaatatattaagtagttttatctccctactcttccttagctgaggggaccagaagtagctgcctgaccccaatggctcatgtgagcgtgtttaactcactcttgagattataaatgaagaagcccagaaattgaagtcaggtagttgagccttggatttttcagatcatgtagagccgaggccagtgtcagaaccccaatgagccaaagtcacacgggaacggaagctaagagggagttggaactctgagtggacatcaagggggtccatagagcaggtgtgcagagagaagcctagagaggctgcctgactgcagccagagactgggaatggagagagtgtcccaactcaatttcctgcctttggttctgagagattcccttgtgccccatttgctcaagcctgtgtgcgtaggagtgggttgcttcctgccaagtcatccctaatgaaatgtgaaaatgcaaatgccagacacaaagtggatgtgcagttcttcaaggtacagtagtgttttgttttgttttttaagtaatggatgaacggaacatttatctacttttctctcaaaatctatattcttttttctccataggtttgataacattaacctgatgcctagggtctcagaagaaaccagttttgggggtcagtgggactcagaaactaacctctttctaaacttcacacacaagcaaaaggtgtttttcccttggaggccagagctccgaggagtggggatgggagttgtggccgcctctgccatgaatgtacccctgcactgcccactggtgttggggaaatctaaggtccatacataagaagctttggttccttgatgttttctgtgaatggattacccagaataggatttttccagatttgcaggctcaaatgagacgccttacaggttggcttcagagcaagagttctctggaaaagaaggaatcataatcctttgataatattttcctaacagccactagaggaagttttcagagagtaataaatcgtgcgttctcatttatataaaaccttttactcctagcttggaacactatctcaactttttactaactagcaattttactaacaaattgactaaatcatttagcttctcagcctcagctttcttatccataaaatcaagatagcagtagttaacacctcctggagttgtttgagacttcaaataaatgatatacctaaggcactttgaagactgcctggtgggtagctcgctgagcccaggcctcagtgggtgtttgatgaatgcctgctttcattatttctgcaccagtgcgat

SEQ ID NO: 697045 - DNA, 603 bp, Homo sapiens
ttctaaccaaggaaaggggcagagagcaaagttcaggtcaggacattttctgttgagtaagtgaagtggaaattgcacttttgctcataattcattggtaggagcttagtcacrttgcccacctggctggtacagtgggaagtgcagccttgccttgggtccaggaaacagggtggaacagattttgatggacgagtagcagtgcctgccaaagagctggaatacagatcttacacttccaagtctggtggcctttctcctatatgaggctttatcttttatatttctaccagtgaaagaaaatgtgagattgtgaagaatactgcatctaaaagtttatctagttcagccttgctacagttccagaaaaggcacttaatctccagaccttagctttctcctttgtgaaatgaaaatattagattccaaaatctaatcagttacaggcatacctcggagatagtgctagttctgttccagaccacgtcaatcaagcagttagcaaagtaaagcaagtcacaccaattttttcatttactgattatgtttatacatagactggtcaaaaatgttatgcttatactatgctgtggtctattaagt

SEQ ID NO: 697046 - DNA, 1292 bp, Homo sapiens
gacccggacccccactccttagctctaaatttcccaggtttttgttggagtcgtagttcagtccaacatctcttttcctctgtaaaacccaaatacagttctctctaaacatatctccatggcccacctttgataaagtctgcctcactatctttaacaagtgtcatgaatttttttttgtttaaacaaaggtgtttcctaaaataatggcatttttaaaaatttatcacagctttgtttgtcttttttataataaaatatatttcttcctctctatttaaaatccactcatgtatacatgcctttataaagtgacaaatagagtctcttgcagtgaaaagaacttaagctaccaaatagtgtgtcaaaccctacttttcttgtaactttgcatttgcaacactgccaagttaatgatatgaaaaaaaaaaaatgttccgctgccccatttgatgctgggtgaaatgaaacaacatcgttgtacttcactgcatttaggcccaacaacatgtcaaattcttttgagataaactgcaaaccattaactgatctcttttatttctcctcacaaaccttacttcaaaaacaatttcttgatacattctacttttctgagaggagagacaactttttctcatcaaaataatttcgtgagtgtagatgcaaaactgccattttctagcatattacctgtttatttttgttttatttgtttatttttagcatctaataatactaagcattattgtttatttagcacacactgtgtatcaggggctatattaaatatttgatttttaccactataaagaaagtaattttacggcaggcaaaaatttasctctactcttttaggttctttttatttaatggatagtcctgagtattaaaatgtcttaagacaaatcagtaagagaaaggcaaacaaatttgcttaaaacaagttttaccagcccatgaaccttcataaggaaatgaagaccaaaagaaacaattacaattgaatacttatatgctgaattgcacagagtagtaaactgtgaaaatgtgacaaggagaaagggctcgggcaaaggtactaattgggtgcaggagtagctaggaagataagggttagtaaacagctttgtttgtacagattttccttgctctcaacttctcattcatgatgacacaaatggcgctttccttcccgtataggtaagactgctttcacatgggaattttatttcctgcttttaagaaacaaaaggaagttcagggtaatcttgcatctactgtttttcaagaga

SEQ ID NO: 697047 - DNA, 577 bp, Homo sapiens
ttttttgtttttggagacagggtctcattataccacccaggctggagtgcaatggcgtgatcgtagctcactgcagcctcaaactcctgggctcaagcaaacctcccaccttagcctccaaatttgttgagattgcaggcataagccactaggctaggctgtttttaatatcaatattaggaatgagtgacactgaaatgcacatttgaccctttgagctctctgaaggtaaaagcaacggatatgaaaattttgtaaatattgtttgttttgacratggatttgagtgtcagacttgaaaagggactatctgtgttctgttatggtgtgtgtaagtatttagattatgaatttatatatacacatatatttgacctcttttattttaattaagtgatatattgttgaagatgaatgtatctgatatatccatttaagttttgtgtggagttaattcatctttaccaaatattaattaattaataaaggtattcaggttcagtggatgaaagtcagccagaacatattgccagaaccactagaagcttaaacatttagaacagtttgactaaagata

SEQ ID NO: 697048 - DNA, 1945 bp, Homo sapiens
atgatatggactcagtcagggttgtttcctgatactgacaagctgagcacagatcagtggatttagctagggaggccttgaagattataaggcattttgctcagtctatatataacgtttacctctgacagcatggctattttgtgtctgaaccaattaggcaataaaagagaggaccggaaaaagtctgattgtcatccccagggtgatttatcttgtttatttgttcttccttctctgctgaagtcattctttcctgagtatttacacagaacacaaatatttggatagtctgcacccattctgaatggtatgtgcccattcctctttactagatcgtctttttaccaagtattctctctaagtcattgcccatcaattagatctacacctctggccatctttccttccaggtaaaatgtgcaaccagatatactgaccaaacttctgtcttctgagagggataagctggtgcccatcattatggagccatgcacaggcctggctcagagttcacatatgctgataaagaatatctggcagttcaggagaatttgcagaccagctgctgccctacaccaacaaggatggctagcagatcagtgataatgtgtaagtcaaaggcacttggcataacacttacctttagagcataaagtgactgcttttccagttctgccttggaaatttcagaaatttatctcatggaaaacttctcttggaaatattcagggaagataattctgggaaattcaggtaaagttcagtgccttgccagtatagaattggaagcttcagtttcttgcttgttacaggtcagaggctgtcctcagctccaagaggctgctcacattttgtttgctaaggtatgttcccaaacataggcatttgcttatgtaaagcccataagggagagagagcaagatagtgagaaagtaagacagagagagagactctccagtaaaacgggcattacattctttctcatgtaacataatcaaatcacacagacacacacacacacacacacacacacacacacacacacacataattatgtatattctgccatattctgttgtaaggagtggggatcacagaagggcatcaataccaggagtgagagatcatcagtcctccgtcagagtgtgtctgccacatcaaggtagttccactattgtataataataactaaagaccaccatgactcaactgttatacaaatttgaagaccactaataacattcttaggtgctcaaaccaaaatattaaatctttaatcctgaagaagtgcttccatatcagtaaatatagcccaatgaagctttatatttgatctgttgtgatgctatacccttcgactctgcccccacacacagacattccagacttttcccgttactgtcaggggaagtattttacatgttgtgtgaataaacataaaaacaggtaaggctactcaagcatatgggactatttgatacagagactatcttcccctggagcaggccatagactttcytgactgagctgtgctaataactaactcttgttataggtaggtctgagcacaaagggaaatagtgaagttcaattttgaagaaatttagcatcagcttgtgaaggtatctgtcctagggttacctttgagataattttattaatttgtttaagtagcaggtaagtaatcaattaatatgtttgttttaattaatgtcagagatatttaaaactaaaataatatacagaaaatggcttcctttcccactagggtgttcagtgatatttgttgattgaaacttctcaattatgtgtctctcatttgagaactctattctttactgctactgtctctatgttgcctggaaatgttaagatataattctgtgattctcaaaattaagttttagactttgtaatcactcactttttttggtaaatatta

SEQ ID NO: 697049 - DNA, 628 bp, Homo sapiens
tcctgctacctcagaattttatgttgtaataatctctgttargcatatatcccatattaatggtatcagcggcacagccatggcttttatagtgaggtcacctaggaatttgcagcatctaagtgttatatgtacactttgaagggatgtttgatttcattctttaaaaatattacttttggctatatgtagaattatttagaagtaaaacatatataaataacttggaatatgcatataaaaataaacactgtgactgtatgtacatttatacaaataatacctatgaaacagaaaaaataactttttagttctgagtcagtagttagcaaaaattttcatatttaatttatttttataaaattagatatgtttgtaaaagctactttttaagtgccttagttttatgtatatcatcctaaaataatactctaaagagagtattaatttctaccataaaaaatacaaaatgctctttgtcgaatcaatcatttatacttctttcgagcttacaaaataaaatgatacttttttacacaattttacacacttttttacacaatttgaaaccactatgctttactgagatataaccgagaaagttttctcagcgcaaagatcatacaga

SEQ ID NO: 697050 - DNA, 629 bp, Homo sapiens
tgtaatattctgtaattaaaataacaatttcacatctagcaaaattacttatgaaatgaaatagtcttggaaatgttattgttttagaaactatacaaggagaatgggagaaagcccttttcacctagaattctctatcagtcaaggtttaatcaggaaaatagaagctgctggatatactcttagtgtgaaggttggttttktttgtttgtttgtttctatcagacttaggagaattaatacaagaatcaaaagtgctggagaagagaccaaggaagtcgctactgacagtgtagccagtaacaaaagaccaaagcaggttgttcttaagtgttttcctggaaatccctcaggatgcaagtgattctgaagaaactctcccactgagtggtttcaaaccccttgtcttcccatgtctgcctgtaattgcctcctgaaaataatgtcctctatatatcttctgcattccaaataatgcacaagtgaccttgctcttggtggactttaatctgtaaatatgtggtgatgaaaattctggataaaagggagcagtttctggcttttcatttgaaatgcaaatgaagtagcaacatagctaaataacaacaagggactcagctgaaatccca

SEQ ID NO: 697051 - DNA, 603 bp, Homo sapiens
cagctcgttaacaacagcacctaaaagaaatatatggtatgcctgacagacatcctttttcagtaactgctataaaaacaagcctaatagactcaaaattgttatggaaaaattaatcatagtggattaagtggaatcattttatgatttccacaggcatttcttcttaagtacctggccacagttttcttagctatataaggaaatataaactaaaacttaacacaggtaaagcaaaacctgagaagaaagaaagaacatagaaaagaaggaaaagaaagcttaactagcccccaaacaaagtgagatrtgaagtagttgttgagaaattccacagacttgagaagtccaacttctttgaaatggtgtggtagaaagttgagaacaggcaattatccagaaaaaaaggatacatattctccaaaggccacacatgcagagatggtaaacattctttacaatggagagcatgttttataaaaacagtattaagctggagatgaagaaaaagagcataacttaaataaatgctttcactctctctaaaagtattcacaccattgtccttccttttgtgccaaaatatatacatacatatatata

SEQ ID NO: 697052 - DNA, 2492 bp, Homo sapiens
gtaccacgttttctttatccacttatctgtcaatagacatgtgggttgtgtaacacagaggtgatttgattccttggggcccaccactcaaagtgctctagcctagcattgtcctaagtatgtttctatgaatcctatttccacaagttcgtgacagatgttacctacgaagaggtgggggtggttcccataatcaaataaatgctagatacactgaattaaactaatttaacatgtatttttcatgcaggacttctcaaagcttgaaatatgtcactgtcactatgaatctccaagagagggatgtaatgcatcaaccttttcaaatggatttgacttgaggtgtttttttgttttttgttttgttttgttgttgttgttgtttttggcttagcgtttctcatggaactaacgataatgggaagacacttctgggaaaatggtgatccaagctgttctgtatcaagctgataattctccccatctaaagagaattttatgacattctacttatgaataagtggccttgcaattacatttgataccacttcatatgccaactgctgaataatagcacatgtggtagacagagatgtattgcccagatctcccctcaaggaaggactctctacccagctgcaatgagcaaacagcctccagtgatgactctctttagggtttgcctcagctacagagaaccactttgcccaaggccacacacttcctgcagcaggctctaccaggtggctgagaatggcagggtctgaaggccaagccattttggcttaatgtgggacactcagatgtgcagttttcacttcctaccaggctgagactttgtcaggcatgcattggcagtgcaacttcttcctagtccaatcctgcttccccacctgcctttactattgcaggtggtcaaccataaacatcatgtcctaaactccaaagaacccaacatgtgagagttgttctagaagcgggctgaggaaaagtgacaagatggggttttggcagttcaactgttaaacttttattggaaggaattggaattgagaaccagtggaatggaggctaatgggtgcaacgtgtcaggcatttgatacatgtgaaggaaatcagagctatcaggctaaggtattaataccttttgcaaaggaccactgatgtgctacggaaagaaaatgaacatttaagagtgagcatgaaattgagaaattttaatttcaagaaattgaaagccaaatatgaaagacaaagggccactttggatacgaggaatgaccaagaaagtcaaggaccaagcccaatccgataagctgaatttaaatgcggttaaatgctctgccaagggacataggttaaaccaatgccaaggccttctttgggggggaaaaaaggacaaaaaactaggatcctgacacatagaatagctcacacatattggtggagactatctattgcagatttcagttgtgggaagaggtgtcacatggattttgcaataagcccaatttcaacacaggcacctggaattctggagcaaggttatgtcattcacaacagaggagcatataccttcgaaaataacccctgacatgctactaggctactggagggacagaattcctgagcatgggacaccaaatggccatactagaactgcccatgattagttaagtcttaccagatacaccaaatcataaagtcaaatgggcttagcaacaattgatcataagacggaagcattatattttgcatcaatatgaccatggaggtagctcagactcccatggtgtccaacactgttacaaaagcatgactctctcagctcatatctatatctgtgtgacagatcccttatgaccagctaaaagaggaggaaaaaaaatggcttacagatgaattggctctgtatgtggaagcagctgtactaccttcagggatagccttaaatgacagtaaaggcaaaaaatccytccaatgggaagagctttgggcagtgcatgagtcattcactttcttagttggaaagagaagagacccaaatttagaatatatatggactgctgtgtagcactgaatagactggacagctggccgggggtctggaagggaaaaaattggaagatcaaaagcaaggaatttgtgattcagtcacatggatgaacatatgggattgaacacgaaatctgaagattttttaaaatgtgtttgttgataccaaccagacaaaattatttatccacttaatgccagctagtttctgtcactgaccatctcagtgctggcataatgggacatgaacttagtgaccacagtggcagaaatgggggcccaacagcatgcactccacttatcaagtttgatttagcaattgttgcaatcaaatatccaatgcaccagcaacagagaccatcactgagctcccaatacggtgccattcctcaaggacataaactggccacttggtggcaagctgcatacgttggatc

SEQ ID NO: 697053 - DNA, 816 bp, Homo sapiens
atcgagttttcggcagacctgtacagattcgccactgctaacatactttggtgctgtgactcggatacatcccctaatggtaagacacctctatgcctcaccttcttcagctagaggtgtcaaaaccctgtacatggttttcttctcaccttttgctctcctgcttgctaaccaacccccaggacaattccttttgaccactgttccccactggctgatctcagttcaccctgaggggtggcttgtaggggtgggaaggacttcagagttcataccaagttgacttgaggyactaaaggccctcctggacaggaagctcatgagagtggtaatgcatccatccataaagatcttaatcacactcatttatgcttaatgttctattattggaacactaagcatgtgggagttatttgtatcttactgctcaaggtcattgccaaggtctgatttttcacacatctgcaattcagaaaactgcagcctctggcataaatgggttaaataccctggcttcatccctggttttcgggtcctgatggaagtttgtctggacatgggcttggggagccgttactggcactccattgaaggaccaaagatgtagaagagaaaaccttagcctatattctctggctcacaaggcattaagttggcctccttgctctgaaaagtgggaaaggaaatttgggctttaatggctttataacagccttataagagcccaagaaatgttagattcattaagctaacacaaatgtcagttgaatcacaccttattcctgactcatgtcttttctttttgctaaaatgcat

SEQ ID NO: 697054 - DNA, 816 bp, Homo sapiens
atcgagttttcggcagacctgtacagattcgccactgctaacatactttggtgctgtgactcggatacatcccctaatggtaagacacctctatgcctcaccttcttcagctagaggtgtcaaaaccctgtacatggttttcttctcaccttttgctctcctgcttgctaaccaacccccaggacaattccttttgaccactgttccccactggctgatctcagttcaccctgaggggtggcttgtaggggtgggaaggacttcagagttcataccaagttgacttgaggcactaaaggccctcctggacaggaagctcatgagagtggtaatgcatccatccataaagatcttaatcmcactcatttatgcttaatgttctattattggaacactaagcatgtgggagttatttgtatcttactgctcaaggtcattgccaaggtctgatttttcacacatctgcaattcagaaaactgcagcctctggcataaatgggttaaataccctggcttcatccctggttttcgggtcctgatggaagtttgtctggacatgggcttggggagccgttactggcactccattgaaggaccaaagatgtagaagagaaaaccttagcctatattctctggctcacaaggcattaagttggcctccttgctctgaaaagtgggaaaggaaatttgggctttaatggctttataacagccttataagagcccaagaaatgttagattcattaagctaacacaaatgtcagttgaatcacaccttattcctgactcatgtcttttctttttgctaaaatgcat

SEQ ID NO: 697055 - DNA, 1052 bp, Homo sapiens
atccagcctttcaatgaggttaaaaattcacccaatctcggcgccgtggctcatgcctgtaatcccagcactttgggaggctgaggcaggtggatcatgaggtcaggggttcaagaccagcctgacaaacatgctgaaaccccatctctacttaaaaaaaaaaaaaaaattagccaggtgtggtggcacgcgcctgtaatcccagctacacatgaggctgaggcaggagaatcgcttgagcctgggaggcggaggttgcagtaagcggagatcgagccactgcactctagcctgggagacaaagggagaccccgtctcaaaaaaaaaaaaaaaaaaaaattcacctgatctcatctcagttggtcatctgaactcttcactacaatacctgagtaggggtacccatgcctgcacaaaggaatttattccattgttaggtaaatttagattattttagttgtgagaatgttctttctaccattgccatggtatttgcaaaacattcccttaacttcatgctgccactttggacaacccagtacaagtgggctccctcttgttggtgttactgctgaaaggactgagtgattttctctgttaggctgagttcctcaaagctacttgcctgtgtctcccactctgtgtctctccccactagtgaatgattgactcaactgatagacgagtccctctacamacaatctgagtcttacgaaatgtcctaattaggactattggaagacatctagtccaacctctaatccagtgttctcatccaaaggaaatcagaattttctctaagacaccccttccaagctgttgtctattctgtctttaaacatttccaatcaatgggaaatttactgctttcagaggtagactattccatctttgcccaactcatgactgaagaatgtcctgccaaagtgcttcaaagtttcatgatacactctatgggaaattttgtgataggaattttgatcttaggattttggagtcagtcataagacgaaatccacgtttaggaaatatacatacatttagagtgaatc

SEQ ID NO: 697056 - DNA, 1548 bp, Homo sapiens
gaccaacacttgtgttttttagctgacttattcttgggtatttaaaagagatcttgggccragcagtggctcatgtctgtaatcccagcatgttgggaggccgaggcgggcgaatcatctgaggtcaggagttcgagaccagcctggctaacatggtaaaaccccatctctactaaaaacacaaaaaattagccaggcgtgtttggcgcacgcctgtaatcccagctactcgggaggctgaggcaggagaattccttgaacctggaaggcggaggttgcaatgagctgagattgcgccatggcactctggcttgggcaacaagagcagaactccgtctgaaaaaaaaaaaaagatcttgaagttcaaaaattatacgagtctgttattttcctagtcttttctccactccaaagaaagataaacctaattggtattccttaccactacaacaatcaggaccactgaagtgagaggaaaggaagctatacaaggatgtatttaaagctcattacttaaacaaaatgaaaacataagatccagagagttctttttatgtttgtttaagagcttcagaaaggctgggcaggctggcacatgcctgttgtcctagctactcgggaggctgaggcagaaggatagcttaagcccaggaatttgtatccaccccaggcaacatagtgaggcctcattaaaaaaaaaaaggaaagaaaaaagggttttagaaaacataatctgatgcacagattatagagttttgcatttttaaaaaatagatctaattgataagacagcaaaaaatgaatatgtggaacccagcaatttcattccacgtacacactagagcagtaatcagcaaacattttctgcatagaattagataccagatattttaggctttgcacgccatccagtctctgttacaaccactcactaggcctgaaaacggccttaggtaatatataaatgcatgagcatggctgttccaataaaactttacttatggacactgaaacttgaattttcatgtgtcataaaatattagtctttccatttttaaaaaccattcagaaatgtaaaaaccaccttagtgtctgggtcatacaaaaaaaaggtggagggtccacgggccagaccatggtttgccaatccctgctctaaagaacttttacaggccaggcacagtggctagcgcttataatcccagcactttgggaggccaaggtgggcagatcacatgaggccaggagttcaagaccagcgatggccaacacagtgaaaccctgtctctactaaaaatacaaaaattaactgagtgtggtgtcgcacatccgtggtcccagctacttgggaggctgaggcacgaaaaccgcttgaacccaggaggcagatgttgcagtgagccgaagtcgtgccactgcattccaccctgggtgacagagcaagactctgtcttaaaaacaaacagacaaaaagaactcttacatacacataactcaactacacatgagaatgttcataacatcattatgtgaattagcaagtatgca

SEQ ID NO: 697057 - DNA, 1548 bp, Homo sapiens
gaccaacacttgtgttttttagctgacttattcttgggtatttaaaagagatcttgggccaagcagtggctcatgtctgtaatcccagcatgttgggaggccgaggcgggcgaatcatctgaggtcaggagttcgagaccagcctggctaacatggtaaaaccccatctctactaaaaacacaaaaaattagccaggcgtgtttggcgcacgcctgtaatcccagctactcgggaggctgaggcaggagaattccttgaacctggraggcggaggttgcaatgagctgagattgcgccatggcactctggcttgggcaacaagagcagaactccgtctgaaaaaaaaaaaaagatcttgaagttcaaaaattatacgagtctgttattttcctagtcttttctccactccaaagaaagataaacctaattggtattccttaccactacaacaatcaggaccactgaagtgagaggaaaggaagctatacaaggatgtatttaaagctcattacttaaacaaaatgaaaacataagatccagagagttctttttatgtttgtttaagagcttcagaaaggctgggcaggctggcacatgcctgttgtcctagctactcgggaggctgaggcagaaggatagcttaagcccaggaatttgtatccaccccaggcaacatagtgaggcctcattaaaaaaaaaaaggaaagaaaaaagggttttagaaaacataatctgatgcacagattatagagttttgcatttttaaaaaatagatctaattgataagacagcaaaaaatgaatatgtggaacccagcaatttcattccacgtacacactagagcagtaatcagcaaacattttctgcatagaattagataccagatattttaggctttgcacgccatccagtctctgttacaaccactcactaggcctgaaaacggccttaggtaatatataaatgcatgagcatggctgttccaataaaactttacttatggacactgaaacttgaattttcatgtgtcataaaatattagtctttccatttttaaaaaccattcagaaatgtaaaaaccaccttagtgtctgggtcatacaaaaaaaaggtggagggtccacgggccagaccatggtttgccaatccctgctctaaagaacttttacaggccaggcacagtggctagcgcttataatcccagcactttgggaggccaaggtgggcagatcacatgaggccaggagttcaagaccagcgatggccaacacagtgaaaccctgtctctactaaaaatacaaaaattaactgagtgtggtgtcgcacatccgtggtcccagctacttgggaggctgaggcacgaaaaccgcttgaacccaggaggcagatgttgcagtgagccgaagtcgtgccactgcattccaccctgggtgacagagcaagactctgtcttaaaaacaaacagacaaaaagaactcttacatacacataactcaactacacatgagaatgttcataacatcattatgtgaattagcaagtatgca

SEQ ID NO: 697058 - DNA, 1548 bp, Homo sapiens
gaccaacacttgtgttttttagctgacttattcttgggtatttaaaagagatcttgggccaagcagtggctcatgtctgtaatcccagcatgttgggaggccgaggcgggcgaatcatctgaggtcaggagttcgagaccagcctggctaacatggtaaaaccccatctctactaaaaacacaaaaaattagccaggcgtgtttggcgcacgcctgtaatcccagctactcgggaggctgaggcaggagaattccttgaacctggaaggcggaggttgcaatgagctgagattgcgccatggcactctggcttgggcaacaagagcagaactccgtctgaaaaaaaaaaaaagatcttgaagttcaaaaattatacgagtctgttattttcctagtcttttctccactccaaagaaagataaacctaattggtattccttaccactacaacaatcaggaccactgaagtgagaggaaaggaagctatacaaggatgtatttaaagctcattacttaaacaaaatgaaaacataagatccagagagttctttttatgtttgtttaagagcttcagaaaggctgggcaggctggcacatgcctgttgtcctagctactcgggaggctgaggcagaaggatagcttaagcccaggaatttgtatccaccccaggcaacatagtgaggcctcattaaaaaaaaaaaggaaagaaaaaagggttttagaaaacataatctgatgcacagattatagagttttgcatttttaaaaaatagatctaattgataagacagcaaaaaatgaatatgtggaacccagcaatttcattccacgtacacactagagcagtaatcagcaaacattttctgcatagaattagataccagatattttaggctttgcacgccatccagtctctgttacaaccactcactaggcctgaaaacggccttaggtaatatataaatgcatgagcatggctgttccaataaaactttacttatggacactgaaacttgaattttcatgtgtcataaaatattagtctttccatttttaaaaaccattcagaaatgtaaaaaccaccttagtgtctgggtcatacaaaaaaaaggtggagggtccacgggccagaccatggtttgccaatccctgctctaaagaacttttacaggccaggcacagtggctagcgcttataatcccagcactttgggaggccaaggtgggcagatcacatgaggccaggagttcaagaccagcgatggccaacacagtgaaaccctgtctctactaaaaatacaaaaattaactgagtgtggtgtcgcrcatccgtggtcccagctacttgggaggctgaggcacgaaaaccgcttgaacccaggaggcagatgttgcagtgagccgaagtcgtgccactgcattccaccctgggtgacagagcaagactctgtcttaaaaacaaacagacaaaaagaactcttacatacacataactcaactacacatgagaatgttcataacatcattatgtgaattagcaagtatgca

SEQ ID NO: 697059 - DNA, 632 bp, Homo sapiens
taaaaagagctattttatctgactcaatacactggttggcaactttttaaggcaatcacaaaagcacaaagactaagtgaaaagagaatctagaatgaaaaacagaacataattttgccttaatgatggtacttgccaaacaaggtgacatgaagtgtcagttttcttggtcagcaggctatagggaacagtctatctataacctataataagaccgtgataccctcctcacaacccaccaccaccaaagacctacatgtgagagtaaattagaattaaggtttcccgactgacctccagcaaggtaaaactgcctgtcttcccccaaaattattttcttcctcagactttataaacataaacgaaccttcatatgaaatttctawcccaaattcgtattatttgatggaccagaaagattttaagccaagaatttaaagtggtcctgaggtggtagtgcccccaggttctaggtagaagcaaacgcagatcctattgggaaaaacctaaatgactcaaataattccaacagaaaaatttgcaagaaataatttgttctatctccaaatcacaaaacatagaaggcatcatgaaataagcccagaaagactggagttaacagtatgatcaga

SEQ ID NO: 697060 - DNA, 632 bp, Homo sapiens
taaaaagagctattttatctgactcaatacactggttggcaactttttaaggcaatcacaaaagcacaaagactaagtgaaaagagaatctagaatgaaaaacagaacataattttgccttaatgatggtacttgccaaacaaggtgacatgaagtgtcagttttcttggtcagcaggctatagggaacagtctatctataacctataataagaccgtgataccctcctcacaacccaccaccaccaaagacctacatgtgagagtaaattagaattaaggtttcccgactgacctccagcaaggtaaaactgcctgtcttcccccaaaattattttcttcctcagactttataaacataaacgaaccttcatatgaaatttctatcccaaattcgtattatttgayggaccagaaagattttaagccaagaatttaaagtggtcctgaggtggtagtgcccccaggttctaggtagaagcaaacgcagatcctattgggaaaaacctaaatgactcaaataattccaacagaaaaatttgcaagaaataatttgttctatctccaaatcacaaaacatagaaggcatcatgaaataagcccagaaagactggagttaacagtatgatcaga

SEQ ID NO: 697061 - DNA, 650 bp, Homo sapiens
tttccaagtctttgactaggcactaaaggctatgctttgtaaaaggttacctctaagtccaaaaaaaaaatctgctcaagtgagtttaattaatatcatttttgcatcactaaatatagagatccatcaaactctttcacaatattgttgatttttttgaccgctttagatcgaatcattctccttgttttagacatttacatctgcttttaagtttttatggytgcctgttggcaggcagcaaagtggatctgtcgatgctactgcagaataatgcaaggtttgttatgaattaaatattagaaaccttaacacagcggccaataagaattatttgccttattaaagcagcagaagacgctgattaaattttcattgcattgcagtctttttcccatttctgctttcaattcatcattctaatgtatgaaaggctcaccgaataatggcagggggacttaatttctggaatgcaaatatagcaaagaaaataccataaataccctcccagaaaacattaaacagtcagttctaattaagtgaatactaactaagtaaatattctcttaaagggaaaaaaataactcaaaggtaaagaatttgagaaggaaagcacaattacctatattacaaatatatacagatacaca

SEQ ID NO: 697062 - DNA, 1129 bp, Homo sapiens
gagagcttccagggcctcaataagccccagaatgccaaaaaattcaattcaggttggaccaggtttctagtgttctcaggaccaagtggacagacatggaatggggtgcaatggactgaatctcttgggtgacaggaatccaggaaagggccctgtcttagtctgctcgggctgccataacaaaatttcacaggctgagtggcttaaaccacagacatttattttgacatttctggaggctgggaagtccaggatcaaagtgctgacctggtagattcattctgaggcctctcctcttggcttgtaggcagcggccttcttgctgtgtrctcctgtgacctcttctttgggcattcaaagaaagagggagggggagagagacagagagctccctggtgtctcttcttttaagggcactaatcctattgcatcagggccccattctcatgacctcagctaatccttatcacctctcaaaagtcccttctccaaataccatcacattagggattagggcttcagtagaagacttttggggcaaaacaaacattcagtccatattaggtccctcaaaagagcctgcagtccaaaagaaaataaagggaaagattcctatggcatgccttgccaaagtgagcatgctctgggagtcaggaatgctccggcatttaggagcgagcaggggagagccagcagccgcaagaccactctctattgctttttattaaatctctgtttaagtaaacaaggaactgacagtcttgggagataaacaaaggacatggagtctgctgggtgagacttttccataaatgaggccttcttctccatagtcaagtgtgccaagaagagcaaaatgtaggagtaggcctaagaggcccaggaaagaagccaagtattggggtttccatttgcccagacgaggcgtgtccccaggggcatgggtgaatggagggcacatttccgggccctttgagtttacaaagcactttgtttcccagagactctgcagcttcgcctcatctccaggtggggacactgaggtccagcagagtgaatcgagttgtcccccagcaaggagaggtggagccctgtctctctgcagccatgccttaattttgccttcaca

SEQ ID NO: 697063 - DNA, 563 bp, Homo sapiens
gagtggggcctctgcagcagtctgtgcggaaagccttggagagcggccgtgggtcctggcaatgacatcatctctggcatcattggcagaggggctggcacttggcgcctgtgcaggtggatatggagggtgcttgctatctgcaatggagcccttggcctgggaggtctggccaatcaggcaactgtactatgcctcagtttcctcatcaacagatgaggactctacctttccaccaccccacaggtgtccatccagggtcaccatgacacagcgtgcacagaagagctttggaatgacagagatgccagtgggctgcagggcattatgcacacagcccagaggggactgcagtgtgacaaagtaacttcttgggaaaaacacccaagatrtgcagtggccacagctgacataacctccggtcggatacagggccaacaagtgtgcgagtgcagccttttagcaggtggaattcacagaagtgcagtttgggactgcagccccattccctcctggcttccttgagactgaggctgtgcaagtgccagggtgcccatttcccc

SEQ ID NO: 697064 - DNA, 596 bp, Homo sapiens
gccacacccagacagccggcatggattattcctggatccagcctaaccataaagtcccccttttgtctccttgtttacttatttctcttatayaactcatttctccaaaaatccagtatctgacatggcctccctgtaaatacctgagaggacaaagatatgtgctcacacatacagatgcacagacacacagacatgtatacaaacatattcccacacagacatacccacacatacacacacacggacacacacatacatgcacacatgagtgcacacacatgcatacacacatgtaaacacatgcatgcacacatgaaaacacagacacacacacacacacacgcacacatacacagtaaatgcaatatccagaccgaagactgacagccaacaagatcatgattcaggaggaactccactcctggtaaatatggcaggtgaatttggaaaagccattggtcatccactcatgcctggccaattttcaactaggacaggcctcctgcttaaaggaactcggaatggcatcgtgcccctccctcaccctggtccccagttccaaggaaatatgcatccgtgcttcttttgtgcaa

SEQ ID NO: 697065 - DNA, 814 bp, Homo sapiens
tcttccaagaaggaagaggagaagcctgctgacatccacagggggaaagacattcaaccagcaagggcaacacagggaggcaagttaagtcagtggggccggggacccatgcccaggttggtgagaagctaaggtgtgtggatgtgtttcctgctaagctgatgcctgtcactacagcaccattatttgaatgcctgcctatggggcactgggtaccgagagcaggtgcacaagacaatagacctcatgcagggggagaaaaagtagggccccacagcccaatgcactttcatctgggggctccttgagggtcagagatggcccttatatgtctttktgtctcaggccctgttgggtctgtatagttctcaggacttgacccacagctgacggaacctgagggagccctgtgggtgctgagggcatgcttcagggacaggaaggctggccctaaagacttgtccccacctcatgatgcattcaactaagtaaggtgagcttcttcatctcagcctttcacgaaagaggctgcatgggttccaggaagctagtctggagtaacaaagcaccaacatttcggtagctgaggacagcagaagttgagttgttgcccatgcagcagtcctgagagtgccctggctcctcatgcgtggtctctgggtggggtctttacctgggctgctccagggctgcacatggatgctacggttacttggaaggagccaagggctgaagagcaggcgttcctatgtccagctcaggcattgctcatgtctgtgcatgttccatggcagaggacatattcccatggctg

SEQ ID NO: 697066 - DNA, 814 bp, Homo sapiens
tcttccaagaaggaagaggagaagcctgctgacatccacagggggaaagacattcaaccagcaagggcaacacagggaggcaagttaagtcagtggggccggggacccatgcccaggttggtgagaagctaaggtgtgtggatgtgtttcctgctaagctgatgcctgtcactacagcaccattatttgaatgcctgcctatggggcactgggtaccgagagcaggtgcacaagacaatagacctcatgcagggggagaaaaagtagggccccacagcccaatgcactttcatctgggggctccttgagggtcagagatggcccttatatgtctttgtgtctcwggccctgttgggtctgtatagttctcaggacttgacccacagctgacggaacctgagggagccctgtgggtgctgagggcatgcttcagggacaggaaggctggccctaaagacttgtccccacctcatgatgcattcaactaagtaaggtgagcttcttcatctcagcctttcacgaaagaggctgcatgggttccaggaagctagtctggagtaacaaagcaccaacatttcggtagctgaggacagcagaagttgagttgttgcccatgcagcagtcctgagagtgccctggctcctcatgcgtggtctctgggtggggtctttacctgggctgctccagggctgcacatggatgctacggttacttggaaggagccaagggctgaagagcaggcgttcctatgtccagctcaggcattgctcatgtctgtgcatgttccatggcagaggacatattcccatggctg

SEQ ID NO: 697067 - DNA, 2301 bp, Homo sapiens
gcaataggaatcactgtgtttgttgaatctacttgagtttatttaaaattatttgttgtacgtgtgggaaagcttgcccgagcttggggtttgctgcttgtggcttgctgttggagttctgccatatagycacctgtgtttcatagccggctatctgattacagtggagatgcagtatctgactctatatatgttctcgcttgtcttacatcttccgaatttcattgaatataatcacgttaaggtaaaatgtgtttaaactgctaatggactgggccattgactttaacgacattctcaatactacatttaattatcgtacaagcttttcttgatgatcatatttcccaggatcagttggagttatgttaagtacacttaggcagataataatgaatgaaacaactcttttataatctaggagaagtagaagctcttattatgtggaggatgaggcagacactatgcaagcacccatggggcacgtgaccatgctgaggactgtcctgcaccagtgcagagagttttggcacatcttagagaagatgctgatgttctggaggcagatggcactgagccaggcagccccatggctgggtggtggttggagagagtactggagacaggaagcgctctcagtggcaaccagggttcctctgggaagtggctgctgctgtttctggaatgacactgtgggtcccaagccatcttctagacagtggcagattcctgggccagccctgcagagtctttttgtagcagttagaacttggcaggaaacaggggacccattcaatctggggtatttgagcagagtttagtaaggggactatttaccaattgtggtcaagatatgaggaggagatcttaagggagagtgtgatctccctgagctgctaacaccaggggcatgactaggccttggagggcagggaagagtggtcactagccccagagagcattgcctggcagcagctatggcagctggtggagagaggcagttacaactgccatctgatagggaggttgctggaggggcaatcacacctggcgccacttcatccttggaatctcctgccagtgcccctcattgactaaaccccaagctgaagggtaaagctaaagggtaaagaagccatatgatgcacccagacctgtccacctcctgggcatggagcaggaggagggtgagggtgaggacaaagagcagacaaagcacaatccctgtctgcaaacctctccaggccagaggcttgctcatggccaggcccaccatagaagcttaaccagtaagagaatactgaatcgttctcagagaaggaagaggtggaataagagaaggatctggttttggaaagtttgcattctagtcctgatatggtccctgactggcatggacctgggcaactcatgggaccccaattttctcatgttcaaactgaggataacgatggtcatccctgaaggtttctgtggggcccatatagaaatagaaatggagcaaatatagagtacactcaaagaaggggaaccagcaaaggcaaagctgtggaggtgtggaggtgtgaatgtgtggtcatgtccagtgaaagaagcagagacagaagaagagagctggcattctcctgatcacagggcccctggggccatgccagggagttcagaattttcttagactactgaggagcagagagctcaggcagcaagggctgggggcttggcctttgtcagcaacaagaacagaacaaggggcttgaagaggaatggaacttagggaaaggccagcccaatgactgattgtttcagctgccagtgtagagaaggtaggaggtttgtccaacagtgtatgaatcctatgttagttattagtgtaacagtattatcacaaacttagcagcctaaagtgacatattaatatctcagtttctatcagtcgaaagcctgagcatggcttagctgtgtcctctgcaaggcgttaattatagtattggtatcagggctgtattctcatctgaaggcacaactggggaagatctgcttccagaaccatgtgtttgttggtgatgttcatttccttgcagatcaaagatggggaggccaagtttttggctggctattggctggacatcagcctccactcctgcgatgtggcctctgcatagggcagctcacaacatggtgactgacttgcttcttcaaagcctgcaaagagaaggtctgctagtgaggcagatgtcacaatcttatgtaaggtagtcacatgcaacttgtcattctgccattttctgttggttagaatca

SEQ ID NO: 697068 - DNA, 601 bp, Homo sapiens
gtacacagtttttacgttttaagtaaaagagatcacaagtgactaattaaaataacaatgagagtactgtaagtattccaaaayagttttttctagtggtgatatttagggtgtatatttggtttggattttgtgtatatgtatttctaagttacctacagtgaatacatttgtggacatcaaacactctatgtttctttttttgtgatagcttgtgcctgacctaattctacattagcgagcagattgaagaagtgaggagacatcagatagatgtagacgcttcaccaaggagtccccctgcagtgccacaggggcagtaggctcacttattccatatccttggcatttgcagggatagacatacacagggaggcatggggagctcctgaggagcaaggacagatggtcaatggtgggaaaaagttacagtgccatataccctctttcttttaatggaaactcagggatggatggtctggccataaactattaatagtacctctggaaaataataatactcaatacagggcccatcaaaactgtttctcaaatttaaaagagccacagggttgcagaacggggacttagaaatattaga

SEQ ID NO: 697069 - DNA, 711 bp, Homo sapiens
ttaggagagaatttttgttaaggtttgaaaggtcaaagaatttaaatgtatgcccctctagccctacccccaccctgccccaaaaaaggaaaagtacggactggagaaatgagaaataagattgtggtaaaaaacaattccatctgattgctaaaaagattgttgtacttaactatattagcatttaaatggccctggtaggacatggaggaaatacctacacgctaatgcaaaaaaggtagggaagctgtcaggtttgcaccttttttgtctcattgtttaagtggagccagtttttttcccaggctggataaacagactgcagtgaaggtgaaacagacattgagaaagctaatattgcttacaaaaaagcaaataaaaatttttaattacaaacactgtaaagctgagaaattgagaatgttaattactatatgcttttctactgrtgtgtttgggaactagtgattcccaaaccttgcagactatcaaaaccacaaggggaggttttcataaatgtagatttacagttcccttcctgtccccattctgattcagtgggtttggggtagagcccaggagtctgtaaaacactcatccaagtgattccgacacacaggctaggctgggatcagacacagctgatgaaatgcaaaggtgaggcaaaacaaaccgggagtcacatctctcccagcccaactgtaaaatgca

SEQ ID NO: 697070 - DNA, 622 bp, Homo sapiens
aggagtcataggaccagattggtattttagtaatgctcgtgccagggtagagaatgggttgcacagaaggcacagggcttgacagatcagatcaaaggctgttgcaacaatccaggttggatccagtccaaactaatggtgtgatcctgccattaaaaaaaaggaactcaytggagaagtttctgaggttcggggcatgagctttggagtcaggtgggctgaatgctggttctcaacctcttcttagccatgtctgtaacgtcatcaaaacctcaccttgcttatttcatatgagatgaaatctgctgtctgggtcattttgcaaatgaaattggggttcatgctcaactgcacaaggttctcactccatcagtggtgacagtgatgatgatgatgatgatgataatgacagacaatactttggtgactgattggctttaggctgagggtaagtgacagaagagtacaggatacctccaaggtttctaattgggtgagtgaaggcacacattgtcaaccgggctgggggcacagaaagaggacctggtttagaaaaaaaaaaaaaaaagtagtgcatttggttttgaacatgttgtgctaaggacacctaccagaatttgtt

SEQ ID NO: 697071 - DNA, 622 bp, Homo sapiens
aggagtcataggaccagattggtattttagtaatgctcgtgccagggtagagaatgggttgcacagaaggcacagggcttgacagatcagatcaaaggctgttgcaacaatccaggttggatccagtccaaactaatggtgtgatcctgccattaaaaaaaaggaactcactggagaagtttctgaggttcggggcatgagctttggagtcaggtgggctgaatgctggttctcaacctcttcttagccatgtctgtaacgtcatcaaaacctcaccttgcttatttcatatgagatgaaatctgctgtctgggtcattttgcaaatgaaattggggttcatgctcaactgcacaaggttctcactccatcagtggtgacagtgatgatgatgatgatgatgataatgacagacaatactttggtgactgattggctttaggctgagggtaagtgacagaagagtacaggatacctccaaggtttctaattgggtgagtgaaggcacacattgtcaaccgggctgggggcacagaaagaggacctggtttagaaaaaaaaaaaaaaaagtagtgcatttggttttgaacatgttgtgctaaggayacctaccagaatttgtt

SEQ ID NO: 697072 - DNA, 1044 bp, Homo sapiens
atgccaacttgccttttagtggatttcttggctttcttgaaagtatcctctaaaaaacatttttaaatgtttgggcgtttaaaaattatttatgtgtggtgtgaagagtaggcagcacctatcttaagaattctgtgtgaccaggaaaggaggtggaattcctgaacagaagcaatgcaaatacacagagaacttggtgagttggggtcatatgtggatatgtaaatggtctatgctgtataacttattacaggcatgagcgattgtatgcctgtgttaactctgctgtgtcaaagtcatttcctatttaaactgaatttgtagaccacggaagaggatcaggattaattatgtctgtgaggaagaagaaaagcaaatagctcacttgattaaatacattacaataatcactacattctgtcctttagacctgtgctgtccaatagggtagccaccagaccttatggtcactgagcacctaaaatgtgctcctagtacaactgagagactgaattttaaattttacttaattttttaacagttaaatttaaatttaaaagctgattctcagctcaattattggaaaatgttaagtacgcttggaataatttgggtatatacacctatttttttcaattatgaattttatgacatctaaatatagatcacctatttctggtaaaatttagcatctgaattgagatatattgtaggtataaaayacacactggacttcaaagacttagtataaaaaaggaatgtaaaatatctcaataatgtttatattgatgatgtgtcaaaatgataatcttttgtatgtattgggttaaataaaacatattattaaaatgaattatacctgcttctttttacttttttaatgtggctatagaaaattttaaattacaattacggttcatatactgtttctattgacagcacagccctagactaagccgctttggaattcaagagggagtaagtgatgaggttccattgactgggaagtcttcaagtgtgcatggtgctaactctctgagccca

SEQ ID NO: 697073 - DNA, 626 bp, Homo sapiens
aaaagttcaaagtaagtgttatgtcactgtttaattacacattatgttcattcttagtgatacctaaaatgatgctgcatcttaaaatcaatgatatcttagatttgatgaaatacaatataaggtaatcataatcaatgtaaagaaactagacttccccaataaaatacagatacttacaaattatattttgaaaataaagcttcggtgcatgcctgtagtcccagctctttgggaggctgaggagagatgattgctagagcccaagagtttgaggctgtagtgagctatggtcatgatcactgcactctagcctgtgtaccaaagcaagaccccatctctaaaaacaaamcaaaacaagaacaacaaaaattaaaagtaaaaaagtgggggaaatatctgaaaaatattaacaatcacaacagcaaaacttaatataaacatataactaccaaaaaaaatcattttaagtggtaaaagggaggaattattagggataaaaagggttattgctttataatgaaaaggacaattcaccaggaagatagaacaattttgaacctttatgcacctagcaacatagcctcaaaacaacaacaacaaagggtagatttactggaaagaac

SEQ ID NO: 697074 - DNA, 2325 bp, Homo sapiens
ggctggagtgcaatggtgtgatattagctcactgcaacctctgcctcccatgttcaagtgattctcccacctcagcctcccgagtagctgggactacaggcacatgccaccacacccagctaatttttgtatttttagtagagacagggtttcattatggtggccagactggtctggaatggctgaccttgagatccacccacctcggcctctcaaagtgttgggattacaggtgtgagccactgtgcccagccagttcagtttcaatggcagagaaatgggtcatgatcagaggcttttacacatgcatgcttaaaactaactaaaagtaataaaacgagagctataatcatcctaacgcaaaaacgaaaacagtacttagagctcagtattcattagtctctgttctaaaacgttcacatgtagcattgacttgtttaatactacatgtaagtattatttttatactaatttaatcaatgagttcaattccaagaaaagttaaagaaccaaggccaccctgctaatgcatgaaggaactggcactaaatacaggctttctggctccagagtgctatgtatgctaaaatacggagtttgagtgttgattttggaaaaaacacctaaagatgcactctacgcgaatgaaaggtgaattgaatttagtaatttagtatcgtaaattttggaaatactaaaggacttctacctctggcttgaccattgacaatggattttgtggcccaggggtaatgtacatacaatgaaaaataggaagagtgaaaaatctggaaagaattacaaccaagttttaacatagatcgctgttgagtatagaaatgattatcttcctctgataattttctgtatttttctttttctattggttagccatgagtgcctttataacagcaagaagaaactattttataactttcataacatgacagttaaactctttcgatgtgcttcactatttgtgtgatttgtcttgtactgttgtcttttgcaccgtcatcatagggtatgtttgaacgttagctgtaagcctatgccagagaaccattggttggtcccattgtaccactgtcatgggttgtctgatgttaaggaaatgtagccatatttcttgtgctgaacagatgttaagggaataaaaagcccggcataggtggatatgtgtggaagaataaatatcttggtttgtgtttgcttctctgatgtttcatttaattgcttattttattttgacttgcctttgatatatccaatgaagagcaaattcttcttgaaggacaaaatacagggtttttttcacagaggtagatacgttgatctttttgatattgtctctctcttcagaaaattaatagacatttctaaaataagcctacactcatttttctttacaaaaataacaatataaggtcacatatgaaaatatatgaaatcacagcatggtttatagtctggcccatcctagcgggaatcttatcattagcctcaaaagatttctacagagattaggccttgtttcttgatactttcctaaaacaaattgttatagggtcccaatatggtaaaattccattcaaagacctattcatgggtgaaaaggggttcctggaaaatccactgtttctaaaattatatactggtggagaaggataacttgtacataacacattctatcttaacaggattgtgcttttagttagagtctgtttaaaatcataaatatccagagtgccaaatttagtaattttatgtggattagtaagagaactaaaaaatatatcaggtgataaaaggtttaagcttgcattagtacatcagatctggattgaacctttccaatatatgtagaagcaagataaaatggaaatcttgcatttctttttgcatgaattatttattcccgatcttaaactctgcttattttactgcttgaagtgacttcctttgctgtttcctttttggaaatcctagttcagctagaatagaacaatgaggaacatattttctratgagattgtttttcccaaaatctaaaatatggtgatagcgcatatgtgaattggattgtcatttcactgtaaataaatttgcttgcaaccctttgtcgaagtctggagaggaatttaaatatgtctttatatatttctatatataactctatggagtattgtgtcattttaaacaaaatttcatggaggatataaaatctttagataatgtacataatataaaattacatatatattttaatatatatgtgattaatctcctctgaactataataatacattacagaaaaaagacatg

SEQ ID NO: 697075 - DNA, 2590 bp, Homo sapiens
cttccctctctttgttctgatgtcacactagcattgcagagtgaaggttctcttgcccaatcctgctttttcttccctttattatttatagatgtttatttaccccgaagaatttcttgcattgccaattccaccaaggcaaaggtttcccagaggaccagaattgacagtgtgtattacacctacatatagatacatatatgtatgtatacattgatacccatgtatacatttacatatgtttatgtgtgtgtgttttttgtagacatacataggcatgtgcacatatgttcacaaatgcacacataaacatgcacttattcaacccagagtccttggaaggaatgacattctgaaagttggaacaactaaccttctcacacagatatgtatgttagagaaaatacagtatttttttcactgtcttgataaatactcttatcgataggcaagaacccaagtacttatgtggggggtggcagaccatgaaatttattaatggcattgttatttaaagtcattattaaaaagtcaaagtgaaaactaaactaaaacccaataggtaaataaccaatagatctagtctattccattacaggaaaaagtcttatttggggtttagtgggtaggacttcttggagtatatgaatttttcagtttttaactggcatttgttgatgttatttggattcaacttctatgaataatctcttctaagtatgtaaccaaggactaaggctgacctggaataagaatgactatcttcactcaaatagaagttcacatttatcaaattatttcaagaatcttttgatatgttgtccttgaacatggatagatttcaggctactcatgacatttacattaaatttcatctgatggtatgttgatgaccatcaaccttttgattaaaaatttattattttgaaattacattatgttgaaaatttctaaaaccacacaaaaacattttgcccaaacaggatatttgggggatggtctttaaatataatataattccatataatatttatctctgcatgttagagtgaagtttattctcatcctaatttaaaatagtcttataaattgagtattgatgtgagaagtaatttcgataatatttttaaaggtacccttgtagaaatgcaatggattgatacttttcatattttacatcaattagtttttatataaaatatatttactttttatcttatgcaaatatattttatataaatttaattaatatcaaatcttgcagtttttttctttgaaaatgtccaatttacctttttctctttaactgtttacatggaagtctagccaaatttatacaattaaaataatttctatgaagttcgattttgcaatgaatgggtacattaggcagaagcccttttaaaatctgaatttctcagggtttttctcgagcattcttgattcaacatgcatgacttgaacttggaaatttctattacccttaatcagaaaagatgtagtccatatgttgattaggaaatatgctttctgaacatgtgcttttacaaacagaaagaaaaatatatttcatgcaatttyaaactttttaaatgccaaaagatgaaaaaaaaaaaagcgtcagggactttttcaatgcccattgagtgtaagttaaaaggttttgtaaaatatttacataaaagcaaatttgttatctttaggccaatctgatcctgctatgagagaaaaatattatgtgtttttcctcagtgtactctattgaaaattagtttatgtctgcacactagcagatgctaagttattttaaagagaaaggaatgtaagtcagaggatagtataatgagaactgtgccttcttcccctctctcatcactggccctcaggattccaacattctctttattagctttgggagacagcatggttcaggttggttgttcaaggggtaaaatagtacatgtacatcataaaacatttgcaaattttttttgagagagaaagagcatattttaaaagctgataaaattctcaaactctctcttatcctggacttcaaacagttcttcaaaaatccaaacgcaaagaatgtctaaatgaaacatattcggggatttttgaagttataggtgcataatatgtgaaccaatcatggaataaatatttgaaaagttttgggaaaaattatctcagcagtttcctcttccatgattgacacttctgccctgtgtagctgagtatacttagacaaatacactactggcaagatatattctctgaaagtctatggattgaagggctgcaaacagctaaaaacagtatttgaaaaaatgggactgggaacccagtagcttgggcacagtttcaaaaaacaattgtttcacagttaaacattagaatcactcaaatacctacagtaatttggagaattatctcacgatgatctggaagatcattatctgagtgggttaagcaaacatatctgtgaatctctgcctctgcttcagcattaaaagaagtctggggtctttcatcaaacatgattttaatgctgttatggattgaatgtctgtgtttccttcaaatgtat

SEQ ID NO: 697076 - DNA, 2590 bp, Homo sapiens
cttccctctctttgttctgatgtcacactagcattgcagagtgaaggttctcttgcccaatcctgctttttcttccctttattatttatagatgtttatttaccccgaagaatttcttgcattgccaattccaccaaggcaaaggtttcccagaggaccagaattgacagtgtgtattacacctacatatagatacatatatgtatgtatacattgatacccatgtatacatttacatatgtttatgtgtgtgtgttttttgtagacatacataggcatgtgcacatatgttcacaaatgcacacataaacatgcacttattcaacccagagtccttggaaggaatgacattctgaaagttggaacaactaaccttctcacacagatatgtatgttagagaaaatacagtatttttttcactgtcttgataaatactcttatcgataggcaagaacccaagtacttatgtggggggtggcagaccatgaaatttattaatggcattgttatttaaagtcattattaaaaagtcaaagtgaaaactaaactaaaacccaataggtaaataaccaatagatctagtctattccattacaggaaaaagtcttatttggggtttagtgggtaggacttcttggagtatatgaatttttcagtttttaactggcatttgttgatgttatttggattcaacttctatgaataatctcttctaagtatgtaaccaaggactaaggctgacctggaataagaatgactatcttcactcaaatagaagttcacatttatcaaattatttcaagaatcttttgatatgttgtccttgaacatggatagatttcaggctactcatgacatttacattaaatttcatctgatggtatgttgatgaccatcaaccttttgattaaaaatttattattttgaaattacattatgttgaaaatttctaaaaccacacaaaaacattttgcccaaacaggatatttgggggatggtctttaaatataatataattccatataatatttatctctgcatgttagagtgaagtttattctcatcctaatttaaaatagtcttataaattgagtattgatgtgagaagtaatttcgataatatttttaaaggtacccttgtagaaatgcaatggattgatacttttcatattttacatcaattagtttttatataaaatatatttactttttatcttatgcaaatatattttatataaatttaattaatatcaaatcttgcagtttttttctttgaaaatgtccaatttacctttttctctttaactgtttacatggaagtctagccaaatttatacaattaaaataatttctatgaagttcgattttgcaatgaatgggtacattaggcagaagcccttttaaaatctgaatttctcagggtttttctcgagcattcttgattcaacatgcatgacttgaacttggaaatttctattacccttaatcagaaaagatgtagtccatatgttgattaggaaatatgctttctgaacatgtgcttttacaaacagaaagaaaaatatatttcatgcaatttcaaactttttaaatgccaaaagatgaaaaaaaaaaaagcgtcagggactttttcaatgcccattgagtgtaagttaaaaggttttgtaaaatatttacataaaagcaaatttgttatctttaggccaawctgatcctgctatgagagaaaaatattatgtgtttttcctcagtgtactctattgaaaattagtttatgtctgcacactagcagatgctaagttattttaaagagaaaggaatgtaagtcagaggatagtataatgagaactgtgccttcttcccctctctcatcactggccctcaggattccaacattctctttattagctttgggagacagcatggttcaggttggttgttcaaggggtaaaatagtacatgtacatcataaaacatttgcaaattttttttgagagagaaagagcatattttaaaagctgataaaattctcaaactctctcttatcctggacttcaaacagttcttcaaaaatccaaacgcaaagaatgtctaaatgaaacatattcggggatttttgaagttataggtgcataatatgtgaaccaatcatggaataaatatttgaaaagttttgggaaaaattatctcagcagtttcctcttccatgattgacacttctgccctgtgtagctgagtatacttagacaaatacactactggcaagatatattctctgaaagtctatggattgaagggctgcaaacagctaaaaacagtatttgaaaaaatgggactgggaacccagtagcttgggcacagtttcaaaaaacaattgtttcacagttaaacattagaatcactcaaatacctacagtaatttggagaattatctcacgatgatctggaagatcattatctgagtgggttaagcaaacatatctgtgaatctctgcctctgcttcagcattaaaagaagtctggggtctttcatcaaacatgattttaatgctgttatggattgaatgtctgtgtttccttcaaatgtat

SEQ ID NO: 697077 - DNA, 649 bp, Homo sapiens
ttaaattaaaaaagaaaattatataagctctatatttatattaacttttactgaagtaaaacctaaaataataaccaatctgattttaggggtttgacagaactttgattaatgtaagcctttttctaaaaaggagcagagaatagagaaaagaccaaaaaaggtgatcrtgtgtattagtgtacaaataatctagattagtgtcaatggggtgaagaatattttagccagatctccctcacaaccaaggtatatttcccagaaggcctcttggctgtaacagtcaatatatacatgcttgtccacaagccttctccactggttatgcctctgttatttgctattcacacactaatgttcctttgacttctgttcttgccagagcctattgctatttgtagccccacataaaacgcataaaatgcttaagcagtgtggggggatgtggaacattcaaggataatatatgctagagtaaccgcaaataagggacttctacaaaagatggaggggcacttttccttatcactctcaatctgaaaaatatttatacttttattcatttctatgtttatatttttcttgtcaaagcctaagctgagcactttttttaagattcttcatgtaaaagagagccaatataatcagg

SEQ ID NO: 697078 - DNA, 649 bp, Homo sapiens
ttaaattaaaaaagaaaattatataagctctatatttatattaacttttactgaagtaaaacctaaaataataaccaatctgattttaggggtttgacagaactttgattaatgtaagcctttttctaaaaaggagcagagaatagagaaaagaccaaaaaaggtgatcgtgtgtattagtgtacaaataatctagattagtgtcaatggggtgaagaatattttagccagatctccctcacaaccaaggtatatttcccrgaaggcctcttggctgtaacagtcaatatatacatgcttgtccacaagccttctccactggttatgcctctgttatttgctattcacacactaatgttcctttgacttctgttcttgccagagcctattgctatttgtagccccacataaaacgcataaaatgcttaagcagtgtggggggatgtggaacattcaaggataatatatgctagagtaaccgcaaataagggacttctacaaaagatggaggggcacttttccttatcactctcaatctgaaaaatatttatacttttattcatttctatgtttatatttttcttgtcaaagcctaagctgagcactttttttaagattcttcatgtaaaagagagccaatataatcagg

SEQ ID NO: 697079 - DNA, 649 bp, Homo sapiens
ttaaattaaaaaagaaaattatataagctctatatttatattaacttttactgaagtaaaacctaaaataataaccaatctgattttaggggtttgacagaactttgattaatgtaagcctttttctaaaaaggagcagagaatagagaaaagaccaaaaaaggtgatcgtgtgtattagtgtacaaataatctagattagtgtcaatggggtgaagaatattttagccagatctccctcacaaccaaggtatatttcccagaaggcctcttggctgtaacagtcaatatatacatgcttgtccacaagccttctccactggttatgcctctgttatttgctattcacacactaatgttcctttgacttctgttcttgccagagcctattgctatttgtagccccacataaaaygcataaaatgcttaagcagtgtggggggatgtggaacattcaaggataatatatgctagagtaaccgcaaataagggacttctacaaaagatggaggggcacttttccttatcactctcaatctgaaaaatatttatacttttattcatttctatgtttatatttttcttgtcaaagcctaagctgagcactttttttaagattcttcatgtaaaagagagccaatataatcagg

SEQ ID NO: 697080 - DNA, 576 bp, Homo sapiens
gcagttctttccatcaagtatagatgtagcccgaggcacttaaagaaagaaagagagaagggaaaaaatgcaccatttcctaygtgagatggaaaggagtttggaccgtcttgcctcttgagtcctctggacacatggtgagaacccactggcagtggagggtgtttgttaggtgagcccaaggcttggcctaggtgctgtctttcaggggcagcttcctgaattaatatctttccttctcatatctaagataaaatgtggtgataaggtattttgacatacaatagaaaacctaaaaattaccttggtggcattaaaaaaattcattgatacggtggacaaacaaatctgtgacataggaaaacaaacttgaggatagagtactgaagatggtaaacaaatactacagggatataacactgtgagagaaaaaggagagaggaaacactcagtccaggaattgcacagtttctatgaaactcttggaatgaaaaatattaaaaatcaattgagaaaatcaattatcaattaaataattaaagaaaacttttttaggttgaaaaagattaatatgta

SEQ ID NO: 697081 - DNA, 576 bp, Homo sapiens
gcagttctttccatcaagtatagatgtagcccgaggcacttaaagaaagaaagagagaagggaaaaaatgcaccatttcctacgtgagatggaaaggagtttggaccgtcttgcctcttgagtcctctggacacatggtgagaacccactggcagtggagggtgtttgttaggtgagcccaaggcttggcctaggtgctgtctttcaggggcagcttcctgaattaatatctttccttctcatatctaagataaaatgtggtgataaggtattttgacatacaatagaaaacctaaaaattaccttggtggcattaaaaaaattcattgatacggtggacaaacaaatctgtgacataggaaaacaaacttgaggatagartactgaagatggtaaacaaatactacagggatataacactgtgagagaaaaaggagagaggaaacactcagtccaggaattgcacagtttctatgaaactcttggaatgaaaaatattaaaaatcaattgagaaaatcaattatcaattaaataattaaagaaaacttttttaggttgaaaaagattaatatgta

SEQ ID NO: 697082 - DNA, 541 bp, Homo sapiens
tccaagagtatgtgtcacgagaactagttaaataaataatgataccaactcaaaaagggacccaatgcatttatattatgagggaagctctctctgctccaatggacaaaggtcttcaggatatggtggtaacagaaaagagcaaagaggagaatagtataaacagtgtgccacaattatgtagcaaaatacatctgttaatatatttgtgttaatatttccagtaacactcaaagatcatgcaagaaattcatcaaaatggctatctttaggggacaaggctggcaagaaatgagtctggcacagatggggtgacagaaagattttttgatacataactttttatattgttttgatttttaacccyatgaatatatttcctattcaaaagaaaattagcatcatcaaacacacacaaacattcctgcgtctaagacagataactaactctcagagacaatatggtctaactcatgggttggcacactatggcctgtggaccacatctatgcactgcctgtttttgtccagcaggcaagat

SEQ ID NO: 697083 - DNA, 841 bp, Homo sapiens
atggcttcaaagagataatagagctcaaccgaaatagctaagccattctccccatttataaatatcacataaagtctcctcttcaaaagctgaagggtataaagctcctctgctgaaagcagcctctctcttctacccagtgagaacgagtgctggagggaggaaagccatgggggccaagggtcccgctatgccaggcatcatcttccctatccccttctctttctcctctgtatcaacagtgctcccaataatgaccatgatcatggcagagctgggcaggggcagcaagggacacacctagatcttcagttccagaggcatctgttctgttgctgacagcgaggacccttacggaatgcaagagaccaacacacaccaaggctgagaagctaactagtacacaacctaagtttaatggcacgtattttcataaaggctatgaaacgcaaatcaactacatttcctcccttttccttctgccaagacgtattaatggcatcaactccaatctctatcccaggcaggttttcaaaccgggaaaagcatggcttcacagtaaacctgactctgccattctttccatgtctmaatggctttccatcacctttcagggtctcctgaacatctcccttcttctctcgtcacatcctggacgtgatctcacacactcatgggcctaatccatcattctttcattttttttcattcctcaaactatttttgagcatctactgtgctccaggcactattataaaaaaaaaaaatgcaagcatgaacattgcactgcttttgtcttcccaatgtcccagtggagaagggagacttctagattaaaaaa

SEQ ID NO: 697084 - DNA, 1535 bp, Homo sapiens
ttatacacttttaaaaaaatgcaatatttgctggacacggtagctgttgcctgttatcccagcacttcgggaggccaaggtggttggatcacttgaggccaggagtttgagactagcctagccaacatggtgaaaccccatctctactaaaaatacaaaaattagccgggaatggtggcacatgcctgtagtcccagctacttggggggctgaggcacaagaatcgcttgaacccgggaggcagaggttgcagtgagctgagatcgtgccaccacactctagcctgggtaacagagtgagatagattctgtctcatagaaaaagcaatattaaatagaaataggagtttaaaatcattttgtctttaggatgattgtttgctttgttttctttgaagagtattaattttaggttatccctacgtgactattaattgctatcaccagatactgtgaatttattatttttttcttttttattcatagtgtatttttatttttaatttgtatgggtagagggaagaaagacatctttaattggattaacattttagttaattaagataagccataggtgagtgataaagagaaaagagataggcttttgattcacacaatactaaatttaatttctagcttcctcacttgataggtgtgaccttgcaaacattagttaataccaactatgattttctatatgaaaaggagaataataatatgtcctttaaggacgattgtgttgaagtaacattataaatatcaacagcatttaattcagtgtttcatacattcttatcagcatcattaagtaaacttactgtaactactactaatatcattattcctaatactgttttaagccttcagattgctcttatttgtctgacttctagctgattttgaagtacaaaatattatatcagartaaggaagaaatagataattcttcacttaaatctttgcctcttttaggttagtgaacaaagcataagtctttgcccctcaaaggactttatgttagccaattctagtatgccatattccagtgggacatgagtctttttgccccttccttttagccttggtggtgatttacaaggataaacacttgagcactcaagatagttatgtttgttagtacatgtaaatggttaattctacactgacaggcacatattaaattggttctgttcctaacaatgaagttaactctttgttattttagcacagccctcatgcttgccatatgtcatggagcatgagagatagttggcatggttcttcagcaaaatgttgacatctgtgctgaagatacatgtggaatgactgcagaacgttatgctgttgcttgtggacttaatcggtgtttacatttaaagactaggtgagattttatagtttgtttcaggtaatttttgaatgacagtgagttagttcacttcatcggccagaaactagtcaaaaagctagactagttagaaggaataatgggtccaggattctttattttaggactttcaacagctttatccctag

SEQ ID NO: 697085 - DNA, 1425 bp, Homo sapiens
tgaggaaagcactaaccattttcagaattttaaaaacttcaattcatagtcacttggcacctaagttttcacatgtgctggtgaaatgaaaaaaaaaaaaaaamaaaatttgtaatagaatctttctttctttctttctgtgtttctttctttctttctttctttttctttcttttctttcttttctttttctttctttctttctttttccagctcagtgtggggggaagagtaacagggcaaagtggtgttgttgaaagcattggccatctaacgcttccatatagagacaacttattctgtgagtggcatctccaggggctctccagacactatctcaccaactctttcgaagattttaaccttcagaattcctctggctgtgaaaaagactttgtggagatctgggactatcatacttctggttagtgaaatatatctgctctctttggggtgtttattttcgcatgtacttattcagcctctgaagtttctgcacttccgagaaaggcaaaagcatgtctatactctgcagagaagtgcagattaatgagctttgggcagtaccagtgattctctacctcaattctaccattacaatggatgtccagagcccaggtgtcatatagcctaccctggaggccacctggggagagcaatggtagtgggaaggcaacctgttgctgctgaggcatcccattgccacatgccattatttgaggggtgttctatagcttgaggcagacagagggtcatgcatgtctcctggcagtagcataaggcagatatttgtcactctgtttgtctcagaccactttttcaaccagataagcaagccttcctcattgtcctgagatatccttcccctaactggttgcatttttttcacttcttcatatatttgaacatgttaattttcattcatgttttcctgttttcttgacagagagtaacttttcttcatgggcaaggtcttgttttttattattttctttgtatacgcaggacacctcgaatagaggttaaaagaaatcaatcacctggacatatatatttaattatttgtctctcacaggaaacatcttgggaagatactgtgcaaacaccattcctgacagcatagacacttctagcaatactgccgtggtcaggtttgtcatagacggctctctgactgcctcaggattcagactgcaatttgaatccagcatggaaggtgatttcattgattaattcaaaacaacattgagcacctgcattggacagacactatgctaggcactggtgttacaatagtttgaaaagcaaaataaaacatgacctctatcttcttggaccttaatcaaaaagttacactgacaaatgaaaaattacagctgtgatcaatgctataagggaaaactagttataataagaggatgagag

SEQ ID NO: 697086 - DNA, 1425 bp, Homo sapiens
tgaggaaagcactaaccattttcagaattttaaaaacttcaattcatagtcacttggcacctaagttttcacatgtgctggtgaaatgaaaaaaaaaaaaaaacaaaatttgtaatagaatctttctttctttctttctgtgtttctttctttctttctttctttttctttcttttctttcttttctttttctttctttctttctttttccagctcagtgtggggggaagagtaacagggcaaagtggtgttgttgaaagcattggccatctaaygcttccatatagagacaacttattctgtgagtggcatctccaggggctctccagacactatctcaccaactctttcgaagattttaaccttcagaattcctctggctgtgaaaaagactttgtggagatctgggactatcatacttctggttagtgaaatatatctgctctctttggggtgtttattttcgcatgtacttattcagcctctgaagtttctgcacttccgagaaaggcaaaagcatgtctatactctgcagagaagtgcagattaatgagctttgggcagtaccagtgattctctacctcaattctaccattacaatggatgtccagagcccaggtgtcatatagcctaccctggaggccacctggggagagcaatggtagtgggaaggcaacctgttgctgctgaggcatcccattgccacatgccattatttgaggggtgttctatagcttgaggcagacagagggtcatgcatgtctcctggcagtagcataaggcagatatttgtcactctgtttgtctcagaccactttttcaaccagataagcaagccttcctcattgtcctgagatatccttcccctaactggttgcatttttttcacttcttcatatatttgaacatgttaattttcattcatgttttcctgttttcttgacagagagtaacttttcttcatgggcaaggtcttgttttttattattttctttgtatacgcaggacacctcgaatagaggttaaaagaaatcaatcacctggacatatatatttaattatttgtctctcacaggaaacatcttgggaagatactgtgcaaacaccattcctgacagcatagacacttctagcaatactgccgtggtcaggtttgtcatagacggctctctgactgcctcaggattcagactgcaatttgaatccagcatggaaggtgatttcattgattaattcaaaacaacattgagcacctgcattggacagacactatgctaggcactggtgttacaatagtttgaaaagcaaaataaaacatgacctctatcttcttggaccttaatcaaaaagttacactgacaaatgaaaaattacagctgtgatcaatgctataagggaaaactagttataataagaggatgagag

SEQ ID NO: 697087 - DNA, 1425 bp, Homo sapiens
tgaggaaagcactaaccattttcagaattttaaaaacttcaattcatagtcacttggcacctaagttttcacatgtgctggtgaaatgaaaaaaaaaaaaaaacaaaatttgtaatagaatctttctttctttctttctgtgtttctttctttctttctttctttttctttcttttctttcttttctttttctttctttctttctttttccagctcagtgtggggggaagagtaacagggcaaagtggtgttgttgaaagcattggccatctaacgcttccatatagagacaacttattctgtgagtggcatctccaggggctctccagacactatctcaccaactctttcgaagattttaaccttcagaattcctctggctgtgaaaaagactttgtggagatctgggactatcatacttctggttagtgaaatatatctgctctctttggggtgtttattttcgcatgtacttattcagcctctgaagtttctgcacttccgagaaaggcaaaagcatgtctatactctgcagagaagtgcagattaatgagctttgggcagtaccagtgattctctacctcaattctaccattacaatggatgtccagagcccaggtgtcatatagcctaccctggaggccacctggggagagcaatggtagtgggaaggcaacctgttgctgctgaggcatcccattgccacatgccattatttgaggggtgttctatagcttgaggcagacagagggtcatgcatgtctcctggcagtagcataaggcagatatttgtcactctgtttgtctcagaccactttttcaaccagataagcaagccttcctcattgtcctgagatatccttcccctaactggttgcatttttttcacttcttcatatatttgaacatgttaattttcattcatgttttcctgttttcttgacagagagtaacttttcttcatgggcaaggtcttgttttttattattttctttgtatacgcaggacacctcgaatagaggttaaaagaaatcaatcacctggacatatatatttaattatttgtctctcacaggaaacatcttgggaagatactgtgcaaacaccattcctgacagcayagacacttctagcaatactgccgtggtcaggtttgtcatagacggctctctgactgcctcaggattcagactgcaatttgaatccagcatggaaggtgatttcattgattaattcaaaacaacattgagcacctgcattggacagacactatgctaggcactggtgttacaatagtttgaaaagcaaaataaaacatgacctctatcttcttggaccttaatcaaaaagttacactgacaaatgaaaaattacagctgtgatcaatgctataagggaaaactagttataataagaggatgagag

SEQ ID NO: 697088 - DNA, 666 bp, Homo sapiens
ggaccatgagctcctatagggcaggaatgaagttgtgttcttctttgaaacccctggcacaccgtggtcaacagatcttgtttgactcgtagtggtcaatagatggaatagttggaatcataaagctcaatagaccccatgagaacctagaagacaaagtacagtcaagagctcggactttggagttggctaggcctggactgaatctgattctacaacttaatagctgagagggccttggttttcccatctgtaamgattataattattataatgaatacctacctcctagggatgtaatgaggattaaaagagaaagtgcaggtaaactgtttagcacagaacctggctcacagaacacaatacacattagctgctattattattattattattttatttatttattttgagacagagtctcactctgtcacccaggctggagtgcagtggcgcaatctcggctcactgcaacctccacctatcgggttcaagcaattctcgtgtctcagcctcccaagtagctgagatgacaggcgtgtgccaccatgcccaactaatttttgtatttttagaagagacgtggtttcaccatgttggccaggctggtctcaaactcctgacctcaggtgatttgcctacctctgcctcccaaaatgctgggat

SEQ ID NO: 697089 - DNA, 666 bp, Homo sapiens
ggaccatgagctcctatagggcaggaatgaagttgtgttcttctttgaaacccctggcacaccgtggtcaacagatcttgtttgactcgtagtggtcaatagatggaatagttggaatcataaagctcaatagaccccatgagaacctagaagacaaagtacagtcaagagctcggactttggagttggctaggcctggactgaatctgattctacaacttaatagctgagagggccttggttttcccatctgtaacgattataattattataatgaatacctacctcctagggatgtaatgaggattaaaagagaaagtgcaggtaaactgtttarcacagaacctggctcacagaacacaatacacattagctgctattattattattattattttatttatttattttgagacagagtctcactctgtcacccaggctggagtgcagtggcgcaatctcggctcactgcaacctccacctatcgggttcaagcaattctcgtgtctcagcctcccaagtagctgagatgacaggcgtgtgccaccatgcccaactaatttttgtatttttagaagagacgtggtttcaccatgttggccaggctggtctcaaactcctgacctcaggtgatttgcctacctctgcctcccaaaatgctgggat

SEQ ID NO: 697090 - DNA, 666 bp, Homo sapiens
ggaccatgagctcctatagggcaggaatgaagttgtgttcttctttgaaacccctggcacaccgtggtcaacagatcttgtttgactcgtagtggtcaatagatggaatagttggaatcataaagctcaatagaccccatgagaacctagaagacaaagtacagtcaagagctcggactttggagttggctaggcctggactgaatctgattctacaacttaatagctgagagggccttggttttcccatctgtaacgattataattattataatgaatacctacctcctagggatgtaatgaggattaaaagagaaagtgcaggtaaactgtttagcacagaacctggctcayagaacacaatacacattagctgctattattattattattattttatttatttattttgagacagagtctcactctgtcacccaggctggagtgcagtggcgcaatctcggctcactgcaacctccacctatcgggttcaagcaattctcgtgtctcagcctcccaagtagctgagatgacaggcgtgtgccaccatgcccaactaatttttgtatttttagaagagacgtggtttcaccatgttggccaggctggtctcaaactcctgacctcaggtgatttgcctacctctgcctcccaaaatgctgggat

SEQ ID NO: 697091 - DNA, 646 bp, Homo sapiens
ttattctcaatgtaattccccagggcacacagacaaccaggtccctgtgccactaggctgtgcctattgggattctcaccctcctcagctcataaatcaagaaagagaaatatttgggcccatacaaaaccacagcagagggctgggccttgcccagaagttgcctctgagtggagtctgtacgtgcgtgcgcgtacgtgtattcgttggcctgtctgtgtgttttcccatcagcacaggtgcctgctggggccacgctgtacaccacaggctctcctctctctcaagatggaggtcggggtgtagctgcgtttggggagcagctgccacatctccttaggcatgtagcagcctgcgtgtgctccggagacagagcagcgtgggtgaggctcagggtttgcctgccccagtggcctctgctccagaacaggcttgtctgggcctgcccacccytaatctaaccacagaattggggaactgactgaaccccaatttctaggggggtacagcttgaacgccaaggcttctgccactgtctccatggccttggcccaaaccttattggcaagaggccaagtcaaagggcctcacgtgggtgctggaggttccagatccacaggccatctcctgggttctgaaagggtca

SEQ ID NO: 697092 - DNA, 605 bp, Homo sapiens
cctcagcctcctgagtagctgggaccacaggcacacaccaccacactgggctaattttgtttacttctgtagagacagggtctgtgttgcccaggctggccttgaactcctggactcaagcaatctgcccaccttggcctcccaaagtgccgggattacargcatgagccagggcacccagccagaaatgatatttaaactacggctggaaggatggttggtgtcaaccaagttgagaggctggagtggtgatgggaagagaggaattgtgtctcagaaaaagggaacagcatgtgcaatggccccgaagcgagcctgatccgcggtgtgattctattgaaacctgcaacaccctaagagggaacttttaattttgctgatgagaagacgaggcttgaggaggttcggccaccggcctgggactcagcaggttgcatcctgagcccctggggttttcctgaggactcagcctgagtcacccaggactcagccgagtccagaagaccagcctcccttacctgtggaaaatgttcaaaaagtttcagggttaatgaggtttctgggggggaaactcattgtgaaggagaaagcattaaaaaagagca

SEQ ID NO: 697093 - DNA, 605 bp, Homo sapiens
cctcagcctcctgagtagctgggaccacaggcacacaccaccacactgggctaattttgtttacttctgtagagacagggtctgtgttgcccaggctggccttgaactcctggactcaagcaatctgcccaccttggcctcccaaagtgccgggattacaagcatgagccagggcacccagccagaaatgatatttaaactacggctggaaggatggttggtgtcaaccaagttgagaggctggagtggygatgggaagagaggaattgtgtctcagaaaaagggaacagcatgtgcaatggccccgaagcgagcctgatccgcggtgtgattctattgaaacctgcaacaccctaagagggaacttttaattttgctgatgagaagacgaggcttgaggaggttcggccaccggcctgggactcagcaggttgcatcctgagcccctggggttttcctgaggactcagcctgagtcacccaggactcagccgagtccagaagaccagcctcccttacctgtggaaaatgttcaaaaagtttcagggttaatgaggtttctgggggggaaactcattgtgaaggagaaagcattaaaaaagagca

SEQ ID NO: 697094 - DNA, 658 bp, Homo sapiens
tttccttcttcttgccttctgtttcttttaaggcatcatctattgtgttaatttgttcttgtattccttctgatttattcttcacttctgaaatgaattttgctttttaaaaatatatataattcttttctgtgtctgagtttttctaattaggttttatgtggttttttcttgtcctgcatcactttttactgtcttttgcccattttgaagtatcaggttccagttttgatctgttcatggatatgtttttgtgacatgtttcttctggcttcttatcatttattgcttagcttattaatttctattctttcttattttctattataagtatttaaagctatatgttttcctctaagtattacttagctgtcttayacgttttcatttgtgttatttggtgatcattcactttcagctatttattaatttccattataattctttcatctatgggttgttttaaaaaatatttttaaggccaggtgtggtgactcacatctgtaatcacagcacttagggaggctgaggtgggaggattgcttgaggccagaagtttgagaccggcctaggcaacaaagtgagaccccctctctacagaatatttttttaaaattagctgggccaggagtggtggctcatcccagcacctgtaata

SEQ ID NO: 697095 - DNA, 644 bp, Homo sapiens
cctcgggaggcaggcaaatcgcttgaacccgggagacagaggttgcagtgaaccaagattgcaccactgcactccagcctgggctaccgagcgagactctgtctcaaaccacccccgacccaaaagaaaacactctaattatatgatatcaaccttttattaaacaattccacatgagtggaaaaaaaatactcagcagatatagactagaaagacacttccttctcatgataaaggaaattaacaacaagcaatcctaatttccctagtaagagagtctacacaatctgctaggacagagcaagtccactccagcccagctctcgcaccagttaaaactaaaaacactggacaaatacaaaaagcaactacctcccaacactggaaaaacaacatttgagtgagtttcccagaattcttttttctctattatcttccagctttgacccgaaggtgacccgagtgctgaactatgcagcaggcacaggcaacaaaatctcttagtaaaactctgtctctctggccagaggactgggaaaatgkgtccttgtgagttggagaagtatgggtggaatctttgtttctttctttctttgtctctttcctctcccaagctctgtcccgagagtgagtccagatgcaga

SEQ ID NO: 697096 - DNA, 2166 bp, Homo sapiens
gacatgcgccaccacgcctgactaatttttgtatttttagtagagacagggtttcaccatgttggccaggctgatctcgaactcctgacctcaagcgatccacccacttcagcctcccaaagtgctcagaytacaggtgtgagccaccatgcccagccatcttgtcttattaagaaaaaaatttttcttaatttcttactgtatatttttttctcccataattttatttcattttaatagaaaggctggaacttaattatctgatgatatcttaggtaaggttaccccaaaagccgaccctgaggcaaggatttgagtagcagtactttgttcaggagattatatcagtagttatggataagggactggaaaggtaagatgaacatgaaatgagagcagattacttatctgcgagcacctgggcctcacttctgttggaggactctggaagatagttttctacattcagggggaagaaggtgaaaatgtttgtccgccaaactctctgagtgattgactgaaatctacttctgagaatgctgactctctgatacttctagcctgccccagcatgatgaatgagagggtagcagcagccagagaaacccctcaggcacagagttacaagtaccttcagttggtagctgttggattggcaggtactagaatagtaaataattgtctattgttgcataataaattacttccacattttgtgggataataatgtttctaagccattgtttctgtgtatcaggaaatcagcttaactgggtggttctggatcaaggtttcccataaagttacattcaagatgtcagccaggctgcagtcatctgaaggcttgacgggggctggaggatccacttccaagatgcatggctgttggcagaagggctcagttctttgctggctgttaggaagaggccccatgttcttaccatgtgggcccctcattagggctacttgagtattctcaagatatagcaactgatttcttcagagtgagcaacacaagacagagcacaaggagaaaaccacaatgccttttataacctagtattgacagtcacacaccgttacctagtcctgccatattctattttggtaagaaggaaatcactaattccaatgcacacactcaaggggaactttatcatcaccttttgaaaggaggtatgtcaaagaatttgtggacttatttgagaaccactacagtggatatgggaagatataggctgggcaccaatggcatctgctaatggtgggtctatatatcctatgttttacctgtcaccatcctaggttcttacattttctcacaaaaggcataaaggatgagtgaatctgtcttctttctttctttctttctttctttctttctttctttctttcttcttcttcttcttcttcttcttcttcttcttcttcttcttcttcttcttcttcttcttctttcttcttcttcttctttcttcttcttcttcttctttcttcttcttctttcttcttcttcttcttctttcttcttcttcttcctcttcttcttcttcttctttcttcttcttccccttccccttccccttccccttctccttctccttcttcttcttcttcctcttcttcttcttcttcagatggagtttcactcttgtctcccaggctggagtgtggtggtgtgatcttggctcactgcaacttccgcctcccaggttcaaatgattctcctgcctcagcttcctgagcagcttctgagtagctgggattacaggcacatactaccacacctggctaatttttgtatttttcgtagagatggggtttcaccatattggccaggctagtctagaactcatgacctcagtgatcctcctgcctccaaagtgctgggattacagacatgagctaccataccccacctcaactgcttcttaaaatttactttatcccttcccaaacacatacacattctctccctgactcctcctctttaccccctgtcccaaccgaaaggttatttttttaccactagacaaatggatctcaaacaaattacttcttcacatcagagtctctgtattgcactaccctggaggcaccatcacattttaatctaacaactatgatgctgagcagcttggtggcatgccaacctctatattcctt

SEQ ID NO: 697097 - DNA, 625 bp, Homo sapiens
aggcggaggttgcagtgagccgagatcgcgccattgcactccagcctgggcaacaagagcgaaactccgtctcaaaaaaaaaaaaaaaaaaagatcaccttgggctagcctcccaaatgtcttccaaaacttcccactcattctccttcccagtttttctaaatctaccaaatgcacccaacacttcttacgttccttttagccaggtagggattacgcgcatttttaaagacctccttaaaagtgaaggctgtagtaccgtcaggactgcctagcgctcacccagaagctgcttgtctccgaggcactaagaggggcgtggccatgggcgtggctcgccgggccggcggagtgggcggagcctaaaagcttccccgcccggtcagactcaacacatgcgcccagaggtttctagtggaacgaggtgtggattgtgaggtgactctggccgcttacttccggttcctagcgatgcgcatccgggtcacgctaacgccgcggtttcctccgctcgattggttctactgtgggtctggactgatctccatgtcctgttgtggggcttttacagcctttgggtgagtctcagctgccracagggtctgagcgcagccgggcgagcaca

SEQ ID NO: 697098 - DNA, 618 bp, Homo sapiens
ctttagaactcaaaatgctgtaacctaaaaacttttgccacccaaatggaaaaatagaaaaatgcataattacagttgaagatatcatcacttctctctcaacagtctaaagcagcagtccccaacccttttgggcaccagggactgatttcattgaagacaatttttccatggacaagagggcggaggagtgggaagggtagtgaggtgggtgtttcgggatgaaactgttccacctcaagtcatcaggcattagtcagattctcataaggaacactcaacctagatccctcacatgcccagttcacaacagggttcgcactccttgagaatctaatgcctgagctgatctgactgctggctgagctcacctcctgctgtgcggcctacttcctaacaggccacagagttgyaccagatcagtatcgggtaggcacccctggtttaaagtacaaggagacaaaaactcagtaaggatatagaagacaatatgccactgaacaacagcagcatacaaattatttttgtggacacatagaacacgcaccaagacataccatattctggaacgcacaacatctatcgacaaagtttaaagaaatgacataatacatagca

SEQ ID NO: 697099 - DNA, 649 bp, Homo sapiens
cttaagtctctttctttttttttcccctagcactaccattgtgttagtccgctcaggctgctataacaaaatattttaaattgagcagcttaaacaacagacatttatttctcacagttctagaggctgggaagtccaagatccaggtgctggccaatttggttcctgatgaggacacttccctgccttgcagatggccatgtttctcctgtgtcctcacatggtgggaaggaagaggtggggggagggagagagagagacactaatcccatcatgagcgctccaccstcaccacctcatctaaacttaatgacacccaaaggcccacctcctgataccagcacattgggggttaaggtgtcaacacaggaattttggggggacacaggcatttaatccataataaccactttactaatctactcaagataatgatttcaaaaataaagagagttcggatacaggtctcaaatgaggggagtccaggaatcaagaaatctgagagagagtaaagcaaagagtagaggaaatgggattgttctgccaacaaggacaagggactctagagagaagagggtgaaatgaggttcagatacaaatacataaattacgatcgtagtgcttggaatagaaagaaaggaagttgaag

SEQ ID NO: 697100 - DNA, 649 bp, Homo sapiens
cttaagtctctttctttttttttcccctagcactaccattgtgttagtccgctcaggctgctataacaaaatattttaaattgagcagcttaaacaacagacatttatttctcacagttctagaggctgggaagtccaagatccaggtgctggccaatttggttcctgatgaggacacttccctgccttgcagatggccatgtttctcctgtgtcctcacatggtgggaaggaagaggtggggggagggagagagagagacactaatcccatcatgagcgctccaccctcaccacctcatctaaacttaatgacacccaaaggcccacctcctgataccagcacattgggggttaaggtgtcaacacaggaattttggggggacacaggcatttaatccataataaccactttactaatctactcaagataatgatttcaaaaataaagagagttcggatacaggtctcaaatgaggggagtccaggaatcaagaaatctgagagagagtaaagcaaaragtagaggaaatgggattgttctgccaacaaggacaagggactctagagagaagagggtgaaatgaggttcagatacaaatacataaattacgatcgtagtgcttggaatagaaagaaaggaagttgaag

SEQ ID NO: 697101 - DNA, 1791 bp, Homo sapiens
ctaatcacaataaatttaggagggttttcttactaaaatttaacagtaacgtacttcaatcaagtaaagctttctgaccctttttagccttaggtgaacgattgtagaagcatttaaaaatgataccaattccatggctgtcaacatattttgaaacatttgctttggtaaagaataggtgctattaaaaaatcccacctctagctaatagcaataaaaggcagacaccaaggtaagaagtcaactttacatgcagacaataagtaaaatgttctaagtagaaaaatcaggatgatgcaggaatgtctgttcatgccttttaattatttttatttttatttttattttttttgagacggagtctcattctgtcacccatgctggagtgcagtggcgccatctcggctcattgctttttttgcctcccaggttcaagtgattctgctatctcagcctcccgagtagctgggactacaggcgcatgccgccacggccggctaattttttttgtattttagtagagatggagtttcaccatgttgcccatgctggtcttgaactcctgagctcaggcaatccacctgcctcggcctcccaaagtgctaggattacaggtgtgagccaccacgctcggccagtgatttttttagaaaggattcatgcctcaactaaaaaaaaatctcaacgagaatttttcaaatttccacagattccttcaataattttttgtggtttaaaatttttaatactactaacatagcttacttaattaaactaaagacaattccaatattagttattttaaaaacttaaaacacttggctcataaaaaagaccctgtcattttacatgcaagcttctctgataagaatgcctgtaatcattttcccaccccattaatttctaattttcttttcttcttcttttttttctttttctcgatctgtcacccaggctgcagtggcatgattataactcactgcaacctcgaactcctgggctcaaggaatcagcctcccaagtagctgggactacaggcatgcatctccacacttggctaatgatttttttggttttttggggktttttttggtagagatagggtattgctatgtggcacaggctgggcttgaactcctggcctaaagcaacacccctgtcttggcctcccaaagtgctggatattctgatttttttagagaacattatagatgttccatttgtgaatttatctgagctagaattttggaagctatttaaaatttcagcctatatagttcttggaataacaaaagcaattcttaaatttagtgtattctgtgtgaaatatagtttagaaaggctcaaaatcaacaattaaaaacaataaataaatgaaaatttgcacagcttaatttatctggcatctctggggaatgttgctgttgtataatttttgctttaagcatcagaatttttctttaatcttaggcatattttacaaaattctaaaatgtatcgtaattctctgggtcaccattaagaatacattttgttctataaagtaaaattcccaggggctgttatggaagtaagagctgtttttttgttctattaaaaagctgcgctatttgagttcttgtgtctagcttttctaatttttctgccttctccctggtagttttaacatgaattcttactccctactctctccctcatctgtcttattaattttatctttactcttcttgagcaggtaagccagctaatcaattactagaattatgtctaaagtaagagcaaatacaacct

SEQ ID NO: 697102 - DNA, 2336 bp, Homo sapiens
tcaatgatatgcagtagaaagaaaccatggtctgctgttttgtgaagagtagtgtgccttgacttgggggtacaggaggaagaggaatgcagaggagtgaggatcatgggaaaatgttgaacttttctgttggagtttcttcgccactatgaaggaaaacattttcccattaaaatagaaatactagaatcatatacataacatttttggaatttaatccaaaacttcatctgttccgttaaaacatacataaagaaaaggagtaataaaataggttgggactaataagcagcagattatattactaagatttttcactattactgtaattagttaggtctggctgattatggcttttagagcaaagaataggatgaggaaaatgcagctgttttattatcactaacagagatgtggtgaacaatcctcttagatgttaaaaacgaaactgacccaggaagagagccctcatcagtaccagaccatgctggcatcctgatctcagactttcagcttgtagaactgtgagaaaataaacttatgttatttaaacctaaatacataagtacacctttatctcctttttccattctctttgtatgcttgggatccaggatacacaaattgaagttacttgtttaatgattttataactatgtcagaatttaagttaaaagtgagttactctgtatgtagaaaggctgaaaatagtacaactgcagtaattctgtcagctataagggacgtgtggactgagagggtagtcttaatagattgtgatcaactatatgtgaaaacattttgtatagtgagttgatgtgtagtttacatgtaaactaactcctttagttcgaaaggaattttattttacgttaaaagattattttaggctgggctttagtggctcacgcctataatcccagcattttgaggggctaaggcaggaggatcgcttgagcccaggagttcaagacyggcttgggcaaatggtgagaccttgtctctaaaaaaattaaaaaattagccaggcatggtggtgcgagcccatggtctcaggtaggatgattgcttgagcccaggtgatagaacaaaaccctatctcaaaaaaaaaaaaaaaaatttttttttttgtatgtatgtaactctttacttatctactacctaataatccacaaaaatacccacaaatccttaattacgtggaggaggaggagatgataatagagatcattttaactttgaaagataatggattccgggccagatgtggtaactcacccctgtaattcccaacactctgggaggctgaggtgggacgatagcttgagtccaggaattcaagaccagcctgggcaacatggcaatacctcatctctattaaaaaaaaaattattaagaaagaaaggggccaggtgcggtggctcacgcctgttaccccagcactttgggaggctgaggcgggcggatcacaaggtcgagggattgagaccatcctggccaaccaacatggtgaaaccctgtctttactaaaaatacaaaaataagctgggtgtagtgttgcatgccttttagtcccagctacttgggaggctgaggtaggagaatcgcttgaacccggcaggcagagattgcagtgagccgggattgtgccactgcactccagcccgggcgacagagcgagactccgtctcaaaaaaaaaaaaaaagaaagataatggatttggttctgccattagatctgggttggatcctgggtctgctatggtttctgtatccttagtccagtttcttaatttcttgagtcgtcagttgctccgtttataaaatggtgttcagtgatacctgtgtttttagcttctcaggcttgttgtgaggtgaacatataatgtttcatgtaaagcaccttttagatggtaaagcgctatgcagaactgttcttaactattacttctcccatttaaaagataaactgtctttctgattcttttaagaattctgtgctttccctgtctcattcccctccgataaactggagaaaaaagggcttagaatgatcacccatttttttacctaaccacttttcctgcatttacacattttttttttaaaagagaagaaataacatttttttaagagaaaaaagtcccagagagattaacttcttcaaggtcatagagctggtgacaaaatcaacagacctttgatttagttcattcatatctgtaactttatacatatttctacttaactaattttggcatattttacgctttttttttttttttaaaggacagggcctaacttgcccaggctggagtgcagtggtgcaattatgg

SEQ ID NO: 697103 - DNA, 2336 bp, Homo sapiens
tcaatgatatgcagtagaaagaaaccatggtctgctgttttgtgaagagtagtgtgccttgacttgggggtacaggaggaagaggaatgcagaggagtgaggatcatgggaaaatgttgaacttttctgttggagtttcttcgccactatgaaggaaaacattttcccattaaaatagaaatactagaatcatatacataacatttttggaatttaatccaaaacttcatctgttccgttaaaacatacataaagaaaaggagtaataaaataggttgggactaataagcagcagattatattactaagatttttcactattactgtaattagttaggtctggctgattatggcttttagagcaaagaataggatgaggaaaatgcagctgttttattatcactaacagagatgtggtgaacaatcctcttagatgttaaaaacgaaactgacccaggaagagagccctcatcagtaccagaccatgctggcatcctgatctcagactttcagcttgtagaactgtgagaaaataaacttatgttatttaaacctaaatacataagtacacctttatctcctttttccattctctttgtatgcttgggatccaggatacacaaattgaagttacttgtttaatgattttataactatgtcagaatttaagttaaaagtgagttactctgtatgtagaaaggctgaaaatagtacaactgcagtaattctgtcagctataagggacgtgtggactgagagggtagtcttaatagattgtgatcaactatatgtgaaaacattttgtatagtgagttgatgtgtagtttacatgtaaactaactcctttagttcgaaaggaattttattttacgttaaaagattattttaggctgggctttagtggctcacgcctataatcccagcattttgaggggctaaggcaggaggatcgcttgagcccaggagttcaagaccggcttgggcaaatggtgagacyttgtctctaaaaaaattaaaaaattagccaggcatggtggtgcgagcccatggtctcaggtaggatgattgcttgagcccaggtgatagaacaaaaccctatctcaaaaaaaaaaaaaaaaatttttttttttgtatgtatgtaactctttacttatctactacctaataatccacaaaaatacccacaaatccttaattacgtggaggaggaggagatgataatagagatcattttaactttgaaagataatggattccgggccagatgtggtaactcacccctgtaattcccaacactctgggaggctgaggtgggacgatagcttgagtccaggaattcaagaccagcctgggcaacatggcaatacctcatctctattaaaaaaaaaattattaagaaagaaaggggccaggtgcggtggctcacgcctgttaccccagcactttgggaggctgaggcgggcggatcacaaggtcgagggattgagaccatcctggccaaccaacatggtgaaaccctgtctttactaaaaatacaaaaataagctgggtgtagtgttgcatgccttttagtcccagctacttgggaggctgaggtaggagaatcgcttgaacccggcaggcagagattgcagtgagccgggattgtgccactgcactccagcccgggcgacagagcgagactccgtctcaaaaaaaaaaaaaaagaaagataatggatttggttctgccattagatctgggttggatcctgggtctgctatggtttctgtatccttagtccagtttcttaatttcttgagtcgtcagttgctccgtttataaaatggtgttcagtgatacctgtgtttttagcttctcaggcttgttgtgaggtgaacatataatgtttcatgtaaagcaccttttagatggtaaagcgctatgcagaactgttcttaactattacttctcccatttaaaagataaactgtctttctgattcttttaagaattctgtgctttccctgtctcattcccctccgataaactggagaaaaaagggcttagaatgatcacccatttttttacctaaccacttttcctgcatttacacattttttttttaaaagagaagaaataacatttttttaagagaaaaaagtcccagagagattaacttcttcaaggtcatagagctggtgacaaaatcaacagacctttgatttagttcattcatatctgtaactttatacatatttctacttaactaattttggcatattttacgctttttttttttttttaaaggacagggcctaacttgcccaggctggagtgcagtggtgcaattatgg

SEQ ID NO: 697104 - DNA, 2336 bp, Homo sapiens
tcaatgatatgcagtagaaagaaaccatggtctgctgttttgtgaagagtagtgtgccttgacttgggggtacaggaggaagaggaatgcagaggagtgaggatcatgggaaaatgttgaacttttctgttggagtttcttcgccactatgaaggaaaacattttcccattaaaatagaaatactagaatcatatacataacatttttggaatttaatccaaaacttcatctgttccgttaaaacatacataaagaaaaggagtaataaaataggttgggactaataagcagcagattatattactaagatttttcactattactgtaattagttaggtctggctgattatggcttttagagcaaagaataggatgaggaaaatgcagctgttttattatcactaacagagatgtggtgaacaatcctcttagatgttaaaaacgaaactgacccaggaagagagccctcatcagtaccagaccatgctggcatcctgatctcagactttcagcttgtagaactgtgagaaaataaacttatgttatttaaacctaaatacataagtacacctttatctcctttttccattctctttgtatgcttgggatccaggatacacaaattgaagttacttgtttaatgattttataactatgtcagaatttaagttaaaagtgagttactctgtatgtagaaaggctgaaaatagtacaactgcagtaattctgtcagctataagggacgtgtggactgagagggtagtcttaatagattgtgatcaactatatgtgaaaacattttgtatagtgagttgatgtgtagtttacatgtaaactaactcctttagttcgaaaggaattttattttacgttaaaagattattttaggctgggctttagtggctcacgcctataatcccagcattttgaggggctaaggcaggaggatcgcttgagcccaggagttcaagaccggcttgggcaaatggtgagaccttgtctctaaaaaaattaaaaaattagccaggcatggtggtgcgagcccatggtctcaggtrggatgattgcttgagcccaggtgatagaacaaaaccctatctcaaaaaaaaaaaaaaaaatttttttttttgtatgtatgtaactctttacttatctactacctaataatccacaaaaatacccacaaatccttaattacgtggaggaggaggagatgataatagagatcattttaactttgaaagataatggattccgggccagatgtggtaactcacccctgtaattcccaacactctgggaggctgaggtgggacgatagcttgagtccaggaattcaagaccagcctgggcaacatggcaatacctcatctctattaaaaaaaaaattattaagaaagaaaggggccaggtgcggtggctcacgcctgttaccccagcactttgggaggctgaggcgggcggatcacaaggtcgagggattgagaccatcctggccaaccaacatggtgaaaccctgtctttactaaaaatacaaaaataagctgggtgtagtgttgcatgccttttagtcccagctacttgggaggctgaggtaggagaatcgcttgaacccggcaggcagagattgcagtgagccgggattgtgccactgcactccagcccgggcgacagagcgagactccgtctcaaaaaaaaaaaaaaagaaagataatggatttggttctgccattagatctgggttggatcctgggtctgctatggtttctgtatccttagtccagtttcttaatttcttgagtcgtcagttgctccgtttataaaatggtgttcagtgatacctgtgtttttagcttctcaggcttgttgtgaggtgaacatataatgtttcatgtaaagcaccttttagatggtaaagcgctatgcagaactgttcttaactattacttctcccatttaaaagataaactgtctttctgattcttttaagaattctgtgctttccctgtctcattcccctccgataaactggagaaaaaagggcttagaatgatcacccatttttttacctaaccacttttcctgcatttacacattttttttttaaaagagaagaaataacatttttttaagagaaaaaagtcccagagagattaacttcttcaaggtcatagagctggtgacaaaatcaacagacctttgatttagttcattcatatctgtaactttatacatatttctacttaactaattttggcatattttacgctttttttttttttttaaaggacagggcctaacttgcccaggctggagtgcagtggtgcaattatgg

SEQ ID NO: 697105 - DNA, 2336 bp, Homo sapiens
tcaatgatatgcagtagaaagaaaccatggtctgctgttttgtgaagagtagtgtgccttgacttgggggtacaggaggaagaggaatgcagaggagtgaggatcatgggaaaatgttgaacttttctgttggagtttcttcgccactatgaaggaaaacattttcccattaaaatagaaatactagaatcatatacataacatttttggaatttaatccaaaacttcatctgttccgttaaaacatacataaagaaaaggagtaataaaataggttgggactaataagcagcagattatattactaagatttttcactattactgtaattagttaggtctggctgattatggcttttagagcaaagaataggatgaggaaaatgcagctgttttattatcactaacagagatgtggtgaacaatcctcttagatgttaaaaacgaaactgacccaggaagagagccctcatcagtaccagaccatgctggcatcctgatctcagactttcagcttgtagaactgtgagaaaataaacttatgttatttaaacctaaatacataagtacacctttatctcctttttccattctctttgtatgcttgggatccaggatacacaaattgaagttacttgtttaatgattttataactatgtcagaatttaagttaaaagtgagttactctgtatgtagaaaggctgaaaatagtacaactgcagtaattctgtcagctataagggacgtgtggactgagagggtagtcttaatagattgtgatcaactatatgtgaaaacattttgtatagtgagttgatgtgtagtttacatgtaaactaactcctttagttcgaaaggaattttattttacgttaaaagattattttaggctgggctttagtggctcacgcctataatcccagcattttgaggggctaaggcaggaggatcgcttgagcccaggagttcaagaccggcttgggcaaatggtgagaccttgtctctaaaaaaattaaaaaattagccaggcatggtggtgcgagcccatggtctcaggtaggatgattgcttgagcccaggtgatagaacaaaaccctatctcaaaaaaaaaaaaaaaaatttttttttttgtatgtatgtaactctttacttatctactacctaataatccacaaaaatacccacaaatccttaattacgtggaggaggaggagatgataatagagatcattttaactttgaaagataatggattccgggccagatgtggtaactcacccctgtaattcccaacactctgggaggctgaggtgggacgatagcttgagtccaggaattcaagaccagcctgggcaacatggcaatacctcatctctattaaaaaaaaaattattaagaaagaaaggggccaggtgcggtggctcacgcctgttaccccagcactttgggaggctgaggcgggcggatcacaaggtcgagggattgagaccatcctggccaaccaacatggtgaaaccctgtctttactaaaaatacaaaaataagctgggtgtagtgttgcatgccttttagtcccagctacttgggaggctgaggtaggagaatcgcttgaacccggcaggcagagattgcagtgagccgggattgtgccactgcactccagcccgggcgacagagcgagactccgtctcaaaaaaaaaaaaaaagaaagataatggatttggttctgccattagatctgggttggatcctgggtctgctatggtttctgtatccttagtccagtttcttaatttcttgagtcgtcagttgctccgtttataaaatggtgttcagtgatacctgtgtttttagcttctcaggcttgttgtgaggtgaacatataatgtttcatgtaaagcaccttttagatggtaaagcgctatgcagaactgttcttaactattacttctcccatttaaaagataaactgtctttctgattcttttaagaattctgtgctttccctgtctcattcccctccgataaactggagaaaaaagggcttagaatgatcacccatttttttacctaaccacttttcctgcatttacacattttttttttaaaagagaagaaataacatttttttaagagaaaaaagtcccagagagattaacttcttcaaggtcatagagctggtgacaaaatcaacagacctttgatttagttcattcatatctgtaactttatacatatttctacttaactaattttggcatattttacgctttttttttttttttaaaggacagggcctaacwtgcccaggctggagtgcagtggtgcaattatgg

SEQ ID NO: 697106 - DNA, 601 bp, Homo sapiens
ctgtctcattagatgagaagcaaggttatctaagttttctaggtttactggagagtgagtcttgcattccccattagatgataagttcacatgcttagcaagcagagaggtagagtcgttgggttttgtaaagaaagcccactaaaagaggctgctgttcaatcccacctggaaggaggaaataggaaattactagaccaacatccytaatggctaccacactaggagtgtggtcttgggcaagctacctaattttttccctgaatttacaaattgagatgataatcatattttctacacaataggaccactatagaatgaaatgaaaaaagaaaaccacccagcccttgcacagtgcttggaatatagcaaatgttcctaaatgttagatattatgacttttgtttcctagcttgataaaaaattataaagtttacagtcgcaggaaaaatagaattttaacatatgtttcgcaatttacactgcagatctgctgttcttttgacatttctataatatttccaagtgtagctatgtttgcccctctgggacactgaggtatgaggttggcatggtaagggggaaacattatctcggtttc

SEQ ID NO: 697107 - DNA, 644 bp, Homo sapiens
tatgcccttctgtggatctcattcctgtgtgacctcacaatacagtacggattttaactgagacacatggaaacatcaggtgagcccccctctcagagcagcatctcagctacctgggcctgtggtcacagaccttataagttggggtgattcatatccactcatattcacagcaacattcacaatcccaggactgctcccagatcatcacagtctatttctgaaggtggtgaccccaatgccattgctatggggcatcygggaacgtatgtccctccagtgtctgctgagccactggtacatgcaacagttccattgttaggcagcggaatccagggtaaataaatttagacacaccagctccaccactgactggctgagtggtcttgggcaagattacttgcctcaatatttctaaaagtgtaaaatgtggataggatattattatctagtttatggagttattttgaggattgaaatgagataatcccttgaatgttaatttcttccacttgttctggatgtgtttaagcccttagtattcaggcagttgcagcagggttcatttaatttggaagagagggagggagaaagaagggaagaaagaaaacaaatcagaaaagaagaaagaaggaagggaggaa

SEQ ID NO: 697108 - DNA, 644 bp, Homo sapiens
tatgcccttctgtggatctcattcctgtgtgacctcacaatacagtacggattttaactgagacacatggaaacatcaggtgagcccccctctcagagcagcatctcagctacctgggcctgtggtcacagaccttataagttggggtgattcatatccactcatattcacagcaacattcacaatcccaggactgctcccagatcatcacagtctatttctgaaggtggtgaccccaatgccattgctatggggcatccgggaacgtatgtccctccagtgtctgctgagccactggtacatgcaacagttccattgttaggcagcggaatccagggtaaataaatttagacacaccagctccaccactgactggctgagyggtcttgggcaagattacttgcctcaatatttctaaaagtgtaaaatgtggataggatattattatctagtttatggagttattttgaggattgaaatgagataatcccttgaatgttaatttcttccacttgttctggatgtgtttaagcccttagtattcaggcagttgcagcagggttcatttaatttggaagagagggagggagaaagaagggaagaaagaaaacaaatcagaaaagaagaaagaaggaagggaggaa

SEQ ID NO: 697109 - DNA, 416 bp, Homo sapiens
aaaaggaaagttctccttaaacgtttctttttatcagagaaggaactttttggggagaaactccttaggagacttccctgtaagtttcgttagccagggttgtatcacaggccattgccttagycagtctcttgcatgatgaatcaaattaccaagaatgcttatactaattgagtcattgtgcatgtaagtttttgaacaaacctaaaaaaaaaaaaaaacaaaacaccggtcacacacacacgtttcatcctgggaacatttctatatgcaaaaactgcatggcgtaatcctaagagaattattttcacttacgaaattattatctgacaacaaaaaagatgattaaaaagtagaataaattgcatagtatgatgcacacagaatgctattgttgcaataaattgtaagcttca

SEQ ID NO: 697110 - DNA, 1190 bp, Homo sapiens
  misc_feature 1173: n = A,T,C or G
gtaattgcaagattcagttactttctcacacatcatcatcctaccatccttcagtgtttggcccagtgaactgtaagctcactaaaaaaaaaaaaaaaaaactccaaacgtgctagatcatcagcagataaagtcttaggaaaattgaattattcagggctttctagactgaataacaacagtaaattatttttaaagaagctttataatagtcttgtcttctaggcaagtgctagatgagttcatgtatttggtctcattttactttcacaataatcctgtgaagcagacattgccatctctagtttacatctgagaaatgctaggttcagagaaattgaaaaacttgatccacaaagttgctaagtggtcctgatcatagacctccttcttccaaagcacagccccctcttccatccattaacccattagggaacaagatgctttgtataaattaattttgcagataaattttcgagcaaaacaaaaattttaaaccaaggggttttaaaattattttttacaggtatcatttcaaaaatttattcttaaagaatagaaacataatttaacatcttcttaatggcatagtcatattatgaacatctatttgcacagtccatgcaacattcttgtgttcttgcttcctcattcagcattagattcttgttaagcgctgctaacatttttgctttttacaattgtgtcatactatttctattctacaagagtatttcaaaaacaattaactagaacatgaaatagccaaagtattaacagctacttgaaaaacaggccaaaccatttttgcattagaacatcaagaatactgtgtttgcctttggttagggactgctttgagacataatttttattgggaaggggttttkgggggtttttgttaggtgggggatggcagttgccctgtttggtgttctttcaggcattaatgggaattctaataaaaaaggactctacaggcaaatacatttggaaagtgctgcatgccatttcttagccttggatattcacaagatattttggcatgtgtttttaatgccccagtattttatacttattctatagctaagtagatgatagatgcaggagtagatgtagatttaggtactagggtttatgtgggacactttttcgtataaagcagcccagcantgtatcttgcaggcaat

SEQ ID NO: 697111 - DNA, 2318 bp, Homo sapiens
taaatagctacggattgtttggggaagactggaaggtgatctttgtaggtcttccacatctgtacctggcttgtatgaggctgtgattttctactagggtgactgaagtcaggccttttttcactctatttataagttttcattatgtggatcaaattaggctgcccatttattttagttaaaagtgttatgagaaaagcttgggactgtaatgtccccttcacactgggaaggaaccaagagactaaagaatgacttgaacaagtcaagtttgataaatagatgagtttattaagacttacagaaagggtactcctggatggcagcaggacggctttagagatctgccctcactcccatctccaaactgcttttaaactaattttttcgccccttgcctaccgtgtttaactgatgagactgtttttcttggtaggttctcagatactctctgggatgtttaggttctcagggcaccttctccttggctgggcaccatggccttggctcactgcccagccttcagtgttgagacatgcacccttaagaaacatggtggggaacctgtaacactaccgtaaggagcctctgattaattagttattgtcaaagttcattctgatgattcctttagctataatacctattatggtaacattattctccttagctcttatagttaagtctctgccacatttggatctcatcattctcactcaaatcaaggactccattttgatggcaacatatgccactttccttcctgacttcagaggatagctatgactatactttctgaggatgttgttcctcagggggaactgttctgaggataaggtgttccttgtacaattcatttgtcaaggtctttgtgaagggaatgtgctttgggcctgggagatgtggcatgtgataggttcacttcaacatttcratttccctaagtcttacattctctcttatgtataatgctatacaaagatgtttccaacatcctcactaaatgattttaggactaaatgagtttaggtttcaggtaattaactgactacatgatgaaatttgatacaggtctggaagaaaatagggtgtggaaggagaagaattggcatgtttttacaaggtaatagcctcaaatggggacattatcaggtcttcatacaaggtagaaccagcctcatcagtcaggcagaggatctctgttgactggagaggtttggtaggatttgggggtgctatgtactcaaaaatatgaatgttcccaattgtcacctttaaattctcaaggtcctactccttccttgggaatttaaggaaaattcttaaactttccttaagaatttaggaaattctttcctaatcaagtttttaattttcacataagaaacataagattttgttgtaattcagcaactaaaggatcagattcttcttttagtttttagtgaatcagctctgtgacagtaaagataagacattcttttaaggcagtcagagaaactccctgttcttagattttggcttaaaaaaagaattcatgttatttttcttcttgtaattctccgatgcagttataagtcactaatctacctgattgtccttgcatccttttgctcatcatactatgttttggaaaccacctcatatttcattaaagttgtatgttcagtgggcacttcattccaggtgaccataggtggtaattgaagtatctgcttctctattggaggccatgttctactgatattcaaccctttctggaaatcaaatccttactttttaaagcaaactcaaatgctcacctttgagcattgcatctacaattatttctgataagaaattctgtattagtcaagggttcatttgctgatagcagaaaacacttcagctattttaagcaaaaagatattaaatgcaaggagttagctgcttatgaaatgttggaattctaggaggattcggagctatactgggcctccagggagactcacagaagagtggcagaacagttctgccaggaaaatcacagactctactacaattaagaggctggggaatcaacaatctaccactagaactctagactccagagtcataccacatctactagttctgacccagaaaaaatgactgatttgtgcatcacaacttccccccaacttagattagtactgaattcaagtatcatgcaaatgcgtataattgttaatacctaaactatatctggaattctagatacaaggaaatttagaacatgtagtttcagctctccagcctctgtaatgaaaaatttatgtgaagtacttatcacaattatt

SEQ ID NO: 697112 - DNA, 1404 bp, Homo sapiens
catatatgtatatataacatatataatatatatggcattgttggaccctgacttacatatgtatatataagtttttatatgtatacatayacacacacacacacacacacacacacacacgttttggggcacagttcctaaatcgtaactcccatagccctggttacagtgtttgttatttataatgttgggggcatcaggcctcaggaggtggcctcgggaaacagaatctctcagaccatctcctgccctcgttttccctctaatctgcccgcacatctcacctttctgaatggggctcataagaccctcatcctaacagggtcctgccccattcctttggggaataatgctgacctcccgaggcttccatggaaacccaagaggactgggttcagagagcttctgggtagctgaacttgtggagtgacatgataagaggaattgcagagtaatctgagcgctttgggaggccgaggcgggtggatcacctgagctcaggagttcgagaccagcctggccaacatggtgaaaccccatctctactcaaattacaaaaattagtcgggcgtggtggtgggcacctgtagtcccggctactcgggaggctgaggcaggagaatcacttgaacctaggaggtggaggttgcagtgagccaagatcatgccactgtactccagcttgggtgacaaagtgagactctgtctcaaaagaaaaaaaaaagagggattgtagaggtgacaggaaaaggctctttaaaacaaacaaacaaacaaaaacaggttctcactctgtcacccagtgcagtagcaagatctcagctcactgcagcctcaacctcccaggctcaagcgatcctcccacctcagcctcccaagtagctgggaccacaggcatgcgtcaccacacctagctaatttttgtattttctgtagagacagattcttaccatattacccaggctggtcttgaactcctgggctcaggggatccacccgccttggcctcccaaagtgctgggatttcagccatgagctaccatgcccggccaggaataggagctttcaactttctatttctgccttgctctccaagtggctgctgtgattcacaatgagccccacctccaggggctgagtgctccggatccaccacatcggggtctactcttggcatcttaggaccctggcttttgcacatcatatgttcctggtttggtgcctcgtcgctggtctttctctgattacccggctctgtgtgaggccagttagagtgggccactgtgctgtgtcctcagcttacggctgagtgaagggaaggaagcccagagaacttgctgggaaacccatctgtgtttgcttcactgtatcttcccctctcccattccaagagtcctcgtccgg

SEQ ID NO: 697113 - DNA, 573 bp, Homo sapiens
aatgagagcacttgccaaggctactgaacaaagggtcaagcacccagccagtcactgagttccagactcttaataacaaggttatgaagctatgcgaagccttcatcccttctcataactacacaggcatgtcggggcttctgaagttgtgacagtgatttcctttaaagaaaacgattctaagtaaaccaaggacacttcacccttgactttgaaaatgtctacaaactttcccagagcaaatctctgccggcgtttctcacttcccgatctgatcggcctgaggagcccacgggctgggctggcacgttcttttgttcagcttctctaccggaaggagtttgtgtaaaaaggaatagaaatcagtgttcatgccacaataggggtaattgttctgagctgccacattccgttaaatgtttacctttttgtttcacaatctaacaggaaacgaggagcraaggatttttggttcccttatccccctttggtcaagactaaaaaagaccagttgttattctagttgctcaaaaatgaaatgctcaaggtaggaaatgagcacagttgctaaag

SEQ ID NO: 697114 - DNA, 466 bp, Homo sapiens
cccmcccccacgcccggctaattttgtaaaaaaagtagagacaaggtttctccatgttggtcaggctcatctcgaactcccgacctcaggtgatccgtccgcctcagccacccaaagagctgggattacaggtgtgagccacagcgcctggcggtttggccatatttttgtgagcagttagccacttggtatctgactaaaagaaggtagcaacatgttcccaatatgacaatttttttaattgctttaaaattcttcaaactttgcctctgttaaatttatgtatttatatgcctttatcatccacattttttttaaaagccctccctttaaaagccatcattttatggtatgaaagttataatctgacctagaatttcccctgaaccacagcatgttaatacatgaataaaataagattccctacctaaaataacctttaccatcatcttcttttatttctaaa

SEQ ID NO: 697115 - DNA, 622 bp, Homo sapiens
acggagtcttgctcttgctgcccaggctggagtgcaatggcgcgatctcggcccactgcgaacctccgcctcccaggttcaagcgattctcctgccttagcctcctgagaagccgggattacaggtgtgcatcaccacgcccagctaattttgtatttttagtagagatggggtttcaccatgttggccaggctggtctcgaactcctgacctcaggtgatccgtccatcttggcctcccaaagtgttaggattacaggcgtgagccatcatgcccaatcaactgctgtatatttttgctactcaatagacacatttaaatctctgatttgtgacttatttcagaagagaagctaactttgtaaagtaaaactgagtatttgttagcattttgaagcatttataagcattttcttggaaataatccattgattcgattatttaaaaatataacttgagcaatatgagacttggtcctctgtgtgtctgtgtgttgcatgttattagtaggtgattttgagaagattttatccatagcatacaacgctttacaaaatctttaaacaaatagtacaagtcaaacaatacagtacrtattaagctgtactaagagagcatttgat

SEQ ID NO: 697116 - DNA, 633 bp, Homo sapiens
ttttgaacttagtatctgggctttatggactgcaaaggtagcagataacttttcaagtttggtgtttaaagagcagggacagtatcttgtatgtttttgtgtccctgagtgttgcttaacacacagcctgggcacatttgtacagtgtcaataattttaaaagttgtgtatttactgaaccttttgagtgagaggatttaaatttttttttcagactctttctggatgtgcrcataagtgcactcattttatccatacctcttgtattctaagacttacaaccaagaaatgtttactggtttactcctttaccacttcttgccaaagaggtagaccagcctgcctccttatgctcagattcggtctttctgtcaagagtttccatcctccttttggaattataaccaagttaaaaggtctgactgtgatttcctttaagattgtagaggtggacgaagtcaaaattgacttaatactatctgtgaaaacagtcaaggctgggaaggggcattttttgcactgctttcctttagcagtggtgattttagcagtgagttatagtacatgcagttggagttgaaggacactgagagagattctgagcagcagaacattcagttggtccatgagtgt

SEQ ID NO: 697117 - DNA, 638 bp, Homo sapiens
gttatagcagcccttgcatgcagtatactctatctttatagttagatgcaataaacagaaacattcttcattgcataagcagaacttgatggtatttccctagtaactttgttctccagcttattccccaaagacctctgcaggagaaggagtgaaaactaaaaaacatatatgttcccaattttgcaaatcaatgaacctgagtttttctttaatgactattttcagtgtcaccgttcatgtcaaattacgatagtattttgaagtgtgattctatgaatgtccaagtttttggaataaagaaatctgcaactgctctattcaacatccacagaacttctgactctagtctagcagtcgacacacctggatcaataacaggacattatttagtgtccctttaacatgaaagagacaattcttggccagctgctgcctagtaacgctgatctgttacaggctgtgcaaagtgatgaatgatgcctcagcagactcagctgggcggtgcaaggtggaacgcaaactcggcttcactgcctttctgggtctgaaaatgttcagtttgtttttgttgagaaacaaaccaygccaaaacatagtagtttgacaaatacacatctttttagcttacggttctg

SEQ ID NO: 697118 - DNA, 624 bp, Homo sapiens
atggcaaataagtttttatcagagttattccaaaatggaatgagtatggaatattattcagcaataaaaaggaatgaaggactaatgcatgctacaacacagataaactatgaagtgaaagaaaccaggtacaaaaggccatatgctctatgattctatttacataaaagatctggaatggatacatccatagagacagaatgcagattggtttttgccaggagctgggcagaggggaaaaggggagaacccacttgaagggtaaaggttttrggaatgatggaaatgttttggaactggatagcagtggtggtggcacagtgctgtgaatggactaaacaccactgaattgttcactttcaaatggttaatttagaaataagagaggagaaataacaacaaaaaagttgaatgagtagtcacaggattcccaagttccctagcaattaagttgttttcttcagcataggccagaagttcactcaatatagacacagtgacagatataaagtcaaggtttagactagagaaactcaagattccttctagttagaaactatgatagtctgtgatgatttgtcatgatctccagagctcttcaaataaaaacaaaattatctccta

SEQ ID NO: 697119 - DNA, 405 bp, Homo sapiens
  misc_feature 115, 340: n = A,T,C or G
atttaaattttatcttttgatttggctccaaaattgcatctatatttttaaaagaaatgttagttttaaatttcagaaataatacgctcatattttwcagtaaaatgataaaatncagtcaatgttaaaattcccatttactgctttgctcattttcctcctgactgagatcaggtaactattatcaggttaggaagtgtccttctagatctatttatgtgcttttacatccatatatatgacgtaccctagcaaatacatagcattatgtgggtgtagtttttttctttttatctgtgtatcttaatgtatgtcttggtctatattatttatacgcaantgatatattttcatatttgcacatataatgtcaaggttgattttttaaaagttcacacagtatct

SEQ ID NO: 697120 - DNA, 601 bp, Homo sapiens
tcctgtgcgaagctgactctgaggtctgagtttcagctctgtggagggctgaaatattgcctttcctgttagccccaggagatccctctgaaaagtgttcttgctggaggagggattccccccaattatgccagaagaatccctgtgctcaaattttacccacgcctgggagaagacttgcccagaacacatgctccatagtgtttttcaggatggagtgggagtgagaaaggagtgtctcagaggagggatcagastgtactcggctctgtcgttggatagccagcgactccccatgatgtccaggtgacaagtgtgatgctaagttttgcagccaactggcaaaagcacagacacctttaaagagtacttgacctgcctaagagaatgattatttttgtccatgaaataagtagcaaaaaatatatagtaagactctagggattctcctgttctactcctggttttgccaactgaagtaacccttgaccttgggccacttttctcaccatcaccactttaggcttctgcaaaatgaagaggttgaagtgaaaccaaatcaccttcccatatattttttgtagttctaagtggggtgaga

SEQ ID NO: 697121 - DNA, 601 bp, Homo sapiens
tcctgtgcgaagctgactctgaggtctgagtttcagctctgtggagggctgaaatattgcctttcctgttagccccaggagatccctctgaaaagtgttcttgctggaggagggattccccccaattatgccagaagaatccctgtgctcaaattttacccacgcctgggagaagacttgcccagaacacatgctccatagtgtttttcaggatggagtgggagtgagaaaggagtgtctcagaggagggatcagagtgtactcggctctgtcgttggatagccagcgactccccatgatgtccaggtgacaagtgtgatgctawgttttgcagccaactggcaaaagcacagacacctttaaagagtacttgacctgcctaagagaatgattatttttgtccatgaaataagtagcaaaaaatatatagtaagactctagggattctcctgttctactcctggttttgccaactgaagtaacccttgaccttgggccacttttctcaccatcaccactttaggcttctgcaaaatgaagaggttgaagtgaaaccaaatcaccttcccatatattttttgtagttctaagtggggtgaga

SEQ ID NO: 697122 - DNA, 632 bp, Homo sapiens
tcgtaggctgcataaatgtcttcttttgagaagtgtctgttcatatgctttgcccactttttgatggggttgttttgttttttcttataaatttaagttccttgtagattctggatattagccctttgtcagatggatagattgcaaaawttttctccaattctgtaggttgcctgttcactctgatgatagtttcttttgctgtgcagaagcctttagtttaattatatcccatttgtctattttggtttttgttgccattgctttcagcattttagtcatgaagtctttgcccatgtctatgtcctgaatggtattgcctaggttttcttctagggtttttatcgttttaggttttatatttaagtctttaatccatctcgagttcacttttgtataaggtgtaaggaaggggtccagtttcagttttctgcatatggccagccagtttttccaacaccatttattaaataggaaatcctttccccattgcttgcttttgtcaggtttgctatgacttcgtttctaatttgccccacaaggattcacagaaatagttgtcacacaaactctttttagttatgaggaggaatcaattctaccttacatctttactcatagagtcatagcat

SEQ ID NO: 697123 - DNA, 632 bp, Homo sapiens
tcgtaggctgcataaatgtcttcttttgagaagtgtctgttcatatgctttgcccactttttgatggggttgttttgttttttcttataaatttaagttccttgtagattctggatattagccctttgtcagatggatagattgcaaaaattttctccaattctgtaggttgcctgttcactctgatgatagtttcttttgctgtgcagaagcctttagtttaattatatcccatttgtctattttggtttttgttgccattgctttcagcattttagtcatgaagtctttgcccatgtctatgtcctgaatggtattgcctaggttttcttctagggtttttatcgttttaggttttatatttaagtctttaatccatctcgagttcacttttgtataaggtgtaaggaaggggtccagtttcagttttctgcatatggccagccagtttttccarcaccatttattaaataggaaatcctttccccattgcttgcttttgtcaggtttgctatgacttcgtttctaatttgccccacaaggattcacagaaatagttgtcacacaaactctttttagttatgaggaggaatcaattctaccttacatctttactcatagagtcatagcat

SEQ ID NO: 697124 - DNA, 628 bp, Homo sapiens
attagtgaaggggaaaaataaagccagtaagaaatctattggaacaattgtgaaattagcaaagagtacatacagtaaaatttatataacatgacttgctaatgagaatctgttaattcttttgttaggggaaaaatattatttaaagacaagtgttaactttatgagtaacccatgtgctgtacagaactaaactaattctcaaattcaaattaaattctcaaggcttataaaataaattattttttctggctatctgaaatgaatgtatgttaaaaagaaatatgggctgggtttacttatgtagtacttctaatataaagttgggatttatagcctacattaattatataagctataaaacaatagttctgtgctctggctttaaaaatcacttctactccatagtagcaagagtttcttgttgttgttggttctattttttgttaaatacataaagagaaaggatgaatttgagattcccatattttcccaatctgagacttacttactactttacactatgtagtgcaatttaatttcaaaaatttttaaacacattccttggttaatcctaatctggggacacatagtatagytatttgtatcctgtgttaaagctgagtgt

SEQ ID NO: 697125 - DNA, 600 bp, Homo sapiens
attagttgaatgccttaagaaacaaaaacaaagtaaaactgaggtcttatgtgtaagaaggaattctgtctccatacttccatcagaccaaacctgcaacatcagctgttccttaggtccccagcttcctggtccacttggcagaattctgacttgtcagacatrataatctgatttccactccaaaccccaagaaaatctttagcctttgtcagcacaggaaaaggaaaaggagggcaagaacacccagtgcacctgactgctacatgggaatgatgttcaatctcatcaacaaacacatattaaagttttatctcattgggaacaaaaatgagcattattattgattattaaaaatcattattaatgattattaatcattgccaaggctgttcttatatgagtgctattatatattattgatatatttgtatcttaacttatacaaatgaatattggaaaaaattaaatatatttaaaattaatattaaatcttgaagtcacattcaagataatacgatcatgctttcagtaaaacatatctttttatggaaaaattaagatttagtagaaacatagtgaaatttacataggcttgaa

SEQ ID NO: 697126 - DNA, 600 bp, Homo sapiens
attagttgaatgccttaagaaacaaaaacaaagtaaaactgaggtcttatgtgtaagaaggaattctgtctccatacttccatcagaccaaacctgcaacatcagctgttccttaggtccccagcttcctggtccacttggcagaattctgacttgtcagacatgataatctgatttccacyccaaaccccaagaaaatctttagcctttgtcagcacaggaaaaggaaaaggagggcaagaacacccagtgcacctgactgctacatgggaatgatgttcaatctcatcaacaaacacatattaaagttttatctcattgggaacaaaaatgagcattattattgattattaaaaatcattattaatgattattaatcattgccaaggctgttcttatatgagtgctattatatattattgatatatttgtatcttaacttatacaaatgaatattggaaaaaattaaatatatttaaaattaatattaaatcttgaagtcacattcaagataatacgatcatgctttcagtaaaacatatctttttatggaaaaattaagatttagtagaaacatagtgaaatttacataggcttgaa

SEQ ID NO: 697127 - DNA, 655 bp, Homo sapiens
ggtgagtcagtcactatcattcccaaacaacatatttttatatgaatatggtactgttgactgatttcagctatgaaaacgagtttttctcaaaccattcatttccccacccttcctgtataattactaatgatccatgggatcctggagtatggcatctayattgaagagtgattccactcagagaggatgcctatgccacccaccgctttatcatccttccctaacaaagtgatcaaccatctactctatgacaagcaactaatagatccagcaatagttaaattagtgcttcctggttgacatccatctgcactttccttacacagaagaggggataacatggactgaaagccaggaggattcaatccagggatattggttatcattcaatatttttataaccacaaccagcagatctttgtatatatacggcttaccttcagctttaactgcaatccagctctagaatgagtgtcaaatctataattttttgatactttgataaaaagggatattctaaatcttattgagaatgtagctattgagtgactgttgagtctagattccttgacactctggtatgaaggcatattccaagtcctattgggaacccatataaaaattttcttcagatccaaatgccaaaagaagc

SEQ ID NO: 697128 - DNA, 607 bp, Homo sapiens
tgctgtttccatggagctggggacccaggcagtagaagcggaatgacagtgggtagatgaatatgaaatgggcagatacagaaggtggtaatattttaaagaagttgtgttatgaaggaaagagggaaagaatgtggtagctggaaaaagagtatgggttagcrgttttattaaggtagaatggtttgcaccaacttaaaagcagatggtagttcaagagggagaagttgaaaaggagaaagagaagtgatgggatctgaggtttgtgggagtggaagggatttaaaacacagaaggaccagggatacctgcttagttataggaacctattaacattgataatgtccagtactaacacaaacacgggaccctttttactctgctccaagttatcttcctgatacatttccccatgtctagaagataagactctgccagtcttcacatttccccaactcatgccttcccccaaactccaaccatcatgaaagatattttttctttattctttttccccatcagagagggagaattgtccccacttttttggttagagatgcaagagacatttcttttttctttctttctttttttttttttttgagac

SEQ ID NO: 697129 - DNA, 607 bp, Homo sapiens
tgctgtttccatggagctggggacccaggcagtagaagcggaatgacagtgggtagatgaatatgaaatgggcagatacagaaggtggtaatattttaaagaagttgtgttatgaaggaaagagggaaagaatgtggtagctggaaaaagagtatgggttagcagttttattaaggtagaatggtttgcaccaacttaaaagcagatggtagttcaagagggagaagttgaaaaggagaaagagaagtgatgggatctgaggtttgtgggagtggaagggatttaaaacacagaaggaccaggratacctgcttagttataggaacctattaacattgataatgtccagtactaacacaaacacgggaccctttttactctgctccaagttatcttcctgatacatttccccatgtctagaagataagactctgccagtcttcacatttccccaactcatgccttcccccaaactccaaccatcatgaaagatattttttctttattctttttccccatcagagagggagaattgtccccacttttttggttagagatgcaagagacatttcttttttctttctttctttttttttttttttgagac

SEQ ID NO: 697130 - DNA, 663 bp, Homo sapiens
atgatggatatcctttctaacgccaaggaacaagaaaaaaatgggttatatatatacatatatatatatttttttttggtggagggctgatggagtcttgcactgtcaccctggctaatgtgcagtggtgcgatcttggcctgctgcaacctctgcctcgtgggttcaagtgattctgctgcctcagcctcccgagtaggtaggattacaggcacctgccaccatgcccagctaattttttgtakttttaggagagacggggtttctctatgttggccaggctgttctcgaagtcctgacctcgtgatccgcccaccttggcctcccaaagtgctgggattacaggtgtgagccactgcgcccggccaggttttatggttttattaagttttttgagcttttaaaaatgagccttaagaattgccgatttcctaccttggtcttatgaatgattactattcttttattattattatttttagctttctcttttatctcatgaattattttttcttctttttagatttgagtatgacattagggagccaacctgaaaacatgaagaagcatcttgaatggttggaagtagctgttagagtgaatttgtgagagctaggttagctggttaatactagtttagctgcactgctttttgctgtttgg

SEQ ID NO: 697131 - DNA, 663 bp, Homo sapiens
atgatggatatcctttctaacgccaaggaacaagaaaaaaatgggttatatatatacatatatatatatttttttttggtggagggctgatggagtcttgcactgtcaccctggctaatgtgcagtggtgcgatcttggcctgctgcaacctctgcctcgtgggttcaagtgattctgctgcctcagcctcccgagtaggtaggattacaggcacctgccaccatgcccagctaattttttgtagttttaggagagacggggtttctctatgttggccaggctgttctcgaagtcctgacctcgtgatccgcccaccttggcctcccaaagtgctgggattacaggtgtgagccactgcgcccggccaggttttatrgttttattaagttttttgagcttttaaaaatgagccttaagaattgccgatttcctaccttggtcttatgaatgattactattcttttattattattatttttagctttctcttttatctcatgaattattttttcttctttttagatttgagtatgacattagggagccaacctgaaaacatgaagaagcatcttgaatggttggaagtagctgttagagtgaatttgtgagagctaggttagctggttaatactagtttagctgcactgctttttgctgtttgg

SEQ ID NO: 697132 - DNA, 1667 bp, Homo sapiens
taaatgaggtggagtaaatgagaccttctttaaataaatatttcccttgataaaggccaaaagaaatgactaaaaccaaatactaatgttttggatggatgcaagttattaacaagacaaactgataatcaagacaaactgataatcagatagggaaaaataatactatcttttaattaaaagcaatttgaaaaagtaattttttactcaaactttaatgcgtaattaaaactaatgcacctaatccactgcttcctaaactcataaaataaaaatctagctgggtgcagtgcctcacgcctataaccccaacactttgggaagctgggtgggggggttggggggagaattggttgaggccaggagttcaagaccagtctgggcaacatagcgagactacatctctacaaaaattaacaacaaaatcctagaaaatggctttaaggccaggtgtggtggctcatgcctgtaaccccagcactttgggaggctgaggcgggcagatcacctgaggtcaggagtttgagaccgcccggccaacatgatgaaaccctgtctctactaaaaatacaaaaagtaaccaggcgtggtggtgggcacctgtaatcccagctactcgggaggctgaggcaggagaatcgcttgaacccgggaggtggaggttgcagtgagctgagatcgcaccactgcactccagcctgggcaacagagcgagactctgtttcaataaaaaataaaaaaaagaaaatggctttaaaatcagttttgcatttaaaagttgggtttgtttttgttttactgcaggtcatatgagcaagaatgctatgacaaaatgcaaataaataccaaggacatctgttaaattagaaaaataaacgtgtatatgtacaaatatgtttaccgagaaatagattatagatactgatattatagctgactgaataccatttttcttgtcatgagaaactaaatatacacacacatacagatcaatccctcagacgaaggaatcttattttcaagataaatcgttgatcatgaatgcttcctgctaaacattagccttatacaaatgcttggcataattctgttctcaagatttcaaccataaaatactgtttttgattattattgtaacattttaaaattatctcctataagataccttgcatccaccttataacacactcattgctacagatgttgttaatagtgcagtaagttttgtcagtttttaaaaagtgagatttttgargcaagagatgtcataccaaaagctagagaattagaaaaaagttgaggataggagtaaagatctagtaaaaaggtctaacagcataagccaagattttgaattaaaaaaatgttaatacttttggcccggccgggtggctcacgcctctaatcccagcactttgagaggccgagacgggcggatcacgaggtcaggagatggagaccatcctggctaacacggtgaaaccccgtctctattaaaaatacaaaaaattagccgggcgtggtggtgggcgcctgtagtcccagctactcgggaggccaaggcatgagaatggtgtgaacccgggaggcagagcttgcagtgagccaagatcgcgccactgcactccagcctgggcaacagagcgagactccgcctcaaaaaaaga

SEQ ID NO: 697133 - DNA, 626 bp, Homo sapiens
taatttatttgtatgtttatttattcacttatttgtattttgtcttgctcyatatggcatttgaagtaaattcagttttcagaatgcattactcatatggtgggtgtgaaacagtttaagaaaagagtgggctgatagatttgtaagaagccacctcctcaatcagcaccacggcggtggacagctccctgccaggcttctggctgaactctggtgtccttatctgagcattgagataatcactcttttccaattctacatttttaagtagatgactctgaagactctcaaaggaagcaaactcgctaatcaatggtcctgagcacacggaagatattcaatgaattatgatggaattgaaacagaaacaattaaaaacctgaaattgagttcaccctcctacattcaataagtcatttctaaaatcctgcagtgttataacaaatggtcttttcaaaaacatatataatgaaagacagagaatgatatacagaatgagggatgaaaaaggtgcagtattacagataaaaagttttctcaaggcatgaaagaaacagaagagaaaatgatgtttacattccaccattatttaaaagaatcagtcttcagggttcacagctggtacc

SEQ ID NO: 697134 - DNA, 610 bp, Homo sapiens
ccaaagtgatgggatcacaggggtgagccacctcgcctggccggtcctcattcttaatcaacttttagttcaactcttggagtcatgcttttaagaagaatgcataggaggcaaccttgccagttacctgggagtgccagtggatactgcgatagtccttggctactgaggactcagacagccgtagccagccgtctaacaagggacaatggtgtgggctgccatgggtcatggatgccatcaatagtattggagcccctctggttgtcggctaccctgagaggggtagagtgtcctctgcccagatgataaccaagcagatcattggaaactttgagatttttcctctttctagaaaactttatcatgatgaaaattgctcttgtcatgtatttaaatggtgagactgttttgtagaaaatatttcataatcatctaatatgtatttgtaataatctatgaggataggtagacagtcttgcaaaattcacaattacrctattaataatggattgttttttaaatgtatgatttctcccccctcaggtgatgttcgaaatgatatctatgtaacattagttcaaggagattttgataaaggaagcaaaac

SEQ ID NO: 697135 - DNA, 2093 bp, Homo sapiens
gaaagcaggccctcaaccaggcrctgagtttcctggtgccttgatcttgaactttccagtctccagaactgtgagaaataaatgtctgtcgttttaattacccattctctagcagtttaaattgactaaaccaacaggcaatcagaattcaccaaaatccttccatggtttccccagccttgtactcaaatatgttttggaacatagaacagagacaggtagacatgcatgcttccataggcattcatacccctaagagcctcccaccttgatcctgtaaggcaaccatcaccattagggatgtattcctaaaagggtttattctcggcagaatgaagttccgaaccatatgcgtcagatctgtaattgtggatctgaaaattgagatgtcttccccaacttcagcttcctttggctgttccactgaatttatgaagatcctgttcactataattaattgacctatacttaaaatatcaagaggagcttctgcttttcttatacatagagcaattgagcaattaaaatcaccctttgttgaggttttactgttgttatctaggcaataatcattgatgacagaaagatgattttaaaaatcccttctttctagaagttattagaaaataatattttattcttagttattagtcaagtatattttcttttcttttcttttttctttttctgagacagagtttctctcttgttgcccagactggagtgcagtggcgtgatcttggctcatggcaacctccacatcctgggttcaagcgatgattctcctgcctcagcctcctgagtagctgggattacaggcatgtgccaccatgcccagctaatttttgaatttttagtagatactgggtttctccatgttgctcaggctggtcttgaacacccgacctcaggtgatccgcccacctcggcctccctaagtgctgggattacaggcgtgagccacggcgcctgggcaggccaagtatattttcaaataacttggtaaataataggtaaaatgattgagcatgtgctaagcacacttctaagttttccacatgcattatcttatttaatgcttacaacaatcataattactcttatgcccatttcaacaaggaggaaactgaaacctgtaaagattgaggaatatgcgcaaggttgcacagctcatcaatgagagtcatgactcaaactcagggcgtctgactctggatccagggttctcagtgtgctagcatcacctcaacaacaagagaatataaagtgccatggaataaaatataaatgtgatacatttggttgggtcagtggaaggaaatgaggtcagagatggaagcggtggaatggaaataatattggtattgactttgtttaaagagacatttgcctgacagaaaattgagactgaagaacggcattttagaaaacaagatatgtacatttaaagatgtagaaccataaaaatatacagaatatttagcaaatgttgagaagccaaatgtgcctagaattctggctccatgggatgagagaatgacacaggagtctacaatggtagaatggagccctggatgtctcttgcaaaataaataaattatatattttttaattctggcatgtctttaaatctaatcactaaaaataactaaattatttttgtgtgcttggtcgtgaataaggaaaaatgagatcagcacattatgggcaagacacatagtgaggttatcccaggttcagagaatgaatgccataaaaactactttaaagtttatgaactaaggctcatgacaatttctcttctgagtttataggtattttttgaaccatcagtggttttgtgtagaacaggatgagaagatgtcagtaataaattgtaagaggggagagctgtcagattataaattttgcgcatggtgtcttgttaaggatgaagatttccaggacaggctcttggcattaaaggaaagtcaccaagagcatttgtgtgaggtcctcacactcagaatgtgcctttgataatctattttagtggattcaagaataatagaacttgtatttgtacatttaatcaaaagcactaacgtactttt

SEQ ID NO: 697136 - DNA, 2093 bp, Homo sapiens
gaaagcaggccctcaaccaggcgctgagtttcctggtgccttgatcttgaactttccagtctccagaactgtgagaaataaatgtctgtcgttttaattacccaktctctagcagtttaaattgactaaaccaacaggcaatcagaattcaccaaaatccttccatggtttccccagccttgtactcaaatatgttttggaacatagaacagagacaggtagacatgcatgcttccataggcattcatacccctaagagcctcccaccttgatcctgtaaggcaaccatcaccattagggatgtattcctaaaagggtttattctcggcagaatgaagttccgaaccatatgcgtcagatctgtaattgtggatctgaaaattgagatgtcttccccaacttcagcttcctttggctgttccactgaatttatgaagatcctgttcactataattaattgacctatacttaaaatatcaagaggagcttctgcttttcttatacatagagcaattgagcaattaaaatcaccctttgttgaggttttactgttgttatctaggcaataatcattgatgacagaaagatgattttaaaaatcccttctttctagaagttattagaaaataatattttattcttagttattagtcaagtatattttcttttcttttcttttttctttttctgagacagagtttctctcttgttgcccagactggagtgcagtggcgtgatcttggctcatggcaacctccacatcctgggttcaagcgatgattctcctgcctcagcctcctgagtagctgggattacaggcatgtgccaccatgcccagctaatttttgaatttttagtagatactgggtttctccatgttgctcaggctggtcttgaacacccgacctcaggtgatccgcccacctcggcctccctaagtgctgggattacaggcgtgagccacggcgcctgggcaggccaagtatattttcaaataacttggtaaataataggtaaaatgattgagcatgtgctaagcacacttctaagttttccacatgcattatcttatttaatgcttacaacaatcataattactcttatgcccatttcaacaaggaggaaactgaaacctgtaaagattgaggaatatgcgcaaggttgcacagctcatcaatgagagtcatgactcaaactcagggcgtctgactctggatccagggttctcagtgtgctagcatcacctcaacaacaagagaatataaagtgccatggaataaaatataaatgtgatacatttggttgggtcagtggaaggaaatgaggtcagagatggaagcggtggaatggaaataatattggtattgactttgtttaaagagacatttgcctgacagaaaattgagactgaagaacggcattttagaaaacaagatatgtacatttaaagatgtagaaccataaaaatatacagaatatttagcaaatgttgagaagccaaatgtgcctagaattctggctccatgggatgagagaatgacacaggagtctacaatggtagaatggagccctggatgtctcttgcaaaataaataaattatatattttttaattctggcatgtctttaaatctaatcactaaaaataactaaattatttttgtgtgcttggtcgtgaataaggaaaaatgagatcagcacattatgggcaagacacatagtgaggttatcccaggttcagagaatgaatgccataaaaactactttaaagtttatgaactaaggctcatgacaatttctcttctgagtttataggtattttttgaaccatcagtggttttgtgtagaacaggatgagaagatgtcagtaataaattgtaagaggggagagctgtcagattataaattttgcgcatggtgtcttgttaaggatgaagatttccaggacaggctcttggcattaaaggaaagtcaccaagagcatttgtgtgaggtcctcacactcagaatgtgcctttgataatctattttagtggattcaagaataatagaacttgtatttgtacatttaatcaaaagcactaacgtactttt

SEQ ID NO: 697137 - DNA, 577 bp, Homo sapiens
tgctttcctggrtatccagctttccttccatcttgggaatttcagcctccataatctcagaagcaaattcatgcatatatatacacacacatacatttcataggtatgtggctaagattgtatttttacaagttcagccatgagatgattggtgaagccagccaatgaataagggtgtgttctattatacgattcagtcttcttttgtaaacgattgaagttctgcatttgaagtaggaggataggagggagcaagtccacctaggatgataacagctgaatttctcaacttacacttcagagccgtaggggtcaacttagagactcaaaaatctcacccataatcctgccctaaacaccagggctagggaacactgtggccctcaggtgattttctttagccaggtctgggagccacacgacggcagagggagcaggaaacactatgcaaatagaggccaggacagcagggagggcctgttcatgatagaacccaggcaaaactctcctcagaaagcgagtgtggagaaacatagatcatgcctgagacctggtggattagagcactggctactgg

SEQ ID NO: 697138 - DNA, 577 bp, Homo sapiens
tgctttcctggatatccagctttccttccatcttgggaatttcagcctccataatctcagaagcaaattcatgyatatatatacacacacatacatttcataggtatgtggctaagattgtatttttacaagttcagccatgagatgattggtgaagccagccaatgaataagggtgtgttctattatacgattcagtcttcttttgtaaacgattgaagttctgcatttgaagtaggaggataggagggagcaagtccacctaggatgataacagctgaatttctcaacttacacttcagagccgtaggggtcaacttagagactcaaaaatctcacccataatcctgccctaaacaccagggctagggaacactgtggccctcaggtgattttctttagccaggtctgggagccacacgacggcagagggagcaggaaacactatgcaaatagaggccaggacagcagggagggcctgttcatgatagaacccaggcaaaactctcctcagaaagcgagtgtggagaaacatagatcatgcctgagacctggtggattagagcactggctactgg

SEQ ID NO: 697139 - DNA, 577 bp, Homo sapiens
tgctttcctggatatccagctttccttccatcttgggaatttcagcctccataatctcagaagcaaattcatgcatatatatayacacacatacatttcataggtatgtggctaagattgtatttttacaagttcagccatgagatgattggtgaagccagccaatgaataagggtgtgttctattatacgattcagtcttcttttgtaaacgattgaagttctgcatttgaagtaggaggataggagggagcaagtccacctaggatgataacagctgaatttctcaacttacacttcagagccgtaggggtcaacttagagactcaaaaatctcacccataatcctgccctaaacaccagggctagggaacactgtggccctcaggtgattttctttagccaggtctgggagccacacgacggcagagggagcaggaaacactatgcaaatagaggccaggacagcagggagggcctgttcatgatagaacccaggcaaaactctcctcagaaagcgagtgtggagaaacatagatcatgcctgagacctggtggattagagcactggctactgg

SEQ ID NO: 697140 - DNA, 577 bp, Homo sapiens
tgctttcctggatatccagctttccttccatcttgggaatttcagcctccataatctcagaagcaaattcatgcatatatatacacacacatacatttcataggtatgtggctaagattgtatttttacaagttcagccatgagatgattggtgaagccagccaatgaataagggtgtgttctattatacgattcagtcttcttttgtaaacgattgaagttctgcatttgaagtaggaggataggagggagcaagtccacctaggatgataacagctgaatttctcaacwtacacttcagagccgtaggggtcaacttagagactcaaaaatctcacccataatcctgccctaaacaccagggctagggaacactgtggccctcaggtgattttctttagccaggtctgggagccacacgacggcagagggagcaggaaacactatgcaaatagaggccaggacagcagggagggcctgttcatgatagaacccaggcaaaactctcctcagaaagcgagtgtggagaaacatagatcatgcctgagacctggtggattagagcactggctactgg

SEQ ID NO: 697141 - DNA, 577 bp, Homo sapiens
tgctttcctggatatccagctttccttccatcttgggaatttcagcctccataatctcagaagcaaattcatgcatatatatacacacacatacatttcataggtatgtggctaagattgtatttttacaagttcagccatgagatgattggtgaagccagccaatgaataagggtgtgttctattatacgattcagtcttcttttgtaaacgattgaagttctgcatttgaagtaggaggataggagggagcaagtccacctaggatgataacagctgaatttctcaacttacacttcagagcygtaggggtcaacttagagactcaaaaatctcacccataatcctgccctaaacaccagggctagggaacactgtggccctcaggtgattttctttagccaggtctgggagccacacgacggcagagggagcaggaaacactatgcaaatagaggccaggacagcagggagggcctgttcatgatagaacccaggcaaaactctcctcagaaagcgagtgtggagaaacatagatcatgcctgagacctggtggattagagcactggctactgg

SEQ ID NO: 697142 - DNA, 655 bp, Homo sapiens
acagatgagtacacagaaccccagggacacagtggggcctgttaggtccaactcctgtctcctttcctcactgccccaggagaggacagggagcctggcactgaggcccttcatgtgctgttccaggaagcaggctgatgccacttccrggagggatggagactgggcgtgtaattccagacaaaaatacctggaacaagaataagatcccccagtgggtggaagcagtcagctactctctgcccaattatgggcaagagtctgctgctagagcctttccccatggtcttgatgtttccgggtgggggttggtagggagcagtggtgagggtgcccatcagtctaggaggtgccactaaataaatcataatgcaaggccaggcatggtggctcacaccagtaatcccagcattttgagaggccaaagcagcagggtctcttgaggccaggagtttgagaccagcttggacaacatagtgagacccccgtctctacaaaaaatacaaaaattagctgggcatgttggcacacacttgtagccctagctacatgggaggctgaggcaagagaatcacttgagtccaggagttggaggctgcagtaagctatgactgtgctgccacactccaacctgggcaacagactaagaccctgt

SEQ ID NO: 697143 - DNA, 584 bp, Homo sapiens
tgcactggggttgtctagggaccaactaggataggaagacagatggagtcagctcaagcctggcccctctagcacatcccaaatgccctgatgagattctcaactccctgctgctccccgctccttgtcattttccatagggcctcatccaggtgtctcttctcagccaacagttcttaggatcctaaaattaccatctttgagtctgagggaaaactgtcattcttaaaatcacagaacagtagagctggaaggacttttttttttttttttgagacagggtctcactctgttgcccaggctggagtgcagtgtgcagtgkcatgatctcctctcaccgcaacctctgcctcctgggtttgagtgattcttgtgcttcagccccctgagtagctaggattacaggcatgtaccatcacacccggctgaattctttttgaacttttagtggagatggggttttgtcatgttggccaggctggtcatgaacttctggcttcaagtgatctgcctgcctcagtctcccaaagtgctgggattacaggtgtgagccaccgtgcctggctaaactggaaggacttcta

SEQ ID NO: 697144 - DNA, 659 bp, Homo sapiens
gcaaattaatgtagatatatgctaattagatcactgccaggcactttgttctaatggagttgccagctcagaggtgcagtgggttggatctgcccagaaggggcttgcagagccccccagctggggaaggggtggggatgggtcagtggtcactgagatgaggggatggggttaccatggagacagaggccaggmgcctgctgctgcctcctgacaagaccagggctggcccaatcagtcgcatcctgggcctccctagcagctccaagctggtctctgagggctaatgatgcagaaggtgagcagatgctccctggctccccaggcccagcggaggtagagggctgggccgcagcaggagggcgtgcagacaggcagatggcagtcaggggattgggggtccaggacctgtcccgaggaggaggaagattacccctccagggtggaaggcacctccagcagtgccataaggggtgagactcccaaatgctggggcatgcaaacaggctgggcggccaaatctcaaagagcaccttggtaagaagtggtggaaaagagcaagggtttggccccagactggttggagtcagccgttctgcgtccccttaggcaagcctgccactgctctgggcctcagtttcctcatttataaaaagggg

SEQ ID NO: 697145 - DNA, 598 bp, Homo sapiens
atgggacagatgttactggtgtctgctctgaggagggaaagggcaagactgtcatccccaagaggacaggagctgggtgcactgtattcaccactgtgttctcgggatttagcacacaagaggcactcgaactcctgacctcgtgatccacccgccttcgcctcccaaattgctgggagcgtgagcctgaccaagatggcraaaccctgtctctactaaaaatacaaaaattagccaggcatggtggcagtcacctgtaatcccagctactcaggaggctgaggcagagaattgcttgaaccagggaggcggaggttgcagtgagctgagatcgcaccactgcgctccagcctgggcgacagagcgagactgtcaaaaaaaaaaaggcactcgagaaatgtttataagacgaatacatgttatgtactcagaatactgtctagatcaaataggagataaataaatgtggccgggcacagtggctcacacctgtaatcccaacaccttgagaggccaaggcaggggaggatcacttgagctcaggagttcgagaccagcctgggaaatatagtgagacccttgtctctacaaaaaagtt

SEQ ID NO: 697146 - DNA, 598 bp, Homo sapiens
atgggacagatgttactggtgtctgctctgaggagggaaagggcaagactgtcatccccaagaggacaggagctgggtgcactgtattcaccactgtgttctcgggatttagcacacaagaggcactcgaactcctgacctcgtgatccacccgccttcgcctcccaaattgctgggagcgtgagcctgaccaagatggcaaaaccctgtctctactaaaaatacaaaaattagccaggcatggtggcagtcacctgtaatcccagctactcaggaggctgaggcagagaattgcttgaaccagggaggcggaggttgcagtgagctgagatcgcaccactgcgctccagcctgggcgacagagcgagactgtcaaaaaaaaaaaggcactcgagaaatgtttataagacgaatacatgttatgtactcagaatactgtctagatcaaataggagataaataaatgtggccggrcacagtggctcacacctgtaatcccaacaccttgagaggccaaggcaggggaggatcacttgagctcaggagttcgagaccagcctgggaaatatagtgagacccttgtctctacaaaaaagtt

SEQ ID NO: 697147 - DNA, 1210 bp, Homo sapiens
attttattaaaaataaccccactagttgcaccccgttaaactgatgttaccatctactaatgggtcatggttggcagattagaaaacactggtaaattcatgaaacgcatggactgtgtgtcaggctgctgtattagagtcctgcttctaccacttgctgcctgtgaacttgaaaatatctccgtttctcgtgtaaaatgcaggttctagtagttcataaagttgttatgggaactaaattattaaatacatgtaatatgcttaaagtggtgttcattatgtaataaatatcctctaagtattaatcatcatcatcattattgacttatatcttgctgtaggtaaatgttgaataaaaaaatgtttcttgactatatcagcattcccacttatcctaaaacagatattttcttaagtttaccaacatctgtgttttcttgtgtctggaagtatataaaatataacaacaaaataaaagttaattcaactgcacttaatacaatggaaatattttaaaaattatagttcaataagaaatccaataaaagactacttttatttctgttcctcctcccagattaaaacaagtagatcattagtatttcatacttatcagttaagaaagaagcaaggatatctggaagataccatctgttgaacttaagaagccagaattattccttttcaaatgaaattatttgatgaaccccaatcataggttaaaatgcttgagaggartattttctatcttttctttttttccccaaaggtttatttttatttatttttaaaataggccggatgcagtagctcaggccttaatcccggcactttgggaggttgaggtaagcagattactcgagcccaggagttcaggaccagcctgggcaatgtaaggagacctcatctctacaaaaagcaaaagaaattagtcaggtgtgatgatgcatgcccgtagtcccagctattcaggaggctgaggtgggaggatggaggcaggaggtcaagactgcagtgagctatgactgtgccactgcactcaagccctggtgacagagtgagaccctgtatcagaaaaaaagcaaaacaaaactgacagataaaatggtatgtattttatcttttctaaaatacagcatacatacatttttattatagatagagaacaaatctacaagtcatgacatgaaaagaacacagaatctggtgg

SEQ ID NO: 697148 - DNA, 1064 bp, Homo sapiens
acaacaacataaaatggactaagacaactgtgaatatgctaccagtccagtcttagacctgtcaatggtacttgatagactacacacatctatgaaaacttttctggaatgtgccttttcactggatcaaatacatagtaatgtaaaatctcttcctcttaagagtgtttgagctcttcatttgaagctggatgtaaattatttggtcttttgttaaataaatatcagaaagcattataggtaagaaagatgcttcctaataatcaggagaaaaccttctacctgttgtgatgtttataactctttttcttttacaaagaatcccaatcaacctagcttaagcaaaatttgtatctacttaccagaatgtataagtttaacgaagaatacagtgttaggagttcagctttacctctggtttggatgagaactgttgatagagcacagtagaaactaaaaaaaaaagagatctgtcttgagtgttccttgaaatatctctacatttcagctctactctctttgggaaagctagcttttatactttccagactacatttgaaaatggccctcatcgtggatcatgccggcaggagatcgagaccatcctggctaacacggtgaaaccctgcctctattaaaaatacaaaaaattagccgagtgtggtggcgcacctgtagtcccagctgcttgggaggctgaggcaggagaatcacttgaacctgggaggcagagcttgcagtgaaccgagattccgctactgctctccagcctgggcaacagagtgagactctgtcacaacaaaagaaaaaaaaaaagaaaatagccctcatctacaggtgctgacttattttcttcattcaagtaaattccaaagccaaattttcaaatgaggcattttaattggctaatcttcatcaaggtgcctttytaatggaataacactgtcatattaagtgaccacatagttttggcctgcagcagagtcaagcttgcttctactgctttcctgtaaacaagggacctggggaaagagcaatccccagtatgtggtgtgttgaccttc

SEQ ID NO: 697149 - DNA, 1568 bp, Homo sapiens
tttcaatttacagacttgtgtgttggcattttttaagaaaaataatttaaaaatagctacaatttttctttttttttttttttttttttttttttttgcgacggagtcttgctctattgcccaggctggagtgcagtggcgcgatctcggctcactgcaagctctgcctcctgggttcacgccattctcccatctcagtctcccgagtagctgggactacaggcgcccgccaycacgcccggctaattttttgtattttttagtagagacagggtttcactgtattagccaggatggtctcgatctcctgacttcatgatcagcccgcctcagcctcccaaagtgctgggattacaggcgtgagccaccgcacccggccaaaaatagctacaatattaataaataaaagttctcatcttgtgtgcccctgctctgtatagtgctacctagatgggcctatctctcatttaattattaattactattaaaaaccatctgcactttcagtgaggctggaaagacactcagagctcccagaaaaacagaagcctgtctggtgagacaggctgctccattcactagagggtctcccaagagactctcagttttcgtctaaaagtatttagaggaaaacagcattgtagagagagtctaggtttgtctaacacacttcaaatttttgtctcttttcctggtgtctcattcaggatagcatgtgtcccagatagaagagttggttgggacaataaaaagcattgtttcccaaaccatcaataacttgttttggataacaccctgctgccaccagccagttcttctgagagaagacaaaaggctctgacctgcctccaggcaccttacctgctgttctcttgctgatgtcataaatgatcaacagcatcccctcatagccacattgtcaggacacctagagagctgtgtggagccagaagatactgtttctgcatcccaggcatgttggtgagcctcaggtggctggagtggccagggcttctgcaggaaggacctgagaagtggacattctccacactcacctcagcctcagcagaggggacatcagctccaagcttttgcctggcagggtctcctgtcttgtgatttagagttcctgtccccctgatagttgccatgaaagtggccctcgtgtagcctgcaaagtgacgcctattctccacccttggacctgtggcttctctttgattagacactgtgcatactcagggtggctggcaatggggatggatccacccagggctcctagtggggattcttaggggatactgtggcccttttctagagcactcacatttcattaagaggccttcacaggtctcaatctcacataccctctgctattcagccacattgcccttcttacatgtttccaaacacctggatgcctttgcacacatgctgttcctccagcctagactgcccttgcttgtgcttttgcgcggtggctcatgcctgtaatccctgcactttgggaggctgaggccggcagattgcctgaggtcaggagatcaagacaagcctgaccaacatgg

SEQ ID NO: 697150 - DNA, 1568 bp, Homo sapiens
tttcaatttacagacttgtgtgttggcattttttaagaaaaataatttaaaaatagctacaatttttctttttttttttttttttttttttttttttgcgacggagtcttgctctattgcccaggctggagtgcagtggcgcgatctcggctcactgcaagctctgcctcctgggttcacgccattctcccatctcagtctcccgagtagctgggactacaggcgcccgccaccacrcccggctaattttttgtattttttagtagagacagggtttcactgtattagccaggatggtctcgatctcctgacttcatgatcagcccgcctcagcctcccaaagtgctgggattacaggcgtgagccaccgcacccggccaaaaatagctacaatattaataaataaaagttctcatcttgtgtgcccctgctctgtatagtgctacctagatgggcctatctctcatttaattattaattactattaaaaaccatctgcactttcagtgaggctggaaagacactcagagctcccagaaaaacagaagcctgtctggtgagacaggctgctccattcactagagggtctcccaagagactctcagttttcgtctaaaagtatttagaggaaaacagcattgtagagagagtctaggtttgtctaacacacttcaaatttttgtctcttttcctggtgtctcattcaggatagcatgtgtcccagatagaagagttggttgggacaataaaaagcattgtttcccaaaccatcaataacttgttttggataacaccctgctgccaccagccagttcttctgagagaagacaaaaggctctgacctgcctccaggcaccttacctgctgttctcttgctgatgtcataaatgatcaacagcatcccctcatagccacattgtcaggacacctagagagctgtgtggagccagaagatactgtttctgcatcccaggcatgttggtgagcctcaggtggctggagtggccagggcttctgcaggaaggacctgagaagtggacattctccacactcacctcagcctcagcagaggggacatcagctccaagcttttgcctggcagggtctcctgtcttgtgatttagagttcctgtccccctgatagttgccatgaaagtggccctcgtgtagcctgcaaagtgacgcctattctccacccttggacctgtggcttctctttgattagacactgtgcatactcagggtggctggcaatggggatggatccacccagggctcctagtggggattcttaggggatactgtggcccttttctagagcactcacatttcattaagaggccttcacaggtctcaatctcacataccctctgctattcagccacattgcccttcttacatgtttccaaacacctggatgcctttgcacacatgctgttcctccagcctagactgcccttgcttgtgcttttgcgcggtggctcatgcctgtaatccctgcactttgggaggctgaggccggcagattgcctgaggtcaggagatcaagacaagcctgaccaacatgg

SEQ ID NO: 697151 - DNA, 2277 bp, Homo sapiens
ttgcaattgagacgactctctatccaggtatctaccactttgtagaaagcatagaatagcataaggcgtttttcaggagattgtgaaaaaaactgtgggaggtaaaagataggcttgtcagactgacgaatgcagagttgtcttcggctattccagcttaataacttacatctaatattataacatcacagaggaggcatctgaagtttcacagaaaagtaaatagaatataataaaycaaatactaaatactaagttaaatatctgaagtatgcactgataacaatcatatttggtttctgaaaaatactgaatactacttgaaaagggctcaaaggatcttatatgaaaaaatatttgttccaagtgaatagattttttaaaaatcagattttttggctgggcgtggtggctcacgcctgtaatcccagcactttgggaggccgaggtgggcagatcatgaggtcaggagatcaagaccatcctggttaacatggtaaaaccctgtctctactaaaaaaaaaaaaaaaaaattagccgggcgtggtggcatgtgcctgtagtcccagatactcgggaggctgagacaggagaatcacttgaacccaggaggcagaggctgtagtgagacgagatcgctccactgtgctccagcctgggcaacagagcgagactccatctcaaaaaaaaaaaaaaaaaaaaaaaaaacagattttttttaaaaccagtaacaccagagtatttcctaaaatctaagacaaatttgtcttttaacatctccttttttcattaacaaagattgtcaataacattggtttatatgcaaatatgtgaatacttgcacatatattgaaaatcaagctaaagggacccttaatgtgccttggattgggactgggctgacttgtggctttcctggagtccatcactgggatgtgtgtggcaacccaaagctgagtccttctccctaccttgtgacacttttcacagttctgttgaatctgatactcttcctgtttcagcatttctgtcatttccatttccttgaggctactgtcatattcctcctgcaggtggatcttcttttccctattctggggtgaggtgacagagtcaaatcaggtcagcaaccagggaagccttataaacggggccccctcactggggactgatatgggctgtgggctctttgggcctgttgagtttcctcttgtaactagctttagcctgctagtagttacaaacccttcaactccacagctcgtctgagttgaagctccactcctctgagttagcccccaggatccccatgcttcagggatatctggctctaagagcaagtcaaataaaccaagaaattccccaggccagctccagaatcctgccttgtgtcttggctttcaaattactctgggaaagctgggccctccctaagtcccagtgcacatacacacctcttcttttgcttttgctgttttcctgtaatgataaagccagtgagccaggtattctattgggtcactgggccgaaccttcgccacctctgccagtgcctgggccaggcaatttccaaagcacctcttcaggtagttagtttccatcctggcagcctggaaaacatcaaaacaaagtcacactattttacaaacttaatctgatattaaaaatagacacattctaaccaattcagatttatttcaggataaatatgagatgcttctggatcacacctttcccaaaagaaccaacaaacacttacttgctgttatattcagtggaggattgtgccatgaaacaacctaggacctggcctcctcctgacggagtccatattcctgaagttgacacattttaattccaaaagagcccagcaaataataaaagctcagatctagccttaacattttctggaggcatttttcaatttgtccccctacttctcatattttagcttaaggaaggaaaaacaagtagacagatatccatatctatcttatacatatctatcttatggacataggaaaaaatatttcctagctctctccactgcaagggccttgaaaccaaaacacttcagtagcaatgagcacgctaagcatataaaccttgcttgtaaatagccttcatcacttaagaggaatcagggctccttggagaaatggctgattccaaggctggggcaggacaagcctaacgagcctggaacattttgttgtgccagaaagtaagaaaattctaaaaaatacaatcgttggggacagagaagccagcttgaag

SEQ ID NO: 697152 - DNA, 1520 bp, Homo sapiens
tctttgtgttgggaacgttccaaatatttcttctagctattttgaaaatacaataagttattgttgactgtagtcaccctactgtgctattgaacactaaaatgtattccttctatctaactgtattttgtacccattagccaacctctcttcaacaccccctccccaataccattcccagtctctggtgaccactattctctctacctccatgagatccactgttttagctcccacatataaatgagaacacgcaatatttgtctttctatgtccaggcaaattttatacgttaggaaccttggtatttaaaataaagatggtctgtcaacatctccccactctcagtctctcttcttttgtcattctacagaaccatctgtcaatggctacttcakactttagatgctccaagaggaaaaagtcatttcaggtaaggggcacctctctggaaaggtggttattatacctccatgttcaatttatttcacatttcactgtatcttggaagagttatttctcttattctcttatttgttttagaattgtatccataacccagtttcattgaagatggagtcttccttcaggtattcagttccttgatgtgtcttttgaaattcagggagagaaataaggtttaattcagtatcattttgatagtttacacattttcctactggactttaagaagttctggaagtccgtcagttagaagaccatatatgttaatctaggaaaattattttataccagctattcaattggcattttcctcaatttattcaatttgttttttggtaagacatattgtgtacaggtgtatgcatgtcctttatataaatatgaaaaatcaaaattgttcaatgagttatttctggtttaaatagttaaaacataattaaactgggtgtttattgcaaactgtgatctcagaaataatgataactgctttcccttttttatatttatttaaagagatattttattatttgatgaacaagtgtatgttgtattcacagtgacagtatttcatccaacttgattaaggtgtgttccaagtgttcgaacagaacgttcaagtaaagttgttttaacagcttgggtcttttcctaattgaataccctttatttccttctcctgcctaattgccctgggcagaacttccaacactatgttgaataggagtggtgagagagggcatccctgtcttgtgccagttttcaaagggaatgcttccagtttttgcccattcagtatgatattggctgtgggtttgtcatagatagctcttattattttgagatacgtcccatcaatacctaatttattgagagtttttagcatggagggttgttgaattttgtcaaaggccttttctgcatctattgagataatcatgtggtttttgtctttggttctgtttatatgctggattacatttattgatttgtgtatattgaaccagccttgcatcccagggatgaagcccacttgatcatggtggataggctttttg

SEQ ID NO: 697153 - DNA, 1520 bp, Homo sapiens
tctttgtgttgggaacgttccaaatatttcttctagctattttgaaaatacaataagttattgttgactgtagtcaccctactgtgctattgaacactaaaatgtattccttctatctaactgtattttgtacccattagccaacctctcttcaacaccccctccccaataccattcccagtctctggtgaccactattctctctacctccatgagatccactgttttagctcccacatataaatgagaacacgcaatatttgtctttctatgtccaggcaaattttatacgttaggaaccttggtatttaaaataaagatggtctgtcaacatctccccactctcagtctctcttcttttgtcattctacagaaccatctgtcaatggctacttcatactttagrtgctccaagaggaaaaagtcatttcaggtaaggggcacctctctggaaaggtggttattatacctccatgttcaatttatttcacatttcactgtatcttggaagagttatttctcttattctcttatttgttttagaattgtatccataacccagtttcattgaagatggagtcttccttcaggtattcagttccttgatgtgtcttttgaaattcagggagagaaataaggtttaattcagtatcattttgatagtttacacattttcctactggactttaagaagttctggaagtccgtcagttagaagaccatatatgttaatctaggaaaattattttataccagctattcaattggcattttcctcaatttattcaatttgttttttggtaagacatattgtgtacaggtgtatgcatgtcctttatataaatatgaaaaatcaaaattgttcaatgagttatttctggtttaaatagttaaaacataattaaactgggtgtttattgcaaactgtgatctcagaaataatgataactgctttcccttttttatatttatttaaagagatattttattatttgatgaacaagtgtatgttgtattcacagtgacagtatttcatccaacttgattaaggtgtgttccaagtgttcgaacagaacgttcaagtaaagttgttttaacagcttgggtcttttcctaattgaataccctttatttccttctcctgcctaattgccctgggcagaacttccaacactatgttgaataggagtggtgagagagggcatccctgtcttgtgccagttttcaaagggaatgcttccagtttttgcccattcagtatgatattggctgtgggtttgtcatagatagctcttattattttgagatacgtcccatcaatacctaatttattgagagtttttagcatggagggttgttgaattttgtcaaaggccttttctgcatctattgagataatcatgtggtttttgtctttggttctgtttatatgctggattacatttattgatttgtgtatattgaaccagccttgcatcccagggatgaagcccacttgatcatggtggataggctttttg

SEQ ID NO: 697154 - DNA, 1029 bp, Homo sapiens
caggctggagtgcatggttccatcttggctcactgtagcctcagcctcctcggctcaagcagtcctcccccttcagcctctcatgcagctgggataacaggcatgtgccacagtgcctgccagctgggataacaggcatgtgccacagtgcctgcctgcctgcctatctatctatctatctatctatctatctatctatctatctatctatctatctatctacttattttttagagacagagtcttactttgttgcccaggctggtctcgaacttgtgggctcaagggatcctcccgccttgaccttctaaaatgctgagattatgggcgtgaagccaccatgcctggccaaaattggcctgttttagtagttacctgagctcaggcagatcgagttggttacccttgttctgcctggtaagtttgtttcttatccttaggagggaagatgaaaaatcctggctctcagtcttggggtgctgaagcagtgttacacactggccctgacacagccattgctctacaggtgttagatgaatgactgaatgtccagtaggtccttaataaatgtaagaatccctccctccattaggttgaaccatatgaagttgccattttcctaggtaaaaaagggttgaattaaccagcctttcatgtggttcaacctaatacagactaaacactggggccaggcaattccacygtgagactagccatgtccagatctctgggcctgagctctcggccaagcctggcttctcctagggcctacccagttgtcagtgtcaggctctcagtcgagaacagaggagccgagcggggtctgcccccgagatggggcagtgctctcttgagcggttctgctgctcaggactgccccagtggtgctggccttgtcagggtttggccgtggtgggagccgtgatcctaacagcagctgacatttactgaacgctgtgcacatggtgggcgctgagcgcttggcctgaagtcacactggtggctttcttggagtttctatgtgatccc

SEQ ID NO: 697155 - DNA, 1029 bp, Homo sapiens
caggctggagtgcatggttccatcttggctcactgtagcctcagcctcctcggctcaagcagtcctcccccttcagcctctcatgcagctgggataacaggcatgtgccacagtgcctgccagctgggataacaggcatgtgccacagtgcctgcctgcctgcctatctatctatctatctatctatctatctatctatctatctatctatctatctatctacttattttttagagacagagtcttactttgttgcccaggctggtctcgaacttgtgggctcaagggatcctcccgccttgaccttctaaaatgctgagattatgggcgtgaagccaccatgcctggccaaaattggcctgttttagtagttacctgagctcaggcagatcgagttggttacccttgttctgcctggtaagtttgtttcttatccttaggagggaagatgaaaaatcctggctctcagtcttggggtgctgaagcagtgttacacactggccctgacacagccattgctctacaggtgttagatgaatgactgaatgtccagtaggtccttaataaatgtaagaatccctccctccattaggttgaaccatatgaagttgccattttcctaggtaaaaaagggttgaattaaccagcctttcatgtggttcaacctaatacagactaaacactggggccaggcaattccactgtgagactagccatgtccagatctctgggcctgagctctcggccaagcctggcttctcctagggcctacccagttgtcagtgtcaggctctcagtcgagaacagaggagccgagcggggtctgcccccgagatggggcagtgctctcttgagcggttctgctgctcaggactgccccagtggtgctggccttgtcagggtttggccgtggtgggagccgtgatcctaacagcagctgacatttactgaacgctstgcacatggtgggcgctgagcgcttggcctgaagtcacactggtggctttcttggagtttctatgtgatccc

SEQ ID NO: 697156 - DNA, 1029 bp, Homo sapiens
caggctggagtgcatggttccatcttggctcactgtagcctcagcctcctcggctcaagcagtcctcccccttcagcctctcatgcagctgggataacaggcatgtgccacagtgcctgccagctgggataacaggcatgtgccacagtgcctgcctgcctgcctatctatctatctatctatctatctatctatctatctatctatctatctatctatctacttattttttagagacagagtcttactttgttgcccaggctggtctcgaacttgtgggctcaagggatcctcccgccttgaccttctaaaatgctgagattatgggcgtgaagccaccatgcctggccaaaattggcctgttttagtagttacctgagctcaggcagatcgagttggttacccttgttctgcctggtaagtttgtttcttatccttaggagggaagatgaaaaatcctggctctcagtcttggggtgctgaagcagtgttacacactggccctgacacagccattgctctacaggtgttagatgaatgactgaatgtccagtaggtccttaataaatgtaagaatccctccctccattaggttgaaccatatgaagttgccattttcctaggtaaaaaagggttgaattaaccagcctttcatgtggttcaacctaatacagactaaacactggggccaggcaattccactgtgagactagccatgtccagatctctgggcctgagctctcggccaagcctggcttctcctagggcctacccagttgtcagtgtcaggctctcagtcgagaacagaggagccgagcggggtctgcccccgagatggggcagtgctctcttgagcggttctgctgctcaggactgccccagtggtgctggccttgtcagggtttggccgtggtgggagccgtgatcctaacagcagctgacatttactgaacgctgtgcacatggtgggcgctgagcgcttggccygaagtcacactggtggctttcttggagtttctatgtgatccc

SEQ ID NO: 697157 - DNA, 1029 bp, Homo sapiens
caggctggagtgcatggttccatcttggctcactgtagcctcagcctcctcggctcaagcagtcctcccccttcagcctctcatgcagctgggataacaggcatgtgccacagtgcctgccagctgggataacaggcatgtgccacagtgcctgcctgcctgcctatctatctatctatctatctatctatctatctatctatctatctatctatctatctacttattttttagagacagagtcttactttgttgcccaggctggtctcgaacttgtgggctcaagggatcctcccgccttgaccttctaaaatgctgagattatgggcgtgaagccaccatgcctggccaaaattggcctgttttagtagttacctgagctcaggcagatcgagttggttacccttgttctgcctggtaagtttgtttcttatccttaggagggaagatgaaaaatcctggctctcagtcttggggtgctgaagcagtgttacacactggccctgacacagccattgctctacaggtgttagatgaatgactgaatgtccagtaggtccttaataaatgtaagaatccctccctccattaggttgaaccatatgaagttgccattttcctaggtaaaaaagggttgaattaaccagcctttcatgtggttcaacctaatacagactaaacactggggccaggcaattccactgtgagactagccatgtccagatctctgggcctgagctctcggccaagcctggcttctcctagggcctacccagttgtcagtgtcaggctctcagtcgagaacagaggagccgagcggggtctgcccccgagatggggcagtgctctcttgagcggttctgctgctcaggactgccccagtggtgctggccttgtcagggtttggccgtggtgggagccgtgatcctaacagcagctgacatttactgaacgctgtgcacatggtgggcgctgagcgcttggcctgaagtcacackggtggctttcttggagtttctatgtgatccc

SEQ ID NO: 697158 - DNA, 1073 bp, Homo sapiens
agaggtatccatatcaataattatgcacttaaaccattatccacaatgcagccatttcatccaggaataggtggaacccaatccttgtaatatttctgggatgttgaaaagcttttaagggaacatttgaggacatctctccaaaaagatttgagagtctcatcctacccttatttttcacagatgtaggtaaatatgggtttgaaaagaaatcacctcagctaaatctgttagagctatattttgtttaaataatgtgtacagggtcctaaaatgtcagtttttcagtttagttcattaaagttaacatagatctagagctattgatagtttaaaatgccatttagagatagagcatgttgaataaacttgtccatagcatagctaaggggccacatatactcagcctccactcctgctttctattctgtgtcatgtgggagattttaaagggtaaatgaaggtcatccaattgatcgccataaatagtattctgtcaccacctccctaagagcaagagggtgaatctttgtggaaggcaaatgacaatgatcaaattctaaattttctctctttaattcatttttccttttcatcattttatagaaatagtgaatgggaaataaaatgattttttttctctcttttttgagtgataaaatgcatcttggtataccactagctttggggtatccctgagctctgacagcttaattttcagttggggtaagtacaaagccaggccttgagggctgctgtctctggtcccattctagtagaacatcagaaggaaggctgggcatgctggctcatgcctgtaatctcagcactttgggaggccgcagtgggyggatgacctgaggtcaggagttggagaccagcttggccaacatggtgaaaccccgtctctactaaaaatacaaaaattagctgggtgcctgtaatcccagctactcgggaggctgaggcaggagaattgcttgaacctgggaggtggaggttgcagtgagccgagagcgtgccattgcactccagcccaggcgacaagagcgaaactccgtctcaaaaaaaaa

SEQ ID NO: 697159 - DNA, 610 bp, Homo sapiens
gtcacagcctatgttgtcttcatggtggataatggccaatacagtgttgatacgtggtaggtatccagtaaatgtttgttgaattaattgtgtctgaagttaccggaggctacataaataacatagcctttttagaaattgccacggataaattacttggcatttatcttcagtttccatgtctatcaattgagaatgtgttgtattattcatcttcatgaaagagatgtagaaagattaacaaatagagtcatttaaaacaaaactgaagtgctagagaaattataatgaattatattaakaatgaaatttggctcattgtattattagtattctttttgtctattgaaatcacattaccaaatgatgacctaattataactcatttgccagatggttaattgtgatgaaaaaaaaaaaaaaagatttgctgttattgtaaaagttgtgtttttatagtaaaacatttttcagaattactaatttatcttttagtatgataattttcaccttgcaaatttaaaggcctatttctgactttaataaaattattctaaaaatacagaaagacgatcatgcttcaaaaaggcctaggctctaaaataaccag

SEQ ID NO: 697160 - DNA, 610 bp, Homo sapiens
gtcacagcctatgttgtcttcatggtggataatggccaatacagtgttgatacgtggtaggtatccagtaaatgtttgttgaattaattgtgtctgaagttaccggaggctacataaataacatagcctttttagaaattgccacggataaattacttggcatttatcttcagtttccatgtctatcaattgagaatgtgttgtattattcatcttcatgaaagagatgtagaaagattaacaaatagagtcatttaaaacaaaactgaagtgctagagaaattataatgaattatattaagaatgaaatttggctcattgtattattagtattctttttgtctattgaaatcacattaccaaatgatgacctaattataactcatttgccagatggttaattgtgrtgaaaaaaaaaaaaaaagatttgctgttattgtaaaagttgtgtttttatagtaaaacatttttcagaattactaatttatcttttagtatgataattttcaccttgcaaatttaaaggcctatttctgactttaataaaattattctaaaaatacagaaagacgatcatgcttcaaaaaggcctaggctctaaaataaccag

SEQ ID NO: 697161 - DNA, 610 bp, Homo sapiens
gtcacagcctatgttgtcttcatggtggataatggccaatacagtgttgatacgtggtaggtatccagtaaatgtttgttgaattaattgtgtctgaagttaccggaggctacataaataacatagcctttttagaaattgccacggataaattacttggcatttatcttcagtttccatgtctatcaattgagaatgtgttgtattattcatcttcatgaaagagatgtagaaagattaacaaatagagtcatttaaaacaaaactgaagtgctagagaaattataatgaattatattaagaatgaaatttggctcattgtattattagtattctttttgtctattgaaatcacattaccaaatgatgacctaattataactcatttgccagatggttaattgtgatgaaaaaaaaaaaaaaagatttgcygttattgtaaaagttgtgtttttatagtaaaacatttttcagaattactaatttatcttttagtatgataattttcaccttgcaaatttaaaggcctatttctgactttaataaaattattctaaaaatacagaaagacgatcatgcttcaaaaaggcctaggctctaaaataaccag

SEQ ID NO: 697162 - DNA, 642 bp, Homo sapiens
tagcctcttctccagctgtttgataattaatgaacaagcacaataaggaaacttactcaaaccaatgaacaagttagacggattttgacatcctagaagagaacctggagtatatgagttgacattatgctgagcgttcactttaaaattatgaaagtcatgaattttgcgtgcacaagaaatgttaaggcaggtctgcctgaactgtttcctgtgtaaacaatagttttaatacctgaatatccaaatatagtacactgtgtttatacaaaataggttaagctaggatttgttcaggagttctgaaagactagggatattcctggagcaacaatcttaaagaagctgtgaactttaggatttcctgaggccacagaaataatcygttgcaagtcagtaatcatcaggaaaatatgaccatgaccgacacacgtattattcagaggccatcattctatttaagttgaggagtaccttatgtcttcattgatctgtgtattccttaccattcaacaactctgcctttgcttatgcttcttaagacttactcagctgcaagaaatgatcagtagaaaatcccaacagctatagctgactttttatgctctttgtcacttataattgttcttaaatccatgctca

SEQ ID NO: 697163 - DNA, 666 bp, Homo sapiens
tgaaactctgccaattgggtgagtgggagtcagatgtataattaaatctccttctggaagatctgccactcagagatcaaatgttagcatcaaatggggctttccaaatatgatcgaggggcccatggaaagctgtcaatagtttttgccctggaaatttaaaaggaatagattttttaaaggaagggttctgactcatttaagaatctaagcmcaaatttagagaaagagaaaatgactaaaaatataaatcatgcttagaacaagttatgtctctctttctatgtagattgcatgttaggtttcttttagatttaaggccacaaatgagttatctctaggttttccttttaagacctctcccaataatgattttcaataaatggatggctatagccatgtgatgaatgacattttatatgaaaacactggatatttgagtttgccctttcatgacatctaagaaaaaagagggaggcatcaggagatattcacagccagaatagaacagatgaaaatccagcattacctttagataccactctatacagacggctcgctctgttaggaagaggtaaataacatttcaattacagaaaaaaaaaaaaaaaggtttgtacaaacactcccttttactccaaagcctaaataaatgctgtattatga

SEQ ID NO: 697164 - DNA, 595 bp, Homo sapiens
tatacatatatatatatacagagacagagacagagccaggcatattggcaagtgcctgtagtcctagctactcaggaggctgaggaggtagggktgttgctggagcccaggagttagagactgcagttagctatgattgtaccactgtactctagcctgggtgacagagtaagacctctgtctcttatttatatatcttggggcccacaaggaatttacttgtgagcaaactgtgagagacgtatgtagccttttatctttgtagctatctatttaggaaaaaatgggaggcagctttgcatgactcagttcccaagcttgacttttccctttgacatagggagtctggggccctaagattttattttcctttctagatagatagataagcttttttttttcaaattacacaaaataattctacagtaactgcataatctttcataatttataaggaaggttcttctcatactttcctctgtttagatgatacttggagaatgacatctatttctggaattacattcattttaagaaagatataaactaaacaaaaatacatttcaaacagagtaaccagaattctgaaggctct

SEQ ID NO: 697165 - DNA, 595 bp, Homo sapiens
tatacatatatatatatacagagacagagacagagccaggcatattggcaagtgcctgtagtcctagctactcaggaggctgaggaggtagggttgttgctggagcccaggagttagagactgcagttagctatgattgtaccactgtactctagcctgggtgacagagtaagacctctgtctcttatttatatatcttggggcccacaaggaatttacttgtgagcaaactgtgagagacgtatgtagccttttatctttgtagctatctatttaggaaaaaatgggaggcagctttgcatgactcagttcccaagcttgacttttccctttgacatagggagtctggggccctaagattttattttcctttctagatagatagataagcttttttttttcaaattacacaaaataattctacagtaactgcataatctttcataatttataaggaaggttcttctcatactttcctctgtttagatgatacttggagaatgayatctatttctggaattacattcattttaagaaagatataaactaaacaaaaatacatttcaaacagagtaaccagaattctgaaggctct

SEQ ID NO: 697166 - DNA, 575 bp, Homo sapiens
  misc_feature 11, 379: n = A,T,C or G
tacaatttttnatttagccttaaaattgtaaaactacttctttaaaatctgcgttttataatgtatttttctaatttaaacctgattatcttctcagttaattcaaattggatagctttttgtcaaaactgttgtagaactttgaataaacattttttgaataagcggttaataatatttttgtgctaatcaacattggattacttttctttcagattcaaacatctacttctttgggaacatcacagatttcacagaaaataattcctctcttggaacttccatctgtttctgaagatggtaaaatgaaactgcttaaggatatttttcttattttattaaaataatttctgttctgaggcatatttttctcaaaggnccacacagaggaaggaaaatatcttttccttttaaartctaggttcttgactgaggctctatgaatggaagacagattaacatgagaaaacaagcagatttactagcattcatatttcatgggtacatgcaagaagctcaggaatgagtaactcaaggtggtgattaaaatttgggtttatataccagtttgggct

SEQ ID NO: 697167 - DNA, 1103 bp, Homo sapiens
atggcagaaggtgaagragaggcaggcaccttcttcaccaggcggcaggaaggaggaaagaatgggaaactgccatttatagaaccatcagatttcatgagaattcactcgctatcacaacaacagcatgggggaaactgccccatgatccaatcacctcccaccaggtccctccctctgcacctggggattataattcagattacaatccagagatttgggtggggacacagagtcaagtcatatcattaacatttattaatgcaggcactagtctaagctctttacatgtattaactcatttaagcctcactagaaccctaagggataaatatcaatactattcccattttacaaactaaaaattgactcacaggttgctacacatggccaaataacacttattatctattatgtaactgatcctaaaaggaggtagcaaggagtagagagaagagaacaaactttaattagaacaaggctctgccacagttagctctgttgatttgggtctttatgggtaaagcgagtgggttggtagataacttatgaggctctttcaatttcaagccttgaaaatccttcttaactttattttctatgggaataaggtaaggaaggacaaaagatgagcagaggtgagaagcaaactgaagccaccagggctttggaaagtgtcactggaactgcagcagagttaatacaacagaactgatgcccagtaggtggtcaggaaatagatgctaaacaaaatgaatgtatgaagggaataactagtgaaggaaaaacaaaatcttcactcagagatgttaaagattgatgccatacaatatagcagaaaagaatgtaaacactgtgtttataatagaacccccagtgggactgcagaggaagaagaatgacagacactgatcctgtggtttcatggcagggttgtcaagagcatgagttctggcatcagactacttcaagtccagactctgccactctttagtgtggccttgcgcaagtcactcaatctctctgtaccttgttttccttatgtataattcaggaatactattagcactttcatcatagagtcgctgaaagataaattgaga

SEQ ID NO: 697168 - DNA, 1576 bp, Homo sapiens
gagctcccaaggcttttcccactacttcctttacccttgtatttcgctcaactatctacattgactcaactcctggtaaggttggaaacttctcctgcaaaccaggccttcagtttccccattggggcatatattcaggagctgagagtctccctttcccacttccacagtttgggcactcacagtgtttggggtgtctcctgggtcctacagtggcagtccacttccttcgcagggtctatgggtcctcttggaattcctggttcgttcttgcagtcattatggagctaaagttcatgatgcaagcctctgcatgctgttctgtccattcgaattggagctgcaatctagtcctgcctcctgtctgtcatgatgatcccaaacataaatcttgtatttttgagcagttaggacaataggcatttacccccatacccaactgtgtgcttggctactgtctcctattgagaggtgaagccagctgggcttctgggtccagtggggacttggagaacttttctgtctagctagaggattgyaaatgcaccaattagcattgtgtaaaaagggactaatcagcactctgtaaaatggaccaatcagtaggacataggcagggccaaataagggaataaaagctggccactcgagccagcagcagtaacctgctcggtacccttccagctttgttccttcactcttcataataaatcttgctgctgctcactgtttaggtctgtgccacctttaagagctgtgacactcactgtgagggtgggtctgtggcttctttcctgaagtcagcaagaccacgaacccactggaaggaacaaacaactccggatgtgccacctttaagagctgtaacactcaccacaaggtccacagcttcattcttgaagtcagcgagaccaagaacccaccagaagtaataaattccagacacattatctctttaaattccagggctcttttctttgctgcagacagatgaataagtctggcttagaggtagcaagaccatttatcagcctccagatgttccagcatcctccctatggatctcccattacctgcaagtcacaggatggcaggtgctatggtagagtcacccaggagctcctggaatggaggagatgaaacggtggagatgggaactcagattccttttatttttatacttttgggagtttatttctataaacattctttgtcttctacattctttttttagatagatagcccaggcaaggtggctcatgcctgtaatctcagcactttgggaggttgaagtgggaggatcacttgagcccaggagtttgagactagcctggtcaacatagtgagactccgcctctacaaataataaaaaaataaaagattagcagtgtgtgatggtgtccacttgtggtcctagctactcagaaagctgaggtgggaggattgcttgagcctgagatgttgaggctgcagtgagccatgtttgcaccactgcattccagcctcagtgacagagtaagaccgtgtctcaaaaaacaaaaagatagatgatagatagatagatagacatattaga

SEQ ID NO: 697169 - DNA, 1224 bp, Homo sapiens
tttcatggcctatgactaggatgaatgagggaagagggccctgccatgggaaatcaatcctaattgtttagaatctaacataaaactatttttaaactattaatattttaaattactcactgaaagggaaaatcattttccctgcctacaaagctatgatatggttcttacaattcaatcttcaaaaatatattttcctgatcttcacatttcgcatctccatttttaaaatgtcttcctttctccttatctaaaactttggatctcaattattttgacctttctcctcagattcagattaaacaaacctttcgctgcaagcctaactatgtgctgagcaatgcatagttaactcactctattatctagagatttatcattttacagatgaaggaacagaggctccattaagttcagtgactttcctgctttcacagcctcgaaagtggcctctccagagtttccaagtccacatgctgtcaatgggggggctctaggtaaaatatttttccagtatggcttgcatttagttttatccttcagaggtgttattcaaattgttatgtggtttggggaaggggctttgctactggtaatctcaggctggaatcaaggattataagcaactcacagaaggataaatacagctattgcacattgtaaacaatctgtttgttcacaagggatcttctccctgaattcaaataaccagacattaattcttctttgtagatttactctaaatggaggtccacaattaacaacatgtcaggtcttattcctttatatcatttcaattgcctaaccagtagattgttagctcaaagggtcagagcacatgattagtgagggaggacaaaggcttctccctctattcccgtgcaggtcaataggcatgcacacctcctaccctcggccagctcagaaggtgctggttccactagatactaagagggctggtagtcagaacttgtagggaagaaaagcagggcattctgcagctgactccgataccaaccaaaagataatatatgctaacatgacaacaactaacaatgattatggttaagtattattattgcaggatttcaaggcacaaccattcacaaaatataaacattttgtgaaaacatatgctagctctatraacaaaggcaagaaaaccttcatttatgttcccttctggaaatcaagcacgtcctttttgcttgtttgtttgctttc

SEQ ID NO: 697170 - DNA, 662 bp, Homo sapiens
ttccttatccttccctgcctagatctttgatatcttttctctccttttatctgccccagtctaggaaaatagcttattcattgttaactgaaacaacacaaaaaattatgctggtccatgtttaaaggaataagtagcttggtttatcagaaaatatagttcttcacctcactttggttgtcttctcaaatataatgttgcaaggaatgatgaagtacagtaaaaacccaaggcagggtgatatggtttggctgtgtccccacccaaatctcatcttgaactgtagctcccataatccccatgcatcctcggagggaccagttgggaggtaattgaatcatggggktgggtttttcccatgcagttcttgtgatagtaagtcttatgagagctgatggttttataaagggcagtttccctgcacatgctctcctgcctgccgccatgtaagacattcctttgctcctcctcaccttctgccatgattgtgaggcctccccaggcatgtggaactgtgagtctatcaaacctctttttctttataagttacccaatctcgagtatgtctttattagcagcatgagaacagactaacacagtaaattggtactgggtagtggggtgctgctgtaaagatacccgaaactgtggaagtgactttg

SEQ ID NO: 697171 - DNA, 589 bp, Homo sapiens
gtggcggctgggcagaggctgcaatcttggcactttgggaggccaaggcaggcggctgggaggtggaggttgtagcgagccgagatcatgccactgcaccccagcctgggcaccattgagcactgagtgaacgagactccgtctgcaatcccagcacctcgggaggccgaggctggtggatcactcgcggtcaggagctggagaccagcccggccaacatagcgaaaccccgtctccaccaaaaaaatacgaaaaacagtcaggcgtggcggtgcgcgcctgcaatcgcaggcactcrgcaggctgaggcaggagaatcaggcagggaggttgcagtgagccgagatggcagcagtacagtccagctttggctcggcatcagagggagaccgtggaaagagagggagagggagaccgtggggagggggagagagagggagagggagagggagagctgtttttttttgtttaatactctataaatctatgcctaatagaataaatagaactctacaggttaaggagctactgggactcaggtatcctggcccataagtgttacagagtgttcttgggtgataactgtacc

SEQ ID NO: 697172 - DNA, 627 bp, Homo sapiens
tttgcattgactccttcttcaaatgtcagtttcctttttaaaagtctatactctaaccacttttgcattttactttattttcagtgatcatacttgcttatgacaagatgatcacttttttctaaatgatgaggcaatgtggtttagtgcagaagttagtttctgccctctaggaatttacagagtaataaaagagataggaaaggaaaaaaagcaattataatacagagaaaataagtaaaataacaagggtagcaaataaaggtgtcttaagaagacagtatagaggctggaggcaaagcaagaaggcagaagactctacccatcatccccctgcaaggacaccaattcaacaattatctacccaaataaaacaccttcataagaactaaaaatcagatgagccctcatagtaactgatttcagctttgtatcactgaacraggcagtgaagagatagaacaaacagccttaaatcgctggcaccatccctgctacaccccaacagtggtggcaaggtacggggagtgtctctgggcactgggggagggagagcacagcaattgtgaggcattaaactcagtgctgtcctgttaaagaagaaaggaaaagtgaactgaactcagc

SEQ ID NO: 697173 - DNA, 2169 bp, Homo sapiens
tgagcaatttttgttaatctagtaccaaaaaactgatcattttaaggaaattaatgaggtcaaacttttgggccatcaaggctaaaaatcaaagcctggacttcagtcagttgagccaggcgtccttcatttgaggcctgttagtgtccaatcagcccattaccactgtctctccactcatttatttaatcccaggaaagaatataattttttttataaaagtgaagagaagatatttagggcatcaacgctgaagtaagaattgcttcaacaactataagataatggatttaatatataaaattctttcacttgaatgttttcaaccagaagataaataaaatttgtccagtgttggatttgttatcaatgccaacttccttatataagctgaaaatatcaagaattaaaatgaaccaacagtgttcacatttacaaataaaaaggcccggagatgtaagaaagatgttatcgttattccatctaaaatgtgatagaaggaattagaaaccaattttccattttgcttaagtaaaagaaacagactccaaattatttgctataacatcaattttaaatgcactgatttttctgttagtgtataaagcattttcaagctcagcttttttaaaataagttttcaaatgtaaaaacgttttcaaagataaactcctataactgaccaaatgttttatgttacattcaaatcaaatcaagaacaaattttaaattaggattcaagggagagtagtagaaaatgtaaatagtattctttggatattaaatattttaacttattcaagaactttataaaaattattatttaatttatgtattttgtaataatgaaaaaatattttaacaattatctgacatttctttcctcttaggaaaagataacatctctttataacacaggtattatcttacaattaagtgattacaatgacaacaattttatatatcacttccaggttaatccaaaaagtggcttcactttctcataggccacacagccaacgcctactgcaggaagcacctttatgatgtttgaggtgaaacccctgtaaaatcccaattttccttctttggtatatatttcttgaatgagctgaatcatagaagttgtttttcctttttccactggggctataaattggaaaaaagtataattcaatatttaatatttataaattaagaaaatccaatgataaatgggaatttacagagattgaaattacttcagaatatacctctctccctacctgtagaatgtcttgtgctgttcaatatggtacccactggacacatgcagctatttaaatttaaattaattaaaattaaataaaactaagaattcattgcctcagttgcactggtaacaatcccaagtattcacttgggaatagtgactatcatactgaatagcacagatataaaatatttccaccatcacagaaagttctatcaaacaacacttgaaagtctttcatgagggacctcaaaggaatatttggaattggatttgacacaaatagttagagaggaaaggatgggtgatgggatggatagagagattctccacctggagaatgtaaattaaaaccaaaaatctaactaaaaagacaagaagaaggagaatgtaaaataatatcacttaacacatgacstttaaacagtttagtcaagaagataacaataggattgtgtgggggtttttgccttcttgaaaagtgataaagatattttcttaaaaactaaattcctaacatttcactaagacaaaacagatatcctcccttttcttaatatctcttccttaagtaaattggaaaaaaaattgagttcaattccacaaatgtattaagttccagttgcagaatatgacaataataacagaactagggtaaaattacacgatcatatggaataactgtttatttgaaaaaactataatcttttctattgttctgcatggtactttctaattgtaaactccttaaagagatcattagtaactgaagaaaatgtggagaattccaaacaatactttgagaggaaataaaatctaaaatgcacaaaaagctttagtcagtaaaataataaattcgggattcttgcttatcaattctacagtttttgtctttgaagtcattaatttatactcat

SEQ ID NO: 697174 - DNA, 667 bp, Homo sapiens
tttttcataggcaatctcctggcctcaaataacacctctctcaggtgacacaccaacacttgaaatcttaagtctcagtatcacatttgcaacggcctactgaaaatcataacttggtggtcccatcaacagctcagtttaaatacgcataaatctgaactcatcacctctcttgagtctggctcacttcctcccgttctctacctgttttcaagatgtaactcagatgcaactctcctaaacactcaggcacaggacccaaatagaacttcgccctcttcctttcccctgctttctacttttcgagttgacagttctcaagacagctctatcatgagttaatttcccctagtcaccatcatatttcgaactcttattatcagttccccgaatgatggtaatatcttgcatctggtcttcccatctttctagtcttttttgctgtgttgcccaggctggagtacaatggtgcaatcatggttcactgmaaccttcacttcctgacagaagagtgatcctcccacctcagccttccgagtagctggtgctacaggcacacttcatcacacctggctaatttttgtattttttgtagagatgaggtttcaccatgttgcccaggctggtctcgaactcctgggctcaggcaaaccacctgcctcaccct

SEQ ID NO: 697175 - DNA, 616 bp, Homo sapiens
taaaaacaagcaaaaatctgtttctaccacttaccttgagagactcataatggycctgtctaatatcttcatattcttccatgatttcctcaaagtattcatcctttagattttcatctaacagctgggaacactgaaaatgcaagatagccatagatgagcaaaagatgataaaactggtgtagtaatggtcaatgctgataacacctccttcaggaaggcttccttaacttcatttcttctcccttcaccaactgtgctaattcctgcctggcgtgcaggaaaaggtaaactcagtgggcttgggatgttcaaaccctgcacaagccaaagaagggactggcctttgactggtttctgggagacaaactctaaacccttgggacagcctgcctgataagagagtcactgtatacctggcaccctgggccacgtcacatcgtttatgctaacagtctgatttatggtgggggaccttcgctcatgcttatgtttgacctctgcagggactgaagactgaacaattaaggctagacacatgggcattctgggcctatgtgaccaacccccaataaaaacccaggacgtgaaggctcaggtaagcttctgggttggc

SEQ ID NO: 697176 - DNA, 1409 bp, Homo sapiens
agcagtctgcaagcaaggcagagcaaaagggagagtctctacattttgagaagccctgaagcttctgatcactgtggctaacagaaaataagagccagggtcatgtctgaccctgcttcaaaagaaacattattatgaaccagaagaaattcctactcatataaaatatggctgtagcctgaccctcaagtgattcttgggcaaatacctgggcaagaattaacttcaaccaaatatgtgtacaatttgaaaaagaaacagtgcaagctataaatgtacagcagattatacctatatataattatatagaaaattacaagtgattcaacaaaaacaaattgcagataattaacacaagaaaaaatkgttgtctttcatgtcatggaacatatgaaaattgtcatcaaacacagcatagcaaatcaatattttaaataaaaaccttttagataaaaaatcttaaagcagataaatgagtttagagaaaatatatataataagacagtgaaaccagagaaataaaaccaatcagcaaagacatgaaatggcagagatgaggaaagaagtaagagataaatagaaactatcatggaaatgagaatctcaccagaagcagcacagaagagaaagacaaactggaatgccagtgaggaagagcttgggaaagatgagctaataaaagtcaaaataactattaaaaagaaagttactgttgaggaagaaagcagaataaatggaattttcaaatactttaaagtaatttttagtttttttaaatttccagaaatgaaggataacttgcatgtacagattgaaatatcctatcatgtcctagaaaaatctgatccaggatcaaaattgagtcaaatgttagaaaagtttctggacttcaaaagtaaagagtggggaggaagaatcactaacatttaacttcatgaaaagtaaaaacccaaatagatgcacaagcatatgtgaaagtaaaatggtctttgctttatgaagaagctggcctaggtagggttacaaatgggttttactgaacttaaacagctaattcctacatctctgaaaataatcagaatagaaaaatagatggaaaaatttcaaacccactgtaagagactaacataaatccaattccaaaagctgttaatcataccatctaaaaagaaaactgtcgactaatcatgtgtttacaaaccaaaataaaatattaacaaattaaatataacagtgtatttaaagaataatacaccaaaatcagcatagtgaaccccagaatacatgtaagcttatactaggaaaaccattaatgaagtttttgacattagctgactaaaagagaaatatgaataaagaaaaaagggccacatcaatttctaattttaaaatgaaaggaaataaaatca

SEQ ID NO: 697177 - DNA, 621 bp, Homo sapiens
agttaatcaagggtcatattgcaatccggcccaagtaacatcgttaatcagtgctctatttgtcattcccttttatatgcattatttccttcaaaagcagcatccaaacttattaagtgaatttaataagtacttacaaagtactatcttagaactgtccaacaaactaatatgtacatagttcaatacatgcatattttagtacaaatgctaactccattatgctttcataaaatgtgtcaactgtcttatagtagtactggttccaactaaaaaaaaaatcaatctttcaaaggttaaatactkaaaaataataatattactgagataatcagagccaggcacaatctagagtcatttagaaaaacaagcagtagttacacctcacataaacaggactgcagaaacactttcgtgttttgataccaaatgccaaacactagcaaataaccacctgattctttgtgattttataatttataatgcctttttacatgcattatatactctaaacctcataatcttatagaatattactacatcccaatttatacatgaaaaaacagactcgaaaacaataaattatttgtccaaagttaaatttcaaggtcttaaattcca

SEQ ID NO: 697178 - DNA, 930 bp, Homo sapiens
tatcacatggtctacccaggctggccagcccttcatattatttctcagatctgcaaagtcggcttgttgataaaacatcatctgcttgaaagggagtggggataataacagtgtctatccccayagggtaattgagagggttgaattagaaaaggcacttagccagtgctctatgaatattggcaagttgtcctgttacccttctctgttataatcatagattgctttatctccaggagcaaggaaaaagggcttgctctctttacttctgtttattccatcatacgggatggatggctggaatgttagatgtgatagtgagccatctgggaccgtagtggcaaggccactcccaaaggatggtgaaactggagaaaaaaggagaaatgacctcccaaatagtccccaacctccagtctgttttatgagaaagaaacacacttctgttttgcttaaaccccaggcggctatcttatgtctaatacccctcttaattttattaatagcagtagtagtaccactagtctcagcaattatttatggtttgctgagaagggaaacttgtgtcagagtcgggggactgaaatcctgacacctgtgcaagaatgaaggaattgttaggcatctggcaaagggacaggcaagaatgttctggacagagagaacagcatgaataacagtgctgacaataaaaaagacacatagtatttaggaaagaaaaaaaattgagaaggggccggtgggggtggctcatgcctgtaatcctaacacgttgaaatgacaaggaaggaggattgtttgaggccaggcgttcaagaccagcatgggcaacatattgagaccccttgtctacaaaaaaaaaacttgaaaatcagccaggtgtggttgtgtgcacctgtagtcccagttactcagcaggctaaggctgaa

SEQ ID NO: 697179 - DNA, 930 bp, Homo sapiens
tatcacatggtctacccaggctggccagcccttcatattatttctcagatctgcaaagtcggcttgttgataaaacatcatctgcttgaaagggagtggggataataacagtgtctatccccatagggtaattgagagggttgaattagaaaaggcacttagccagtgctctatgaatattggcaagttgtcctgttacccttctctgttataatcatagattgctttatctccaggagcaaggaaaaagggcttgctctctttacttctgtttattccatcatacgggatggatggctggaatgttagatgtgatagtgagccatctgggaccgtagtggcaaggccactcccaaaggrtggtgaaactggagaaaaaaggagaaatgacctcccaaatagtccccaacctccagtctgttttatgagaaagaaacacacttctgttttgcttaaaccccaggcggctatcttatgtctaatacccctcttaattttattaatagcagtagtagtaccactagtctcagcaattatttatggtttgctgagaagggaaacttgtgtcagagtcgggggactgaaatcctgacacctgtgcaagaatgaaggaattgttaggcatctggcaaagggacaggcaagaatgttctggacagagagaacagcatgaataacagtgctgacaataaaaaagacacatagtatttaggaaagaaaaaaaattgagaaggggccggtgggggtggctcatgcctgtaatcctaacacgttgaaatgacaaggaaggaggattgtttgaggccaggcgttcaagaccagcatgggcaacatattgagaccccttgtctacaaaaaaaaaacttgaaaatcagccaggtgtggttgtgtgcacctgtagtcccagttactcagcaggctaaggctgaa

SEQ ID NO: 697180 - DNA, 650 bp, Homo sapiens
atttgaagagttcctggcatatgacaagagttacaatagtgtagctacaattattatccaggtcagaggctgtggagtagaagggttaagagtgagttttgttttgttttgttttgttttgttttgttttgttttgttttgttttgttttgttttgtttgagatggagtctcaccctgtcgcacaggctggagtgcactggtgtgatctcggctcactgcaacctccgcttcccgggttcaagcgattcttctgcttcagcttcccgagtagctgggattacaggcacccggcaccatgcctggataattttttgtatctttagtagagatggggtttcaccatgtaggccaggctggtctcgaactcctgacctcgtgatctgcccaccttsgcctcccaaagtgctggaattacaagtgtgagccactgtccccagccaagaatgagttttctactaccacattgccctgcagaacaatctgactctccttttgttgaccgtttgaccttgtacttaactgtgtctcagtttccttatttatatattaggaataataaaacacatttctgatggaattattgtgaagattcaatacattaatacatctgtaagatttagaacaatgcatgggacaaaatagatgttca

SEQ ID NO: 697181 - DNA, 1368 bp, Homo sapiens
tccctgaacatttggggatcagagttttaaagataattcggtggataggtgcttgggaagtgggtagcgtcaattgttgatggaatcatagggggtcaaagtaaatttttgttgctsttggtgtcttctgttcctgggtgggatggcagaactggttgagccagattaccagtttgggtggtgtcagctgatccactgaatgcaaggtctgctaaatatctcaagcagcctaaaaaattttaggttttgcagtaatgatattatccccaggagccatttggggaggttcagactcttgcagccagaggttgcatgacccctcaatcataatttctaatcttgcagctagtttgttagtcctacaaaggcatactggtccccaggcaagcaggggtcttttcgggaaagggctattatcaattttgtttcagagtcaaaccatgaactgaattccttcccaaagttagttcagcctatgcccctgaatgaacaaggacaacttaaaggttagaagcaagatggaatcagttagagctgatctctttcactgtcataatttcctcagttatcatttttgcaaaggcagtttcagtttttaaactattctttgcattcccacattctaattttggaagttgggaaatacagaaagttctttgttttaactaacaattacaaaaaacaaaataaaaattgaactgataacaaaagagcagaatgaataaaagtttcaaaagatccacctattagtaattcaaataatacatgaccagcaaaaaaatgtagcaactgacaattttttattttattttatttttatttttttgaaacagagcctcgctcggtcacccagactggagtacagtggcgtgatctaggtttaccgcaatctccacctcctgggttcaagcaattcttctgtctcagactccagattagctgggcttacagatgccggccaccacacctggctaatttttgtatttttagtagagacagggtttcaccatgttggccaggctggtctcaaactcttgacctcaggtgatccacctgctttggcctcccaaagtgctgggattacaggcaattttcataaaatcaagatgttctgaaaatgaagtatgtttccccaatactgagagaattccattgttcccccaatactgagagaattccatgtatatggacagactaggagctttacaaagttatgagagttgtgtggcagtcatacctcttacgggaatactaaccaggtcatccaagttctagtaacatgctgtttttgcttaaggatactgaattttttaacccttactctaccctaaatagcccaattttctttggagtaaaagtacacagaat

SEQ ID NO: 697182 - DNA, 626 bp, Homo sapiens
tttgtgtacatgatttaaaaagagaggaacagacattgaaatgtgagtgaagaatttgaaataaatattttaatgattttaattgtatacattaaatgggtacaaaatgcctttttgctcttcctacatgtattataaataatatcttttaatgagaataatgtgattgaatatgcccagtcatgtttgaaatgttggtttacactttgtaatacagctatttaaagatctagttcgatgtttggttcattttgatactcgtttttgatgtcttacttagtgggaaaagatacctctcaaaacatgtagatccaaaacaaagaragtattggttgactataccaactaaatcatgataatcatttttaagttttgtccagaattatgctaaagttttttttaaatgtaatatgtctttttagtatagctgaagttttattctcctgttttagttttcacttgtctgtttgttggttggttttatggctttttgtttcctcttgggtaatatgactcagaggacatattgaggaagtgtggtagaggagggttttatgagcatatatttctctaccatctttcccaggaattgaatatcatattttcaaaaatctagtaagttacct

SEQ ID NO: 697183 - DNA, 1512 bp, Homo sapiens
tttccgagggggctacgttgcctccgcccccagcagctccgccaccatcgccctccagctctacgccaccccgcaccgccctgctccgcctactctcccggctggagacgctcaggcagcgagcgagcgcaaggaggaaatgacacggagctggagaaagggggagagaggggggaaaaggagaagggaaaaaaagaaaagaaaagaaagaaggagaggcggagggatagcgcgtaatggacaagaaaacggagcaatggggaggggcagtcactgggacctcgcctataggatcgctggggagtgggagcgaggcgaggcctcacatcaattgttacattgtttcattcaagcagggcccctctttggtcctcctctttactgccgggttccccgcccctccagccagcccaggcgaggggaggtgaaagtcgttagtgtggacggcccgcgtggctgagtgggctgaaacgctggtttcctgattagcgcgttcatgtttctctgactgcctttttcttctgaaggtcccgagaacggagacctgggagggttaaaaggctgctaatttgtggaccttgcctagaggggtggaaagcaaagccagcaggccagcggacatagtgaggctgtgtgtgtagactgctctgtgtgtacgcgctaggtgtgtggggtcattatgaaacattgccccagagcatagtttaaataaagaagcactttgaggatgccccctgctcgggctcccccgcaccctggctcagtgttggtgtctatggctagcactgtgcttgtgtatgttccagtcatctggagttcctggcacggccttgcacttgccccaccgagatgagcaagccagcaatcagcaaactttatgactagcagtattgtctctaaacaaacctacaggaaagagcatccattgataagctggccaattaataatgttgtgcctttgggaagaatcagcttttagactgggtccagaacatctctgcacatctgttcaagcttgaccttgtagtttctgagctgggcttttgtaatagaccaaacagccacaataatagtcctgaaaagcgaatttgttactgaatcttgtgctgatttctctgccttcacttggacaggttatcttctctctttgaggtgttttctctggagccacatgcgggcagtgaatttttaaagggcctcgcactagcggagaaagtgttgacaactcagttgtgactcaacaggatgttcccactctgtctcgcctgttcagtttcttcccctgttcttgtgcagcttcttcttcatggccaacaaacacactgcggccccttccttcacagccagctttctgcggtcaaggtttccactctctacttctacttcctcacctgtcactgcctcttcaacgcacagcagcctgcggtgtgctgcagcaggccactgaaatgtctctcaaagtcmcccccctccatcaatccttttttcttagcacccccctggactgtctgc

SEQ ID NO: 697184 - DNA, 922 bp, Homo sapiens
tcctaaatgatgactataatcctatggtctggcctgtctttcccaccccaactttttccctacaaaaatttgttctaatctatcaattacttgggaaaagatctaatcaattcacctgcaaaacgacattgaaaactggcagaagcttaatgtgctagtgtgtcagtgggattttcattttgattataaatttttttttaaaaaactctcacagcagaaattcaggcatgcagggatatttttgggttggaggtttcccagtccccagtccatattatataggttagtattttccatgcttttgatacacacacacacacacatacacacacacacacaaatatccattacaagctttaagaacaagtaaactgacttttaaaaatcaatgataataattttattataatgatgacaataatttctttgcaatatttcaccatgacacctatatctagataaataatgactgagttataggttagatttgatatccctttgggttcttttcttagctgtattttcactaaaaaagaaaattttgatccatgaatttaagttgttgggaatggcagtgagtatttggtggctttgacagacagttttggrtatttatatttgaatggaacattaacctagaaattatagaatgatttctcactaaagactactttcaatacttcattagacaggaaaataataagcatttcacaattaaaagctgaaaggtttaaatgtttcaacttggaagatgaatctaattatttctttgattacatatagctctgaaaggtgtttttttcacattttgttacagcatgtggatgaagttttttaaaaatgccaaattatcttattcattaagggaagataatcatcaaatcaaaactattgctgattaaaccatttgtatcacatttaa

SEQ ID NO: 697185 - DNA, 620 bp, Homo sapiens
aaaacacttccaataagcctgaattacaaccccaatatcatttcagttttttagattaacatgtgaaataaagagtttttcttagtcacagttacttttactgccaaaaacccaatgaatatctttccctctggaaccaaatacactgtttaattttaatctcttagctgactgacacaggaacaaaactggttttgcattttcccttttcatttacttttctgcaattgatcactggccttaaaaagttgagaagatatatttcagttgccattttctgtactggttttcattcattagttttccttctcctccttcctttactctgcaatctccttctcttctatcacatcagttatatctcttgccacaagctcacataatttctgtcgtgtgtctttgtaatatctaatttgttacgatgtattatgcatgcaaatgtaattgcagaggaggmgttaagcagaatgacagcttaaagaggcatattttttttgactctgtcactcccagaaaacagcataaagagatctgggacaactagatgtcgtgatgaaaacattagaacgccaggatatcaaattaaacaatagaactgtcccactgaacccccatcatct

SEQ ID NO: 697186 - DNA, 1451 bp, Homo sapiens
tttaaaataaatatttgtaaaataaaaataaatatttgtaactatataacatccacatagagtttttttgtttgtttgtttgtttttgagctggagtctcgctccgtcacccaggttggagtgcaatggcgtgatctcggctcactgcaacctccgcctcttggattcaagtgattctcctgcctcagcctccagagcagctggaactctaggtgtgcgccaccatgcccggctaatttttgtgtttttgtagagatggagtttcaccatgttggccaggctggtctcgaactcctgacctcaggtgatccacctgccttggcttcccaaagtgctgggattacaggagtgagccaccgcgcccggccccgtgtaagttttatttaggtacattccaaattaaatgaaaagcttctattgttttgtttttatattaatcatgccttttgaatttctaggttttttttgtttcttgttttttttttttttttttttgagacagtcttgctctatcacccaagctggagtacagtggcacagcctcagctcactgcaacctctacctcccaggttcaaatgattctcttgcctcagattcccaagtagctgggactacaggtgtatgccaccaygcccaactaatttttgtatttttagtagagatggggtttcaccatgttggccaggctggtctcgaactcctgacttcaagtgatccacccacctcagcctcccagagtgctgggattacaggcgtgagccacctcacccagggaattcctgtatttctgatgtttggctgggggccttgctaaccctggaagggactgccctccccaggactggtcatttcctagaaaatggcaatcatctcctgatccgttggccttaacatagctcaacaatagtgacatctacagtttaaaagttttctgtgtggtttcattctaactctcaatataagtacactcagattgtttcccccacgatattcataaatcaaggattttttcttagccttttctcttgctaaatatatcatacttctgtcaaatcacttgctaatctttgatatcaattcatataagtttggaggggggaaaaaaacacaccaggaatgatattttacaaattcttactgtgctccaaaaagtgtgccagccccggcaggtcatctggatcagcgaaactcccaactccaacacaaagagccgctgcagactggagtaattagaacacatacaaatagttgagtcaaccccaaaggaataatattcgcatcttatcttaaggattcatttggagatggatgttttccaataggagtaacaaaattctttccctgagaatcaggaggagcagcaaagtgaaactcaccagaactgtgtcagtttcaccctgctgctcctccgcttgccatcctgccaaatgctgaacaggtgcagacctaa

SEQ ID NO: 697187 - DNA, 1610 bp, Homo sapiens
cattgtaaacaaattcctactttcaataagtggttgagaaaactcacaaatgtttttctgccttggtgagctgggtaaaataacaagaatgcaattattattacttataaatattgtttttgccagtatttactgagcattttccttatgattgaattgcgctaaatgatttacatggactaattcactcaatcccttttcaacaaataataaccattattatcatccttattttataattgaggaaacaggctaagaaggcttaaataacttggcaagtgcacatagtaaccatgttacaaggctgagccatgagtacagttctctaaactcagcacactcttaatctctatattgtccttttttatcaataagatctctccttcaaagggatgccttctatcaccattccatctgaacggagctactgtgagtcgagtcactatcaacaayacaatgtaaccttgtcgcatattcttcacagcattaaccattacctgcaactaccttgcacacttgttttgttgtttataattcatctttctttctctggtagcatgaccttgtctatcaggtttagtactgtatttgcaagataatagttcttgtacatagtaagtactctgtaagtaattgtggagctaatgaatgaaccacttggtttctagtcatgccacataacatatcccacatgtccaactgcctatgtatatcttaaactaataatttttgaaatatttaatgtaatatgtctaaatgtgaactcatttttatcaactcagtaaattaaaaagaaaaagcctttatttcttaagtcttaaccctaagagtcatttttgtctttcttttattttttaatccaaaatactaatttatgtaggatcagccttctaaatatctcatggttctttttacttctttcattcattgcaatatctatagctaaagctgccattgtctctggattgaatctgttcaaccgctttctgatgtctttgccttctggtgtaatcttcctataatctgttttccactctagaaatcaaaaggtgcatgtttagcacaacagacttggaatttctgtatttataacagtttgttgtgcctgtcctgtctttggaataaaatccaaattattttaacatgattcaatatatttttcaatattgaaattgtacttttccctcttcactagctatctttcagaattctccatcttacgtgaactaggaaatatagggtagggccttagagcacagatttctgattcaacttccctagttctacaaagagactccatccacttcttagttctgtgatatggacagactacgtaatccatgttgccccagataacttgactgtaaaatgggagtgtgtgtatgtgatggtaataataattgcacctaccaggtaaggttgatgtattaaatgagtaaataatgcaaaacactgaaagaagttatttgcttagtaaatatcagctctttctttatagttctagggtcctatttttagttctatgagtatgtcatgttttcatatatctctgtaattttgcaatgataaccattcagcttttgaattctatatatacactccacttaatc

SEQ ID NO: 697188 - DNA, 634 bp, Homo sapiens
cccaggttcaagtgagtctcgtacctgtctcctgagtagctgggattacaggcacacgccacctcgcctagctaatttttgtatttttaatagagacggggtttcaccatattggccaggctggtctcgaactcttgacctcgtgatccrcccacctcggcctcccaaagtgcaggattacaggcatgagccactgcacctggccaaaatcatattttatagtaggttattcagtatctaccaactggaaagtcaagaattctctcatgtattcatagaagaaatattcgtaagtggtgcatgatagaaagaaatacaaactatgatggcgtaatatgcagaggtcacatatcctatttttattcaaatatatgagagttctggcattaagttatgatggaatagcatgcattggactaagccttctgctgggaaaagtcatcagctctggacaaaaccaagctgctgtaagttccaaattatttataacatatcatacataatacccagtatgtaattttaaaattactaaacaaagtcaactggaaaatatgaccgacagtcaaaagaaaagttagataatagaaacaaacccacagatgactccactgttgaaatttgctgaatttaaaat

SEQ ID NO: 697189 - DNA, 604 bp, Homo sapiens
cgtgacccagctcaggatggtgaaatgtgtgagggcggttctgctcaactactatctgtgcacttgggaaaggattccttggtttttagaaggagcaaaagaaaaagatggtttattctggagtgtcatttctggatggctgccactgtgtggccaccaggcaaccataaggggagttgggttaggacaatgccagtacacccaacgtggcggagttgagagatggaagaaacccaggtccttgggggcattgtggaattgccgaagtttactaaccttgaagctgccttaactcttagtcttaattktctaaagcagaaatctgaggattcctgcaatgttggtaggtacttgcatttatgttgagaaatttttctgagtgtggcccaagaacagcctatgtcagaatatttcagaatgcctgctagaaagctggcttttcttcatatcttccatattataggaaggaatatccatggcggggcctaggaatcaccattttaacaattcctctattcttctgttcactcaagattcagaatctgtattttcagatacctgttgcagggactcagttcatcacccccatggagaacagccttgc

SEQ ID NO: 697190 - DNA, 1800 bp, Homo sapiens
gtgaaaatttttacactggcatctcacttgagcagtctaaatgatggcacacacatggaggaaaaatattaacagtggtgacaatacktacaattttccttccaattatgcatttctatatatactatgtgctatgggctaagttgctgtatcccccaaattcctaggttgaagctctaatgcccggtacctcagtgactgtatttgagacaaggcctttgaagaggtgcttagcttaaaacgagactcttagggtgggtcttaatccagtcgtactggttatccttataagaaaagaaaccttggatggaaaatcgaggcaccaggagttggtgcccagaggaaaggccatgtgagaacacaggaagaagagaactcagaagggatcaaacaggccgacaccttgatcttggacttccaacctctggagaaagtagaaaataaatttctgttggttaagccacccagtctgtggtatttggttaatgtagccctagtaaatgttatttacacatacatatacacatatacaaacactctagcaaaggatgctttcatctacacatccacacacacactcctcacggatgattatcttctgcagttgaaagcttcttcatatatttaatagcattgccaaacattgaaaatagcccttcaccaaactattttggaatttggtgcattgttattatatatgacagatgttttcatctcacagtaaaatgtgtaggttaagcctggaaaatactacataaaaaaaaattgatctgggagttgtggctcatacctgtaatcccagcactttgggaggctgagacagaaggatcgcttgagctcaggagttcaagaccagccaaggcaacatagtgagacctcattactagtgaaaaaaaaatgtatcaggtgtggtggcatgcacctgtagcctcagctactcaggaagctgagacaggaggatcgcttgaggctgagagatcgaggttgcagtgagctgtgatcacaccactgcattccagcctgggtgacagaggagaccctgtctcaaaaaaaaaaaaaaaaaaatgcatcgagagatacaaacttcttcatgtttgttcagtttgctaaaaaagttcagataatattttatactgtgcagggttacacatagatgagattggctagcaaagaatttcgggagcaaaaatgaattccataattagtcaacttttccttttaggtattactggattgtttctctgtgaaagacaatcaccaaaataagattttttcgtgtttttttttttttttttgccaaggatttggtagctctgctttgtaatatgtgatgatagtaataaataaataatttctctggcattaatgatattaacattttatgtaactcattcattaaggtctcaagtggatgctcaaagctattacaattcagtacaagtcacttagtatgaaacacacgcctcccacagcactacactggttttaaaattgatagcaccatcaggtctacaaggtcttgagaagaatttcattttctcaccagtctaaagtgattgtgctatgttccctgaccttcaaaagctttttgtcatttttctgccatgtagtgcagaggttctttcctccatccatttcatttaaatatgtgctatgtgggtaaatccaataaactaagtagccatttagttaaaacccttgtgggggtcagagctctagggaacatttcaaggcactaatgttccttcttcaactctgatttcctagatcattgatcatcttctaccagctctttgaaat

SEQ ID NO: 697191 - DNA, 1304 bp, Homo sapiens
ggagccccgttaggctttaccttctgtttacttcatatctgagacttagcagtaacgttgccgatctccttgtgtttctctccgattttctcatcctccttgcccagaaatgtctgattatctcttcccctatgcaaaagaattcagacctccccatttcccgtatgatcaaagttcagtctttatcctcaaattcttctgacgctatgatgattcccactcagctgcatgcattatctcctccaaactcgtttttccctagtcgtttaacacgcatcatgattctcacctgttaacctgtcacctttatcctcccaaacaacgcagatacaggtgaaatggccctcactctggctccacacttaaggggaccctcctctggccttcctcctccttctggggcaaaaaattggcagagctaagggaacgtacccactgagcccacatcctgctatctggtccatgcctgggacacctgagaccctgctgcaatggttcaatggcagctttcatgacctgtgcaggtgatggggaaatggactgagtttagacttgcaggcctgggtgtttccccacgtgcataggaggctctttacagcacaggtggaacctgaggggagggtccgggatgggagtgtgacatgcaaaatggtgcatggtattgaggaagccaaaagagtttcaagaagaatggaatagtagatagtggcaactatagcaaaggtgaaataggacatgcactgaaacatacatgtgggtttggcaatttggaggtctcttcatctaagcctgcgaaagcacctccagtaattcttctcattttgaagtcaaatctatttttcttagtctgttcgtgccactgtaacaaaataccacagactcagtaatttatataggatagaaatttacttctcacagctctggaagctggaaagtgcaagaccaggcacagacagtttcagtgtctggtgagggccccgtctctgcttcctcaatggcaccttcaactctgtatcctcatatggcagaagggatagaagagcaaaagggggatgaacgctgtgtgctcacatggcggaagtgcagaagagcgaagaggtctgaacttgttccctccagccrtcttgtaaggcactaatccattcataagggtggacttaatcatccatgacaatcacttcccaaaagaccctacctcttaataccaccacaatgagaattaagttgcaacgttaattctagcgggacatattcaaaccatagcagtactcatattattacaactacactactagttgaactag

SEQ ID NO: 697192 - DNA, 656 bp, Homo sapiens
ttgaaccaattccgaagaaacggaatctaatcatagatatctctgattgcaaagccaatgatcttaattcttttcactgatgctacaacacccactgcctttgagaaggaatcaaccaaagagaattgcttcctactttacaagtttgcctgtaaggggccttggcagcccattttattaatgtctccagtgctatgagagtaaaccagcaagaactgatacaacattggcagtgactaatgacttcagtctgcctcttttcacaacacagaaaggaattttacctgatgaccaagtagacataagatctttacaaactgacacagtccagattttattctgtgcttaactggaactgcaaaaacaaagtgataactgttacaagaatctcaggaacatttcagacatgattgttttccaaaagagaacaatatatgtatattactctttattaaaacccataaaaactcaaatgacaccagtggcaaataagaagttgtaaataagtcatggccttcttaagcccatggatttgcagctagctcytgacaatgtgtctctaacctccttgctggattcagtcacacatcactgcacaataggcattctctgctctttaaaaccctgagatgccagtgccattctcatttgcattt

SEQ ID NO: 697193 - DNA, 613 bp, Homo sapiens
agtccaaagtcctgagaaccaggggagccaatggtgtaactcagtttgagtctgaaagcctgagaaaggagagcctttggtgtaactcctgtagtcaaaagacccaagaaccatgagccccagtgtctgaaagcaggaaaagatggatgtcccagctcaagaagagaaagtgaattcatctttcctctgcttttttgttctatctgggtcctcaacagattggatgatgttggcccacattgtgggtggtgaagagggctctttactcagttcactgattctcttctggaaacacccacactgacaaacccagaaatgttttaccagctgtctgggtatcccttaacccagtcaagttggcacaaaattaatcatcaggtgaactttggcacaaaattttggcacaaaattaatcatcaggtggtatcaacatgactagcwccaggaaagaaagaaaaacttattggtatttttattgggattacaataaatgtataagtaatcttttggagagaactgacatcttaataatattaaggcatcctaaccaagaacataggatgtatttccatttattcaagcctacttttgaaacattcaggagtatttcata

SEQ ID NO: 697194 - DNA, 1230 bp, Homo sapiens
ttgaaatgtaaaacttggtaacatattaatactctatcttaggtacacttaggaacaaaattggaattttgccaagaaacaactaaggtttcctatagtaatactttaatttgtgatttctattaaatttctaactagagtttgcaaaaataaagtaggatatgtggagcacaacaaacaatacaggatatatgtttacatgtgtaaatcataaacctaagcttgttatttgaggccataaaattggttgaaatcaccaaatagtagcataggaaatcttgacgagatagaataaaaaaatagaaaataaaatccttgtggagacataggcaataatgaaggtcacaaatggtaacatttccatagtgatttgatgttaaaaagaaagaccagccaacatcagcagattacttgaggccaggagatccagactagcctggccaagagggcaattaaaaaaaaaatacaaggcccggcgcagtggcacacgcctataatcccagcactttgggaggccaaggcaggtggatcacaaggtcaagagatcaagaccatcctagccaacatggcaaaaccccgtctctactaaaaatacaaaaattagccaggtgtggtggcatgcacctgtagtcccagctactcgggaggctaaggcaagagaatcacttgaacctgggaggcagaggttgcagtgagccaagaccacaccactgcacaccagtctggtgacagagtgagactctgtctcaaaaaaaaaaaaaaaaagttaactggctgtggtggtgtgcgcctataatcccagctactttggaggctgaggmacaagaatagcttgaacctggaaggcagagattgcagtgaacccagattgcaccactgcactccagcctgggtaacagagtaagattctgtctaaaaaaatttaaaaaaagaaagaaagaaaaaaacagatagttgcactaatcagaaatctttgaaaacatagttttaaatataaatatttgattaatttctatataaaagctagttcagtaaaaatggaaattaactttagcccaattaaaagaacagttttctccaaggcaaaacttatgcattagtaattattattaccttaaaaatgtggtcaaatagtatctatgggtcaaaattttgcagtgttttggttgctttaaatcttcataataaaattgcctctctaaaaatatttcttagtagtagtcgaatatg

SEQ ID NO: 697195 - DNA, 1905 bp, Homo sapiens
atcttccaactttgctgaatgtgccctatagtttaattttaatactggttgtatataatgattctcttgcagagagtttgaaaatttagtaattagctctcagtatgggccaactccaacatactacttgctgcaagcgaaagcatttttatagttcagagaacatacagaaaaaataagttacatagttatggaatggtggtttttcagtgtacaattaaatggtttacagttggaaggtagggagggcttgatcatgtgtaaggcaatgattatcattataratgtgataatatacaaagaatgattgccagtatggaatagggacataactttgggatgaaatgattaaaacaatgagagacacactgttttgctttaaacaagctcattgatgccagtaggtactgattcaactggcaagataaagaggtttacttgttaaaaatggttatggatataaacctagcagaatcaccctaatgagtagaatgaatagtgcatgcataaactgaacttaaaatgtattatcaattttgagtaccaattatggaccaggccagagataaaatagtcttctcttaagcagcttatattttagtgtgagagtcagttactattcagataaacacagaaaacaatgtaaaatttttagcctcaaaagtttctgaatgagtgatttatggacctaatgaggtgtttaaaagtagaacttgccaatttaaggcttaagggaagaattccctgaggaaataataattgaactgaaattaatggttcattaggcatattttaaagagaagaatactaagaaactggggacagatttcaaaaaggcactgtgaaaaagaaaagtcaggagacctgtcatgccaggggagaatggaaaaataaatattagacagggtattttaattattagttatggaaacaaaatcaggcttcccttagcaataaataaataaatacatacgtaaaatataactgacttgaataattgaaaaatttaggtatgattgaatttactatttaaatgatgcaaccaagaattgactcttttgtaattgcttggcttggaagtttattgcattgtcttcacttttaattggctcctttctcattcacacaagatggcttccatgatatttagtttccatcagttctgaacctcaacaataaggatcttctttcatgaaaattctaacaacctttggactgttatgaattgaatctatttgggtcttctgctatatctttcaataaatacctgtggttagagggatggtatgaaatggataacgtagtctaagtcacatctgacactttcagcttaaatcatatgaactattatattacgatggcagatgtctgtatcctgtaagaaaaattggggaactattaacagaggaaagacaaatggttcctaagcttgccaaaaatcagatgtaataaatatctagccatgtaggcctctgcatgatatgtaaaatttacgactaaaagtgttctgaaagtgagagaagtagttcaaaactatttagtaaaagtggggtaatatgtcaaatttacattttcaaatgttcactattcccacaaggattagaaaatattgggaaggtactggttggaaccttgggggtcagaatgggtcactggtattataaaagtcaatagacctgttaattgacaatgagattatgtatgagttagcagaaatgagaaaaatggaaagaagtggtttgaatctggcttagacactattgaaagaatctgcagaaatccctcctccctaaacatacacacagagaaatattgcataggttttctaaaaatggaaggagaaactaccaaactgtacagcctggatgacattaattacagagtgaaatgttaaccaacatttaa

SEQ ID NO: 697196 - DNA, 3276 bp, Homo sapiens
cttactttgaccccctatgatttcatctccaacctgaccagtaagcactcccacttcccaaacacccacctgccaaaaattttccttaaaaactcacatccctgaatgttcaccaagactgatttgagtaataaaactctagtcgctcgcatagcttgctccacatgaattactctttctctattgcaattcccctggcaaagtaaacccattgggtggttacactcttaggcaattaaaatacaatgcaaattttaagtaacatattttatgcttttcatatgtttgatttttaatttcccttctaatacaatcttgaattcccagaacactgagaattctaagaataatctttgtgatcatagatggtgattttgtttttaactaggcaaaaatgagattaagatcagaaataggcctggtgcagtggctcacgcctgtaatcccagcactttgggaggccgaggcaggtggatcacgaggtcaggagttcgagaccagcctggccaaggtggtgaaccccgtctctactaaaaatacaaaaattagccgggtgcggtggcaggcacctgtagtcccagctacgcgggaggctgaggcaggagaattgcttgaacccgggaggcagaggttgcagagagccgagatcgcgccactgcactccagcctggagatagagcaagactctggaaaaaaaaaaaaaaaagatcagaaataaagtttgatgattgggtggaaataaatataaaatcaacttgaacaggcaaagatctgtaagtgctaatatatttcctatgtattctgacaaatggaaaagtgttgtagtttatgagttaatctgtattgtgtcagcataaatgacttgcagaatcatcttccaaaaaactgagaagatagtaaaaattggaacatttagttcaaactgacttttaatctgttaaaattcatcagtgcaaaccatttcttcagtcaatgtctcctccacattgctattttctttatttgattatgacatttttgagattagtatctctgtttgggtcacttttcagttctgacacactcaaggtgtattaaatatttaatatgttcaataaatgtttattttaattcaataaagacataaaattttagtgttttattaaatattagaccctttaatgtgacgattatttagtttacaaagatcttatatgtatcaatatttaaggcatatattttttacatgggagtctgcttaacaaagacacagaaaacaagaaagtgatgtttccttatgtttttgtactttttatgaatttcctatttcacagttaaattagaaactatgaaaaatactttattattggatggctttatttaaaaacataacagtctctattttctacttataagacatgtcatttaaaaaactctggcatgtatatataaatgagtacaaaatacaattattttaataatttccatacatgacaagccttgttctttaaatatattcatacatttttattttataaaataaattcaactaaatctttatgctcttctaaaataatattgaaaatagaaatgagtccaatattccccacagagaaaagaacaggtatcaaatatattctgcagattatactgcttacaaatattagtttttaaaaagaaaagatatgctttaaaaaaattctgtgaaatattcactgcaagcagttggacataaaatgagcaaaagggactaggttcaatctttacaaatacacatgtagcatagttaaataggaagagctccttgcatcctccgtactgagaagcaaataatttataagaaataaagaacagtctcattaaaactctgaggtcattgtccttaaagtgagcacaagtcaacctccattgctgttaggtaaggtcacaaatttcacatacagaaaatattcatcaataaagaaaagtactccgaataaaaataagtgcttgattttgacaatgtatttccaaggaaactaaagatagttgtttttagaatagtccctttaagtataaaatgttgtaaaagaaaagcaagtaaaataaacacgtatagttatagctaacatgtgtgataaaatacagactttctgatagctattttaatgcataaatttatcttgtttaatttttaatattgagtttctataattagaacaatacagtaacttgaacgtctcttttctcaccaatactgaaaaaagatgcaaggttggataagtttctattgtttgmctcctaaatttcttctccctggtattttctaaattttattttactattcattcattcattggctcattaactcagtaatagtaccctatcctgtggtagaggtattatattcctagaataaagacctgaatatgacatattatttgggcttcaggaggctcacagtatgatcaatatgataagtaaacatcaattctagcagaatgaataaaaatgttgaattagatttctcagcaaagagatacagaaattcaaaagtagatgttagttctcattgcaaggctaaggaagacattacaatggaagctagaattccccttgaataatttgggattttattttggtgacattgaagatatcacaaatatttatttaaaaaataaatttgattacagcattgactttgttttccagataattttagggaattctgctcacagtttcaggttgaatgccaaaaaaaagaggcatgtatattttataattagactaatatactattctagacagtaaattacaagcaagaaaactaggacaacagtgtgaaaataaagaaaatgttatttcttggaaatattaaagatgcactcatattgtaaaaaatattttattcttttatctgaaaataataatttcaaatttttactgattaaaataattttacaatatgatgtcttgttttattaataaaaagttacttatggatgcagaaatagcaatgaacaaaatatttttcatattttatattacatataaaagatataaaaataattgcatggtttaaaaattgatatataatctctctataaccaaaaaacattagaggaacttgatagaaatgcaaatgtgagagtttcataccagaactaggcccaatcaatttgttttttggtttgtttgtttgttttttggagatggagcttcgctcttgttgcccaggctggagtgcaatggcacgatcttggctcaccacaacctccgcctcccgggttcaagcgattctcctgcctccacctctca

SEQ ID NO: 697197 - DNA, 3276 bp, Homo sapiens
cttactttgaccccctatgatttcatctccaacctgaccagtaagcactcccacttcccaaacacccacctgccaaaaattttccttaaaaactcacatccctgaatgttcaccaagactgatttgagtaataaaactctagtcgctcgcatagcttgctccacatgaattactctttctctattgcaattcccctggcaaagtaaacccattgggtggttacactcttaggcaattaaaatacaatgcaaattttaagtaacatattttatgcttttcatatgtttgatttttaatttcccttctaatacaatcttgaattcccagaacactgagaattctaagaataatctttgtgatcatagatggtgattttgtttttaactaggcaaaaatgagattaagatcagaaataggcctggtgcagtggctcacgcctgtaatcccagcactttgggaggccgaggcaggtggatcacgaggtcaggagttcgagaccagcctggccaaggtggtgaaccccgtctctactaaaaatacaaaaattagccgggtgcggtggcaggcacctgtagtcccagctacgcgggaggctgaggcaggagaattgcttgaacccgggaggcagaggttgcagagagccgagatcgcgccactgcactccagcctggagatagagcaagactctggaaaaaaaaaaaaaaaagatcagaaataaagtttgatgattgggtggaaataaatataaaatcaacttgaacaggcaaagatctgtaagtgctaatatatttcctatgtattctgacaaatggaaaagtgttgtagtttatgagttaatctgtattgtgtcagcataaatgacttgcagaatcatcttccaaaaaactgagaagatagtaaaaattggaacatttagttcaaactgacttttaatctgttaaaattcatcagtgcaaaccatttcttcagtcaatgtctcctccacattgctattttctttatttgattatgacatttttgagattagtatctctgtttgggtcacttttcagttctgacacactcaaggtgtattaaatatttaatatgttcaataaatgtttattttaattcaataaagacataaaattttagtgttttattaaatattagaccctttaatgtgacgattatttagtttacaaagatcttatatgtatcaatatttaaggcatatattttttacatgggagtctgcttaacaaagacacagaaaacaagaaagtgatgtttccttatgtttttgtactttttatgaatttcctatttcacagttaaattagaaactatgaaaaatactttattattggatggctttatttaaaaacataacagtctctattttctacttataagacatgtcatttaaaaaactctggcatgtatatataaatgagtacaaaatacaattattttaataatttccatacatgacaagccttgttctttaaatatattcatacatttttattttataaaataaattcaactaaatctttatgctcttctaaaataatattgaaaatagaaatgagtccaatattccccacagagaaaagaacaggtatcaaatatattctgcagattatactgcttacaaatattagtttttaaaaagaaaagatatgctttaaaaaaattctgtgaaatattcactgcaagcagttggacataaaatgagcaaaagggactaggttcaatctttacaaatacacatgtagcatagttaaataggaagagctccttgcatcctccgtactgagaagcaaataatttataagaaataaagaacagtctcattaaaactctgaggtcattgtccttaaagtgagcacaagtcaacctccattgctgttaggtaaggtcacaaatttcacatacagaaaatattcatcaataaagaaaagtactccgaataaaaataagtgcttgattttgacaatgtatttccaaggaaactaaagatagttgtttttagaatagtccctttaagtataaaatgttgtaaaagaaaagcaagtaaaataaacacgtatagttatagctaacatgtgtgataaaatacagactttctgatagctattttaatgcataaatttatcttgtttaatttttaatattgagtttctataattagaacaatacagtaacttgaacgtctcttttctcaccaatactgaaaaaagatgcaaggttggataagtttctattgtttgactcctaaatttcttctccctggtattttctaaattttattttactattcattcattcattggctcattaactcagtaatagtaccctatcctgtggtagaggtattatattcctagaataaasacctgaatatgacatattatttgggcttcaggaggctcacagtatgatcaatatgataagtaaacatcaattctagcagaatgaataaaaatgttgaattagatttctcagcaaagagatacagaaattcaaaagtagatgttagttctcattgcaaggctaaggaagacattacaatggaagctagaattccccttgaataatttgggattttattttggtgacattgaagatatcacaaatatttatttaaaaaataaatttgattacagcattgactttgttttccagataattttagggaattctgctcacagtttcaggttgaatgccaaaaaaaagaggcatgtatattttataattagactaatatactattctagacagtaaattacaagcaagaaaactaggacaacagtgtgaaaataaagaaaatgttatttcttggaaatattaaagatgcactcatattgtaaaaaatattttattcttttatctgaaaataataatttcaaatttttactgattaaaataattttacaatatgatgtcttgttttattaataaaaagttacttatggatgcagaaatagcaatgaacaaaatatttttcatattttatattacatataaaagatataaaaataattgcatggtttaaaaattgatatataatctctctataaccaaaaaacattagaggaacttgatagaaatgcaaatgtgagagtttcataccagaactaggcccaatcaatttgttttttggtttgtttgtttgttttttggagatggagcttcgctcttgttgcccaggctggagtgcaatggcacgatcttggctcaccacaacctccgcctcccgggttcaagcgattctcctgcctccacctctca

SEQ ID NO: 697198 - DNA, 650 bp, Homo sapiens
attatcctccttttcttaacaagtgacttctagtgaggctagagatacagccaaattccgtaaattgaactctgttgtacctagctctacctctgttcactagatcagtgtttttcaaattgtgagtytaaaattagtttaatgagttatgacttgtctttaaaaataaagaaaagatagaatatgacagcaggtataaaattaacatattatttcagatatgtatgtatacatatatatttcggtatgcttatgggtaacatgaaggaaaacagggctaggtgtggtgatcacgcctgtaatcttagcactttgtgagaccgaggtgggaggatcacttgaggccaggagtttgagaccagcctgggcaatgtagcaacaccccatcttctacaaaaaatgaaattaggtgtgttgcgggagaatcacttgagcctgggagattgaagctgcagtgatccgtgattgcaccactgcagaaggcctaggcaacagagacactgtcttaaaaaaaataaaaaagaaaagcaaaagaaaaaagtgaaaaacagatttgtcactatgaacaaatatttttaaaagccagtgcattaaataatgacattagcaatattaaagtttatgttaaggtaagagaagtaagaggagtc

SEQ ID NO: 697199 - DNA, 761 bp, Homo sapiens
tctgcttttggataagaagaattcagagagtgagtctgaatattgagtttgagggatgccaaattatccaaatctatttggttgctgcgttttgaatawcaaacagtaagagtttaaagattgaaggattcatatgaaacacatctaattttttttaagtttggatagtgggagttcaaaaagaaaatacacacacatttttataagcaaagtatggggacacagagaaagtgaaccttaaagactagtagattctcatcaccaagcagatactcaaatctgaagcctatgctctttgagtgataagcggggatagattcctgtctctattttaatttttgtttcggtacatttaaaattttcactgggtatgtgcagttgactttaccttatttaaatgtacataaaggccgggtgcagtggctcacgcctataatcccagcaatttgagaggccgaggcaggcggattaccaaaagtcaggagtttgagaccagtctggccaagatggtgaaatcccgtctttactaaaaatacaaaaatttgccggttatggggcacatgcctgtagtcccgtttgctcaggaggctgaggcaggagaatggcctgaatctgggaggtggaggttacagtgagccgagattataccactgcactccagcctgggtgacagagagggactccatctaaaaaaaagtaataataataataataaataaataaatgtacataaagtagagcttcattgtatatgtctgtct

SEQ ID NO: 697200 - DNA, 761 bp, Homo sapiens
tctgcttttggataagaagaattcagagagtgagtctgaatattgagtttgagggatgccaaattatccaaatctatttggttgctgcgttttgaatatcaaacagtaagagtttaaagattgaaggattcataygaaacacatctaattttttttaagtttggatagtgggagttcaaaaagaaaatacacacacatttttataagcaaagtatggggacacagagaaagtgaaccttaaagactagtagattctcatcaccaagcagatactcaaatctgaagcctatgctctttgagtgataagcggggatagattcctgtctctattttaatttttgtttcggtacatttaaaattttcactgggtatgtgcagttgactttaccttatttaaatgtacataaaggccgggtgcagtggctcacgcctataatcccagcaatttgagaggccgaggcaggcggattaccaaaagtcaggagtttgagaccagtctggccaagatggtgaaatcccgtctttactaaaaatacaaaaatttgccggttatggggcacatgcctgtagtcccgtttgctcaggaggctgaggcaggagaatggcctgaatctgggaggtggaggttacagtgagccgagattataccactgcactccagcctgggtgacagagagggactccatctaaaaaaaagtaataataataataataaataaataaatgtacataaagtagagcttcattgtatatgtctgtct

SEQ ID NO: 697201 - DNA, 2458 bp, Homo sapiens
  misc_feature 703, 704, 705, 706, 707, 708, 709, 710, 711, 712, 713, 714,715, 716, 717, 718, 719, 720, 721, 722, 723, 724, 725, 726,727, 728, 729, 730, 731, 732, 733, 734, 735, 736, 737, 738,739, 740, 741, 742, 743, 744, 745, 746, 747, 748, 749: n = A,T,C or G
  misc_feature 750, 751, 752, 753, 754, 755, 756, 757, 758, 759, 760, 761,762, 763, 764, 765, 766, 767, 768, 769, 770, 771, 772, 773,774, 775, 776, 777, 778, 779, 780, 781, 782, 783, 784, 785,786, 787, 788, 789, 790, 791, 792, 793, 794, 795, 796: n = A,T,C or G
  misc_feature 797, 798, 799, 800, 801, 802, 835: n = A,T,C or G
cacccaagactccctgggtatccttcaaatgtagccaagaaaagtgttcttctaccctagtcagtaaatggaatgctaaaacatgatatctcattcaacatcagagctactacaactgacaatgacttcatggtatacatcaattcctattaagaaaaaatatattttaaatgcagaacttgagagggatcacaacagcatagcattattgctatgagtttcaaacatggtatttcatacaatgtgaaatatcaatcagcatccctccctctcccaaaacacacattactcatgagatactatcagtgtttaaaatccaagcttatggaagtacaaacttaattctcagtacttttatactaaattcaaagaatctatgtaacactcatctggaaaaattcttaattccataatatcttggagataagcaacagtaaactgttagaaaacgttttaacattacatgatatttaaaaaatcaccataattaccataataaaccaataattatgctccctgctcacaaaaggcacctaccaattatgaacagaccatttttcataattatttaccactatgtggcataagggtttaggcatataacccataaaaatttgttaaaagtcatggtttttcctcaaagctaaaaatgcataaatgcctgtaaccattaccagtcagtagtggccaccacatgcatatnnnnnnnnnnnnnnnnnnnnnnnnnnnnnnnnnnnnnnnnnnnnnnnnnnnnnnnnnnnnnnnnnnnnnnnnnnnnnnnnnnnnnnnnnnnnnnnnnnnncccattaaaaatgtagctactattgacagatanaactgaaaaagagtgaatgaatgactcaattatttttaaaggaagcattaaccactaaccagataatataccaacaaattacccagcagcactaagtataccatgtaagattcagttccagaacacagctacatttctgtgtccatcacagtaattagtccttaaaagttgtacttaaaatgtcaatctttaataaactcaaaaataatttattgagatttcatcttgtagtctacggattatgagttgcgaatagaggctgaggtccccccaagtgttatctgcaggctgctgtgttgatgcagagctgggaagatcacagatccatggagggagaaggcacttgtcttccaggagatcacttcgggacagggcaggcctgaccctgcgatggcaccttcaactcttgagccagaagctggtacctacaaggaactcatctcatgaccttcatttgccagcagtgccacacgttacctacagcaccacaaaactcagaatatattctagaagtttttgtcggttgcattgaggtagaaaagtgctgctcagttctaaaacagacactctcttttgtttggtctccttgaaaacctaaagaaaaggtttagattaaattaaaggcaaaaaataaaaaataaaaaaaatttccattaccaacctgacctgtggtgtcctagacctcagaaggcagtaaaggcacaaaaaaccatatcctggcwttaagtaaatgtatgcctgggtgtgtgtgagcatgaggtgggagtttccaatgcaaacaaggtttcttttctagttttttattaggaattaatggagttcacaccaacattaactatattctaaaatttcaaccaacataactatactctaaaatgacttagaataaagtcacaaacagtccctcacaaaaggccgctagtatctctatagaacttacattccccatgaatcatgaaggtaaaggacacctgaggatacttctagaaattcttgtaaaaatacaagaaagtaactaaaaatcatatggaataattaagagccaagattgtggtcctaatcccaaaatcaaaaatctgaagtactccaaaatctgaaagattttgaacatcaatatgatgctcaaaagacatgctcatcagagcattttgggttttggattagagacgctcaacctgtaagtctaatgcacatattccaaaatcccaaaaaaatctgaaatccaaaacatttctggtcccaacattttggataagggatattcaacctgtagcaccttgaaacatattgataccagttatatatagcagcttgggaataaatgtgaaaccagtaaaattccagaacattcaaataaatctacactgatgggcttcaccttcaacatagcccaacccatcctacatgccccgttcccaaaaatgcctttatcattaagccagcagaaactgcttctctcggggtccaccccaccacaaaggtagctcaaacagactagatctaaagagaacagaagttgagatagcttttataccataaatgggggacacctacccccatatgcttgaaccatgtgaccggcttgtttgcaagacattgtgcggggctctcggctggagagag

SEQ ID NO: 697202 - DNA, 2458 bp, Homo sapiens
  misc_feature 703, 704, 705, 706, 707, 708, 709, 710, 711, 712, 713, 714,715, 716, 717, 718, 719, 720, 721, 722, 723, 724, 725, 726,727, 728, 729, 730, 731, 732, 733, 734, 735, 736, 737, 738,739, 740, 741, 742, 743, 744, 745, 746, 747, 748, 749: n = A,T,C or G
  misc_feature 750, 751, 752, 753, 754, 755, 756, 757, 758, 759, 760, 761,762, 763, 764, 765, 766, 767, 768, 769, 770, 771, 772, 773,774, 775, 776, 777, 778, 779, 780, 781, 782, 783, 784, 785,786, 787, 788, 789, 790, 791, 792, 793, 794, 795, 796: n = A,T,C or G
  misc_feature 797, 798, 799, 800, 801, 802, 835: n = A,T,C or G
cacccaagactccctgggtatccttcaaatgtagccaagaaaagtgttcttctaccctagtcagtaaatggaatgctaaaacatgatatctcattcaacatcagagctactacaactgacaatgacttcatggtatacatcaattcctattaagaaaaaatatattttaaatgcagaacttgagagggatcacaacagcatagcattattgctatgagtttcaaacatggtatttcatacaatgtgaaatatcaatcagcatccctccctctcccaaaacacacattactcatgagatactatcagtgtttaaaatccaagcttatggaagtacaaacttaattctcagtacttttatactaaattcaaagaatctatgtaacactcatctggaaaaattcttaattccataatatcttggagataagcaacagtaaactgttagaaaacgttttaacattacatgatatttaaaaaatcaccataattaccataataaaccaataattatgctccctgctcacaaaaggcacctaccaattatgaacagaccatttttcataattatttaccactatgtggcataagggtttaggcatataacccataaaaatttgttaaaagtcatggtttttcctcaaagctaaaaatgcataaatgcctgtaaccattaccagtcagtagtggccaccacatgcatatnnnnnnnnnnnnnnnnnnnnnnnnnnnnnnnnnnnnnnnnnnnnnnnnnnnnnnnnnnnnnnnnnnnnnnnnnnnnnnnnnnnnnnnnnnnnnnnnnnnncccattaaaaatgtagctactattgacagatanaactgaaaaagagtgaatgaatgactcaattatttttaaaggaagcattaaccactaaccagataatataccaacaaattacccagcagcactaagtataccatgtaagattcagttccagaacacagctacatttctgtgtccatcacagtaattagtccttaaaagttgtacttaaaatgtcaatctttaataaactcaaaaataatttattgagatttcatcttgtagtctacggattatgagttgcgaatagaggctgaggtccccccaagtgttatctgcaggctgctgtgttgatgcagagctgggaagatcacagatccatggagggagaaggcacttgtcttccaggagatcacttcgggacagggcaggcctgaccctgcgatggcaccttcaactcttgagccagaagctggtacctacaaggaactcatctcatgaccttcatttgccagcagtgccacacgttacctacagcaccacaaaactcagaatatattctagaagtttttgtcggttgcattgaggtagaaaagtgctgctcagttctaaaacagacactctcttttgtttggtctccttgaaaacctaaagaaaaggtttagattaaattaaaggcaaaaaataaaaaataaaaaaaatttccattaccaacctgacctgtggtgtcctagacctcagaaggcagtaaaggcacaaaaaaccatatcctggctttaagtaaatgtatgcctgggtgtgtgtgagcatgaggtgggagtttccaatgcaaacaaggtttcttttctakttttttattaggaattaatggagttcacaccaacattaactatattctaaaatttcaaccaacataactatactctaaaatgacttagaataaagtcacaaacagtccctcacaaaaggccgctagtatctctatagaacttacattccccatgaatcatgaaggtaaaggacacctgaggatacttctagaaattcttgtaaaaatacaagaaagtaactaaaaatcatatggaataattaagagccaagattgtggtcctaatcccaaaatcaaaaatctgaagtactccaaaatctgaaagattttgaacatcaatatgatgctcaaaagacatgctcatcagagcattttgggttttggattagagacgctcaacctgtaagtctaatgcacatattccaaaatcccaaaaaaatctgaaatccaaaacatttctggtcccaacattttggataagggatattcaacctgtagcaccttgaaacatattgataccagttatatatagcagcttgggaataaatgtgaaaccagtaaaattccagaacattcaaataaatctacactgatgggcttcaccttcaacatagcccaacccatcctacatgccccgttcccaaaaatgcctttatcattaagccagcagaaactgcttctctcggggtccaccccaccacaaaggtagctcaaacagactagatctaaagagaacagaagttgagatagcttttataccataaatgggggacacctacccccatatgcttgaaccatgtgaccggcttgtttgcaagacattgtgcggggctctcggctggagagag

SEQ ID NO: 697203 - DNA, 1431 bp, Homo sapiens
tgtcagtccacttcccttccaaactcaaactcagtcaggagacagcaggagacaaaagaaagggcaggtgggaggggagagctaccagaaagaaagatcaaataaaagtacccccacatgttctaaattgatatgtacttttccaggccatctcctctacactaaatctaccaaaattaaaatagaatctcaaaaatgaaaactgcagatgtgcaagctgcaagcatactgataggtgtaacgtctcaacttaacataccaacttctggatggcaccgaatcaaggtaagatatgttttagacaacaccacctaccaataggaaccaaaatatttaaataatccaaaggacacttattctccccattctattttttgcttccctcatctggacatgactatatacccaatgtaataattgggttgcttacttatttatgagactgagtctgactctgtcacccaggctggggtgcactggcatgatcttggctcactgaaacctacaccactccgaatattgtgccttagcctcccaagtagctgggattacaggtgtgagccaccatgcccagctaatatttgtattttgaggaaagacagggttgtggccatgttggccaggctgctctcgaacttctgacctcaggtgatccacccgccttcacctcccaaattgctgggattacaggcacatgccaccatgcctggccaattattggtttaaataagttgtagaaaaggtaagggaatgaagagtaagtataaagacaaataaaggaaagctctacctcttacctctgccactgtaagaatgccatactggataaactttcctactgtttcatggcagacttggtaaaatgtctggcaaggctgaaaagaaaattcatttaaatataaatgccaccattttatacttctttttttaaacgcagaaaacatggtacaaggtagctgccaaagccttccattctgttacctccatcaccccactgagcaagtcctgtgattcccagtgcccactgtcttgatacacacacggtcatggacaaagcccaagaaaagacctctgtcacttaaagttggcagagcacccaacactgcaccacctgcaaggggtactcctgagctcaattctctccccacacccacagtgtggaaagccctctgaagactgcttatcagccccccaccatctatttcttttactttataagacaatttctctgcaatagttatcttataataaatactgtacacaaaagtggtgattgaggaaaggcaacattggaataagtaaataaataccagagaaaggacaaggtcaatcttggaagtcttatctgccctcatcccttccatcccaccacccaaggttcatgcaaaacagattccccaacaggaccacragcacacctcacacaaagca

SEQ ID NO: 697204 - DNA, 692 bp, Homo sapiens
  misc_feature 321, 322, 323, 324, 325, 326, 327, 328, 329, 330, 331, 332,333, 334, 335, 336, 337, 338, 339, 340, 341, 342, 343, 344,345, 346, 347, 348, 349, 350, 351, 352, 353, 354, 355, 356,357, 358, 359, 360, 361, 362, 363, 364, 365, 366, 367: n = A,T,C or G
  misc_feature 368, 369, 370, 371, 372, 373, 374, 375, 376, 377, 378, 379,380, 381, 382, 383, 384, 385, 386, 387, 388, 389, 390, 391,392, 393, 394, 395, 396, 397, 398, 399, 400, 401, 402, 403,404, 405, 406, 407, 408, 409, 410, 411, 412, 413, 414: n = A,T,C or G
  misc_feature 415, 416, 417, 418, 419, 420: n = A,T,C or G
ggtgacaatgctccacctgcaaaatggtcccaaggaaggccctagtgcttgccctttgcctcttccacaaagaggccgactggaagaagcagttttccatttggtaaattagtcctgatcatctgcacccccgtgacggctagggtaacttaaactctcttccgcctaaagcgaggaggacctaaagtgtgacagaggtaaaggtcacaggcgttttacgtggccattccgtcatcaatcattccacatgcccctgcccggtttttcctttaaggtatttcatagtttataattccatctgtaggtgatcatttgatgaannnnnnnnnnnnnnnnnnnnnnnnnnnnnnnnnnnnnnnnnnnnnnnnnnnnnnnnnnnnnnnnnnnnnnnnnnnnnnnnnnnnnnnnnnnnnnnnnnnntgacatgtaacatccaaaaaataatattgaatgcccactgtgtgttagccactgcgctgggtcctgaggaggtcaagttggctaggtccagtccctaacgtggagttgcttacccycgctatggcccagatgtcatccttttggttggctaaggacattaattctgactgtttaaaagagcctcccctctggtctccctgcagcgacctctgaaatgcccctccaggtctggtcctcacactaaagccaaagacagctcagggagaagggag

SEQ ID NO: 697205 - DNA, 1204 bp, Homo sapiens
aaatcagtttttatttgcaaacttagttcccttccccataccaatgaaatatttatgtaaatactttctaaaatccttttagcttyagtattttctgattttattacaattttcgagatacatttgtggataaagaatcaactctgaccactttaatatggatcaatgagattttcaaagattcttcttgctattcaaataatcttatttactctttccacattcttaagttcattttttatccatttatctaaacattgcatgctttcatcattgaacctcctatttcatttcttgaaaatgtcaggaaatactgataaatgcaaagctcccgctttgtgcctggatttcatttgatatcaccttgaatttttgaaatgtaaccttcaaaaaagaatataatttcactttatttcttagaagcattattataaaataatatttatgaatggcttatgagaggaatcaatgcatttacatagtggataaatatgtcacaagacataggcagattcatttactctttttatgaaggaataagtattgaattaggggctctaaaaataagacctgagagaggatacagtatttaaattcatgtttcttataaaagtaatttcattattactgacagaaaatgagtttcctgagattcatagttaccatgtttcttcctaattatttttgtgatgtgatataggttaacatgaaaactgctaagtataaatttaaaattacaagactatttggtaattatagtgtaaaattcccataacactactgaattctatatacttaagcatagtaaaataatatagtatctacttgctagttattcctgtctctgcagacttctaggttgtgaccactttgacttgcattttttttcatgtagcgggctcctttaaaaaaaaagaaaatttaaaaaatttcaattaactgcaattataaattgacaaatgcatctaaatgaacataataagcaagaatggaatgtgaagagcttaatcagatgcttccctaattgtcaggttacatatcctataagaataattccacaaacactgccactaaacattagagctgtgggtatataaatccagggtggaataaaaggatgatactgttgtccaacattcttccttaatgcaacattttggtacctataagcaaaaatgctttgtacagtgcttttccttcttgc

SEQ ID NO: 697206 - DNA, 617 bp, Homo sapiens
tctatatcatctatatctatatctaatctatcaatttatatagaaaggggtcaatgagatttattgcaaggaattggttcaaccaattatagaggttgagtagttccataatctgctgttcataagctggagacccaggaaagccagtgatgtagtttgaaggcatgcgagacacggaaccaacagtgtagactcctgtccgtgtctgcgagcctgaaaaccaggagcaccaaaggcaggagaagatggatgtcccagctccagcagtgagcagagccacactwttgttctattcacgtcctcatggattggatggtccccacccacattagggagggctgcctgctttagggaaggcccatattagggagggctaccaacttaaatactatttttttttctgaaaacattcgcatagacacacctggaaataatgtttagccagatctgtgcatactgtggcccagtcaagtttacatacaaaattatccaacatgctgtgtattacaagcacacaagagggagagccatacagctgacattaagtcaatatttgttgaataaatgagtgtaatttgatcatcatattttggaagcttcaagaataatgtaagaca

SEQ ID NO: 697207 - DNA, 1159 bp, Homo sapiens
tgcaaatttgatttattgtgcccaacatatgaattgcaatttatcttcccaagcttatgtaaacgttcattcactatgactcagcaacattttttacttttaatgaataaattaaagctgttgaaattaaagtaaaacttgttttaaaaaattcagatatgtatatatatgtgtgtgtgtgtgtgtgtgtgtgtgtgtatagttgtgtgtttgcagttgtttcaagcaaaatattgaaatgcagaagcaaagaccacaactgtactgttctcttcaaataaaattctgaggaggcacacttttggagacaaaaagtaatttaatggttatatgaagcttgtgatggaacagataagtcctgcttttgcaactttattgcacagactttgcaattcccattttgttttggccctagctttatccttctgtcttctttaactacagacttagtctgtgacagtctaactaagtggaaatcttagtgtacatacacatactcatacatatgcacagtattcttataaaatgagcaacttacgtgtggytggattttttttatttgcaaatatagcttagcaataaattacatataaatttaccttatattaaatttaaaaatcacaagctgtttcttgatttaattatggacatttatgtcagtgcttttgaacttttgctgcaaactaaaattacttagggaactttttttttgcacctttgtatttatgtatttattttttattatactttaagttctagggtccatgtgcacaacgtgcaggtttgttacatatgtatacatgggccatattggtttgctgtacccattaacttgtcatttacattagatatttctcctaatgctgtcccttccccatccccccacccgatgacaggctctggtgtgtgatgttccccttcctgtgtccaagtgttctcattgtccaattcccacctatgagtaagaacatttggtatttggttttctgtccttgcaatagtttgctcagaatgacggtttccagttttatccatgtccctacaaagaacatgaatttgtccttttttatggctgaatagtattccatggtgtatatatgccccatttttttaatccagtctatcattgatgaacatttgggttggttccaagtctttg

SEQ ID NO: 697208 - DNA, 934 bp, Homo sapiens
ggcactaagaatccattgaaaattttgagaagaaaggctaaaagttgtggtcttaggggaaaaagagatttgttgttcagttcagggtggatggtagaggagaacattagatgcagtgaaacctcagctattttaatagtctggacataaataggattaatataaactgcagggttggtgagaaatgaggtaaacaaacaaatagaggggatacatacaggaaaggagcagtttatgatggtttacatacggtggatggggttgagatagaaaaatgtagatggccctcataaactagtggtgctcttaacatattattttagcacaggccattgataattggcattttatttttgcatttttagcaaattaaaaatgaatattgctaacaatgacattgcttattcaaaggaaaatatcctgtaaagagatcttttggttaagacttgagaaaaaaactagaaagactacmactttctacaccctccctagatctatgattttgaagcttcacatcagtttcacattgaagtacatttatttacataaaattataaaacaaatttcacatagaaaatgcaatagttggaatacactaaatcatctgtataattttaatgcaataataaaacacactgaatcttttaaaagtcattttatatattaaaaaataacctgtttagatgatatctccatacagtacattcaaatgagataaaggaaatttgtatcaaatcatttcagaaaagattaatcaattttgatgagtaacctctgaggaggaggaagcacagtagtagatgtaatataaaacacgtggttggaatcaaagttgtcacatctggaaaataaatttaacatatggtttataatcatagagaaaaataaagaaatgtgccttatctaagtgggactgaatgatattaaacattta

SEQ ID NO: 697209 - DNA, 934 bp, Homo sapiens
ggcactaagaatccattgaaaattttgagaagaaaggctaaaagttgtggtcttaggggaaaaagagatttgttgttcagttcagggtggatggtagaggagaacattagatgcagtgaaacctcagctattttaatagtctggacataaataggattaatataaactgcagggttggtgagaaatgaggtaaacaaacaaatagaggggatacatacaggaaaggagcagtttatgatggtttacatacggtggatggggttgagatagaaaaatgtagatggccctcataaactagtggtgctcttaacatattattttagcacaggccattgataattggcattttatttttgcatttttagcaaattaaaaatgaatattgctaacaatgacattgcttattcaaaggaaaatatcctgtaaagagatcttttggttaagacttgagaaaaaaactagaaagactacaactttctwcaccctccctagatctatgattttgaagcttcacatcagtttcacattgaagtacatttatttacataaaattataaaacaaatttcacatagaaaatgcaatagttggaatacactaaatcatctgtataattttaatgcaataataaaacacactgaatcttttaaaagtcattttatatattaaaaaataacctgtttagatgatatctccatacagtacattcaaatgagataaaggaaatttgtatcaaatcatttcagaaaagattaatcaattttgatgagtaacctctgaggaggaggaagcacagtagtagatgtaatataaaacacgtggttggaatcaaagttgtcacatctggaaaataaatttaacatatggtttataatcatagagaaaaataaagaaatgtgccttatctaagtgggactgaatgatattaaacattta

SEQ ID NO: 697210 - DNA, 1319 bp, Homo sapiens
tgagaaaagacacagccaacactgttaacaacagcaacataaaaacaacaaaaccaccacaacaaaaacatcctctttgtagacggtggagatagctacctttctcaatcatagttctgaaggaaaatgtctttctgaaagtttctaactacaatccaagcccacttttgtgaaggtttgaaatgtcaatcaaaaaaatctttgtggattcccctctagaaaaacccaaactaaaatataagctaatgctaggttgatttgtactcataaatattgaaaagaagcaaatataattcctgtgaggcataactaaattcaagcctaggtttcaaaacattggcacagataaggttccaaaaatcagaggcttcaagaaaataacaaaatagcaaaatgctagaataaatgcaaaaccgtaagtgggactgttttgaaacacaaactggataaccagattttcagactacaatgtcagaattaacattgaattaaatgaaaattcatttacttagtatgtttgaagagctaaaaaataaaattgtcagtagtatttcaaaaaaagagacagcgaggaaaagactatgaaaatgaccatgtaggccagctgtggtggctcatgcctgtaatcctagcactttgggaggccaaggcagcagaattgcttatgcctaggggtttgagactaccctaggcaacatagcgaaactactgtctctacaaaaaatacagaaattatccaggtatggtggctygtgcctgtagtcccagctactaaggaaactgaggtgggaggcttgcttaaacccagaagttcagggctgcaatgagctatgctccagtctggacaacagagaaattcattctctctctgtctccacatctatctatctatctatctatctatctatctatctatctatctatatgtatttatttacctatgtagatatgtatatctaatctatctagatatttatctatctatccacatacatacatatagtggattctatagagaaaaaagaaaaaagattagaactctagaaaatgtaaacatacaaaaaattgggtgaatattttaaagagcacattagatacctgtaaagagaacatcagaataaactatacagaactcagagcaaagatacaaaaacattaaataacagattttagcaaattgtaggacaaagctgaagacataacatttattaaaccaatttcaagaataaagcatggagagaatcaggtagaaaaactttgcagagaaaatagttgagactttccagaactgatgaaggatactgtattaactttctttg

SEQ ID NO: 697211 - DNA, 1319 bp, Homo sapiens
tgagaaaagacacagccaacactgttaacaacagcaacataaaaacaacaaaaccaccacaacaaaaacatcctctttgtagacggtggagatagctacctttctcaatcatagttctgaaggaaaatgtctttctgaaagtttctaactacaatccaagcccacttttgtgaaggtttgaaatgtcaatcaaaaaaatctttgtggattcccctctagaaaaacccaaactaaaatataagctaatgctaggttgatttgtactcataaatattgaaaagaagcaaatataattcctgtgaggcataactaaattcaagcctaggtttcaaaacattggcacagataaggttccaaaaatcagaggcttcaagaaaataacaaaatagcaaaatgctagaataaatgcaaaaccgtaagtgggactgttttgaaacacaaactggataaccagattttcagactacaatgtcagaattaacattgaattaaatgaaaattcatttacttagtatgtttgaagagctaaaaaataaaattgtcagtagtatttcaaaaaaagagacagcgaggaaaagactatgaaaatgaccatgtaggccagctgtggtggctcatgcctgtaatcctagcactttgggaggccaaggcagcagaattgcttatgcctaggggtttgagactaccctaggcaacatagcgaaactactgtctctacaaaaaatacagaaattatccaggtatggtggctcgtgcctgtagtcccagctactaaggaaactgaggtgggaggcttgcttaaacccagaagttcagggctgcaatgagctatgctccagtctggacaacagagaaattcattctctctctstctccacatctatctatctatctatctatctatctatctatctatctatctatatgtatttatttacctatgtagatatgtatatctaatctatctagatatttatctatctatccacatacatacatatagtggattctatagagaaaaaagaaaaaagattagaactctagaaaatgtaaacatacaaaaaattgggtgaatattttaaagagcacattagatacctgtaaagagaacatcagaataaactatacagaactcagagcaaagatacaaaaacattaaataacagattttagcaaattgtaggacaaagctgaagacataacatttattaaaccaatttcaagaataaagcatggagagaatcaggtagaaaaactttgcagagaaaatagttgagactttccagaactgatgaaggatactgtattaactttctttg

SEQ ID NO: 697212 - DNA, 1489 bp, Homo sapiens
tgttattagatggttggacttttcaacatatcactgaaataggtattgaagccataaaatactacaatatttggtactaaaatcaatatgcgcttttgaaaacaatattgctacatagcttctcttcttatattaattcaaaattccatcattcttaaaaagtcttatagttctaaatcaacatattcaattaaatatgaggatataatctgatatttaattatattactttctaaaacataaataaaatatgagttttttagagttaatatttaaatataatgaaaataaaatatttatttagttatttagtaatttttagttaaaagatactttgacatcaaatctaactatttttatatgaggtggaaaaaactgaagactcaacaaggtcatgtgctttgtccaaggtgaacaaataaaaattgatttaatatgatctcattaattttgtaaatgaatctttttttaagcaaatgacatataagaaatactggatgaataatgagtttagagaattgttattctctctagaatgtgtttgtgtatgtatgtgtttctgcatatatacatttttaaattgtattcatacatatggatataatttaaaattgaattggatgttcatccaaagctgcatgtatacaatgattatatggcatcagatatagctcttttaattgaattcattatttttaaactaactccatagcttattgaaacatgaacattatttatttatggtatttatagaaaattctacaggacctgatattgtcatttgattttgttgtgatttattaactttttgataaatattttatgagatatttatttctaaagctagtagagtgttacgagttagggagtgtctgtttagyaatgtccgtgtccacacacattggacagcatttgtattcaggttacattgactgaagaatgcaggatcatgaaaaagcacacactaatccttaattaaatttcttatacagctcaaaccaatatttatatgtcatcctcaaagcacaaaggacgtgaaactaagtcctccagaatcctagccttagaaaaccgagcattcatacttaggagaaaatgtaaagcatatttaggaattaaatcaaaatatgttttctgcctcttaactgttttaagcaaaaacaaaaaaccttcaaatgtggttcatagactaaaaaacaagacagaggcatcaacaaacaaattagccagtatctgaaagtcctaacatatgagccaagaatgaaaatcacatcactacatgaaattttcttgtgtctaattatttaagaatatctgtcttaatgaacaccaaatgtttaagcaaataatattttcaattaggccgggcgcagtggctcatgcctgtaatcccggctctttgggaggctgaggtaggcagatcacctgaggtcaggagtttgagaccagcctgtccaacatggtgaaacacaccgtctctactaaaaat

SEQ ID NO: 697213 - DNA, 594 bp, Homo sapiens
ttcctcatctttttaatttttctccataggacataatttctgaagtgtcatgtaatttatttactctgatggaaagtaagttcaatgaagagagtaaatgtatctattttctttcttacattagttctagctaacacacaataattgttctatatttaataaatgaataaaaaacaataaagcaattagtgttaaaactaattacttatgtaaagttcttatggtaggaaaaagcattaggagtagtatcatattcaacattactatcagtaagtaaaaatatttgttaatatttatatyttaaaatatttccttaaaaagtatttattttccattacagctcagagaacaccaattgtaggcaattcatagcatatgtttatagccagtattcagaaagaaaaaagaaaagagcatcaggcattttagaaatttcctgtgttgtttatagaccaatatttaggtgtcgaaaatctcagagaagaactttataaatcaatagagtgtttcaatggaattaaaaagaatagcttggttaataggtcattcctcaactgtgtagtaacaagataaatttaaatatattatcccacg

SEQ ID NO: 697214 - DNA, 650 bp, Homo sapiens
tccatccccattatccaatcacctctccccaggcccctcctctaattcaacatgagatttgggtagggacacaaatccaaaccatatcaattttatatatatatataakatatatatatatgatatatatatgagatatatatatgatatatatcatatatataatatataacgtcatcccaaaatcagccatcacttactactcaaaaatgccttagtctaagtttacagaaagtgaaaaattgaatcttttctaaaggcacttacttcatacttgagaacacaaatttagatctttctttggaggtaaaatgataaaataaagggaaagcataaataagattcattctaattttttgaaagcaaagaacttggaatgccctttgtagatagcaaaggatctgtgaagaacattaaggagaggagtaatgataaatctgtgccttaagatttctctaactttaaagaaaataatggattgaggcagatatggagggaagtaaacccaagaccagagccatattagtaagctagaaccataataaaatctatatgagagataataaaggcttgacaccatgcaattgctatccgattaaaaaagaagtctttataatattttgttgtagaattcatttaattggttttat

SEQ ID NO: 697215 - DNA, 650 bp, Homo sapiens
tccatccccattatccaatcacctctccccaggcccctcctctaattcaacatgagatttgggtagggacacaaatccaaaccatatcaattttatatatatatataagatatatatatatratatatatatgagatatatatatgatatatatcatatatataatatataacgtcatcccaaaatcagccatcacttactactcaaaaatgccttagtctaagtttacagaaagtgaaaaattgaatcttttctaaaggcacttacttcatacttgagaacacaaatttagatctttctttggaggtaaaatgataaaataaagggaaagcataaataagattcattctaattttttgaaagcaaagaacttggaatgccctttgtagatagcaaaggatctgtgaagaacattaaggagaggagtaatgataaatctgtgccttaagatttctctaactttaaagaaaataatggattgaggcagatatggagggaagtaaacccaagaccagagccatattagtaagctagaaccataataaaatctatatgagagataataaaggcttgacaccatgcaattgctatccgattaaaaaagaagtctttataatattttgttgtagaattcatttaattggttttat

SEQ ID NO: 697216 - DNA, 650 bp, Homo sapiens
tccatccccattatccaatcacctctccccaggcccctcctctaattcaacatgagatttgggtagggacacaaatccaaaccatatcaattttatatatatatataagatatatatatatgatatatatatgagatatatatatgatatatatcatatatataatatataacgtcatcccaaaatcagccatcacttactactcaaaaatgccttagtctaagtttacagaaagtgaaaaattgaatcttttctaaaggcacttacttcatacttgagaacacaaatttagatctttctttggaggtaaaatgataaaataaagggaaagcataaataagattcattctaattttttgaaagcaaagaacttggaatgccctttgtagatagcaaaggatctgtgaagaacattaaggagaggagtaatgataaatctgtgccttaagatttctctaactttaaagaaaataayggattgaggcagatatggagggaagtaaacccaagaccagagccatattagtaagctagaaccataataaaatctatatgagagataataaaggcttgacaccatgcaattgctatccgattaaaaaagaagtctttataatattttgttgtagaattcatttaattggttttat

SEQ ID NO: 697217 - DNA, 1699 bp, Homo sapiens
caagccaagagaacttttaaatttatagaattgtttgttgtagattttgattgtagtggtggttacatgacaacatgtgcttgcctaaactcataaaactgtgtaacataaagagttaattttactctataaactataacacagaaaaaaaatgcaaagctactggcatccaagcaatataatccaagctatataaaaatgaatgacttaatttttaaaatttcactgtgcttaaattaagcaaaataccctcaataatctgaaaaccaaaataaatttgttatatttttatgacattattcacttaacagggtgttttttagcttccaattgctgtgtaactaattatcataagcatagtggtagaaaacagctccacttattagttcacaggtgagaagctcagcatatcttgggtcttcagtggaaatctgaatactrgtgaggctgtttcttctggatgccctgggggaatgatccacttccaagttgatcttttttgtttccagaattctgtctgtggcttgactcttttggattctaatccatcatgacagcctacatgaatctattaaatgtttgctagaagttaagttagttttctttccccttatccacttctatagcagatttctcttcttcctgctttgccagtgaaaatagtagctacaggtccttgagttaaatatatatgtcattataatctctgctctaattagtttcaaagatattattttttattttactccatttattattttttatgaggagcgtgacagttttttttgttccctttttcttcttttttgtgaatttatatattctaatcagagtgcatagcccactattaggtaaagttttaaatcagaaagcaaaacaaaaccaaaacatgtttctcagagagactgtaatgagttttctgacactgaataataagttatagtaaaaatattatccacattttgagtgcctattctgtgtcagtcactgttgtaagcatttgtattaactcatgctccaactcttatactacttgtcaaaggaggaaaagatgttacatatttttctcagtgttatatggtttttaagtagtagaatttatagttgaacatattcaatctaattcctgagagcagtttatctgtgcagattctgcttaatcaaaatctgatagtttaaacagtgaatgcatttcatagtcaaatctacaacactgaaccatatttggttattttgtttaaaaatatggaaagaagtatatctttaaataactatatttagttaaaaacatataaaagcaatctcaggtaaatatgttctcatgggtttatgattctgtatctttaataatactgtcacaaagcggaaatatttatctacagtcaacagaaatcctgttaagcatttgtatgtgcctgtattccttaatttcaactcacctttatctaataactaaatgtacagcaaagtctgcactgaaattccctccaaaaaccttgtaccaataggatgtcatgccactatcatctctgtaaatcccagaatccaaaaatgtcattttttaaaggtcattttagatctgtctttctggatagatgtgtattctttcttgaaaaggccaagttaagtatctttattaaaattatagttactccatttctttcttcaatgctcatatacaaaacatggtcaaactagc

SEQ ID NO: 697218 - DNA, 682 bp, Homo sapiens
cttaaaattatttagaactaaattcaaacacttttgactacagttctcaatagagatggaaaagaatttttgatagaaagaaggattcctgatgatgtaaacacttgttttactygttgccatgtttcataaaagatctacaacacatagaactaaatgttcaaaaaagtaatgaagtatttagatactaccagtttcttacttattcctaatggctaaagagagtaaattttatcataacttaaactatccatcatgaataactttagttaaaccaaaaattgcctgaaaattaggggaaactttataaaaacaaacttatttaacttaagataaaatcaattttaattttttcatcagcttacacacacacacaaaaatacacacattctggcgtatatgtatatatatatatatagagagagagagagagagagagagagagagtttgtgccctaccctagtatttcagaaaattccataaatgtatctaaaaagataaaattaacaaaatcctagcaattatttgaatctctttattttcagaaatttttgtatcccttggtaagacacttataaatagatacgtttccaacaagctgacactgaactgataaacttatttccattctgtgtaattcatgtctctacttatttattatattatgataacttttatttt

SEQ ID NO: 697219 - DNA, 644 bp, Homo sapiens
gcaccatataaatttccttactttgaaaattcaaacttagacacagtcccttcccacagctgcctcatagtataaaggcaagcagactttacaatgtactcataatagggtttagcataagaagactaatgacacataaaatggacaaaattcacatacaagtggcaatggacaatttcctgcaggagattataacttagttcagcacaatatgttgagatgaattggttaaggacttaagaaagaagcacatttcagacaagaagaaaagcatgaaaaactgataaatcaaggtttattaccacaatcatctgcaaaacttgttcaaaatataaatgtattttgtatctgcttctgggcaactgaaagtcaaattcagtacatgtcaggtttcctcagatatttcagaaaaaaataatgtgttcagtgattcaaagatgtatcctaggttaagaacaggtgagctagagcagagtgttagaggtggagtagtaaatgtcaaaactagaaagaatgccttaaaggataagaaccttaaaccataatggaatttatattacagctaaggcatttggactttacctaaagaatacaagaggtcaataaaataagagtgcatatgttagcctggaayagcgatctca

SEQ ID NO: 697220 - DNA, 658 bp, Homo sapiens
atctgggtgatggaataaataaagatttttaggtttttgttttgtttcttttttttttgagacagagtctcactctgtctcccaggctggagtgcagtggtgtgatctcggctcactgcaacctccaccccccaggttcaagcgattctcctgcctcagcctcccgaatagctgggattacaggcgcctgccaccgcacccagctaatttttttgtatttttagtagagatggggtttttatcttgaccaggctggtcttgaactcctgacctcaagtgatccaccacctaggcctcccaaagtgctgggattacaggcgtgagccaccacacctggcccaataaaggttatttttaaagagaaggagagataaatggggaggaaaagggggaagaagaagaggctggagtgcagggttatgatcacagctcattgtaacctcgaactcctggcctcaaacgatccttccatctcagcctcccaagtagctgggatttcaggcccagcttgctgtttgtttcattatctttcttcaagcactttgtttgacgttggagaataagagcgatctagtgaatcrcaggccaccagtgaatacaggccaaacttgtttgcgagaccagggagagcagataaggcacagaccccaagggtctc

SEQ ID NO: 697221 - DNA, 596 bp, Homo sapiens
atgttgcctttttaaaagtaaaattgtaccatcgaacctgttcccacaccactaaatgctctgtgtactacggtggttgcccactcttcttttatatgggtatactgtatttatttaaccagctctgtattcagatacttctgtctactcttttgctattgtaaataaccctgtgatgaaaatccttgcgcatgrattgcctctctgattattttccttgggagagattgctgaaagggaaatgactgggtcatgggtcataaacattttaaaggctctttacacatattgacaaattgctttgcaggaagattctaatggtttatcgtcttatcagcagcatagacatgacttggccccacgggcttcatttctgcctgtgcctctctggtctccctggcatcccagtctgagcctgtcactgtccagtaggcacactttgttaggatgcaacacatctctgggagctcacacgcctccccttagacagctctgtcagcagggcctggccttagcctttctgtgggtctcttctctttcttagcatgtgacacaaagttcttggcatctacaatgtctaattttctttctttttc

SEQ ID NO: 697222 - DNA, 1097 bp, Homo sapiens
gatacagaagaaaagtgcataaagtgggagagaattaacactggaaatacttactacatggcaggcagcttacatatattatgtatcacaattaaatacaattaatattattcccatttatgataaatatgaaaatttacaatcagaataataatttcctaataaagtaggtgctgtggctcatgcctgtaagtccagaactttgggaggccaagacaggaggattgcttgaagccagaaattcgacactagctgggcaacatagcaagactctgtctctacaaaaaaatttaaaaaattagctgtgtatagtagtgyacaccatggtctcagctccttgggaagctgaaataggagatcccttgagcccagaaattcaaggctacaatgagttctgatctaaccactgcactccagtttggatgatagagtgagatcctgcttcaaataaaataaaatatgatataaaataaaataataaaatataaaaatttcccaatacacattggtatagaaatttagcccatttccattaaaacagaaatatcaagcttttaacaacattctacaccactaagtagagaagagaatgggctgtggatgcttctgggtctggtccttccccacaaaatacattttgccacagaaagaggattgtgtagaaggttgttccatggtgattttttccacatagctgatttggtttattgagagcttccacttcacatgttcataaagtaaacagattctaggagttacttggagacatggcagcaaatggttaaccattttttaatggtaaaatctgacctgagtttctgagttctcaactctcttataacagacatttagaagtatccaattcttgaactcaaaattaactataattttaaaatgtgcctattgtgtagacattgatctgtgattatacattttgtcacattgatcaataaagctaaatataaaaatgaaaatgaacagaaactattgaattatgcaccacaaggtgcaatctatatgccaatatgagcatgcagaaatgtctgcgtgctatgtatatgctacttgtgatttattaatttatacttctttattta

SEQ ID NO: 697223 - DNA, 1097 bp, Homo sapiens
gatacagaagaaaagtgcataaagtgggagagaattaacactggaaatacttactacatggcaggcagcttacatatattatgtatcacaattaaatacaattaatattattcccatttatgataaatatgaaaatttacaatcagaataataatttcctaataaagtaggtgctgtggctcatgcctgtaagtccagaactttgggaggccaagacaggaggattgcttgaagccagaaattcgacactagctgggcaacatagcaagactctgtctctacaaaaaaatttaaaaaattagctgtgtatagtagtgcacaccatggtctcagctccttgggaagctgaaataggagatcccttgagcccagaaattcaaggctacaatgagttctgatctaaccactgcactccagyttggatgatagagtgagatcctgcttcaaataaaataaaatatgatataaaataaaataataaaatataaaaatttcccaatacacattggtatagaaatttagcccatttccattaaaacagaaatatcaagcttttaacaacattctacaccactaagtagagaagagaatgggctgtggatgcttctgggtctggtccttccccacaaaatacattttgccacagaaagaggattgtgtagaaggttgttccatggtgattttttccacatagctgatttggtttattgagagcttccacttcacatgttcataaagtaaacagattctaggagttacttggagacatggcagcaaatggttaaccattttttaatggtaaaatctgacctgagtttctgagttctcaactctcttataacagacatttagaagtatccaattcttgaactcaaaattaactataattttaaaatgtgcctattgtgtagacattgatctgtgattatacattttgtcacattgatcaataaagctaaatataaaaatgaaaatgaacagaaactattgaattatgcaccacaaggtgcaatctatatgccaatatgagcatgcagaaatgtctgcgtgctatgtatatgctacttgtgatttattaatttatacttctttattta

SEQ ID NO: 697224 - DNA, 616 bp, Homo sapiens
caatgaaatttgagactactggtatgacaaatcctgtttcaggccttgttgatctagagttacttgcacaaccagaatttgccaaaacaggaaataggtgtttcatatatacggctctaaccttctctctctgcaccttccttctgtcaatagatgaaacaaatacttcatcctgctctggaaaccactggtaagtgataactcctttatttcaaggtgaacattatttatttcaaggtgaacaacacatttataccttatcaatgataaagtgatatattcgtatattttatctacaattttccaaagtttattgataacttttaatgagagtaattatcttaatatattcattttaagctgagaagctaatayatagacagctttattattccaaaagcacttttatccagtttgaaatttaaataaatttttacctttcattctaaagtaatataactaattcccatgtctatgacttgtggaaacaattgtactagaactatttttaatagaaaaatgaaaaactatgaatatatgtgtgtgcatactttcacatcagtaacttttactaatattaaaacatacagctatatgggatgccatagcaaaagtt

SEQ ID NO: 697225 - DNA, 627 bp, Homo sapiens
ttaacttttgtaacatttgcaacctttatgttactattatctcatatgctccaccagtgggtgcacaatttcaggaagtaagcacggtttaaaagtcaaagtcttggtttcttttcttttctccctcatctatcyaataagtatttatgaaagattgttaaatgtcaggtcctccactaagtgctaggaacacaaagataaagaagtcataatttctgttttcaagtagctgacagtctagtaagagagaactatttgtaaataaattgtaatgtagcatgctaaatactaaagtagatatatgtatacagtaagtgaaggtataaaagaaaaaagaatcaattttgtctctatctattcttggctactctaatagagtcttgaggctctattaaattattctcctctatttcttatttgtaaaattggtacaaaaccatcatgtggaagaaagttcaaaggaaaccagaaaatattattatgcaattgcaagggatacacagattcttaatggaagttctttcccactttcagactgctctaggttctcgcctctgactgctaaaatttctctatcacttgttattcttcttggactacattctttaggcatttatgatagggaaa

SEQ ID NO: 697226 - DNA, 627 bp, Homo sapiens
ttaacttttgtaacatttgcaacctttatgttactattatctcatatgctccaccagtgggtgcacaatttcaggaagtaagcacggtttaaaagtcaaagtcttggtttcttttcttttctccctcatctatctaataagtatttatgaaagattgttaaatgtcaggtcctccactaagtgctagraacacaaagataaagaagtcataatttctgttttcaagtagctgacagtctagtaagagagaactatttgtaaataaattgtaatgtagcatgctaaatactaaagtagatatatgtatacagtaagtgaaggtataaaagaaaaaagaatcaattttgtctctatctattcttggctactctaatagagtcttgaggctctattaaattattctcctctatttcttatttgtaaaattggtacaaaaccatcatgtggaagaaagttcaaaggaaaccagaaaatattattatgcaattgcaagggatacacagattcttaatggaagttctttcccactttcagactgctctaggttctcgcctctgactgctaaaatttctctatcacttgttattcttcttggactacattctttaggcatttatgatagggaaa

SEQ ID NO: 697227 - DNA, 583 bp, Homo sapiens
attggtgaattccttacctctgttttctatttctgaaacccctattaacccctattagttaaacactggaatttgaggactcgttttaatttttgatacatttttcctcctctttttcatctctctttttgttctactccataggaattttttaagtgggttgcaaaaaataatcactttatttgatattatagttgtagatatagagtatattttctttaagaaatgaaaaactaagaagaaaatgccactcaacatcgctggcatagcaawaggtcagcaggaaaaaaaaatactgtgataaacttgtctctttaataccaagaataaattctaggccaagcttcaatatgcttcctgttttttcagtacatatttcttttactgttgctcttcattcttttccacatttcatattagaggactggtacagcctttaaaacttctttgataggagcaaatccagtatccactgatttcttctcaaatgcagtctaacccatcagatagactggcagtttcattctcatgaatacttgagtagctatgaaaaacctcaataagacacacacgaatccaatga

SEQ ID NO: 697228 - DNA, 1361 bp, Homo sapiens
caccaaagctcactaagaatcaaccttacctgtctatagttctgctgtgcagagttgaaaattagctgcttcctaatacatatttgttgactgaatcttggtaaaaatcttggtaacaatacttccctcaccaatgctgattttcaagtaactagtccaagcatttttctagataatctatttccttggataaaatacaatttgtggtcataaaacagcaaccactttactatgttcatggataacgtaaatcaagaatttggacagaacatagtgggaataggtgacttctatgcttcatgatgtcttgggcctcagctgaaaagacccaaacagcagggggttgtttgaatggcagaggatttgtttcttggtaaagtactggaaggctgtgctcagctgacctaagcccctacagctggctggtggtatcagactggtcagcatttctacacagcagttcattgcttttaagagtgaatgtttccctaaacaaaatggaagctgcatgtcttttgcgacgtgggcacagcgtcatttccattacaactgtgtactgtttctgtagtcacaaacccactctacttcaaaatgaattgcatagactgcatcttttaatgggggaagtgtcaaagaatttgcagtcatattttaaaacctccaggataaaaggagagtttggataatgatgtttccatgctcctttccttctttggtcacagacctaatttgaggtaaattttacatattaccagattattcttcttaggtaaagagtcagtgaacttcattcttaacattctaacttaattcttcattcttaactttattctttattcatttcatccacaaacatgcaaagagcaagcgcctatgtttctctctaagaagatcaaactagtattgaaatgactttattatgcctaaggaaatagtcacctttcatgtatttcacataagcataatttagagatctttgtaggattgcagagttgttgacttcactaatttggaaaaagaagtgtggatctaccttaggaaaatctaaagcagattctagggtycagattttttttttcaaatgcatactcactagtctccctgtgaccacacaatcctctgttactcacaggacaactggtatgaagggtcttctaagtggtttacctcctatttttacatgcataagtggggtaaaaggcctgggaggaaacaatttacttgggtatgaaggtgtagaactccaggttttgtatgctttacatttctaatatcatgggaaaattgtacattttatttggcactgagcaaatggaattgtaacttatgtttttcaatgtgaatagcttgctgtatgctca

SEQ ID NO: 697229 - DNA, 680 bp, Homo sapiens
cattcattatctatgggtggtcagaatcaccctcacctttaaagcgttttttttttctttctctcttttcccaaaaagaaagttatacatgcatatcatatgcacattacaatacagtagtcccaaatgttgcttttgacagtgtctataatataccacatgcaaataagaaagccttcggtataaaatttcatgggaaaatattgtcttcaagcattactgaaagtaggtatcttactctggcaaaaaccaacaaagtgttcagaagtagcaggattgaagaaaaaagctaacaaaatgttaaattttcagatatgtctgccagttccaggatctgcaagcataaaggactacatacacattatccagtccttacctgatgatgaccytcccgaggtcttaggaatacacccagaggccatcaggagctgctgggagacccagggcgaaaagtttattgaaaatctgattgccatgcaaccaaaaactaccactgccaacctcatgatcaggtaagaactcgctaggaaaaattgttggtcaaaaattatcaggctgggtctggcagctcatgcctgtaatcccagcaccttgggaggctgaggtggacagattgcttgagctcaggagttcgagaccactctgagcaacatggtgaaaccctgtctctacaaataata

SEQ ID NO: 697230 - DNA, 680 bp, Homo sapiens
cattcattatctatgggtggtcagaatcaccctcacctttaaagcgttttttttttctttctctcttttcccaaaaagaaagttatacatgcatatcatatgcacattacaatacagtagtcccaaatgttgcttttgacagtgtctataatataccacatgcaaataagaaagccttcggtataaaatttcatgggaaaatattgtcttcaagcattactgaaagtaggtatcttactctggcaaaaaccaacaaagtgttcagaagtagcaggattgaagaaaaaagctaacaaaatgttaaattttcagatatgtctgccagttccaggatctgcaagcataaaggactacatacacattatccagtccttacctgatgatgaccttcccgaggtcttaggaatacacccagaggccatcaggagctgctgggagacccagggygaaaagtttattgaaaatctgattgccatgcaaccaaaaactaccactgccaacctcatgatcaggtaagaactcgctaggaaaaattgttggtcaaaaattatcaggctgggtctggcagctcatgcctgtaatcccagcaccttgggaggctgaggtggacagattgcttgagctcaggagttcgagaccactctgagcaacatggtgaaaccctgtctctacaaataata

SEQ ID NO: 697231 - DNA, 1551 bp, Homo sapiens
ttctgaattataatcctcatttcttctcattcccaagtaaactcaacatatttagagataattttctctacttttttttttaggttgacagtttcaaagcagtttgcagggatttctctttgtctttaaaaactcccttttgtcctgattttcctcaggtgggctatgactttcgtagatgctgagtggattaaaacaaagagtttttcacattatactctcagaacacacttttttwaaaaaaaaatctttaatcattggctatcacaacatgcttctgacaccagatggggatttctccccacacactaagcaagcaatcagttctgcagcggatagcagctcggtttcctttgttcagttcgactctacttgaatgccaatcacaagccccaggttgctttagctgtattctggcctaccagctataaagtatggatcctaggaccccctttggatttgattaatttgctagagcagctcacagaattcaaacacttaggtttcctggtttattataaagcatacagatgaacggatgcacagggcgagttatggggctgaaagctccacgctttctgtgggtcagccaccctccatgaacctccacgtgttcagctacccaagctctccaaacctagtctttttggggtgtttatggaggcttcattacttaggcatgattgactaaatcactggccataggtactcagtttaaccttcagtccctttcccctccccagacatggggaggtggggatgaggctgaaaattccaatcctgccttgatcttttcagtgaccagccccattctgaagctacctaggggctgccagccaccagccaactcattagcatacaaaaaatcacttacttatagagatttcaaggacttcaggtgttgtatgccaggaaagacctttcaccctcaagatttgctgaaaatcatctgacaaaacagcgatgaatatatatgacacacaaatttattaatatgatgggagaaaatctcagagtgactaccccaccactgagtggggtacagatggttacttgcccttaagggcaagggagatggggaagcataaatgattttaggagctcagtaaatgatttttaggggagttcaatgggcttgaagaacatacaatggcctccacgaagtctgttgggctcagagggtagacggtggtttgtgacatctgtccaggtggactgacttcagactttctccctgcaatatgaattcagttaataaaaactcagggaagggaccagagataattgtttccttctttaggcagataagggagcttcagagaacaactttatcctgtgctttgggagagacagagaattgggagacatgaggtggggaaggtcagagagaccttgcagcttcttcatttctgcatgtcaaagcgccatattttggggatatctgtttctgagcccccaaaatggagacaaagcctaaatatgtatatttcacaatatcatacatgcatacctttggttgcaatcttttgctattctcaaataaaatgtttt

SEQ ID NO: 697232 - DNA, 674 bp, Homo sapiens
attgccaagcacctggcacatcataggtgctcagtgaattcttgtggaatgatgaaggtmgttcccttatatactcactagaactggctgaagtgcattccattctgcaacagagagacttcagcccgcccaccctcacctctaggatcagagtgaccaacagtcgaagggaatggaagggagaaggaaggaaggaaggaaataaggaaggaaggcaggcaggaaggaaggaaatcaggcacataaaggcaaaacctttcttcagctacagaagcagtctcaacacaggcttccactgagcatgctcttcacattcctggggaaggaagaattatcctaacttatggtgaccgacagtcccagtttgcctggaactgaggagtttcctgggacaaagggctttcagggctaaagctggaacagtcccaagcaaaccaggactcccctcccctcccctcccctccactccttcctttctttttaggtggagacttgctcttgccacctaggctggagtgcaatggcacgattttggctcactgtaacctccgcctcttgggttcaagtgattctcctgcctcagcctcctgagtagctgggattacaggtgtctgagaccacacccagctaattttttgtatttttgtagagatggggtttcaccatgttggcca

SEQ ID NO: 697233 - DNA, 617 bp, Homo sapiens
actcatattttcaccctgatttaagatgatctgatatgggtaatgcttgcataatcaaaacttctggaggaacttatctccatagtagacaacaaggtaatcttaaactatcctgacactaattgggtgtataaacttggccaagtcatttttccctttgagtctcagtttygtcaactgtaacatgaatatgaaagtaactaacttgtaggtctgtattaaaaattaagtcaattattttggtaaatcagttgtatgcaatatagcgtacatgagagagagagagagtttgtgtgcatgtgtttagagagagatggagagagagacacacatacacagagaagaatcagtatattgttaaggataacaacatctagaaacaaatcgacagacaagaaaaacaatttaagtaatagaattttcagacagaagttaaagaacaaaacatatgcttaaagatgcccacagggaaatacaaatatgatcatggtagatttagaaaggaaatacctgctagaagtaacagagaactactggaaaattaatgaagtgcagtaggaagaaagaaaataaattattgaagaaaagtttcaagatacaaaggatagagttaaaca

SEQ ID NO: 697234 - DNA, 617 bp, Homo sapiens
actcatattttcaccctgatttaagatgatctgatatgggtaatgcttgcataatcaaaacttctggaggaacttatctccatagtagacaacaaggtaatcttaaactatcctgacactaattgggtgtataaacttggccaagtcatttttccctttgagtctcagttttgtcaactgtaacrtgaatatgaaagtaactaacttgtaggtctgtattaaaaattaagtcaattattttggtaaatcagttgtatgcaatatagcgtacatgagagagagagagagtttgtgtgcatgtgtttagagagagatggagagagagacacacatacacagagaagaatcagtatattgttaaggataacaacatctagaaacaaatcgacagacaagaaaaacaatttaagtaatagaattttcagacagaagttaaagaacaaaacatatgcttaaagatgcccacagggaaatacaaatatgatcatggtagatttagaaaggaaatacctgctagaagtaacagagaactactggaaaattaatgaagtgcagtaggaagaaagaaaataaattattgaagaaaagtttcaagatacaaaggatagagttaaaca

SEQ ID NO: 697235 - DNA, 617 bp, Homo sapiens
actcatattttcaccctgatttaagatgatctgatatgggtaatgcttgcataatcaaaacttctggaggaacttatctccatagtagacaacaaggtaatcttaaactatcctgacactaattgggtgtataaacttggccaagtcatttttccctttgagtctcagttttgtcaactgtaacatgaatatgaaagtaactaacttgtaggtctgtattaaaaattaagtcaattattttggtaaatcagttgtatgcaatatagcgtacatgagagagagagagagtttgtgtgcatgtgtttagagagagatggagagagagacacacatacacagagaagaatcagtatattgttaaggataacaacatctagaaacaaatygacagacaagaaaaacaatttaagtaatagaattttcagacagaagttaaagaacaaaacatatgcttaaagatgcccacagggaaatacaaatatgatcatggtagatttagaaaggaaatacctgctagaagtaacagagaactactggaaaattaatgaagtgcagtaggaagaaagaaaataaattattgaagaaaagtttcaagatacaaaggatagagttaaaca

SEQ ID NO: 697236 - DNA, 617 bp, Homo sapiens
actcatattttcaccctgatttaagatgatctgatatgggtaatgcttgcataatcaaaacttctggaggaacttatctccatagtagacaacaaggtaatcttaaactatcctgacactaattgggtgtataaacttggccaagtcatttttccctttgagtctcagttttgtcaactgtaacatgaatatgaaagtaactaacttgtaggtctgtattaaaaattaagtcaattattttggtaaatcagttgtatgcaatatagcgtacatgagagagagagagagtttgtgtgcatgtgtttagagagagatggagagagagacacacatacacagagaagaatcagtatattgttaaggataacaacatctagaaacaaatcgacagacaagaaaaacaatttaagtaatagaattttcagacagaagttaaagaacaaaacatatgcttaaagatgcccacaggraaatacaaatatgatcatggtagatttagaaaggaaatacctgctagaagtaacagagaactactggaaaattaatgaagtgcagtaggaagaaagaaaataaattattgaagaaaagtttcaagatacaaaggatagagttaaaca

SEQ ID NO: 697237 - DNA, 617 bp, Homo sapiens
actcatattttcaccctgatttaagatgatctgatatgggtaatgcttgcataatcaaaacttctggaggaacttatctccatagtagacaacaaggtaatcttaaactatcctgacactaattgggtgtataaacttggccaagtcatttttccctttgagtctcagttttgtcaactgtaacatgaatatgaaagtaactaacttgtaggtctgtattaaaaattaagtcaattattttggtaaatcagttgtatgcaatatagcgtacatgagagagagagagagtttgtgtgcatgtgtttagagagagatggagagagagacacacatacacagagaagaatcagtatattgttaaggataacaacatctagaaacaaatcgacagacaagaaaaacaatttaagtaatagaattttcagacagaagttaaagaacaaaacatatgcttaaagatgcccacagggaaatacaaatatgatcatggtagatttagaaaggaaatacctgctagaagtaacagagaactactggaaaattaatgaagtgcagtaggaagaaagaaaataaattattgaagaaaagtttcaagatacaaaggatagarttaaaca

SEQ ID NO: 697238 - DNA, 625 bp, Homo sapiens
tgttccctaagtgagtggggttcccctacctttcactcagggaatgtttaatgttttccttttacaatttccttcttcagcttccctctctcctaatgatgaatcctgtaaacttttgctttgcctatgttctgctggaaaccatgttactgtgtactttgaagacattactccgtagcaggaggcagggtgggaggtgctctggggaatgacagcaggccttggctgggggaaactgacaccagctggaggagacagccccaggcagggaatccagcagcagagagctcaccccaaagtgatgaaggttgcgtggagcttgcaggctgctggggggaggaatgtggtcacagggccttctcaccaagctcctrtggagcttaacttaactttgggcagaaaaagagggtaaacaaggaaccaaaggttgttgtaagaaattgagggctacctccaagtttggagcctaataaaaaactgtccctgttcgaaggggaggactcagccccatgtggttgaagtggagaacagctgggacctcccagggcctggggccttctagggaatgggaagtgacaacacaagtaagcaaatgaactggggacatgggagaggtgaggcggca

SEQ ID NO: 697239 - DNA, 612 bp, Homo sapiens
tggttttcaacaagccggatgaaggccactcagccccagccccgtgttattagtggggttcaggcccgtaaatgatcagggacaccctggacacctttaatttataattcaattccccccgatcattttaacgatcattgctcctagacaacatagaaggagctcattaagaactctccacagacttctttaatcatctattattgaaaaagttcatgaagcgtgtgtgtgtgtgtgtgtgcacgtgtgtttaaagttggaaggtttcctaactttcctgcaataaatttctcttccaagtcatacctgaaaaagcacttttcatggaagtatccgtcaataaaaaatatatataatatgtgactggaggaatcctaaaagtctagctatgtgctgatgataagttctaaatgacagctcgagtcaaggtcaagatggggaggctccgatggcrtggctgagtagaagacaggggagcaccaggtgagtgagtcaactcactttgagcccaggcctgagatgagactggggccaccggaccctgaggtcagctctgccatggacagacatgggtgcctggatggactgtggggctcctaaggacaaggtgtg

SEQ ID NO: 697240 - DNA, 398 bp, Homo sapiens
gatctgctttcataatggattaaaggattgatggattaatgggttattatgggagtggacctggaggctttataagaagaggcagaaagacttgagtatagcatgttaggacaccagccatataatgagcacaccatgggatgccctgtgctgccttgggactctgcagagtccccaccagctcgaagacccccacgggatgtggtcccttgactttggacttctcagaagtaataatatttttctctgtaaattatgcagtttcaggtagtctggtataatcaacagaaaaagaactgataaaggtttagataccttcagtgtgtggcaccctgtgttttcctattagatttgcctaaggcacccaggagagcagagtagaagcctgcaaacmttca

SEQ ID NO: 697241 - DNA, 539 bp, Homo sapiens
ccaagagatttttttgttttgttcactgctgtaatcctagtgtctaaaatagtgcttatctgttgaatgaatgaatgaatcacatatggatttctgtgcagagcatttcaaatagtgggctggactttccttccaacacccatcctggctgtctgggtgtatttagggagtgcaatctcattctgatattaacctgagctaagcagaattttaaaggcagaagttayagaaaaatactaaagatattcccaaatcaaatacaatacattgtttgtgatggtgtatttgctcacgctaatggagttgtatcagacatcccttgtgcatacttcaaattctcctggccctgctgcagtggccaattccaggtagactctgactagctttgccaggagccacctgaaaacaccacctcaggcccctgcattacacctctccattcctggctcagaacttttactagcacacagaaaactgcttggcatttacacatgtgcaacttggaaatgtggggacttaatgctcatgggtccattctc

SEQ ID NO: 697242 - DNA, 658 bp, Homo sapiens
tgacctagagctaataagttgtacatattggctgagttactgcaaagaaagggcaaaatgaaaacacagctcttatagtcaaggttcttaggatcttattgagatgagctcctcagaatcagccaaacttcaaacatggagagcacggcccccagtctgccaagtcggcccaagactactgacacctactgcaagcaattagggtccaactacaaagttagcagaaagagcccacccaagaccactgtcacgtgtgacaactgcatgtttggagggttcccaaaacgaccctcaggctcgtaattctctagagggactcacagaattcacggaaaatactcatggctacaatttawtatgttggaaaggagacagattaaaatcagccaaaggaagagacacatggggcagaatctaggacggtttcaaaagggacgcttccattgtcgtcaggacacattacattaccttcccggcatccgtgtgtgatggtacacgtggagcactgccaacccaggatgctcacctgagccttgtatccagagttgttactgtggtttcattacattggcatgattgattgattgatttcccatgtggtctaactcagtctccaggtggactggtactgtgtgaccccaaagcccctgccctaaat

SEQ ID NO: 697243 - DNA, 1484 bp, Homo sapiens
tgaacctttctctttccctccaaagattccgagttcctcctacagtttgcagccttcagtaccctgccccttccctcccctgccctcccttacttggttgtctttattccaagttaaatgatcatcatgaggttgggaaagccgcagctttctatgcaccatgttttactccccaaaggacatcttttagagtccgcagaggcccacatgaagggctcaccagcagctctaccggtttgctttccacaaggagagctaaaatgccggttgctaagcagcatacatgccgctgcttctttccacaatgtagacttaaaaaaatcgccgtaaacattttaccatatgattgagtcaggtgtggggagtcgcagtaaacattttaccatgtgattgagtcatgggtggggagtcgcggaaatacacagggcaggcagttcgctatcacgatgttctctctcaattctgtctttggtctgtcttcctgggtaatgtcacatggagacccaggggatctgccgtcagctgtgtgcagtgggttaacaagacgacggggaacttcagagtgcaggcagtcctcatcttttgcagattctgtatttgcacattcacctactcactgaaatgcatttgtaaccccaaaatcaatacagcggtttcacagtcattctccgacacgggcagaggggtgaagatactgagtcgccagatgcacgcgttccccgccgaggtggagcgtgcaaagctctgccttcacgtttggctctcatatcgtgcacatgtgtcctttttgcagtctccttagcactgtgtttttcatatttttgtgctttctgatggttattttgctgtaaacggcccccaagaatggtgctgatgtcctatttagggtccctaagcacaggaaggctgtgatgtgccttatggagaaaatccatgtgttagacacacttctttcaggtaggagctacagtgctcatgggggtctagtgttaatgaatcaagaatacacacacccagaaaaaggaagaggaagcgcacagggcagccagcttgatgtcaccacgttacatccttttatccggtctttggtaagttttcttttcttttttttttttttgagacagagtctcgctctgtcgcccaggctgaagygcagtggcgcgatcacggctcactgcaagctccaccccccgggttcacgccattctcctgcctcagcctcctgagtagctgggaatacaggtgcccgccaccacgcccagctaattttttgtatttttggtagagatggggtttcaccgtgttagccaggatgttcttgatctcctgacctcatgatccacccacctcggcctcccaaagtgctgggattacaggcatgagccaccgcgcccggccggtctttggtatgttttcttggggacttacacagggtcacgtggagatacagggggatgcgccttcggcccatctgtatgtggggc

SEQ ID NO: 697244 - DNA, 182 bp, Homo sapiens
cttcaaaccctatgcttttaaaaatcattccatttgcttcactaattttctgtgaaaaatcactggtttccatagtggaaactcacaagtggcagctaagtgattggagaacaatcattagtagacccaggtttaaattcagaatctgtaatggacttcctggaagmcattaacctgctagg

SEQ ID NO: 697245 - DNA, 583 bp, Homo sapiens
tttttagcttctatataatgtaggtttgacaactgttccaaataagaatttatttaatttagtgaaagaaaacagcacaacataattaatttaggcagaagtttgctattggcttttagggctggatattctaattgtctgcgagaacctagtatgctcagaattctgttgtctgatatttgaaaagatatgtctttgaaaactgctcttaatcaaaacatgttgaattcagagaaagaaaatagcacattatctaggtctttggcacaaagcttgcgtttaccttttaggactagatattcgcattttctttgtgggcctactatgctcagaattatgttttctgagatttgacaagatgtgtctttgaaaactgctcctacttaatacttgaattcagtgaaagaaaacagcacatcattcattatttgtgtgccctatcttgcttttagcatttagggctgcatatgcatattttcctggaatcaataacttggctccaaactgttttctttctgagcttgtacagaatgtgtttttkaaagtgatcagtgtcaaaacacgttgaattcagtgaaagaga

SEQ ID NO: 697246 - DNA, 583 bp, Homo sapiens
tttttagcttctatataatgtaggtttgacaactgttccaaataagaatttatttaatttagtgaaagaaaacagcacaacataattaatttaggcagaagtttgctattggcttttagggctggatattctaattgtctgcgagaacctagtatgctcagaattctgttgtctgatatttgaaaagatatgtctttgaaaactgctcttaatcaaaacatgttgaattcagagaaagaaaatagcacattatctaggtctttggcacaaagcttgcgtttaccttttaggactagatattcgcattttctttgtgggcctactatgctcagaattatgttttctgagatttgacaagatgtgtctttgaaaactgctcctacttaatacttgaattcagtgaaagaaaacagcacatcattcattatttgtgtgccctatcttgcttttagcatttagggctgcatatgcatattttcctggaatcaataacttggctccaaactgttttctttctgagcttgtacagaatgtgtttttgaaagtgatcagtgtcaaaayacgttgaattcagtgaaagaga

SEQ ID NO: 697247 - DNA, 935 bp, Homo sapiens
tgaaagtgctgcggctgcactgacattcttatggccctcactccaagcacttctcaccactcaaaccagcggccccaagtaaagcttttgggggcactgagagtccatgcctgagtgaggtactgaaggacagactcagtgatgggagagcacattgattttctcaatgcctatggctctattttctcccactccaaagaaccaaggcaaaattcagcataagtcaaggtccaggctttgaaagaaatccaggtgtttgttctcctgtaaaaggagcacgtcataaacccagcacacaccccaggcctgagacgcccactccttcctaccaggggaacctggccatgttcttcgtggagaaggcacctccagcaggtggccaccacagcagcatccggtgtgactcagtggcccctgagctggcatgtctgctgggcctgctccctcccacactcgagctgccttcagccagggacagctcccactccaggtcctcgatcctctgggccggtggactctcgtcaccaccagctccagtgcgtggggtctcttcaggacccaggttcccgtttctctctggctgggtcgcctgcctcccgtgggttaggtctgtcttcctgctactcacaagggaagacactgggagccacctggaaaagacagatgtggaacaaggagaggtgacccctgagagttctcacttcaccctggcgtgggtcatgaccygtgtcactctggcactctcaaggcatcaacacctaccccacacttgggaagagtcaaacgagctgcccccaggcctgacctcatgaagactaatgaaactaatgaagacaaagtttcctggagtttatgtggccacacaaaagcacatccacagccaattatgtcattatgcaatagtcatgtttaataattggaaccattattgaata

SEQ ID NO: 697248 - DNA, 1350 bp, Homo sapiens
agtcaggcaggccctggtgaacctcctggagcggtaggcaaattcagtccttggcagatatacggatgtacgcttgtagtggctgtggatcctcgagctgagaacaggaggcttctttggagcacaagcctcccacagggcactcttgggatgtctgtyctggaattacccagagcagtaacaaagctttcttttcttccttaacccaagccagcaggatgggatgtcggctagcctttgtgtttggagcctaccaacaaacatacggtggccagcacaaaagtattgttgggctacagtgaaaactaggtcggggcccaaacccttttctgcaaagagcccctccaaagagtagagtgccaacaagccactaatttggctgtttgacattgatactggtttctgacaggtttctgacttactgatggcacattgagtcatttaagattctgaaatctttttccattgctgtctgaacctttcaatttggaatctctgagatgtctttgactctttttccttatttctcatatctatcactcagttgctaaaaagctttatattctgactatagccaactttttcttgcccataaatagcactgttagttagatgtttggtcacctctcatctggctgttgcagtaccctccaaaactgcctctaattccttctctatcctgctaccagaatgatctttctaaaatgcagtttgggtcatgtattagtttcttagagctgccatagcaaagcactacaatgtgggtgacatagcagaaacttattatctcagagttctgaaggctggaagtccaaaatcaaagtgttggtagggccttgttctctctgaaggctctacgggaagatccttcttgccttttcctagcttctggtaggtttttggtgttctttggcttgtagatgtctcagtccaatttctgcctctatcttaacatgacattttccctgtgtgcctatatctcttgccactctttttataaggattccagtcgtattggattaagggcctgccctactccaatgtgacctcatcttaacttgattacattggcaaagaccctatttccaaataaggtcacatttatagttaccttaccagggtttaggacttgcatgcatcttttggggggatgtaattcaacccccattagatcatattatacctttacctataaaccttcagtggcccctgtggtctgctgaattaactgtagatgcttcatcttggtattccagaacttctgcactaataacaaatataataataataatagaaatagtcataactgacatattgagcactttccttgacattattcttagcatttta

SEQ ID NO: 697249 - DNA, 2437 bp, Homo sapiens
ttcggaatgatacaaaactaaaaccaaccaaaaacaaactactaactgcaaactgraaaaaaaatgtgtaaaaattcatgtctccctgcaaaggggtatttttattacataagaaattaatgagaagaacatagagttttgataaataggcaaaggcagggatatcaatagagaaacccaaaaacatttagttaaacaaaaaataaatatccaagagggccagacatggtgctaagtgctttccatctaatagcaacatgaaagaggaaatgcaactggttgacagacacatggtaaatgttgactccacactagtaatcaaataaatgcaaataaaaattatgagaccccatttctcagctatgaaattgcccacaattaagaaaaaaggacgtgattaaatgaacttgcatatatttctgaatagggtagaaattaaaacaattgttttggaaagagatttggaaaaactatcaaaaccttggaaattcatatacttatgacattgtaattttgcttctgggaaaatgacctttggaaatatcccaaaatatacaaaagcattgttactctttgcagagctactgaatgataatgaaaattagaaacaacctaaaatatccaaaatcatgcttcaagtaaattgctctgctgctacatcagctggagtctctctgagcactgagagagaagggtatgaatgaatcagttaggtggctttctgaagcaagtacagaaaattctgctcaaatggcttaaataataataaatgttttactatctcacatattaagtttcttgaagttagggcagctccagagctgtttaatctacaataatgtcatcagtaacccagattcttccctctctttgctttgctactctcagcatgtcagccagtcttctctggaagcaagttggctgccgtagtagctcccagcatcacatctttaagcatcaccatgtccaaagactgagaaagaactcgttacttcctgagtcccagaatccctctagcagattatccctgaggattaattgtccagaactgtatcatatgcttagtcctaagcatggcaagacaatagaacaccataattggcttagagcagcagttctcaaagtgtggtccttgtaccaagatcagcattacctggaaacttattagaaatgcacattctcaagccccaccagaatcagaaactcggagggtagagtagagctcaccaagttgtgtttttaacaagccctccaaatggctctgatgtagctcaaatttgagaaccactggtttagactaaccgaaagttcacacactgaggctggaaaaggtctaggcttctctacagctcatgaccacaacattgctaaacgaaatcaagttccgttagcaaagaagaagggaagaaatggctgtgcagtaggcaactgcccatacaggataaagttcctgttttggtggccaaaatgacccaaatcttttaaaaaaaaaagaaagtcaaagtaataccatttcttcctttccacacaccctcaaatacattttttaagcatttctcctcccatttaatgtgaaatgtgaaagatgttgagtggagtttgcagttgttcgagaccagctggccaacatggtgaaacaacatggtgtttatgtatatgtggaatcattataaaaaaggaagttgcagaagaatatgcattatgtaatatgctaacaataactacagaaatgagcaaaatataaatacataaaggtggatgtgtgcttatatgaatataagtgtatggggaaagttctggaaagatatactacaagcttctaaggggttacctctgaggaagggagtgaaattgggggagggagtcattaaatctcactgttacttttattttatttacgtccgaattgtttcacttatttgcaacaagaacatatatagatcacgcgtgtattttcaaaccaaaaagtgcttaaagccacaataacaaaatattggtgaaagggacaaggactgagtctctagggatggttctgagctctgctcatactcccaatgatgttgccaacctttctctcttctccagtgggatggcacggattaaaaacagaacaacacaaaacagtatttccacttctttttcaaaaactttttcaaaaactaagttttctttttggtgttaccttgtattgttctggtagattctgaagattttgcacatgagcagaagcatgaatttagtttttataattaacttttaactcttagaagtataatttgctagctctgctagaaaatccttttggctcccaaaagctgccttcattaggatttttagaagacaaaggctactacattctgcaatatctagaaactaccactggaaggcaacattcagaattagagaatatttaagatggaaagagttagatataatc

SEQ ID NO: 697250 - DNA, 1268 bp, Homo sapiens
tctgggattgttgaaaattagaaataatgtgagtctagtgcctcctccatagtaataatgtgaaaggaaaataaaaactcaggattccaatacactgtgccaaaagaaaaaacaaattaaactgaaagctgagtcgtgcaagatactgactttccgttggatcctaagcagatagctacagagaaaagattaaaaatctccgtagatggccaggtgtgttggctcatgcctgtaatcccagcgctttgtgaggccaaggtgggtggatcacttgaggtcaggagttcaagaccaggctgtccaacatggcaaaacctcagttctactaaaaatacaaaaaaaaaaaaaaaaaaaagaaagaaagaaattagcagggcgtggtggcagatgcttgtaattycagctgcttgggaggaggaagcaggagaatcgcttgaacccgggaggcggaggttgcagtgaaccgaggtcacacctctgcactcccgcctgggcgacagagtgagactctggcaagaaagaaagtaaagtaaagtaaagtaaaaagaaagagagactctggcaagtaagaaagaaagaaaaagaaagagaaagaaagaaaggaagaaagaaagaaagaaggaaggaaggaagaaaggaaagaaagaaagaaagaaagaaagaaagaaagaaagaaagaaagaaagaaagaaagaaagaaaggaaggaagcaagaaaggaagaaagagagagaaagaaagaaaggaaaaactccacaggttactcgtttctaccttatcttacatgaagtgccaatttaccgagagcaagacagtacataatcgactattcccctacctgctacttttcccttacaacacgtggattaccatactcttcctctttcccctccagcctgcttttcctctaaatattgaaaccctcaaattcatctttggagaaagtcacagaccacatactgtttctgtgattctgtgttgttttcttccaggcatgtccttaaccttggcaaaataaacttctaaattaattgccacctgtctcagatacccttggttttacagtaagaattcacatgcttacatagtaactattaattttggtttcttagtgtgttacctatatattgtatgcctttgtttctaatgatatttataaagtattgatgccagctcattgttatcacattgccagttaaaaaaaaaactaatttttaacctaaaaattagataagagctggagatggatctgggggtagaacgggggca

SEQ ID NO: 697251 - DNA, 1268 bp, Homo sapiens
tctgggattgttgaaaattagaaataatgtgagtctagtgcctcctccatagtaataatgtgaaaggaaaataaaaactcaggattccaatacactgtgccaaaagaaaaaacaaattaaactgaaagctgagtcgtgcaagatactgactttccgttggatcctaagcagatagctacagagaaaagattaaaaatctccgtagatggccaggtgtgttggctcatgcctgtaatcccagcgctttgtgaggccaaggtgggtggatcacttgaggtcaggagttcaagaccaggctgtccaacatggcaaaacctcagttctactaaaaatacaaaaaaaaaaaaaaaaaaaagaaagaaagaaattagcagggcgtggtggcagatgcttgtaattccagctgcttgggaggaggaagcaggagaatcgcttgaacccgggaggcggaggttgyagtgaaccgaggtcacacctctgcactcccgcctgggcgacagagtgagactctggcaagaaagaaagtaaagtaaagtaaagtaaaaagaaagagagactctggcaagtaagaaagaaagaaaaagaaagagaaagaaagaaaggaagaaagaaagaaagaaggaaggaaggaagaaaggaaagaaagaaagaaagaaagaaagaaagaaagaaagaaagaaagaaagaaagaaagaaagaaaggaaggaagcaagaaaggaagaaagagagagaaagaaagaaaggaaaaactccacaggttactcgtttctaccttatcttacatgaagtgccaatttaccgagagcaagacagtacataatcgactattcccctacctgctacttttcccttacaacacgtggattaccatactcttcctctttcccctccagcctgcttttcctctaaatattgaaaccctcaaattcatctttggagaaagtcacagaccacatactgtttctgtgattctgtgttgttttcttccaggcatgtccttaaccttggcaaaataaacttctaaattaattgccacctgtctcagatacccttggttttacagtaagaattcacatgcttacatagtaactattaattttggtttcttagtgtgttacctatatattgtatgcctttgtttctaatgatatttataaagtattgatgccagctcattgttatcacattgccagttaaaaaaaaaactaatttttaacctaaaaattagataagagctggagatggatctgggggtagaacgggggca

SEQ ID NO: 697252 - DNA, 633 bp, Homo sapiens
aaaagtacatatttcttattgtgttacacacgtccattatcttgtaagttgaacagtgcatctgcatactctgtaacccagaaccccatgcctaggtggatgcgcccaagagaaaacttagcatatgcacgccagaagacaggtgtgataacgtttacagtaacaaagcttgtaaaagcaaaatttggtactgaaatgcctttcttttattgaaaagaagtcagtgcagrtgtccaccaacaggaaaatgagtaaattaccatgttaatttgtttcaaaccatattaaacaccaaactctatataaataggatgttgtactaccagctatgcacttggaagtggggatgatgatgaacaagacaggaactcagggaatagatcgctcactggggactggagtgttcaggtgcatctcatgaagaagataatacatgggtggggccttgaaaaacatgacagatctacagaacaggagaagagaggaaaggacgttccagagtgggatgatgtaagcaagggcataaaggggaaaactggcatgcagatgtcagggaaaaagaaggcaaatcctttgaaacagagttcagcggaaggaaataataatggagaagtaaatagactacagaggctc

SEQ ID NO: 697253 - DNA, 2403 bp, Homo sapiens
  misc_feature 1315: n = A,T,C or G
ccttgaatttcctgcctaagctaagggtaggccaggcccttgatgctgcttaaattgttccatgtatcccaactatatcacaagcaatgccatcacacttgacttgtgcctgatctccaacttgtcagttagtcaagaaggaggaaagaatctgtttcccgtgcacacactgtaatttttttttccagtgttgctaagcctgccagaacaaaagtaaaaccacaaaacaagatttagatcagtgtcttgatcaccctgttgctattttacagttttaggagggttggacatcaaacacttgaaactgtcatctacatattccttctcagaataaggaagcactggcatgtacccctgctaaattattctctacccccaaatgttggaaactttctctccaggaaaatgctctacagaaggcacgttgaattaatggagttagttctgagaaaggttcttactgtctaagatgaactgtcatatgctgacttccggccaggtggactcgacgccttagcaggaatgttgcttagacatttagctttttctaatttgtttgctattataaacagtgcttgagaaacctaaagtacacccccacctaaaattactatcacgtcgatttgtttatcttctttataattgcttatcccaactgaatgtttcatagcttgcatgcttgtttatgttctactttctttctcgggatcatgacttgggcatgacacaagttacctcttctatcttgtaaaaaaccacgtagtaaggactcaggaaatatttttgaatgaatgagtatatctttcatgcacatgtattttactgttgtacaattatcttcttaagataaatcttttgagtagtcaaattcatagacacagaaagtaggatggtggttgacaggggctagggtggtggggggagtgagaaattagtgtttgtttatttagttttattttattactattattacttttgagagagggtctcactgttgtccaagctggaatacaatggcgtgatcatggtttactgcaacctcaaactcctggactcaagcagtcctcctgcctcagcctcccaagtagctggaactatagatgcacatcaccacacccagctaattttttttaaattattttttgtagagacaggtctcactatgttgcccaggctggtctcaagggatcccctgcctttgcctcccaaagtactgggatcacaggcatgaaccactgcacctggctgagagttagtgtttaataggtgcaaagctttagttggggaagattaaaaaaagttctggatatggacngtggtgatgattgcacaacgtgaatctacttcatgccactgggctgcacacttacaaatgttacaatgtttagttgcctcacagcctgaacaagtaaaatggaagctgtaattaaccttaaaaatatatatgtgtctgagatataattgtatataagtatatgtatacagacatgtaaactatttgttaaaaaagaaactagaacaaaaatattttacatttacctggaaaatggttaaaatggtaaatgttatagtatgtatattttactacaataaaaatgaataaatttgttgaattgccattcttgggctaagggtaagtgtgcatattttaagctgtggtatatattttgagactgcccttcagaagaatgatgccaatttacataaaaaacaactataagggcatgagaatacccatttcaatggtaggttttctcagtctctttattctttgtatttgataggcaaagacaaagacacacacacagacacatacacacacactttactgttttattattttatgtgtgaatattaatatagttgaaacttaagattgaatattgttttatatgtttggcatttcttcttttataagcaggctacatgtatcttttcccatttttatggggctctttacttccttttattgatttgtaggagctctgtgtatagtaaaggtattaattcggtccatcatatcatttgcaaataatttttctccagttctttatttctgcgtaaatgtcatttgtgatcttttgccataggaaatttaaaattatatattgtatcaagataatctttgggtaagaaaattcctcgttccaagattatgaaagtattcatctgtgttttcaccgagtacatttctggctttgtttgatgcatctgtatgtcgataataaggaatcaggyaaagatataactgaattgttcttcttgcaaatccattattttatcataatttgttatataatccatgctttctatcggttatttgaaatgtcatcttttctttataataagtaaccatattcttaggtctatttcactgatctgtctattccagcacctaggcca

SEQ ID NO: 697254 - DNA, 1403 bp, Homo sapiens
ccaacatagctcgcaacaccctatgtcagcacagggcagtggtggtaaaatgtatgtgcgtatctgcgtgtagcaaatggagaaactgggtcccaaaaaaggataagaagaatgtctaggggcacccaataagtttgtgtctgatctggcatttaaatccgggtctttttgactggaggcctcattgggtacctgcgtgatatctacagtgtttttaagcaagagccaaggttaaacaaatttttctcaggccatttgtctccagtgaccacgtgacctacccactccaaggacagagcyagtgaacacttccagcaggtctcacaggacaacaatctaaaatccattagccacaggcaccctttgtccacttcaaaaaaaaagagatgtgcattattcatagcttgacaagtggtacgatgcccttggcctgttccttcttcctgcaccccttcttgccttttctgttgctacttgcaagagagcttctccgcagagtacactgacatcagaacaagggaggcagctcagcagaggcttggatactggcccgaaggtctgggttccatttctggccccaacacttctaagctattaaataggcagaaactaattgcccttgggtaacctatgaaaaacgcctagcccagtgccagggaagagggtgtgctcaatatgtgctgagaaatgaaaagtgttgggggcaggtgtggagccatggccctctgcggtgggacagctgtgcaaaggaggcaatgaatattagcttcatccaacttccaagaaacagatgctgcaggaaacagagccaaagaggtgaccctgtgatccacaggtcccaatgcttggatggtgacagaatggacagaacaggggtcatgggtttggaaaggtcagtggagccggaaagacctgggctggagtcccagctctgtgacctcaccaaacccacatagcctctctgagcatcagtttcctcttccaggaaattgcgataattgcattgacttctgaactgttacgagagctgcaggctccatggaaaggcagagcgcacagtagatgctcaataaacagcagttgctgcagttgtcgctgttgatgggacatttctcccaactgaggcagaaaacctacccagccagatcccaggaaaactccagactgcctgcagggaagaaaagcttccagcgcctcccctccaaccggcccttgaggcttcgcttacctttctgaaaattaaattaaaattcaacagtagcgccattgtggcttatgcatagtctttaatatccaccgctgacaggatggaattagctgcatttttttgtttgggtttttatttcttgctccaactttcattctcccccacagggtgtaagctggtgtttaatctcatcccc

SEQ ID NO: 697255 - DNA, 604 bp, Homo sapiens
aaccccgtcataagttgaggagcatctcaatgcatatcacttttgcacctttgtaaaactgaaaacttgtaagtcaaactattgttaaatcaggtttctctgtatataaaacattataaaatattacttattaaaattgtaacatyttaaaatatgtggtgttttttcaaattagtatgaaaatgatgtagcatcttcaaggctcatttaggaaagaccatgaagaataaactaattatccacattctttagccataatggaaagtattaacactctaaatctttagatattttacaaagagaatatacgattataaaatggctataataaaatggtaccactatactttagtggtggtttaaatttatacactctataatatttaattaaaatcccttaattgcacatgtttcatataagaatgtatcaaataaaaatcatgagatgtccccagggatatctgattgaaagttttcattagagtgctatataaataagtaaatattgcaaaccaactaaaatgatgatagatgaaagaaggtctacacattggaatacaaggcaatgaaattttgatgtcattgatatcaatgatgatataat

SEQ ID NO: 697256 - DNA, 604 bp, Homo sapiens
aaccccgtcataagttgaggagcatctcaatgcatatcacttttgcacctttgtaaaactgaaaacttgtaagtcaaactattgttaaatcaggtttctctgtatataaaacattataaaatattacttattaaaattgtaacattttaaaatatgtggtgttttttcaaattagtatgaaaatgatgtagcatcttcaagrctcatttaggaaagaccatgaagaataaactaattatccacattctttagccataatggaaagtattaacactctaaatctttagatattttacaaagagaatatacgattataaaatggctataataaaatggtaccactatactttagtggtggtttaaatttatacactctataatatttaattaaaatcccttaattgcacatgtttcatataagaatgtatcaaataaaaatcatgagatgtccccagggatatctgattgaaagttttcattagagtgctatataaataagtaaatattgcaaaccaactaaaatgatgatagatgaaagaaggtctacacattggaatacaaggcaatgaaattttgatgtcattgatatcaatgatgatataat

SEQ ID NO: 697257 - DNA, 604 bp, Homo sapiens
aaccccgtcataagttgaggagcatctcaatgcatatcacttttgcacctttgtaaaactgaaaacttgtaagtcaaactattgttaaatcaggtttctctgtatataaaacattataaaatattacttattaaaattgtaacattttaaaatatgtggtgttttttcaaattagtatgaaaatgatgtagcatcttcaaggctcatttaggaaagaccatgaagaataaactaattatccacattctttagccataatggaaagtattaacactctaaatctttagatattttacaaagagaatatacgattataaaatggctataataaaatggtaccactatactttagtggtggtttaaatttatacactctataatatttaattaaaatcccttaattgcacatgtttcatataagaatgtatcaaataaaaatcatgagatgtccccagggatatctgattgaaagttttcattagagtgctatataaataagtaaatattgcaaaccaactaaaatgatgatagatgaaagaagrtctacacattggaatacaaggcaatgaaattttgatgtcattgatatcaatgatgatataat

SEQ ID NO: 697258 - DNA, 1356 bp, Homo sapiens
tggatagtcccaatccttaggcagaaaagggcagtggaagaattcacatgacacacacacaaatacacagtatgcaggcaatatacactcttcaatatacatgaaattgttgacattttcctcattttgttgaggactaataaaactttgtcacaaggaccatctctggagtcactgagtaaacaatgggttgtgggaacatgctggagacccactcttttcctgatggygtgttccctgggaaagaggctccctatttaaagtctctgtgcaatttgaatttctggagagacagtcttaggctttcaaaaattaatctaacgagggagcaaatctggagttagtttaccttcaagggggaattgatcaacattgtgaagtattttctaagcctgggagtgataatggttttaggaaacagatgtctctaacactttccttgtcatttcatatcccctgttgtatggagctgtggagaacaggaattaaaataaaaaactggttactcttagcatcctccttgcattgtaggggtacttagaggtatgggtaagtagcaactggaaaaggttttttttttttagatggtgctgaagactcaaaagcaattagttgctttagaaaaggagtttgaggccgggtacaatggctcaagcctataatcccagcactttgggaggcagaggtgggtggatcacctgaggtcaggaatttaagacctgcctggccaacatggtgaaacccctctctactaaaaatacaaaaaaaaaaaaaaaaaaattagcttggcatggtgttaggcacctgtaatctcagatacactgggaggctgaggcaggagaatcgcctgaacccaggaggtggaggttgcagtgagctgagatcgtgccattgcactccagcctgggtgacaagagtgaaactctgtcaaaaaaaaaaaaaaaaaaaagaaagaaaaaaaagaaaaggagtttgagtagactgaatgtggagggccaggccaggggttggaatgctgtggtgctgaagactgggttctggagatcagagagtgagagtgcattagaagattccttaagaaaatgtgtctgaatttaaagtaggttggaaagccaggattcagaaagaccaccaagcatttaagggatgaggactgaatgagggtgcactttgggcacctggctggaaacagctatgtaattagcagaccctgtggtgagctgaagagactgtattctggacactgggaaactcttattgttaagaacatatagtgggaaggcatgtgctggataattctgtcctgacagacctctgtgaaccagatttgctagttctcttgagaggatttcttct

SEQ ID NO: 697259 - DNA, 1356 bp, Homo sapiens
tggatagtcccaatccttaggcagaaaagggcagtggaagaattcacatgacacacacacaaatacacagtatgcaggcaatatacactcttcaatatacatgaaattgttgacattttcctcattttgttgaggactaataaaactttgtcacaaggaccatctctggagtcactgagtaaacaatgggttgtgggaacatgctggagacccactcttttcctgatggcgtgttccctgggaaagaggctcccwatttaaagtctctgtgcaatttgaatttctggagagacagtcttaggctttcaaaaattaatctaacgagggagcaaatctggagttagtttaccttcaagggggaattgatcaacattgtgaagtattttctaagcctgggagtgataatggttttaggaaacagatgtctctaacactttccttgtcatttcatatcccctgttgtatggagctgtggagaacaggaattaaaataaaaaactggttactcttagcatcctccttgcattgtaggggtacttagaggtatgggtaagtagcaactggaaaaggttttttttttttagatggtgctgaagactcaaaagcaattagttgctttagaaaaggagtttgaggccgggtacaatggctcaagcctataatcccagcactttgggaggcagaggtgggtggatcacctgaggtcaggaatttaagacctgcctggccaacatggtgaaacccctctctactaaaaatacaaaaaaaaaaaaaaaaaaattagcttggcatggtgttaggcacctgtaatctcagatacactgggaggctgaggcaggagaatcgcctgaacccaggaggtggaggttgcagtgagctgagatcgtgccattgcactccagcctgggtgacaagagtgaaactctgtcaaaaaaaaaaaaaaaaaaaagaaagaaaaaaaagaaaaggagtttgagtagactgaatgtggagggccaggccaggggttggaatgctgtggtgctgaagactgggttctggagatcagagagtgagagtgcattagaagattccttaagaaaatgtgtctgaatttaaagtaggttggaaagccaggattcagaaagaccaccaagcatttaagggatgaggactgaatgagggtgcactttgggcacctggctggaaacagctatgtaattagcagaccctgtggtgagctgaagagactgtattctggacactgggaaactcttattgttaagaacatatagtgggaaggcatgtgctggataattctgtcctgacagacctctgtgaaccagatttgctagttctcttgagaggatttcttct

SEQ ID NO: 697260 - DNA, 1356 bp, Homo sapiens
tggatagtcccaatccttaggcagaaaagggcagtggaagaattcacatgacacacacacaaatacacagtatgcaggcaatatacactcttcaatatacatgaaattgttgacattttcctcattttgttgaggactaataaaactttgtcacaaggaccatctctggagtcactgagtaaacaatgggttgtgggaacatgctggagacccactcttttcctgatggcgtgttccctgggaaagaggctccctatttaaagtctctgtgcaatttgaatttctggagagacagtcttaggctttcaaaaattaatctaacgagggagcaaatytggagttagtttaccttcaagggggaattgatcaacattgtgaagtattttctaagcctgggagtgataatggttttaggaaacagatgtctctaacactttccttgtcatttcatatcccctgttgtatggagctgtggagaacaggaattaaaataaaaaactggttactcttagcatcctccttgcattgtaggggtacttagaggtatgggtaagtagcaactggaaaaggttttttttttttagatggtgctgaagactcaaaagcaattagttgctttagaaaaggagtttgaggccgggtacaatggctcaagcctataatcccagcactttgggaggcagaggtgggtggatcacctgaggtcaggaatttaagacctgcctggccaacatggtgaaacccctctctactaaaaatacaaaaaaaaaaaaaaaaaaattagcttggcatggtgttaggcacctgtaatctcagatacactgggaggctgaggcaggagaatcgcctgaacccaggaggtggaggttgcagtgagctgagatcgtgccattgcactccagcctgggtgacaagagtgaaactctgtcaaaaaaaaaaaaaaaaaaaagaaagaaaaaaaagaaaaggagtttgagtagactgaatgtggagggccaggccaggggttggaatgctgtggtgctgaagactgggttctggagatcagagagtgagagtgcattagaagattccttaagaaaatgtgtctgaatttaaagtaggttggaaagccaggattcagaaagaccaccaagcatttaagggatgaggactgaatgagggtgcactttgggcacctggctggaaacagctatgtaattagcagaccctgtggtgagctgaagagactgtattctggacactgggaaactcttattgttaagaacatatagtgggaaggcatgtgctggataattctgtcctgacagacctctgtgaaccagatttgctagttctcttgagaggatttcttct

SEQ ID NO: 697261 - DNA, 1356 bp, Homo sapiens
tggatagtcccaatccttaggcagaaaagggcagtggaagaattcacatgacacacacacaaatacacagtatgcaggcaatatacactcttcaatatacatgaaattgttgacattttcctcattttgttgaggactaataaaactttgtcacaaggaccatctctggagtcactgagtaaacaatgggttgtgggaacatgctggagacccactcttttcctgatggcgtgttccctgggaaagaggctccctatttaaagtctctgtgcaatttgaatttctggagagacagtcttaggctttcaaaaattaatctaacgagggagcaaatctggagttagtttaccttcaagggggaattgatcaacattgtgaagtattttctaagcctgggagtgataatggttttaggaaacagatgtctytaacactttccttgtcatttcatatcccctgttgtatggagctgtggagaacaggaattaaaataaaaaactggttactcttagcatcctccttgcattgtaggggtacttagaggtatgggtaagtagcaactggaaaaggttttttttttttagatggtgctgaagactcaaaagcaattagttgctttagaaaaggagtttgaggccgggtacaatggctcaagcctataatcccagcactttgggaggcagaggtgggtggatcacctgaggtcaggaatttaagacctgcctggccaacatggtgaaacccctctctactaaaaatacaaaaaaaaaaaaaaaaaaattagcttggcatggtgttaggcacctgtaatctcagatacactgggaggctgaggcaggagaatcgcctgaacccaggaggtggaggttgcagtgagctgagatcgtgccattgcactccagcctgggtgacaagagtgaaactctgtcaaaaaaaaaaaaaaaaaaaagaaagaaaaaaaagaaaaggagtttgagtagactgaatgtggagggccaggccaggggttggaatgctgtggtgctgaagactgggttctggagatcagagagtgagagtgcattagaagattccttaagaaaatgtgtctgaatttaaagtaggttggaaagccaggattcagaaagaccaccaagcatttaagggatgaggactgaatgagggtgcactttgggcacctggctggaaacagctatgtaattagcagaccctgtggtgagctgaagagactgtattctggacactgggaaactcttattgttaagaacatatagtgggaaggcatgtgctggataattctgtcctgacagacctctgtgaaccagatttgctagttctcttgagaggatttcttct

SEQ ID NO: 697262 - DNA, 1356 bp, Homo sapiens
tggatagtcccaatccttaggcagaaaagggcagtggaagaattcacatgacacacacacaaatacacagtatgcaggcaatatacactcttcaatatacatgaaattgttgacattttcctcattttgttgaggactaataaaactttgtcacaaggaccatctctggagtcactgagtaaacaatgggttgtgggaacatgctggagacccactcttttcctgatggcgtgttccctgggaaagaggctccctatttaaagtctctgtgcaatttgaatttctggagagacagtcttaggctttcaaaaattaatctaacgagggagcaaatctggagttagtttaccttcaagggggaattgatcaacattgtgaagtattttctaagcctgggagtgataatggttttaggaaacagatgtctctaacactttccttgtcatttcatatcccctgttgtatggagctgtggagaacaggaattaaaataaaaaactggttactcttagcatcctccttgcattgtaggggtacttagaggtatgggtaagtagcaactggaaaaggttttttttttttagatggtgctgaagactcaaaagcaattagttgctttagaaaaggagtttgaggccgggtacaatggctcaagcctataatcccagcactttgggaggcagaggtgggtggatcacctgaggtcaggaatttaagacctgcctggccaacatggtgaaacccctctctactaaaaatacaaaaaaaaaaaaaaaaaaattagcttggcatggtgttaggcacctgtaatctcagatacactgggaggctgaggcaggagaatcgcctgaacccaggaggtggaggttgcagtgagctgagatcgtgccattgcactccagcctgggtgacaagagtgaaactctgtcaaaaaaaaaaaaaaaraaaagaaagaaaaaaaagaaaaggagtttgagtagactgaatgtggagggccaggccaggggttggaatgctgtggtgctgaagactgggttctggagatcagagagtgagagtgcattagaagattccttaagaaaatgtgtctgaatttaaagtaggttggaaagccaggattcagaaagaccaccaagcatttaagggatgaggactgaatgagggtgcactttgggcacctggctggaaacagctatgtaattagcagaccctgtggtgagctgaagagactgtattctggacactgggaaactcttattgttaagaacatatagtgggaaggcatgtgctggataattctgtcctgacagacctctgtgaaccagatttgctagttctcttgagaggatttcttct

SEQ ID NO: 697263 - DNA, 464 bp, Homo sapiens
tagctagtaaatatatttctttattcatacacacacttttttttttgagatgtctgtcacccaggctagagtgcagtggygcaatctcggctcactgcaacctctgctgcccaggttcaggcgattctcctgcctcagcctctccaggagctgagattacaggcgcctgccaccgtgcctggctaatttttgtagttttagtagagatgggtttcaccatcttggccaggctggtcttgaactcctgaccttgtgatctgcctgcctcagctgcccaaagtgctgggattacaggcataagccaccgcacctggctgtatttttttttttaaatacagtctatacacttcagtatgaatgatttaatcttagtcctagaaagtcaaaatattagctgaagcacaagtaattataagacaaaacacttacactccttgtaagcttccaattaatcaaactgggtg

SEQ ID NO: 697264 - DNA, 1085 bp, Homo sapiens
tacaacacagacataccgtgacaccagcacagtcttatcacacttttaattccctcataatacaatacaacaaccattcttttattaatggaggatggggtagggagtatgttatcagtagacttagaaaaaattagcttagtcattgaaacctttgccttttttctaggaattcctttctcatattcttgtgtcttcttggcattgttacgatcttcagcatgagtcatatgccgtgaaaaatgcagactgtactaaataccttagcactggtgttcctctgctttgaccatatggaaacttacattattacagattagacctatcaactaagggaaacagaaaggttattattcaatggttttatttgtaaatgatcattggcactcggcattcattctgaccgcattctagtgtgccatcctgtacgtcgaaggctagaaataaaaagaatmcatttcctagaattctttacagttagagtcctcaatatgaattagttgggtgcacttatatgaaatttaaaatattgaaatgacgtggaaggtgtcctatgtttttgctttttctactgtcagaaatattcttggaacattttttttttctgcagcagattttcattgtccagttactaggtacattattgctgacaggcatttgctttaggagcggcagctgaagtccactttttgtgaccaattacccagttagtgagagacaggaagtagttttgatgctgattcctgatagttgggctgcagttgcaccgataagctcttgaattcaatagtttcaatggcgaccttctgattctcctccttcctaattgggtaagagaagtactttaggtgggtcagattattattgcgcttaagtttattcctagagactcatcctagagcctgtgattctataacatttccaatgactttgtaagcactcaatttcctggtaaataaaatatttcagtattttatttacttcatttctgcttaaaacatcaatgacaattttttcttccctacacaaatcttgactaatacaacagataataaaatgtagacttaatcctgaaataattatga

SEQ ID NO: 697265 - DNA, 1085 bp, Homo sapiens
tacaacacagacataccgtgacaccagcacagtcttatcacacttttaattccctcataatacaatacaacaaccattcttttattaatggaggatggggtagggagtatgttatcagtagacttagaaaaaattagcttagtcattgaaacctttgccttttttctaggaattcctttctcatattcttgtgtcttcttggcattgttacgatcttcagcatgagtcatatgccgtgaaaaatgcagactgtactaaataccttagcactggtgttcctctgctttgaccatatggaaacttacattattacagattagacctatcaactaagggaaacagaaaggttattattcaatggttttatttgtaaatgatcattggcactcggcattcattctgaccgcattctagtgtgccatcctgtacgtcgaaggctagaaataaaaagaatacatttcctagaattctttacagttagagtcctcaatatgaattagttgggtgcacttatatgaaatttaaaatattgaaatgacgtggaaggtgtcctatgtttttgctttttctactgtcagaaatattcttggaacattttttttttctgcagcagattttcattgtccagttactaggtacattattgctgacaggcatttgctttaggagcggcagctsaagtccactttttgtgaccaattacccagttagtgagagacaggaagtagttttgatgctgattcctgatagttgggctgcagttgcaccgataagctcttgaattcaatagtttcaatggcgaccttctgattctcctccttcctaattgggtaagagaagtactttaggtgggtcagattattattgcgcttaagtttattcctagagactcatcctagagcctgtgattctataacatttccaatgactttgtaagcactcaatttcctggtaaataaaatatttcagtattttatttacttcatttctgcttaaaacatcaatgacaattttttcttccctacacaaatcttgactaatacaacagataataaaatgtagacttaatcctgaaataattatga

SEQ ID NO: 697266 - DNA, 1085 bp, Homo sapiens
tacaacacagacataccgtgacaccagcacagtcttatcacacttttaattccctcataatacaatacaacaaccattcttttattaatggaggatggggtagggagtatgttatcagtagacttagaaaaaattagcttagtcattgaaacctttgccttttttctaggaattcctttctcatattcttgtgtcttcttggcattgttacgatcttcagcatgagtcatatgccgtgaaaaatgcagactgtactaaataccttagcactggtgttcctctgctttgaccatatggaaacttacattattacagattagacctatcaactaagggaaacagaaaggttattattcaatggttttatttgtaaatgatcattggcactcggcattcattctgaccgcattctagtgtgccatcctgtacgtcgaaggctagaaataaaaagaatacatttcctagaattctttacagttagagtcctcaatatgaattagttgggtgcacttatatgaaatttaaaatattgaaatgacgtggaaggtgtcctatgtttttgctttttctactgtcagaaatattcttggaacattttttttttctgcagcagattttcattgtccagttactaggtacattattgctgacaggcatttgctttaggagcggcagctgaagtccactttttgtgaccaattacccagttagtgagagacaggaagtagttttgatgctgattcctgatagttgggctgcagttgcaccgataagctcttgaattcaatagtttcaatggcgaccttctgattctcctccttcctaattgggtaagagaagtactytaggtgggtcagattattattgcgcttaagtttattcctagagactcatcctagagcctgtgattctataacatttccaatgactttgtaagcactcaatttcctggtaaataaaatatttcagtattttatttacttcatttctgcttaaaacatcaatgacaattttttcttccctacacaaatcttgactaatacaacagataataaaatgtagacttaatcctgaaataattatga

SEQ ID NO: 697267 - DNA, 1085 bp, Homo sapiens
tacaacacagacataccgtgacaccagcacagtcttatcacacttttaattccctcataatacaatacaacaaccattcttttattaatggaggatggggtagggagtatgttatcagtagacttagaaaaaattagcttagtcattgaaacctttgccttttttctaggaattcctttctcatattcttgtgtcttcttggcattgttacgatcttcagcatgagtcatatgccgtgaaaaatgcagactgtactaaataccttagcactggtgttcctctgctttgaccatatggaaacttacattattacagattagacctatcaactaagggaaacagaaaggttattattcaatggttttatttgtaaatgatcattggcactcggcattcattctgaccgcattctagtgtgccatcctgtacgtcgaaggctagaaataaaaagaatacatttcctagaattctttacagttagagtcctcaatatgaattagttgggtgcacttatatgaaatttaaaatattgaaatgacgtggaaggtgtcctatgtttttgctttttctactgtcagaaatattcttggaacattttttttttctgcagcagattttcattgtccagttactaggtacattattgctgacaggcatttgctttaggagcggcagctgaagtccactttttgtgaccaattacccagttagtgagagacaggaagtagttttgatgctgattcctgatagttgggctgcagttgcaccgataagctcttgaattcaatagtttcaatggcgaccttctgattctcctccttcctaattgggtaagagaagtactttaggtgggtcagattattatygcgcttaagtttattcctagagactcatcctagagcctgtgattctataacatttccaatgactttgtaagcactcaatttcctggtaaataaaatatttcagtattttatttacttcatttctgcttaaaacatcaatgacaattttttcttccctacacaaatcttgactaatacaacagataataaaatgtagacttaatcctgaaataattatga

SEQ ID NO: 697268 - DNA, 1096 bp, Homo sapiens
  misc_feature 39, 40, 41, 42, 43, 44, 45, 46, 47, 48, 49, 50, 51, 52, 53,54, 55, 56, 57, 58, 59, 60, 61, 62, 63, 64, 65, 66, 67,68, 69, 70, 71, 72, 73, 74, 75, 76, 77, 78, 79, 80, 81,82, 83, 84, 85, 86, 87, 88, 89, 90, 91, 92, 93, 94, 95,96: n = A,T,C or G
  misc_feature 97, 98, 99, 100, 101, 102, 103, 104, 105, 106, 107, 108,109, 110, 111, 112, 113, 114, 115, 116, 117, 118, 119, 120,121, 122, 123, 124, 125, 126, 127, 128, 129, 130, 131, 132,133, 134, 135, 136, 137, 138: n = A,T,C or G
gctacaaatgatatatcatcacccagatagtgagcgtannnnnnnnnnnnnnnnnnnnnnnnnnnnnnnnnnnnnnnnnnnnnnnnnnnnnnnnnnnnnnnnnnnnnnnnnnnnnnnnnnnnnnnnnnnnnnnnnnnnttatgcgggaaaaggatatcttgctcccatctttatgtttacgtgtacctaatgtttagctcccacttataagtgagaacatgcagtatttggttttctgtttctgtgttaatttgcttaggatgatggcctccagttacatccatgttgctgcaaaggacatgatttcattctttttgatgccttcgtagtaktccatggtgtactacattttctttatccagtgcaccattgataaacatctaagttgattccatgtctttgctattgtgaagagtgaaaatgccctcttagacggataaaaaatgaatcatgaaagggtgagatactttgactttctcctttgttttcatgtttatattatttgtatttccatcataaagaggaattagttttataagcagcaaaccaaaaaagaattttcatttgagagaaaaatctctatagacatctcaacctaacacctaaccaggggaaaccagaatctggcaggggaggtctttccccatctctttttggacttaaattcacagggcctgacactcttcctaaggacagagattccttgcagtctgcccttagagccacttgcctcagaattttctggccccagatctcatgaatgaatatctccgcaggtggagctgggacctgatctttaacaagctccccaggtgattttgatgaacatcgaagtttagagaccactgcccgagggcatctctcctggggagagtaggaggaaaactgagcaattaatgcatgtttatttaatgcaagtctctaaccgtgagctttgtgccctgtccccttgtgtcctctccctggtgggtagaatagacttgttacctctccatttctgaagcctgtaaattgagaagagtaagctccaggttcatgacttctttctccgatgtcagtgaggtttaggaccacagaattcggaggctaactctgg

SEQ ID NO: 697269 - DNA, 1854 bp, Homo sapiens
  misc_feature 694, 695, 696, 697, 698, 699, 700, 701, 702, 703, 704, 705,706, 707, 708, 709, 710, 711, 712, 713, 714, 715, 716, 717,718, 719, 720, 721, 722, 723, 724, 725, 726, 727, 728, 729,730, 731, 732, 733, 734, 735, 736, 737, 738, 739, 740: n = A,T,C or G
  misc_feature 741, 742, 743, 744, 745, 746, 747, 748, 749, 750, 751, 752,753, 754, 755, 756, 757, 758, 759, 760, 761, 762, 763, 764,765, 766, 767, 768, 769, 770, 771, 772, 773, 774, 775, 776,777, 778, 779, 780, 781, 782, 783, 784, 785, 786, 787: n = A,T,C or G
  misc_feature 788, 789, 790, 791, 792, 793: n = A,T,C or G
atggcaattctggagatgtatgaggggctggatgtgggagtctgtagtcctgtgcatccctcccacactatattttttgccaggttcttgttagggaatggaatgcatttggtccatataactactagactttttgactattttaattgtctccatcaatgctttctatgagccaagttcagtgcaaaaatatattaatacatgtaagcatatttaaaccataattcatttgttttattctttattttaaatatgccaatttaaagtttattattcttaccactaggatatgatgagagcagaaatcccacattatatatatttagtacattctacattcagtattccttaaagaaaactacctatcatggttaaaactgattacttgtggcatcaaaaagcatctctccaaaagctgatatttcaaagatgatgcccagaaaaagatggtaagtatttttcaaaacagttaggttatcagtttctaaatcttacttttaaaagagtcaggcacagtgactcacacctgtaattccagcacttagggaggcagaggtggaaggatagcatgagtccaagggttccagacctgtctgagcaacttcgagacttgcctggagaatgaagggcgagaccccattcgccacaaaaggaaaaaaaaaaaaagaccaaaaaaacccacaaaaggatcagnnnnnnnnnnnnnnnnnnnnnnnnnnnnnnnnnnnnnnnnnnnnnnnnnnnnnnnnnnnnnnnnnnnnnnnnnnnnnnnnnnnnnnnnnnnnnnnnnnnnaatttagtaattatgaaccaaaacataagtagatgttttatctgtatacaaatcattttggtgaacatacttgtggaacaagaggctacaatgactacttgagtttccactcttgcagctggatgatcccagatgcataggggttcaatggatgtcttaaactatgcttgaaatgttttgggttcaaacaaagaatgtttgccaaatccttcttccccttaatttttaaacatgtgtatttcaagggaaatttgattcatatgtttctgattcatttacacttaaatcatcaaaatgttatttttgtaaaagctatttgatgtccaagaagctttctgaacctgttttataagttttcttaagtcctttttcttaaaacaggaagttgcattttgccaagtacaaataaactcaaacactaaaaaggttcaagttcagtttccaactctgaactccaggtttaaatgcattctcaatttagcaaaatatattttcccacccctacaaaaatatgggtggaaggaaagacagtagtgataaaactgagtaaagatgctcataagcattattcttctcagacctatttctctagttgtgaaaccataaaacttgtaacaggtgttcctgaagccattagatacaggtgacttgcaaataagaacatctgtctgcatgttgagtctctaagatgtgtctaaatgtgtttactgtgtttgtcacagaaaacagaacctaaaggtcttaacattttaacttcattggtttacctttgactgcctttaggtcctatttttcttaggaaaggtggraagaaccaacacaatttattgaacagaggggaatcataggagactctgtagaggttttatgtctgtactaagatgatattgcattatcaatttaaaaacataattgacacttttatcagaattggaaacgtgcagaaaattttccctggttcatattaagaggtctcttaattatatcttctgctcattaaggcagaggcgattcagcctgacccttctaactgtttcacttgtatagaaaaaggaggcaaa

SEQ ID NO: 697270 - DNA, 588 bp, Homo sapiens
tgaacacacagcaaaaagacactgtctaaragccagaaagcaggccttcaccagatactgaatctgctggaaacttgatcttgtacttcacaaccactagaactgtgagaataaatttctgttgttaataagctacccagtctaagatattttgtaatagcaatagctgcccagactaagacaaatctattttgttaacttcaaaatagaatgaatttttaattgaatatttaaaatataaaggtattttacgtcagatgatataaaagaaagaaagcactttgaaaaaggagaaagtgttacacaaagctaaagacttctcatgacaactttagctatagttttgccataaacagtgtttaaaggggtccacaccatttcaccacatgttagcattgatggtcaaaacagacaactgagcacttacctctttaggtaacctttgataaaataagtctggttgtgcatccaaagcttggtaatctaccaccttcaactctcactgctgtagaaaacctcagcaaacttcaaatatgggcaaagtgggagactgcctctgcaaaatgttaatgtttaattatcaaactc

SEQ ID NO: 697271 - DNA, 1142 bp, Homo sapiens
ttataatgtttcttaatatgaagccttatctttggacatttgaaggtcaaacctatgaatcatcaattaacataatctgacttatcaagacaaatacagtagtgtttgaggtaaagggtgtatctctcaagtaaacaggctaaccaaataagaaaaatatatttagcaaagctcttggtttgggttcccccaagaacagatcctgagataaaactcaagagcaatgtttttggggagctgatccaggaaatacccacagaaaagtggggaaatgaggcaaggaagggaaagaagccaatacaaaagggcaacaagagctcaatcttggtgtgggactctggagaaatttattccaactgaggactaaggaactacaatatttacccacaaaattcccctcagacattggtttaaggatgtttccagggccattaattctctggcacttcaggcttgctttgcatctaggacaagtgctcccacaggcaaaaaaaaaaaaaaaaaaaaaaaatccttagacagatagtcaagggtataagcagtctccagtatgtatgtattsagatgagtttcaagaaatatggatggggcatcacagttgtctgttacactcaagcagcaacatcagaataacctgggatcttgttcgaaatgcaaaaatctcaggcaccgcttcatctccatgcacgttaaaatttgagaggtgctatggtatgagatacatagattagatagattagatagatagatatatagttagatagatagatagacagacagatagatagaaacaacccatctcaaatagaaccaagtacatctagatgctgttttgagccaaaagaagcaaaagagcaatctggaattctaataaaggaatccctttttggttgcccactaacatgctttgtcagagccaattaatctaaagtcccatagacaaacatcaaaacggcaagaaagtgcccctgaagatgcagaaatttctatagtttcaatacctgaagggtgtggggctattgccaagaggctgcctagggttttagcaccttatctccaagctgaaaactagtcaagaccatcatagtatgtatttcttaataaactatttccataatgatggttattctgatccaaatctg

SEQ ID NO: 697272 - DNA, 1369 bp, Homo sapiens
gcctgtcttagcactctagcacaaatkcaactgtggctggtatttaccccctagcactcctggaagctatgtttcacctataaagcaccgcagttgtaatatggcctcagaccctcaaagatctttgaaagtgccacatcaggggaaaatccttagagaaacaagggtgtcagatttttaaactgaatataagattttctcccaaaataaccaaattcactgaatcagcccttcaattcacctaccttaggcatccacccaaatttcagaattctttcttgtagccatgatccctgagaacctcttcattgggtcataatccaaacagatatttaagtctcctccacaatactcttttaggttgctgttacaaagagctgctccttttcaaacacattgccaagaatcaaattcttaggttaacttacttcattctgtataaaaacctgagttcctagccctgatactgaaatatttagtgtgcatgtacagcacagtcatacctatcatttatttttaattgccatgggattatttttgctataaagcaattgtccagtttttatttcaacaaggtaagcagaagcactgcttataaagaatgagcttcatccccaggatcaaacagcttagcaaggttgagtcaaatggccaatttataaaactccatttaaaaaatgttaagggaaacattagaagaaaagtaaagtgctgggaaagtgagagaccgctctaattttattacagctgcaaccatatacattaagcctttaggacaaaaaaagtcatttaataatgccacccctaaaagctgtagcacagtatataactagcaatctgtcttctgtagccactccctaggaaaaaagagggtgtgtcaaatgactagtaccccaaactcggtgggaagaccaaatggactcaacaggcaatctccaagccctcactctgcttcagcctgaggaacatcctccagttcttccaatgtaccatgctttctctctcctccagccttcacatgaactgttccctctgcctaaaatattcttgctctgcaccatcacctgttttactcttactcacctttctgatctcatttaaaatgtcactttgaccaaaagctttccctgaccaccccctccccacaactttgggtttgttaatactgctttatgtaaccagaatgctatatactatccctgtcagagcacattttatatcacactgtattatcattgctaatttgcttgcctaatcatccattttaagctgtgagttcagtaaagcagagacaatgtgttcctttttcactattatatctcagtgcctagcacagtgcctaggaaataaatatttattcaattgaata

SEQ ID NO: 697273 - DNA, 1369 bp, Homo sapiens
gcctgtcttagcactctagcacaaattcaactgtggctggtatttaccccctagcactcctggaagctatgtttcacctataaagcaccgcagttgtaatatggcctcagaccctcaaagatctttgaaagtgccacatcaggggaaaatccttagakaaacaagggtgtcagatttttaaactgaatataagattttctcccaaaataaccaaattcactgaatcagcccttcaattcacctaccttaggcatccacccaaatttcagaattctttcttgtagccatgatccctgagaacctcttcattgggtcataatccaaacagatatttaagtctcctccacaatactcttttaggttgctgttacaaagagctgctccttttcaaacacattgccaagaatcaaattcttaggttaacttacttcattctgtataaaaacctgagttcctagccctgatactgaaatatttagtgtgcatgtacagcacagtcatacctatcatttatttttaattgccatgggattatttttgctataaagcaattgtccagtttttatttcaacaaggtaagcagaagcactgcttataaagaatgagcttcatccccaggatcaaacagcttagcaaggttgagtcaaatggccaatttataaaactccatttaaaaaatgttaagggaaacattagaagaaaagtaaagtgctgggaaagtgagagaccgctctaattttattacagctgcaaccatatacattaagcctttaggacaaaaaaagtcatttaataatgccacccctaaaagctgtagcacagtatataactagcaatctgtcttctgtagccactccctaggaaaaaagagggtgtgtcaaatgactagtaccccaaactcggtgggaagaccaaatggactcaacaggcaatctccaagccctcactctgcttcagcctgaggaacatcctccagttcttccaatgtaccatgctttctctctcctccagccttcacatgaactgttccctctgcctaaaatattcttgctctgcaccatcacctgttttactcttactcacctttctgatctcatttaaaatgtcactttgaccaaaagctttccctgaccaccccctccccacaactttgggtttgttaatactgctttatgtaaccagaatgctatatactatccctgtcagagcacattttatatcacactgtattatcattgctaatttgcttgcctaatcatccattttaagctgtgagttcagtaaagcagagacaatgtgttcctttttcactattatatctcagtgcctagcacagtgcctaggaaataaatatttattcaattgaata

SEQ ID NO: 697274 - DNA, 623 bp, Homo sapiens
ggaatagacttccctccaaattgaattgaatgatttacacatttgccaggactaactatagcaatctctttgaacttactaagaaaatatatcagaatggaaaatctaatttaatttgagaattgattttgattaatttggttttgattgataaaattatatgatacaaataatatttaagctaatgtgaaaatgacataaaacatatatttaaaatgttttaaatatttatggatggtgttcttgattggaaattgaagctaaaggactatattattggcaaactctgacttttgtaactccctgaaaatcctgctttcttccagttctaccaattgcataaccacagaagtgaagataagctacattatgaagtttagttactmatttaactaataattatggatcatgtatacaaagtgtgtgccgtatttccacctatgtgtgaagagtttataatgtaatggggacatacacatacaaagctaagtcaaaaattgtggttccctggacataatatttggaattgctaagagtttctttcacaaaaaaatttcttattgcttcaagaatttttttactggtggagctattagcctttattttctcagtaagaagacagg

SEQ ID NO: 697275 - DNA, 623 bp, Homo sapiens
ggaatagacttccctccaaattgaattgaatgatttacacatttgccaggactaactatagcaatctctttgaacttactaagaaaatatatcagaatggaaaatctaatttaatttgagaattgattttgattaatttggttttgattgataaaattatatgatacaaataatatttaagctaatgtgaaaatgacataaaacatatatttaaaatgttttaaatatttatggatggtgttcttgattggaaattgaagctaaaggactatattattggcaaactctgacttttgtaactccctgaaaatcctgctttcttccagttctaccaattgcataaccacagaagtgaagataagctacattatgaagtttagttactcatttaactaataattatggatcatgtatacaaagtgtgtgccgtatttccacctatgtgtgaagagtttatratgtaatggggacatacacatacaaagctaagtcaaaaattgtggttccctggacataatatttggaattgctaagagtttctttcacaaaaaaatttcttattgcttcaagaatttttttactggtggagctattagcctttattttctcagtaagaagacagg

SEQ ID NO: 697276 - DNA, 605 bp, Homo sapiens
tgggattacaggcatccgccaccatgcctggctaatttttgtatttttaatagagatggagtttcaccatgttggccaggctgggctcgaactcctgacctcaggtgatccacctgccttggcctcccaaagtgctgggattacaggcgtargccactgtgcccagcctgacacactgcgtcttgaactaatgaactacctgtgtacatatctgtctgttcagatccatagtctctggcaaattgcatagccatagccccttccttccagctgccttttctgtaagttgtagatggtaactcctgccttgttgggtgttgagagaattcaattaattaacacatataaaatacttaacagagttctttttttttttttttttttgagatggaatcttgctctgttgccaggctggagtacagtggtgcaatcttggctcactgccagctccacctcccaggttcatgccattctcctgcctcagcctcctgagtagctgggactacaggcgccctccaccacacctggctaattttttgtatttttagtacagacagggtttcactgtgttagccagatggtctcaatctcttgacctcgtgatc

SEQ ID NO: 697277 - DNA, 1020 bp, Homo sapiens
ttctccatctagttaggcagtcctttgctttttattgcttgtttattgatgacatttgccatttgtagcaatagtaatagaatcatctatatatttgtggccttgttgaatgtagaaaaaggatagtggcattttctaattgtgtaaccctataacaccttgacgggggactacagttcatatgctggaccttttgtgtttgttcatggcgkgtgggttgctttaatatacttagcacattgtcctaattgccatccttttggggagggctatatatccaagctaatatggtagcatttttgttttaacatagagctgacccaaggtagacgtaagtgttgttcatttttgcctaatactaataaaattacctaattgttgaagcttggagcttgaatctaggcattttatttcatttcaagtacaccctagtattttaaagcataaatatcctactatcctcaacaactttagaacaaaaataaatattttaacaagaaaaaagcatgccatgacaagctgtaacttagtaaagaaagacaaggaatggtctctatagaccgagaaaaaataggtcctcagatatatttataccaaaggaatgttatgaatgtaaaaaacagtttgactcccccccccccgccaaaaaaaaactccacaaccctatattttgttatcacaagactgttttagtgaataaaacagtatgaattggttttacctgtttccatttaatacttattaactttataatcgtatagcctgagggttttaacttcaagtacagcatgatgactataatagttttacacaaggcttatgtgaaaaacagaagtaattttttttaaaaagtgtgaaatatctaaaaggtatgacttcaatacatcaactcaggtgagacagacatgtaacttctttttccatgtttaaacctaatattgcttttgtgcctctgaaggctcggagtttccatgccttcttaggacatgccaccctctccacacctggatgtgttcacca

SEQ ID NO: 697278 - DNA, 595 bp, Homo sapiens
gccagcggagctactgagtgagcagctgcattacaggagcttgaagctccagagagaggtctggctggagatgtaagtatcagcacagagatgctatttacagacagtgatgagagatcactgaattccaccttgggcactctcaggctgaagaggaggacccaggaaaggatgctaaaaaggaatgaccagttaggtagtaagacaccaagatgatgtggtatcctggaagctaagaggaggaaatgtttcaaggaggaggaaaagygatcaactctgtctaatgccgttgccaggtgacgttaagatgaagaatgagaagggaccactggatttagcaaacatgcaagtcatctgggggaagcagagtcaagcaagagtgtcgagcggaagctgtgcggaggcttccaaaaaatcctcacctacgttaagtttgatccctgtaaatgaacaaactttagcccacgacattggcagatgaaggaaaaagtacagtcctttagtcctcatggtctccaagcaataatttgtgctgaaaattccttaaccatgttctggaaatgagacagctacacatgctattattagagtaaaa

SEQ ID NO: 697279 - DNA, 661 bp, Homo sapiens
attgaaactgaagccttgaatccttagtttatatattaaaaagtcttttttttgggtaaatctataatataaaaaaaagagtacttactgccaacaaaaggatcagactggaaaaaatccaagtttgtatctgcaactggacctgtcagcgaacttgagtctacattaaatggatcttcctaaaaataattttaaattaaaattattttttagaaaccaaagttttaaaaggtaacattttaaaataaaataacacacattcaggtcatacacatgctttgaaaaatcaactgatgggccaggcacggtggctcacacctgtaatcccagcactttgggaggctgacgtgggcagatcacaaggtcaagagatagagaccatcctggccaaaatggtgaaaccccgtctctaccaaaaacacaaaaattagctgggcatgtgcagctactcaggaggctgaggcaggagaattgcttgaacctgggaggtggaggttgcagtgagccaagatcacacyactgcactcaaggctgggtgacagagtgagacttggtcttgaaaacaaaaggaaaatcaactgatggtaatgtaacaaatatctctctagtcataaagcacctttaacacatttttctctttccttcaccttaacatattttt

SEQ ID NO: 697280 - DNA, 979 bp, Homo sapiens
ttgtccactgtgtaaaccctaggaagtaagctaaacaatccatttccttaaccataaaatgaagtgaacattaatatcttcctaataggcttcttgggaggattaaccaaaaagcatttagcacgtttggtgcaaaataacgctcagttagtcactattctactatcagggagatgaagagattgagctactcctaagtagcccttgaataaaggcctgcttctgcttttcaatcctaaccaatgccckttgtttagatgagtggttctaaaagtgcagtctccaccctagcagcagcaacagccccacctgagaacttgttagaaatgcaaattctcgaatcccacaaagaactagtcagaaactctaggggcggggcccagcagtcggtagcctaacaggccctcccaggtgattctgttatatgctgaaggatgagaattactggtttaaatattcttaactccagtctaagttattaaaacagtctcttagggtgtcccttctaacaacattttcctgttgaatttatcttccagatctgtcactgacttcccaaaacaacatgccaatgccactcccagacagaccagtatataaataccacctctcagttttatgaaatgtcgggcaagtctctttatttgggttaattgggtctctgttgtctcagttaattgggtctcaggttatttgggtttcagttcccatgtggaaaaagggaacattaaacatgatataaactaaaatggtacccatcacctagttgatgcttcatgatttgtggctgttttattactattgcacctattatctcatttggtcctcacaacataaaaatacagctattatcaaagcagaatcactggattaaagatatccaagttgataaaacagccaagattagaacacaaatttcctgactctgaactctggttcttttcattagacctggctgtttctataatatcaagaacac

SEQ ID NO: 697281 - DNA, 633 bp, Homo sapiens
cagtgagccgagattgcaccactgcactccagcctgggcgacagagcgagactccgtctcaaaaaaataaaaataaataaataaataaaatagtaataaaataaagatagggacactgaggcaccagcagagtaaataattttcccaagatgcacaattaataaatggtagaaccaggatttggatccagatgaactgtttctagagtctaatttcctcagctactatacaatataggtttgcaagaatttccaggaataacaaaacgatgggattttaagcccattttatccaaatctttaatgacaaggtaactcaacaagtagaagaaattaggaacatgccaagaaactggcacatgtgtattgtgtgtgtagagcactgttttcttgagtgcagcagayatcaagataaaaaggctacagttgaaagggcacggtggttcattcctgaaatccgagcactttgggaggccaaggtgggtggatcgcttgaggtcaggagctcaagaccagcctggccaacatggtgaaacctgtctctactaaaaatataaaaattagccaggtgtgatggcgtacatctgtaatcccagctactcaggagggtgaggcgggagaattgcttgaaccc

SEQ ID NO: 697282 - DNA, 1554 bp, Homo sapiens
cagggcaatctgctttccccgaagttcactggttttaatgttaatctcatccacaaacatcctccaagttgacacataaaattaaccatcacatctacctttgataagaactgttgaaaatatggttctatctgcttacttctcccatgggttgtgttcctcattatatttgattgtcttttgtttggaattctgttcaaaaccaacatgatacatatatgaaatgttatgttcaaaacaaaaaacatacatatttgatatgttatgtttcctgctrtcaatatgtagatatagtaaagaacataccggggataactgaccatgttcaaattcacaaacgtatgtattaagcccttattataggataaggattgcaggtgaaaacacaaataggtaaaccatagacttactctcacacactcttggggtgaggagtaatataagtatataaattattatatgtaaggtagaataacaatactatcataaaattagtatatgcatgatttttgaggatttaaagaaaagagacatgatatcccattgagagaatgtatccatttctttcttccttcataaaataaatatgcatgaagttctactatagctaaagcactattttaggtgatggtgatacagcagtaaaaaaaaaaaaaaaaatccctgccctcatggaattcccctcctaggagggaagacagacaggcacccaacatgaaaacaaatcagtagagtggttttaggtcctgataatatttcagagagtgataaataaaactttaaaattaaaataaccaaagagaaggtgatgggttactatttaagttaggaaggccagggttttgttattgtttttgttttttgagtcaggttctcgctctgtcacccaggctagagtgcagtggcaggatcatggctcactgtagcctcaaactcctggcctcaagcaatccccacgctttggcctgctcaaagtgctaggattacaggaatgagtcagagcatccagctcctttctaaagaatggcatttgaatggacacctgaataaagaaaggaagttatccatgcttttgtctaagggaaaagcatcccaataaatgggaatcacaaatgtaaagcctctcaggaaaaaaaaaatgggtttggagtgtccaggaaaatcttcatgaggggtgggatttacaaagaagcttaaagaagaggtgagattttttgcaagtaaaaatgggagtgagaaagtggtgtttatttagaaatataaaatcttctatgaagagtattggttatatgtatttatatgaccctataatattaattgtaatattttatttcctaagtgcttttatttctcctctgttttgtgcaatgaataattcaagacattatgaaataaatatgagtgttggtctcatccttctgaaagtaaaagactgaggtggacaggtctactatccagagtatgtgcaatctaatggaaagagctctttcctcaaagagttttgttctctaatttcacaatgagatccacataaatagcttttgcacgcctcaa

SEQ ID NO: 697283 - DNA, 1554 bp, Homo sapiens
cagggcaatctgctttccccgaagttcactggttttaatgttaatctcatccacaaacatcctccaagttgacacataaaattaaccatcacatctacctttgataagaactgttgaaaatatggttctatctgcttacttctcccatgggttgtgttcctcattatatttgattgtcttttgtttggaattctgttcaaaaccaacatgatacatatatgaaatgttatgttcaaaacaaaaaacatacatatttgatatgttatgtttcctgctgtcaatatgtagatatagtaaagaacataccggggataactgaccatgttcaaattcacaaacgtatgtattaagcccttattataggataaggattgcaggtgaaaacacaaataggtaaaccatagacttactctcacacactcttggggtgaggagtaatataagtatataaattattatatgtaaggtagaataacaatactatcataaaattagtatatgcatgatttttgaggatttaaagaaaagagacatgatatcccattgagagaatgtatccatttctttcttccttcataaaataaatatgcatgaagttctactatagctaaagcactattttaggtgatggtgatacagcagtaaaaaaaaaaaaaaaaatccctgccctcatggaattcccctcctaggagggaagacagacaggcacccaacatgaaaacaaatcagtagagtggttttaggtcctgataatatttcagagagtgataaataaaactttaaaattaaaataaccaaagagaaggtgatgggttactatttaagttaggaaggccagggttttgttattgtttttgttttttgagtcaggttctcgctctgtcacccaggctagagtgcagtggcaggatcatggctcactgtagcctcaaactcctggcctcaagcaatccccacgctttggcctgctcaaagtgctaggattacaggaatgagtcagagcatccagctcctttctaaagaatggcatttgaatggacacctgaataaagaaaggaagttatccatgcttttgtctaagggaaaagcatcccaataaatgggaatcacaaatgtaaagcctctcaggaaaaaaaaaatgggtttggagtgtccaggaaaatcttcatgaggggtgggatttacaaagaagcttaaagaagaggtgagattttttgcaagtaaaaatgggagtgagaaagtggtgtttatttagaaatataaaatcttctatgaagagtattggttatatgtatttatatgaccctataatattaattgtaatattttatttcctaagtgcttttatttctcctctgttttgtgcaatgaataattcaagacattatgaaataaatatgagtgttggtctcatccttctgaaagtaaaagastgaggtggacaggtctactatccagagtatgtgcaatctaatggaaagagctctttcctcaaagagttttgttctctaatttcacaatgagatccacataaatagcttttgcacgcctcaa

SEQ ID NO: 697284 - DNA, 924 bp, Homo sapiens
atttgcagatgacatgatcatgtaagtagaaaaccctcaggaatctttttaaaaatccactagaactattgaggtgagtttagcaagattgcaggaaaaacgccagggtgttgggcaaaattttaaggtaacccccagcgacgtttgcctgtgtacaatgtcctctccttgcgtgtgggtggaacttgtgactatgataggataactgtgattatgttacattatttggcaaagggatcctgtgggtttaattgggttactttgagttaatcaaaagggagattttccaagtagacctgacctaatcacaggagctctttaaatctagggctagaggtcagagatggaagaagttagagagagagtcaaagctaaatagggaccttgatactaagaaagtagtctgtgaatatggccagatgtttgtcactagtttgggagaaatctcttggtctggmcattttctgtgaatgtcagagtagatataattatccggggggacttgccatggactctggtcatctggtaaagacatgtatatttctgtgctaataaagtagttttaattttaaaattcacctcaagtatgagattcttccctctgtacacatgagctttgtttagggctttagcacaaacttagctctgctgcatgcctcaaaagaggtgcagctcagggtaccagtttgctaaaggggagccacatagtcctgttaaccttgcagtgaaacttaagagttgattagggtggcaggaagccagaagcacactgcatggtaatgaagccccaaacaactcgtttttctttctactgatgagaaaaaggaattaagcataaattgcagtaggagacatttggtctggaatctaggaataacttgctgatgggacattttagagattaggatccccagacaagtagtg

SEQ ID NO: 697285 - DNA, 644 bp, Homo sapiens
tgggtgcatgttttatgcatcacaactatcagtagtaaaaaacaaatttggatcagctgttcacaggaaaagcaacattatrgaaagtaaactgaaatttttacatgaagagacactcatagactatgtcgctaaaaatattgaagtattagaaaggaatatcaggcaattaattaaaatgctttagttttctggattttgttggttgtggttcttgttggcttttacaaatttatttcttgtgatttttttttctaaataaccattcactttggtatctaattttctatatgtaatttttctattttgttttttatagaaggacccttaaattttacaagttttagaccccacaaaacttgaattcacgcctaccttttttatttatcaggtgatagtttcaagaagttggcatagcattcccctggacattcacaggttgatatgtacattttaggatatttcattgtatctttagatatcttctttgtatttcagagatttaggatttgggagaagagagactgaaagattaaaaattaaacaaattcattttttaaaggacattatttaagtttataaactaaaacatttatttatttagtaaaagctttgagctagaataacccattttcgcagtttat

SEQ ID NO: 697286 - DNA, 626 bp, Homo sapiens
ctcaatccagtctgagttgctgcgcaattccttaacgctctaggcttctgggcttcctctggttgcattcctaaacataactgacaaacttctccccatccttcaaggcccaacttaaatgtcacaccaataaaacctttccagattccccgaagcattgtcatgcctttctttttgccctcgggttttttcctaattacattgcatatttagtacactgtatttgaataatttgtcgacataatctgtctccaccattgcactatggtcttctacctgaacacgcaacaggcacttggtatatacgaaacgaatgcttctcggattccggcatgcatacctatctgctttaatgtttattcacatttgtagactagcaccgacacccagttggagaagagtaaagctgaaagagtaaccctgccatttctgaatctaatttttcttcctggtctacccggaggctatgtttctactacaggcccctttccaatataatttctgtcataaccactttaaaaattatgccttccagctgagcgaggtggcacaagcctgtaatctcagcactttgagaggctgagacggggcggatcacttgaactcaggagttcragaccagcctg

SEQ ID NO: 697287 - DNA, 1309 bp, Homo sapiens
ctcactgcaacctccgcctcctgggttcaagtgatcctcctgcctcatctgcccaagtagctgggactacagggaygtgtcaccatgtttggctaatttttgtatttttggtagagatggggttttgccatcttggccaggctggtcttggactcctgacctcaagtgatccccctgcctctgtctcccaaagtgctgggattacaggtgggagccaccacgcctgcccttctattctctttagaataatacatttacaagttatctaatggccatgtatgggaggccagcaggattatagcatcacatttgattgctaattataaacaaccatttattaaatacctacctctctacaatgctttaacaattccttttcgaactactctatgtcaggctttttactgattgtagtttctttcttcctctttatgtttttacctacccagaatacattatcttcttttggtaacaatacctccagtttcctttagggaaacattgtggtacacagaggctagagaactgcagaacaagctgaggaatccagtggcctaccagtgccctcaaccaatgataatggttagctgggagcagctaactctagaccccttgagcttgaagtgacggtgaatctggttttgactttggctaacctctctccaagcctcctgtcattggacatctcatatccaagagacacgattaattggcagagttaagcaggcttccttgctattgattgggttggagctggtaatccttcatatttttttcatttccctttctttttttttttagatggaaaggctaaataaatcattttgaattgtactgtgatttataaattgcagcagaatgtggtgaataaactgtgacagctcatttctcatctaccttgtttgtgctaaatgtacttcttgatgtcagaggatgtgatggaagcaaatcaggagggaggagcaggcattttagaaacaacgccatcttactgggtggcacccaccctggctgagtcatctctgaagcatgtcgatgtgtgcatgtgccccatcccctctgcacatgaaaattcataaccatgagacaggactagcagatatctaatgaaaagggggttcacaatggccagatgctaacattggtaaacctgagatgaatggacaggttaggtgggtgagaccgcagtttggtaaacacaatgttggtattctcattagaaaactggtgggaatcaaaggtgagacggagccatagcatcagatgtttttgcctttatagtatgtgtaatctttgtttccaatgataa

SEQ ID NO: 697288 - DNA, 626 bp, Homo sapiens
ctggacatggtggcatgcacctgtagtcctagccgcttgggaacctgaagtgggaggattgcttgagcccaggagtctgagccttcagtragctaggattgtgccaccgcactccagcttgggcaacagagtgtctctaaaataaataaataaataaataaagaggtggaaaaagccttagtaaaactgcagcctaactttgagttagctcagttcctgattgaattgaagtggccggttctaattctacctacctatcagaggaaagggtgagccctctctggagattccttcatcatccaaaacttctgtaatttttcagagagtatctgactgtcaatcaaaaagtatcaggcctaccaagaaataggacaaaatgaccgagaaagagaggcattgagcaagagagagggggagagaaatcagacaggtgatccagaattatggctggcaacaaatattttaatatgactataataaatgttttcaagaaaatagagaaaaataggggagaaatagattaagaaaaaaaaagaatttccccagggacaaatgggacataatgaacaggtctgacatatatgtaactggggtcccagcagactaggaaaaactgggaaagaaaa

SEQ ID NO: 697289 - DNA, 626 bp, Homo sapiens
ctggacatggtggcatgcacctgtagtcctagccgcttgggaacctgaagtgggaggattgcttgagcccaggagtctgagccttcagtgagctaggattgtgccaccgcactccagcttgggcaacagagtgtctctaaaataaataaataaataaataaagaggtggaaaaagccttagtaaaactgcagcctaactttgagttagctcagttcctgattgaattgaagtggccggttctaattctacctacctatcagaggaaagggtgagccctctctggagattccttcatcatccaaaacttctgtaatttttcagagagtatctgactgtcaatcaaaaagtatcaggcctaccaagaaataggacaaaatgaccgagaaagagaggcattgagcaagagagagggggagagaaatcagacaggtgatccagaattatggctggcaacaaatattttaatatgactataataaatgttttcaagaaaatagagaaaaatagkggagaaatagattaagaaaaaaaaagaatttccccagggacaaatgggacataatgaacaggtctgacatatatgtaactggggtcccagcagactaggaaaaactgggaaagaaaa

SEQ ID NO: 697290 - DNA, 547 bp, Homo sapiens
tatttctgtaaagtagaattcagtatattttcctgtctgtctgtggaaagggaatgtgatcttgataaatgaattagctgtggttttttgactttttccatcccccactctactccactcccaaggaaagaggagagagaagtcaatgtgcagggggtgagggaaagcaccacatttgcagatagaatcttgtatcgtaattaatgaaaggcatatttggaaggatagaagagaagaggtataagaaagagaataagaatgtgaaagttgggccgggtgcggtggctcacrcctgtaatcccaacactttgggaggccaaggtgagtggatcacctgaggtcaggagtttgagaccagcctgaccaatatgttgaaaccctgtctctactaaaaatacaaaagttagccaggcatggtggtgtgcacctatagtcccagctactcaggaggctgagacaggagaattgcttgaacccgggaggcagaggttgcagtgagccaagatcatgccactgcactccagcctgggccacagagcgagactac

SEQ ID NO: 697291 - DNA, 847 bp, Homo sapiens
ggtttgggagagagaggggtgggagcagaagtcaccatctgagaagggaaatcacttggtcatattcaatgttagcagcaagtccagcttatactcaaggggaggagtttacacaaaggcgtgaataccaggaggtggggattgaagtcatcttagaggctgcctaccacagaaggaatgagatctagtgtgcagtagagaggctgacccttgctgggagcagggattgttcctcagcagcacagaagagaaggcagcgtctatgggtacacagagcctagtaagtgagcagctgtgtgggtggaagtgaaggtatttgctcattggcaccaggtaccttggagaatggcaggagatagcattagtaaccagagttcactgacctttgttgctctactgtacccttcggcatagccggaaggattctaaatccagcaaaacacagctctccaccctctcaaatgcttaacaaggaagcatttaaggcattacaccagggtttagcaacactttcactaccctggactaagaaaaatgccagaaggcccacaaggaactataaccaggagaaggaaaatgaggargagagatggggagagaagaaaaggtgaggcattgtctggggaatctgctcaccgctggattttcctgcgtggatttcactcatttttcgaaagtcattgacttcaaacatttgtggctcaagagaaaaagacttgttgatggtttgtttcactaagacagaaaagtaagacaaagtttttttcccctccactcacagtgtcccccgacctgtctgtctgcagtcatgataggatggattttcagcctggaggggcattccaga

SEQ ID NO: 697292 - DNA, 646 bp, Homo sapiens
atgactggtgttgaccactaggttttatcgaggttagcagctgtggaggttttgggtgaacagaatgaggaacgagtgggctcactagtatacaaccacatagggaggggacgttttaactgggccaagggtggtgcagtaccactgggtttgaaacaacttagggctaaaaatggatgcggaggcagcaatgatattaaagttataacagaaacacagtcaaacacatggttcactgagattctaggttaaaagcaagtcaatgcttccaagaatcacctgttttagtagtgagatctgaggggaaacaccttcaaggcaaaccagcagttgcatacagagaaaaaggaggcttagaagaggggctttcattagagatgaagatgtgggagccaaggagtatgggtgctagtgatgaccacaggcacaaggagagtgtgtaacagtaagaaaaggaccaaagatggaaccctaggcaacactggcattgaaaaggaaagctgaagaaccagggaaagagaaagaatagggaaaattaacctgcccaaagtatcacagccataagaattgcagatataggccaggcacggtggcttacgcctgtaatcccagcactttgggaggcygaggcgggcggatcacctga

SEQ ID NO: 697293 - DNA, 646 bp, Homo sapiens
atgactggtgttgaccactaggttttatcgaggttagcagctgtggaggttttgggtgaacagaatgaggaacgagtgggctcactagtatacaaccacatagggaggggacgttttaactgggccaagggtggtgcagtaccactgggtttgaaacaacttagggctaaaaatggatgcggaggcagcaatgatattaaagttataacagaaacacagtcaaacacatggttcactgagattctaggttaaaagcaagtcaatgcttccaagaatcacctgttttagtagtgagatctgaggggaaacaccttcaaggcaaaccagcagttgcatacagagaaaaaggaggcttagaagaggggctttcattagagatgaagatgtgggagccaaggagtatgggtgctagtgatgaccacaggcacaaggagagtgtgtaacagtaagaaaaggaccaaagatggaaccctaggcaacactggcattgaaaaggaaagctgaagaaccagggaaagagaaagaatagggaaaattaacctgcccaaagtatcacagccataagaattgcagatataggccaggcacggtggcttacgcctgtaatcccagcactttgggaggctraggcgggcggatcacctga

SEQ ID NO: 697294 - DNA, 646 bp, Homo sapiens
atgactggtgttgaccactaggttttatcgaggttagcagctgtggaggttttgggtgaacagaatgaggaacgagtgggctcactagtatacaaccacatagggaggggacgttttaactgggccaagggtggtgcagtaccactgggtttgaaacaacttagggctaaaaatggatgcggaggcagcaatgatattaaagttataacagaaacacagtcaaacacatggttcactgagattctaggttaaaagcaagtcaatgcttccaagaatcacctgttttagtagtgagatctgaggggaaacaccttcaaggcaaaccagcagttgcatacagagaaaaaggaggcttagaagaggggctttcattagagatgaagatgtgggagccaaggagtatgggtgctagtgatgaccacaggcacaaggagagtgtgtaacagtaagaaaaggaccaaagatggaaccctaggcaacactggcattgaaaaggaaagctgaagaaccagggaaagagaaagaatagggaaaattaacctgcccaaagtatcacagccataagaattgcagatataggccaggcacggtggcttacgcctgtaatcccagcactttgggaggctgaggcgggyggatcacctga

SEQ ID NO: 697295 - DNA, 646 bp, Homo sapiens
atgactggtgttgaccactaggttttatcgaggttagcagctgtggaggttttgggtgaacagaatgaggaacgagtgggctcactagtatacaaccacatagggaggggacgttttaactgggccaagggtggtgcagtaccactgggtttgaaacaacttagggctaaaaatggatgcggaggcagcaatgatattaaagttataacagaaacacagtcaaacacatggttcactgagattctaggttaaaagcaagtcaatgcttccaagaatcacctgttttagtagtgagatctgaggggaaacaccttcaaggcaaaccagcagttgcatacagagaaaaaggaggcttagaagaggggctttcattagagatgaagatgtgggagccaaggagtatgggtgctagtgatgaccacaggcacaaggagagtgtgtaacagtaagaaaaggaccaaagatggaaccctaggcaacactggcattgaaaaggaaagctgaagaaccagggaaagagaaagaatagggaaaattaacctgcccaaagtatcacagccataagaattgcagatataggccaggcacggtggcttacgcctgtaatcccagcactttgggaggctgaggcgggcggatyacctga

SEQ ID NO: 697296 - DNA, 642 bp, Homo sapiens
gaaaacaagttacaggacatcagttccaggttcttactggtttatctttcaagtatgctttttctaagttacctaaacaacacatataatatacatacatttgcatagacacataccatttcaggacatatgaatttcttcattgtgtgaccttctgttcactaactaaaatgggtgagagaagaaaacaaaaatgaaccaatttacastggaaatgggaaccaaagcaactaatcttaagtttgaacagctcctacttcctctccatctcagaggcacagaaacaaatgggtcagatctggttgccatgtgtgtagacagccagtagcaattctctgccagcactcagctgacaaagtagacctagagaacagagatgggtggaaaggggtgggaagagaggttgtttctctctccagtttttcagaaaacactaatgacctgttgagaaagaaaacagagcttgtcaacatgtatgtggccctacgacacacttcaagtaagatatatgtgatagccaggtacattttataaagtgtatctggtgcatgattctcctgataaactgagatttttggcttaaagagtaaattgatcttggggctaaagcggggctgaggaggtcctctgtggaagctatca

SEQ ID NO: 697297 - DNA, 609 bp, Homo sapiens
acttctcaatgctttctgaacatatccctactccttactatggcctaaagaccccatgtgatctgaccccagatgaactctcttttcttatcaaatatacctagccaggtaaatcttgtctcattctttgccacatcaagctgtttcctgcctgagggccatcgtcttgctatgtcctcatctgcaagcatttttgtcccatctcttcacagggctccttctcatcattcagatatcagctaaaatattatctcctcacagcagttttcctaamcatgctgtctaacacagggcctctgagcctccctgctcacacagtcattctttatcatactatcttgctctgtttccttcacataatttaaccattttctgccattatcttgctaattaattcgagggcaggaaccatgttcattttttaaccattacagggccaacatatggaatagtgacattttattgaaaaaaagtttctcatttatgtaaaagacaattataatattttgggcttaattaattgagactaggttctcaattaaatatttttaaattaaattaacgagcatatgtaaaactaaattaatgagtcttctaattataattatt

SEQ ID NO: 697298 - DNA, 609 bp, Homo sapiens
acttctcaatgctttctgaacatatccctactccttactatggcctaaagaccccatgtgatctgaccccagatgaactctcttttcttatcaaatatacctagccaggtaaatcttgtctcattctttgccacatcaagctgtttcctgcctgagggccatcgtcttgctatgtcctcatctgcaagcatttttgtcccatctcttcacagggctccttctcatcattcagatatcagctaaaatattatctcctcacagcagttttcctaaccatgctgtctaacacagggcctctgagcctccctgctsacacagtcattctttatcatactatcttgctctgtttccttcacataatttaaccattttctgccattatcttgctaattaattcgagggcaggaaccatgttcattttttaaccattacagggccaacatatggaatagtgacattttattgaaaaaaagtttctcatttatgtaaaagacaattataatattttgggcttaattaattgagactaggttctcaattaaatatttttaaattaaattaacgagcatatgtaaaactaaattaatgagtcttctaattataattatt

SEQ ID NO: 697299 - DNA, 609 bp, Homo sapiens
acttctcaatgctttctgaacatatccctactccttactatggcctaaagaccccatgtgatctgaccccagatgaactctcttttcttatcaaatatacctagccaggtaaatcttgtctcattctttgccacatcaagctgtttcctgcctgagggccatcgtcttgctatgtcctcatctgcaagcatttttgtcccatctcttcacagggctccttctcatcattcagatatcagctaaaatattatctcctcacagcagttttcctaaccatgctgtctaacacagggcctctgagcctccctgctcacacagtcattctttatcatactatcttgctctgtttccttcacataatttaaccattttctgccattatcttgctmattaattcgagggcaggaaccatgttcattttttaaccattacagggccaacatatggaatagtgacattttattgaaaaaaagtttctcatttatgtaaaagacaattataatattttgggcttaattaattgagactaggttctcaattaaatatttttaaattaaattaacgagcatatgtaaaactaaattaatgagtcttctaattataattatt

SEQ ID NO: 697300 - DNA, 2193 bp, Homo sapiens
gcatcatttattacaaaattaatactgttttcaaaaaaccaaaacaatatattataaagcacaacgtggagtcttctctcacctccttgtcattcccagcctcaaagggtaaccactgtttacagttcaagtgtgtcttcacagcagatgtttttctatgctcgtgcagacgtatagatgtattcctggaaagagtgatgcttgcattcttgaggagttaggagcattgctatttgaaaaaataaaaatccagtttgatgatgttagtcattatgctgaaaggagtgattttaacaaataccaacagatcttcttgtggtaggccagctttccaagttactggttcaagagaacagtcattttataacaggtataaaatcaaagacgtttagtaaaatattttgcccttaattttccatggatagcttgtttatgaagagttcagtattcagggaagatggaaaaacagccctgtgtcagctaaagtaataaaaccgacttaatcccaaattgacaatttaaagccctttaaaattacttgttgcaaacaagaaacaatccacccagtctgtcatctcttttcagcttattagtagtagaatctcttaggtggctctttaaaccgtgtgtattaaaagtcctaaagttgttcgtggagatttccagttgctagggaataccaacacttatttggtgtttgatattgtaaatcatgatagttattggggccaaagggaggtctgtaaatgtccagtaggttctctttggagctaatttgtgctgtttgcattttctttctgccccaatacacttgtcactggaagaaatcacacagggggtagggataaagcatgaggtatcatgattccttcatgtaaaaattttgctcaaattaaaatgtgaacatagtataatatgtaaaaaaaactggacctccttaaatcctttataaagcaaggcaatgtgtaaacatatgaataaataccaaggttttattttaagtaatagctgtgaatgttaaaagtaatattattttccttagaatagtttaatcacatatcccttttaaattttttaagcctttaaacgtattattttcagtctgggcttgggggctcacacctgtaatcctagcagtttgggaggctgaggctaggggatcacttgagcccaggagtttgagaccagcctgggcaacataagaagacctcatttytggaaaaaaaaaaaaaaaaaaaaaaaaaaaaggaagaaaggggaaggaagggaaggaaagggaagaaaaaaacgaaaagaaaaggaacaaaggaaggcgtcggtgatgtgcacaagtggtcacagctacttggtagtctgaggtgggattgcttgagtctggaagatcgaggttgcagtgagccgtgtttgcaccactgcacttcagcctgggcgagagagtgagaccctatttcaaaataaattcaaatttgaatattttacttgagtaacattttttttctcctgaaaataattttctacagtgttctactgtggttgaggttttcatgtttaaaccagatctctagcctcatgggactcatagtctctcatggaagacagataattgggcaactacaatggattatgccgagttcggtgctttgggagctcagagcacaagccccttcctcatctgccctgtagggctggggaggtgctgtcaaggaaggcttcccagcgggagtgagtcctcaggtaataacctgggatttgtacacacatcagtcaggcaaagagctgtggacttggggtgtgagtggccagagacccagcattatctgcaaaagccagactatgagagagatgagaacacagttaagtaactgatagaagttcagtctggctggggcatggaggaattacaaacatttattatgaaagtaatacatgtgcattgtataaaatgtgagaaaaacagaaaatgagaaggtatatattattgccagtttcatgctgcagagttaactactgtgaacatttgttgcatttttataattctttccatttatattcatagaacagcgtatttgatattatcccagtttggcttagacaatagatatatatacaggtataaaatgcatatgcatacatgaaaacacataataaaactgggatcatgctaacatgctgttacctgcttttttcatatta

SEQ ID NO: 697301 - DNA, 657 bp, Homo sapiens
tctatatatatacacacacacaaacacacacacacacacacacayatatatatacacacacacacacgctatatatacacacacacgctatatatacacaccccatggaacactactcagccataaaaaggaatgaaataatgacttcacagcaacccagaatgaattggagaccattattctaagtgaagtaactcaggaatggaaagccaaacattgtatgttttcactcataaatgggagctaagctatgaggttgcaaaggaataagaatgatataatggactttgaggactcaggggaaaggatggcagaggtgagggataaaagactacacattgggtacagtgtatggtgctctggtgatgggtgcaccaaaatctcataaatcaccactagagaacttactcatgtaacaaaagaccacctgttccccaaaaccctattgaaacaaacataaaataaaataagcgaaaaacagcatgcagcatctaccaatatgtaaaggcccttagatagtttattttcacaagtcttctgaatagatggatgccctctcttgtcctccttatttttccgaagagaaagacagtttaagcatcattttctcctccacatagagatctggtctttttcctcttctaacctcttttttta

SEQ ID NO: 697302 - DNA, 657 bp, Homo sapiens
tctatatatatacacacacacaaacacacacacacacacacacatatatatatacacacacacacacgctatatatacacacacacgctatatatacacaccccatggaacactactcagccataaaaaggaatgaaataatgacttcacagcaacccagaatgaattggagaccattattctaagtgaagtaactcaggaatggaaagccaaacattgtatgttttcactcataaatgggagctaagctatgaggttgcaaaggaataagaatgatataatggactttgaggactcaggggaaaggatggcagaggtgagggataaaagactacacattgggtacagtgtatggtgctctggtgatgggtgcaccaaaatctcataaatcaccactagagaacttaytcatgtaacaaaagaccacctgttccccaaaaccctattgaaacaaacataaaataaaataagcgaaaaacagcatgcagcatctaccaatatgtaaaggcccttagatagtttattttcacaagtcttctgaatagatggatgccctctcttgtcctccttatttttccgaagagaaagacagtttaagcatcattttctcctccacatagagatctggtctttttcctcttctaacctcttttttta

SEQ ID NO: 697303 - DNA, 1462 bp, Homo sapiens
ttctcgaactcctgaccgcaagtgatccacccgcctcatcctcccaaagtgctggggttacaggtgttagccactgcgcctggcccagtttgggacaattttcaatagagctgccataaacatttgtgttcaggtttttgtgtgaacttaagtttccatttttccagtgtaaatactcaagaatgggattgccaggtcctatggtaagtgtttgactttataacaaactgcccaactgctttccagagtggctacaccattttgtgttcccctcagcaacatgtaagagttccagttggtctgcttgcttgtcagcacttgatgtcagtattttctgtcttagccattccaataggcatatagtggtgtctcattgtggttttaatttgtattttcttaatggctgttgaacatcttttcatgtgcttatttgctatttgtataacctttttggtgaaatgtctgttcaagttctcttttggtttttaaatgggttgttagagcctcaactcatttttgcttgggctttgtaccaacagtaatgtttcttgttcccattgcttttcttattttctttcctttccaccacaccccataggactctctttgatatttttttcttattaaaaagacaatgttgcaggacttcagagacatactgttggctaggttttaaatgtgggttctgctataattcaccttgtgatctcagacaagttaattacttgataggattattgtgagaattagataattttaaatgatgtatatgaagtgcttgatacatagctgtatttaaacctttctttttcctctcagttcttatctcaagagtccattccctataatactagtcttctgagatgcttagtgaaaagaatatctgtgagaaaagaaatctgagatacattacatgctctagctattttttggggttttttaaatttattttttaatttttttwaaaaacagagtctcgctctgttgcccaggctggaatgcagtggcttgatctcggctcactgcaacctttgcctcctgggttcaagcaattctcctgcctcagtctcccaggtagctgcggttacagacgtgtaccaccatgcccggctaatttttgtatttttagtagagaaggggtttcgccatattggcccagctggtcttgagttcctgacttcaggtgatctgcctgccttggcctcccgaagtgctaggattacaggtgtgagccacctctagctatcttttggatggtttctaggaacgtgaatatattaatggcttttataagttagccatttctttattgttggacttgttatattcagcattttccaatcttatttgactatggaacacttgacttgtgacatctatttagcctacttttatgaaacacactttgggaaatattgactcattcagcatgtgtgttagtccattttgcgttgctataaca

SEQ ID NO: 697304 - DNA, 778 bp, Homo sapiens
cctcagaatcaggaaatataactttattcagtttcatagagcaatcaaggattgcatgctaatccgtgttagtttttctgatatgcccaratcaattcaccagcaactgttttagacagagcattggtgtcttttgaggagatgcaaaaatttttcattgatgcagaagtacttacctttcttattctggacttgtgagatttagtcttaaagttagtactttcactgtccaactccaaattatttcctgcaaattgtgtggtacgctgttttggttatttgcctctttaatcctgttatatgggtccttctatctatattgcattaaaacaacacaatagcttagtcttgttttgcaatgatgtcaaggtaatgctggcataggtattgtaattgttctttttcattatttgaacttttagaaaacatggtcacaatattaaaagttaaatagtactatctgcatacaaaacacaatcgttaatccacaggcaaagtcaaagacagaatattacaaaacacataaataacccacttcaactgcatcccttggagtaaggcaacaatggaagatctgttcttgtgaactgctaaccagagtgaccaacatcagcctggggaactgagacggcagcagcaaccagcgactacagaaggcagataatttatgttgaatctatttgacactaacaatagtgttgctttcagcctctattttgggggccatcacaaggcttttgcactgggacttttcctgttgctggcaaggggcttccca

SEQ ID NO: 697305 - DNA, 1212 bp, Homo sapiens
tcattgaaagctctgcactccacaactcatcatggaacagacaaaatgatacaaattatgaaaaaatactggtagagtgactgttccaaaattgccmaaatggtttatactctatgtttgacttgtcaaactcataatcctggaaaaacaatcaaaactttggttgtatatttccaccacttgatggaccatttcagcatttacagatggacttcattcagttgccaccctcaatggggtattgtatgttcttgtaatagcttgcatgttttctggttggatagaggccttcccatgtaggaaagctgatgctgtgattgcagctatgaaagtaataattttgaaaatatttttcctttatggggaatccttctaaaaatctccagtgatagaggaactcattttactgggctagttttaaagcagttaaataagatgttactgacacagtggcatattaaaactgaaattggcaaagttaactgaatcaattgggttgccttggccaaaggtgttacactcggctttagttgcaataatatccactcccattagaaaacataaattgaccccttatgaaatagtcactggaaggcctatgtccccaataatagcacctcatgcttcttctgctctcttaaactctgatatgactaaatactgcaaggctttaatatattatgtcaaagtatacttccacccagtaaaggaagctttttgagatccaccagctgagcacaatcaaaccctccgtggtctggaaccaggagactgggtcttctggaaatgatatcagaggaagactgctcttgatcctggttggaagggaccatatcaagttcttctcaccacacacactgcagtgaagcttcagggccttgagccttgagtccacatctcacaactcaaaagggccccttcagactcctggaactgtacatctgttgaagactttaaggtaaagctgaccaggaaaatctctcccaagaagcagacggcatcctagttgtagacagctttcccaagatcaagatcacagatcaacacttctctaccatcatgaaagccttatgtgtttttctgttttcttcattttttgccctaatcctttccttttccctataggaaaatccatgggaccataatcagtggatggctctagctcaagcttatgctctagcacaaaaccagagtaattgttgggtttgtggg

SEQ ID NO: 697306 - DNA, 1212 bp, Homo sapiens
tcattgaaagctctgcactccacaactcatcatggaacagacaaaatgatacaaattatgaaaaaatactggtagagtgactgttccaaaattgccaaaatggtttatactctatgtttgacttgtcaaactcataatcctggaaaaacaatcaaaactttggttgtatatttccaccacttgatggaccatttcagcatttacagatggacttcattcagttgccaccctcaatggggtattgtatgttcttgtaatagyttgcatgttttctggttggatagaggccttcccatgtaggaaagctgatgctgtgattgcagctatgaaagtaataattttgaaaatatttttcctttatggggaatccttctaaaaatctccagtgatagaggaactcattttactgggctagttttaaagcagttaaataagatgttactgacacagtggcatattaaaactgaaattggcaaagttaactgaatcaattgggttgccttggccaaaggtgttacactcggctttagttgcaataatatccactcccattagaaaacataaattgaccccttatgaaatagtcactggaaggcctatgtccccaataatagcacctcatgcttcttctgctctcttaaactctgatatgactaaatactgcaaggctttaatatattatgtcaaagtatacttccacccagtaaaggaagctttttgagatccaccagctgagcacaatcaaaccctccgtggtctggaaccaggagactgggtcttctggaaatgatatcagaggaagactgctcttgatcctggttggaagggaccatatcaagttcttctcaccacacacactgcagtgaagcttcagggccttgagccttgagtccacatctcacaactcaaaagggccccttcagactcctggaactgtacatctgttgaagactttaaggtaaagctgaccaggaaaatctctcccaagaagcagacggcatcctagttgtagacagctttcccaagatcaagatcacagatcaacacttctctaccatcatgaaagccttatgtgtttttctgttttcttcattttttgccctaatcctttccttttccctataggaaaatccatgggaccataatcagtggatggctctagctcaagcttatgctctagcacaaaaccagagtaattgttgggtttgtggg

SEQ ID NO: 697307 - DNA, 1212 bp, Homo sapiens
tcattgaaagctctgcactccacaactcatcatggaacagacaaaatgatacaaattatgaaaaaatactggtagagtgactgttccaaaattgccaaaatggtttatactctatgtttgacttgtcaaactcataatcctggaaaaacaatcaaaactttggttgtatatttccaccacttgatggaccatttcagcatttacagatggacttcattcagttgccaccctcaatggggtattgtatgttcttgtaatagcttgcatgttttctggttggatagaggccttcccatgtaggaaagctgatgctgtgattgcagctatgaaagtaataattttgaaaatatttttcctttatggggaatccttctaaaaatctccagtgatagaggaactcattttactgggctagttttaaagcagttaaataagatgttactgayacagtggcatattaaaactgaaattggcaaagttaactgaatcaattgggttgccttggccaaaggtgttacactcggctttagttgcaataatatccactcccattagaaaacataaattgaccccttatgaaatagtcactggaaggcctatgtccccaataatagcacctcatgcttcttctgctctcttaaactctgatatgactaaatactgcaaggctttaatatattatgtcaaagtatacttccacccagtaaaggaagctttttgagatccaccagctgagcacaatcaaaccctccgtggtctggaaccaggagactgggtcttctggaaatgatatcagaggaagactgctcttgatcctggttggaagggaccatatcaagttcttctcaccacacacactgcagtgaagcttcagggccttgagccttgagtccacatctcacaactcaaaagggccccttcagactcctggaactgtacatctgttgaagactttaaggtaaagctgaccaggaaaatctctcccaagaagcagacggcatcctagttgtagacagctttcccaagatcaagatcacagatcaacacttctctaccatcatgaaagccttatgtgtttttctgttttcttcattttttgccctaatcctttccttttccctataggaaaatccatgggaccataatcagtggatggctctagctcaagcttatgctctagcacaaaaccagagtaattgttgggtttgtggg

SEQ ID NO: 697308 - DNA, 1481 bp, Homo sapiens
tttctttccagtagattaaagaggggtggaaaattacaaaatccagtgcatgccacttaaattaaagttgcgaccatttttattcgtgccaggaggaaggactttattctccttgatttgagcaaatccattatcggagctttcaatttcaggcattccaaatttaggtccacttgaggctgggatgactgctatgtctgagagggcttctttctctgcagcttcttaaaatgcaagaacagaaatcaggaaacattagagagaccaacaaaatgattcagatatttatgtaggtaactaagatgctgttgcttttcttgactagaatttcattatagcttcattaggcaaagagactctattcctaatagtgcatctgatcaacagaaatgcaactagcaaatcaaaaaatgtatgaaagacaaataaatggcttcccaggctgagaagagccaaacaggtttaactgtgggtgattttggaggcctggatagtggcttccctgaatccctaagcctaacttttctctaatttaccagaagtgagaaacaaatgcatacccagacggctcctctcaacagcaggcacccaagcctaaacccagatggttcatcactatgaatgactgttctcgtgcttgttcagtaaaaagacagaacacgaggcccgtgatatgatcagctgcacatcaactcagacatgcttctacacaggataccaggaaggtgagggagttgtacttctgcttcttccatctacggttgccaacctgcactaagggatgtttgctagaatgaagctgagctaaagtagagtgtgtcttgctggagacaggtcctagtctgccctgagggtcttttagctaagagagcattgctgccccctcctttgccttatctatccttttgaccattgttcctgcctctgaattgccattttgaccccagacacggtcacattcttctgcctcctcaacttgtctaggcaccataccctctaccttctaaacctcacatttgcctcctggactaccacactgccatctccaccaattcagttactgcttcccaaaataagaatatttgaccttcttctcttttccacgacctctgattttacttggcaaccaagccacggtttgttagaatttggtcacgaacaagtatttacacaaaaattcaacttcagggaactaaacatgttttagatggcaaggaatctagaagttgcgagtcagtccagagctgatgaaactgctcaaggaagtcatctggaaccagattctttctagcttgcttctcctccatcatccttagcwtgtggtttctgttttaatgatctccaggatgactactctgcacccaagcaaattttaattccagaacagaaaaaaaaagaaggaaaagaagagagaaaggatgaaggacaggtaaatgaagcaaatgctacctggctacctggctgcacctactaataatgca

SEQ ID NO: 697309 - DNA, 619 bp, Homo sapiens
tgtagtgagccttaaagtgctcacacttgtaatctcagcactttgggaggccaagataggcagatcaactgaggtcaggaattcaagaccatcctggccaacatggtgaaaccctgctctcctaaaaatacgaaaattaactgggtgtggtggcacatgcctgtagtcccagctactcaggaggctgaggcaggagaatcacttgaacccaggaggcgcaggctgcagtgagctgagatagtgccaccgcactccagcctgggaaacagagcaagactccatctcaaaaaaaaagttatatatatgataaaatgaaacacgtctagtggagagttggtatgaagactcttcagaggatgctatggaatctagaaactatatcacatgagcattaagatamggaagaaggctaattctggaggtaatagaaatcagttaggaataaaaggcgactttattaaaatataactataattttcaaaagagatgcatcctttgatgctacagaagtaaaaaaaaataggattaaattatgaacatgactatttttaagtatccataaatgacatataatgaactttctcagagcagcactagacatctggccaaactaaactgg

SEQ ID NO: 697310 - DNA, 619 bp, Homo sapiens
tgtagtgagccttaaagtgctcacacttgtaatctcagcactttgggaggccaagataggcagatcaactgaggtcaggaattcaagaccatcctggccaacatggtgaaaccctgctctcctaaaaatacgaaaattaactgggtgtggtggcacatgcctgtagtcccagctactcaggaggctgaggcaggagaatcacttgaacccaggaggcgcaggctgcagtgagctgagatagtgccaccgcactccagcctgggaaacagagcaagactccatctcaaaaaaaaagttatatatatgataaaatgaaacacgtctagtggagagttggtatgaagactcttcagaggatgctatggaatctagaaactatatcacatgagcattaagataaggaagaaggctaattctgkaggtaatagaaatcagttaggaataaaaggcgactttattaaaatataactataattttcaaaagagatgcatcctttgatgctacagaagtaaaaaaaaataggattaaattatgaacatgactatttttaagtatccataaatgacatataatgaactttctcagagcagcactagacatctggccaaactaaactgg

SEQ ID NO: 697311 - DNA, 666 bp, Homo sapiens
aaatagacgaaatcaggtccgaattcaatttcatcaggtgatttttcctgattacctattgctccttaccttcttaccaatgactttcttttttcccactccattccccaccccccagagaaggaaaggtttttgcctgagtggaggtaatggggtaagcttccattaaggtggaagatttgagcctggcttgggataggcrggagaacagccacatttgaataatgtttctgtagaaacctgaacttatttcattctgtgagatagcctggttttctgcccattttgtgaattaagaaacagaggcttagagtgttccagcagctttcccaagcttacctggagggtttcctttttacgggtgctattttctttctgcttcactcctccaggagctggcccacattcacagaatgtgtctggaaagtgccataattcctccaggtgcaaagggcttagtaatttactccttcagtctcctgcttgattgtctcaaaattgaaaaggtttcatgccattttcagacatgcttaagtttctcaaagggggtagcccgggaacttgagacttcagtagtttttccttcttgaatgcccctgtccagccagtgccctaacttgtacaaatcaaggaaaatggtttgtgtggggtggaggtggggtgaat

SEQ ID NO: 697312 - DNA, 612 bp, Homo sapiens
caccaccaggggcgtggtgtgtgtgttgttattctcggctcagtcccagagaacagaatcaagtctagttaatataagtagcaaaagatttattgccagatatcaaytggcagttccttctcctccttgatatttgcttcctctgtgctaaaattttgaggtgatcacctctgccatatctctccaaatttaactctaagctctttgatactatatagccagaaaagatggggggatgtgtggtgagggatagaaatcctttacaatattttctttaatcagcataatgattacattctgactggcagaaagcggggggtggttcttcatctgttttgcctccattgcttcacctgtgaaatggtaccaatcaccccataaagtctggtaaggatgagaatcagtttagtacatgcttactcagtgagcattcctcccgcaatccagtgcttctcaaagtgcggtggctggaccagcagcaccagcagcacttgggaactcatttcttcttcttttattttttttttttgagatggagtttcattcctgtcgcccaggctggagtgcaatggcacgatcttggctcactgcaacctccacctcctgggttca

SEQ ID NO: 697313 - DNA, 1641 bp, Homo sapiens
ctaccctgtttccagaagccagtggaaggaatgatacagaaaggaggagagccaacctattacccggctattccaccagggtgatagcctggctctctgtctagtccatctgtggacacccattcaaagttttgctcttcagatctccctgaggagtctgaagggaccgaggggttcagtgactctccagcaggtagaaattttggtgaaagattgagcaaggataactagctgcttaggagacagacctggcttaaaatagggctgacttctccaattgtcctgtcctttgtgcagcagtttagtcaaagaaatctgccaacaggatacccagaggacacggggtagtgaggatcttctcagagacagtggagacagcagaaaaaacaatggagcaggagtcaggaaagcaaactgcccccaggccccaggcctgcttactgccagtggaaccttaggtaatctaacttagctagggttattgaaacagaatatcatagccctggtggcttaaacaacagtcatttattttctcacagttctggagactggaagtccaagatcaggatccagcatagtggagttctggtgaggactctcttcctggcttgcagacagctgccttctcacttatttctctcttttcctcttcttataagatcactgataccatcagattaggaccctacccttataacctcatttaaccttcattgtctcctaaaagccccatttccaaatacagccacattgggagttagggattcaacacatgaatttgaggggaggaggggcacaattcagtccatagcactctctttctgagcctaagttttctcattttcatagtgtcttgttctcaacaccattcacttaaggggcattgcctgtcctctttcataccagttgttttgctctagtgtgaagataatctaacttttcactttcagggttcttttacccaagctgttcactagagactcctaattatcctatgagaggggaaaataatgtattaacatactgtgccagctaagtgctgctgcataagaaaccaccccaaaagttagtagcttaaaacaacaaaccattttattacatcttgagatgttgtgggtcagaaattctggcagggcttggcttgatggttcttctgttctgtgtgttttttcctgaggtcacttcagtgttcagctggtgatgggctgatcaggagggttcaagacagcctcgcccacatgtctggcaccttggcaggccggctgggaggctgggctcagcagagactgctgaccagagtgcacactccagcatggcagtctcagggtagtcaggcttcttacagagaggaccagggctctcagagagtgtttagagccacctggaaggaagctgcaagctttcttrttacacaacttgaaagttccagaatatcacaactgccatattccattggttaagcaagccactaaagccaacccagatctcaaaagaaggaatagcaaagattttgggccctcttgaatttaccacatatccccattttctagaaggaataagtggggcccacagtgctcaccgacagcttctcagtcacagggtccttagatactacattcatttctgatggctcctgtaaca

SEQ ID NO: 697314 - DNA, 587 bp, Homo sapiens
tcaaggtatacacacggtcaaggcrtcaggggcataagcagttccaagccctgtagcaagggtaagccaggagcagaggggatgtccttatggcagcaggggagtggacccagaacagccctgagggctttggcccagagcaagtgtcaggtggtgtttcctggcccgtcctcccctaaggggactctcagcccataggcaccttaaaattatgaaaagcatctctcattggcctcacttattatgttttctgagccaaaaattatgacacattttaataaatacctatgttttcataggacaataaaacagactttttttttttttttgagacagagtctcgctctgcaacctccgcctcctggggtcacaccattctctttcctcagcctcctgagtagctggggctagaggcgcccgccactgcacccagctaatttttcgttttcgtatttttagtagggatggggtttcaccgtgttagccaggatggtctcgatctcctaacctcgtgatcctcctgcctcagcctcccaaagtgctgggattacaggcgtgagccactgggcccggccaaaacagaatat

SEQ ID NO: 697315 - DNA, 1433 bp, Homo sapiens
tgaagtatgaccaatttacctttactcgatactgtcaaactgctctccaaagtggttgtacaaatgttcactcacaccatcagtataccagggtccccatgtccctacatcctcccaatgccaaatattgcttcagacttcaraaattgtgtgacactgataagtgggacttggtattgcttttaattttaactggcatgttccatcttttgttttcaaagatggtagcaattacactgatctattccttcccagaagttatactgaaactttgttggcaatcctcgaaaaaaggaaaggagctggccgggcgcggtggctcacgcctgtaatcccagcactttgggaggccaaggcaggtggattacaaggtcaggagatcaagaccatcctggccaacatggtgaaaccctgtctccactaaaatacaaaaaattagcagggcatggtggcgagcgcctgtagtcccagttactcaagaggctgaggcaggggaatcacttgaacccgggaggcggaggttgcagtgagccaagatcacactactgcactccagcctggcgacagaacaagactccgtctcaaaaaaaaaaaaaaaaaaaaaggaaaggagcagagtctgctggcccagcactgggaaaccggaaccgggacctgggagctgcctgctgagcatgcagcaacagaaccggtcctcttgccaacccagtctaacaccctccaccaaggaggtgtgctgtgggaaaagatgagctccttgcacttttttttttttttgagacaaggtctcactctgttgcccaggctggagtgcagtggcacaatcatggctcagtgcagctcagctagttttaaaattttttggtatagaaaagttttccctatattgcccaagctggtctcgaactcctagggctcaagcaatcttctcactttagcctcccaaagttctgggattacagatgtgtgccactgcacctggctaccttgcatctttccttggttacctggcctcaggagcaaatgcagagattagagggctacactagcactcttcttcctcttgtagaagggggaagggagatggcccttttatcccagggtggaagaggcagggacaacagcacccccaatgtcctatccagggtctaccccagagtagcagctgcagctacaatggctgtattggcatttgtgaacagtggcagtggcaggtgcaggcaggaaagcatcaggaacaggtactgtgtgactgcaggtgaagggcagcatcaagggtgagaaggagagaaggccgcaatgaatgcactatcatcccaagcccaggactcaaggcatcaggccatggctcatgaacactgaaggcagcagcaaggatggtttgtaacactgccaaggacagaaagggagaggtaaggggccagcacttgtgc

SEQ ID NO: 697316 - DNA, 657 bp, Homo sapiens
tggatttgtttgtaggacatgctgcatgttgcatagctgcatagctgcaatacaaccatgggaatcaggaaattaacactggtatagtattgcctgttaatccctggagcccattcctgttttgccatttgtcccaaggatctcctttatagcaaaagtatccagtttggaattctgtgtagcatttggttgccatgtctctttggtctcttatgtctggaacagttcctcagtctttccttgacatgaccttgacaattttagattagaggccagttattttatataatagatctctmttggtgtgggtttgtttgttttcgtgtgattagattcaggttttgcctctttggaaagaagatcacaggagtgatctgggttcccactgcatcctagcaggtggagctcaattccagtttgtcctattactgaagatgtttgctttgattacttaaactggtgtctgctgggcttctcactgtgacattttccttttccctttgtaactaaaaagaatcttgcagggcagtacttcaaaactattcagatatcccacttctcatcaaccatggaatttactcatttatttatttaggttagttgagaccaagggtcagctgttttgtgtaaaggatcagataataaatattttaggtt

SEQ ID NO: 697317 - DNA, 657 bp, Homo sapiens
tggatttgtttgtaggacatgctgcatgttgcatagctgcatagctgcaatacaaccatgggaatcaggaaattaacactggtatagtattgcctgttaatccctggagcccattcctgttttgccatttgtcccaaggatctcctttatagcaaaagtatccagtttggaattctgtgtagcatttggttgccatgtctctttggtctcttatgtctggaacagttcctcagtctttccttgacatgaccttgacaattttagattagaggccagttattttatataatagatctctattggtgtgggtttgtttgttttcgtgtgattagattcaggttttgcctctttggaaagaagatcacaggagtgatctgggttcccactgcatcctagcaggtggagctcaattccagtttgtccyattactgaagatgtttgctttgattacttaaactggtgtctgctgggcttctcactgtgacattttccttttccctttgtaactaaaaagaatcttgcagggcagtacttcaaaactattcagatatcccacttctcatcaaccatggaatttactcatttatttatttaggttagttgagaccaagggtcagctgttttgtgtaaaggatcagataataaatattttaggtt

SEQ ID NO: 697318 - DNA, 1274 bp, Homo sapiens
cctgatgagtcaggaacagcactacactgccctgtctgctcagccctgctgggatctttatgtaaagtataaaacccagtgcaatcagcggaggaggataccagtcccagagtgctgagagcagcaatgattcagccacccctccttcccatggtgcayatccatccctacaaggccctggctcccctccttatccctgcttctccagggaccctcctgaagagaggcaggagtggagatcagcttggagatcagctagggagaaggagccagggagtgtggcacactattaattagctaaaagcaaatgccacctgcataatgcattatggctgctgcctctgcagcctcccactctccactggcctgctgcttgctattgtctctggagcctgtctcgcctttattggagccctgatgaagcactgctgtgtatgaagtggctcggtgttaatagaaactcatcatattcactgataatcctccattgcctgagatgggccaattaggagctctcaggcacatttgcttactgcagaggggcctccctgtgggaactgtgtgctcctgagcaccacagtctgtgggcacatcagtgtatgcatgggtaacatatgcctgtgcagtttggcaacaacactgacccaggaggctgaattcaaccatatgtagtggagcatggctgcaatatgcttgtgtgggaaagttaaggcaagctgcccccattccttctcattttagaggaatgagttagctggcagttatttatttgtaaataatcaaaaaccaaaaaagccagacaagctgcagagggtgctccacatggaaactgtgctcctgagccatgactttaaacagtgcgcaaacttccacagagacagatgtttctatcttttattgaggtgaaatccacataacatacaattagcagttttagagtgtacaattcagtggtatttagtgtattcccaatgttgtgcagccaccaccactctctattttcaagtcttttttgtaactccagaagtacaccctatgattctctggcaatcattaatctattctgtctctatggatttacctattctgaatatcttatataaaataagtcataaaacatgggattccgtgtctggcttctttcacttagcataatgtctttaagggacatgcaggttgtagcatgtatcagtactccattcctttttatggctgagtaatattccattgtccatatatactatggcttgtttatacagtcatggacatttggg

SEQ ID NO: 697319 - DNA, 1528 bp, Homo sapiens
atgcaaacagaccatttaggcatgtgctaaaaatgtagccaaatgtctacagaatcaggtaaggagccatgcactctgactctcttagaatttccgtgccttttctcaaatacattattgctgtgagaaatgccatcatcttcacagtttgtcatattaaaaattatttttatgtttttctcccctaatttctacctcctatttttttctggagtaatttaaagaacatctcagacatatataatttcacttataaatagttcgctgtgtattgctaacagataagaagttaaaaaaataaccacagtaccattatcccacctagaaaattaataacaattccttactataatcaattataatactcattttccagttttctcaattgtcttaaaaaatatcttctttggctgggtatggtggctcctgtctataatcccagtgctttgggaagcctgaggcatgaagcttgtttgaggcccggagttagaggccagcctgggcaacatagtgagatcctatctctaaaaaaaaaaaggaaaatcagccaggtgtggtggcacatgcctgtagtgccatcagggagctactcaggggactgagggaggagattccttgagcccaggagtttgaggctgcagtgagctaatggcaccactgcattccagcctgggcaacagcgcaagaccctgtctctgaaacaaacaaataaataaatacacgtcttcttagagttggtttgcttgaatcatgtttcttgttttaaagtttcatttctcttctcctttctctctctcccttctgtcttctacaaatatttaccgtatctttcaaagatacatatgggagctgggtgcagtggctcatgcctataatcccagcactttgggaggctgaggcaggaagatcgcttgagctcaggagtttgagaccagcctgagcgacgtagtgaaacctcatctctactgaaaacctaataaattagctagatgtgatggtgcctgcttgtagtcctagctacttgggagatggaggcaggaggattgcttgagcctaagagctcaagactgccgtgagctatgatcacaccactgcactccagcccgggtgacagagggagaccctgtctttaaaaaaatacatatggcatggtaaaacgagttaattccaaagtaaatgagaaaatatggcaaaaggtgagtacaagaagaaaacacagatggagccaagattgtggtgaggacacaaaggccagctataaaattgcatgtcccttttccctagaagtcatgcatttccttctgagcttcctagcaggaactacaaagagggcccatgtgcacctgtgggactcagagttgataacacaccataaaactgctcaggagcagcacaacctgagagatattttcccrtggatcctgacaaaggaaacactgagtaattgaccataccatgttctccatggtagccttgaactctaagaaaataagtttcataaggacattttaaaaaatcattctgagta

SEQ ID NO: 697320 - DNA, 1323 bp, Homo sapiens
ttaaatacaagggctctcagtcagcataggaaaaaccaccacttgggcattgtgtacataccctactattttttattgagttcttatagtcacccattctatttactgtggatctttatgtgaaagtaatccaggacaattcttttatatttaataattaatatatacagatcattctctgtatatttcaatattttaatctttcccacagttttgatcatctatataattaatgctatcatatttccttcaaaccattagatgtccctggggctcatagctttcgtcaagtgtctgaccatttttgcctagatggagaaagcatttttggtagaaaagcatgaatgggcggtggctcacacctgtaatcccagcactttgggagcccgaggtgggcggatcacgaggtcaggagatcgagaccatcctggctaacaacatgaaagcccatctctaataaaaatacaaaaaattagccgggcgtggtggcgggcgcgtgtagtcccaactacttgggaggctgaggcaggagaatggcgtgaatccaggaggcggagcttgcagtgagccgagatgcaccactgcactccagcctgggcgatagagcaagactccgtctcaaaaaaaaaaaaaaaaaaaaaagaaaaaatttgataggaaatgttgaatatccttgaatgcttaaatatcaatattttgccaggcctatttcctctgatctggatgatgtaatgttttcacaaaattagagggagaatttgtatttttaaaagcatgtatacacacacacacaacgaattcaaaagtctacaaaataaaatgttagcagtcattctttctgagtaatgtgactgtgggtggtttttatagtcttccatttgcttctctacttttttagattcccaacaatggacatgtatcttttttttttttgaggcgaagtctcactctgtcgtccaggctggagtacagtggcgcgatcttggctcactgtaacctccacctgctgagttcaagcaattctcctgcctcagcctcccaagttgctgagattacaggcgcctgccaccatgcccagctaatttttgtctttttagtagagatggggtttcaccaygttgcccaggctggtctcaaactcccgaccttcagtgatccacctgtctcagcctcccaagtgttgggattacaggcgtgagtcactgcgccctgcctgacatgtatacttataaggaaaaaaaaaaggaatatggtttttaaaaactactgttaagcactatccccaaaatacaggaaacaaaaacaatgtgagagaagactctc

SEQ ID NO: 697321 - DNA, 1323 bp, Homo sapiens
ttaaatacaagggctctcagtcagcataggaaaaaccaccacttgggcattgtgtacataccctactattttttattgagttcttatagtcacccattctatttactgtggatctttatgtgaaagtaatccaggacaattcttttatatttaataattaatatatacagatcattctctgtatatttcaatattttaatctttcccacagttttgatcatctatataattaatgctatcatatttccttcaaaccattagatgtccctggggctcatagctttcgtcaagtgtctgaccatttttgcctagatggagaaagcatttttggtagaaaagcatgaatgggcggtggctcacacctgtaatcccagcactttgggagcccgaggtgggcggatcacgaggtcaggagatcgagaccatcctggctaacaacatgaaagcccatctctaataaaaatacaaaaaattagccgggcgtggtggcgggcgcgtgtagtcccaactacttgggaggctgaggcaggagaatggcgtgaatccaggaggcggagcttgcagtgagccgagatgcaccactgcactccagcctgggcgatagagcaagactccgtctcaaaaaaaaaaaaaaaaaaaaaagaaaaaatttgataggaaatgttgaatatccttgaatgcttaaatatcaatattttgccaggcctatttcctctgatctggatgatgtaatgttttcacaaaattagagggagaatttgtatttttaaaagcatgtatacacacacacacaacgaattcaaaagtctacaaaataaaatgttagcagtcattctttctgagtaatgtgactgtgggtggtttttatagtcttccatttgcttctctacttttttagattcccaacaatggacatgtatcttttttttttttgaggcgaagtctcactctgtcgtccaggctggagtacagtggcgcgatcttggctcactgtaacctccacctgctgagttcaagcaattctcctgcctcagcctcccaagttgctgagattacaggcgcctgccaccatgcccagctaatttttgtctttttagtagagatggggtttcaccatgttgcccaggctggtctcaaactcccgaccttcagtgatccacctgtctcagcctcccaagtgttgggattacaggcgtgagtcactgcgccctgcctgacatgtatacttataaggaraaaaaaaaggaatatggtttttaaaaactactgttaagcactatccccaaaatacaggaaacaaaaacaatgtgagagaagactctc

SEQ ID NO: 697322 - DNA, 637 bp, Homo sapiens
tagttggtggtcaaaatatttaaaaatgtcacatgataaagtgctaaaaatgtactaggtatcaaaacatactttagagctatagtatttaaacagtgtggtactgatggataggtaaagacaaaatccaggtatgsatccatgtatatataggaatttagtgacagagtgacctcatggcaagacgattaaaaatgcatcctctaaaattatactgtctagttttaaatcctggccccagctgattattagctgtacaatcataaaatagtcatttaaattttctaagttttactttcctcttctataaaacatgaataataatatctatcatagaggcttgttgtggggataaagtaaaatatgtaaggattttagcaaatcaaaaacgtgctgaattttttggtacttagtacatcgtagaaggtatattggcaccatgtaggcgtcacttcaaaattctctttaactatctcttattatggactcatgctctctcataggtagccacaagtcacatgtggcgatgtgtgtttaaatttaaattaattaatcaaatttaaataaaattaatcaaaaataaaaaattcagtttcttagttttgctagctgcattttgatagcttaacaggtatat

SEQ ID NO: 697323 - DNA, 586 bp, Homo sapiens
gtagaatggtagcagtgtcaactgtgataagcagataatttgttactctggacagcctggggcccctttccagagacaggcagaagtccaagttcctagactttcagcctgtgcaatcaagaaggaaagaagtaatgcaaagggcagcaagaaccacagagagggggatttcaggatcatggcagacgggagggaggactagattgcagctgggaacagagcagcatgcgggggcttgcactgtgaattttagctccggatcaacagcaagaacaaaccagcaatcctgagaggacccacagaccctctgaaggaagcasactgctactgcaggacccgggagacacctcaaatatactctgggaggcggaaagcgtcggcaagttttcaagcccgtctagccctctgcctggaaacagactcagggctgttttggtggggcaccgtgggaggtaagatcagccctttggtttgtgtgggagctgggtgaggcctgtgactgccacttccctgactgcccttccctgacaacctgcatgactcagcagagacagccataatcctcctaggtacacaactccagtga

SEQ ID NO: 697324 - DNA, 626 bp, Homo sapiens
ccatcttggctagaaagagaaccttaaatctcttctgtttttaaatctatgtctgtcatattatgtcgtgtctkctctttgtatgtcttttctgtggccccatcccatttgtctggcctttaaaaaatcgtttgagtttttaattgtctcctaaattgaaatggaatttatacatcctacatattttctttttgtgcttgcactagcagtggcagttaaaaagtgtttgatcagtaaagaatactcatagaacctagaatgacaatgattacaaacctatggttttcttcaggaaaaggatattgtatagccacttaggaaaatttaatactgtaagacaacaattcacaaagtgcttttgatatccaatattggtttgtagcgatacgataccaaaataaacattgaaatcagtcaacgtagtattgagaatgtgtttaaaatacaaaactattactgggcttttcaagtttcacatttcatgctactgttgtgtaaatattgcgtgtcaccttgatttgatccagaaatcacttaaagcaactcatgatacatataataaattgagattgtcaatgctctctagacaaagacaatcagaaatttacctgtaacagaacaagttg

SEQ ID NO: 697325 - DNA, 626 bp, Homo sapiens
ccatcttggctagaaagagaaccttaaatctcttctgtttttaaatctatgtctgtcatattatgtcgtgtcttctctttgyatgtcttttctgtggccccatcccatttgtctggcctttaaaaaatcgtttgagtttttaattgtctcctaaattgaaatggaatttatacatcctacatattttctttttgtgcttgcactagcagtggcagttaaaaagtgtttgatcagtaaagaatactcatagaacctagaatgacaatgattacaaacctatggttttcttcaggaaaaggatattgtatagccacttaggaaaatttaatactgtaagacaacaattcacaaagtgcttttgatatccaatattggtttgtagcgatacgataccaaaataaacattgaaatcagtcaacgtagtattgagaatgtgtttaaaatacaaaactattactgggcttttcaagtttcacatttcatgctactgttgtgtaaatattgcgtgtcaccttgatttgatccagaaatcacttaaagcaactcatgatacatataataaattgagattgtcaatgctctctagacaaagacaatcagaaatttacctgtaacagaacaagttg

SEQ ID NO: 697326 - DNA, 1688 bp, Homo sapiens
ctttcctgactgtctgtactcaaccctaacccttaaactacacaaggcattactgccttctgctgttccagatggaccagtctggcttttctggtaagactttgagatctttgatggcatggatcacatctagtattttgctgaatcctccaatgtgctcagcacagtactgggcctagagtagatgcccaaaaggaaaatgaggcagcaatgagacacatctgctaagagaaggttggtgttgaactatcagcacctggggtaaagggtgctgctcacctaattcctttgccacagtgagagcctatcctcagtgtcagcaagacttcagcagagaggtggggaatggtcctctgaggggcctgggaaagggaccccaccaaagacattatcatggattgcggggtcaccatgaggactcagctaagttcggagaccttgaatccatgggcactcatctgtaaggttgtatgtggtcctcaagcagttctcagtggcctggcatcttggaaataggccctacctgttttgtggtggttgcttcccctgggaaataagaagaaacagttcaaatctttcatgaatcaattctgttttcctgaattagagtgttctatttccattatcttgcaaaaatcctcattcctttgaggcctgtgccatgtgattattcttcactctaaccccgatcccactgccaactcttctccactcactgagaactttagcatttgtttccccttcatcaaaaattctgccatcatcctggaaagtttcaacatgcacaaagatggcctctgtgacatcctagccacaacatttaaaaatctccgtaatgccagtggcttttcctttcatttcactcacccactaccatggccccaccttggacccttatcactgaaactgtttctggtcaaccctcacctggaccaccctcacagtctcctgaccaatcattctgcccccaatcacagtgaatcttggttataaccccatcctccatccccattctaccccacttctacactcaaactattcttcactgaccactagagtgggagaattctttagagtgacctttcttttttttttttttttgaggcagagtcttgctctgtagtccaggctagagtgcggtggcacgatctccactcactgcaacctccgcctcctgggttcaagcaattctcgtgcctcagcctcccaagcagctgggattacaggtgtctgccaccacacccagctaatttttgtatttttagtagagatggggtttcamcatgttggccaggctggtctcaaactcctgggctcaagtgatctgcccgccttggccttccaaagaactgggattacaggcatgagccacggcgcccagcctagagtgatctttctaacatgtaaaccagaaggtgttatgcctctgttaaaaagtctacagtggttccacatctacaaggtcaagtcagggtccttagcccagcaggcagtacaccaggctactgtttagcctctcatcgccataacctgccattttatgttctgacatcactgaatacagacagctcccagttccccttgccatctcttgaagcctcttggccctccctctgcctggaaaggtcattttcctgcttctctgtaaagatgttcatttcatctttacgtctttcatccagctcaaa

SEQ ID NO: 697327 - DNA, 628 bp, Homo sapiens
aaaagaggacccacatgtgcagaggcatagagatgtggggaccaggaacacaatgttccaaataggtaaatatgattggatcactgggtgcaaataagatgatagagaaataaggctacccaagcatgcagaagccaagtgaaaatgggccttgcaggccatacaaaggagttgagatttttgagtttaatagggagccattgaaggatttcaaatgcactttataaagatgtattttgacagcaaatatgaagtatagacttgaaggaggcaagattggaaacaggaagactagttaagaggttattgcaatagtccataatccatgcagaagtaatgaaggcctaaagcaagacataggggatagagagaatcagagtatctccccttgaaaargaaagagtccaaagatctcactcagaaaatgcaactcttttccatgtcctgtctccacaatatatttgtatgaaaacaaataaataatactaaaattctaaacagcaattttatatgtgtatcttgggtctattcagagaacagtatccattggcatttggcctctccagcaatatcttactttccttttctattttagattggggggtacatgtacaggtttgttacatga

SEQ ID NO: 697328 - DNA, 658 bp, Homo sapiens
tatctccttaatcactcaatagcattatgtaactctcttgctcacaacctcagtcttggcaagtattaggacacgaactctccagagttgtcccaagaacagtaggtcccagaaaaagaagaatgacttgtgacaagaaccctgaggagtgcctcaatctgtttccatgatttatgatcttcttacctcagtaatgactcccaccatttggttcagacctacaagaggccatgtctgatattttagcagagaaacaggcatataccatcctaaatctgtcttgggctcacgaatcacattgagctcacaaatcacctttcttccctgcgaagttatcrgctgcttaattatagataagtttgcatctgtggccaagaacccaggccaggttttataaaacctgaactgtctcccagtttccaaggacaatcaacatcaaggaatctcgctgcatgactatagggttgatgaaagatcccatttttcacaagtaaaacattttcttagaatcatgaatagctactgacaatgtctaatgaaacaactgataatacatctgggtttgggtgagatgggaagaaaaccaaagccaaaggggacctataaaaatcacttcctggctgggtgcggtggctcatgcctataatcctggcagttt

SEQ ID NO: 697329 - DNA, 603 bp, Homo sapiens
ggatcacctgaggtcaggagttcaagagcagcctggccaacatggtgaaaccccgtctgtactaaaaatacaaaattagccaggtatggcgatgcatacctgtaattccagctacccgggaggctgaagcaggagaattgcttgaacctgggagatggaggctgcagtgagctgagatagggccattgctctccagcctgggcaacaaaagcgaaactgcatctcaaaaaaaaaaaaaaagaaggttggattcctaacttatttcttagtaagaataaatctcacatagatcaaagatttagacttaaaaataaatatctttttcttataattttggagttcagtaggacttttaagcataactccaaactcagaagccatataggaagaggtcaatagactatgtggactcacataatcgactccgaaaatatacaaaccacacaatagacaacaagactacatatgctgcataagtttataaaatytgatacatgtaaaagtacaaacacatgcaacaaatttggaaaatatttacaatatatataacaaaactctaaattattaatgtatagagcttatacatattaaagaaaaagacca

SEQ ID NO: 697330 - DNA, 590 bp, Homo sapiens
ttactccctcttttttcttctctcctccatctcattctctctcctctccttccttcttttcccccttattctctccctctctctctccttccatccttcagccccagtagggcctattctgtaccagggcctgtgctaggcactgaggaagcagaggtgagttaggcagtctttgccttcaaagagatcactgcctaggacttagccatcacagyagtgcaaagtagactggactgaacagaagctcctgagtctgcaaagctaggtcatatccctgtctgtcactcactagctgggtgaccttgggcatatcagtctaacttatccaatactgtccccatatctgtaagagaggaacacttcctacccacctcacagagttcttactgcgttcaacaagataatatatgcaaagcactaataccagcccaacatatagtaaggactgagaaacagtgggagttagctcccttcttcagtggagggaaagaatgacaatatcacttagtggtgaagagtgttaagattgtaaaggagctacttaacctctgggtttaaatggggttaatataaactaccttcgatcctat

SEQ ID NO: 697331 - DNA, 1218 bp, Homo sapiens
ttaaaaaaacacacacatttctttcagctggggagtttacaggtaaaagttttcatgacttttttttttttttttttttgagattgggtctggctctgtcactcaggcgggagtgtggagtgcagtggcttactgcaacctctgcatcctgggatcaagtgatcctcccacttcagcctccctccatgacttttagaaatagcaattctctctgatttaggtcctcaatgctagcaatataatcctggggtacttctaagaaaacatccaagcacagatattaattgtcagagactggggagggtgccacttgtcaccctgcaaatgtgtcccctggaataagcaactatggcaaactcttcgtgaggctactatgaactattattctacaaagcgtgtatttccttgatatttgaaggaatacggttgatttccttggccccaaaggcacacagaggatcctcagtaccaaacggcttctctaaaatgcaatgatgtctgtaagagttcgtgacctaaatatttttattttatgcttttattcttgctacatactgataatcatgatgayaatagcaatatagcatctattatttggtgggcatttactttgttctttgcagaagtgacttcagcgttctcaaacttgtgaaatagatcaacaagaggtgatacacgagatggttccttgggcaaaaatactttgagaaagtgcctgtttggagccctgacaagtcctgtggcatgaatgtgaactttgaccgtttgatttgacaaggatgaatgcctgcaagaaaagaactcagagagatggtggaaccttaaaaacaaacaatattcaagtttgcacaaatgagccagcagagaacagtccggaaggaggggctgcagaatgctgtctttcccttgcgcttgacttcacatttattgaccactgcaccatggaaggaagtccctagagcagaaagaaagccaaaggcaaacaataccctcccctcctgaccagaagaccccaactagaaaatgtatacacttattcagtggattggagcagtgatgcctggtctggtcgccattagaatcaccatgagaattacaaaaacaggactcttgattccactgggctaaactagcaattcttaactagtgcagttttgtccccccacccccacacccgcctccgcccaggggacatttggcaatgttcgcagacttttt

SEQ ID NO: 697332 - DNA, 755 bp, Homo sapiens
cggaataggatgaaacgaggaggaagagatagtgaccgtaattcatcagaagaaggaactgcagagaaatccaagaaactgaggactacaaatgagcattctcagacttgtgattggggtaatctccttcaggacattattctccaagtatttaaatatttgcctcttcttgaccgggctcatgcttcacaagtttgccgcaactggaaccaggtatttcacatgcctgacttgtggagatgttttgaatttgaactgaatcagccagctacatcttatttgaaagctacccatccagagctgatcaaacagattattaaaagacattcaaaccatctacaatatgtcagcttcaaggtaatattttaaatccttcttttaaaaaataaagtatttttagtggctttgtttcctaaaccagtacatcttctcatgcctttaaaatatttgctttttcagggaaaatgcytaaaaatttagaattattgtataccttagaagctgtcacaaaatattatatttgatggagctaaattactctattaattattaataatttcttaaaacagcaaaagcagccactaaataagcataagtcattgataaagctgtgaattacattgaattattgtgaacgattttgaggaagaagaaatatctaataaaataaaaattgggagattataattgagtagagcttaattgctatttctatctaacaggaacttagtgttacttactgatggctttttgaa

SEQ ID NO: 697333 - DNA, 758 bp, Homo sapiens
gataaatttgttcatttgagattttttaaattatggaataattttagcaacatgcatatttaccactttaaactgcagcttattggtaaggactgggctaaatagggaaggccaagaactaatctttaatgatggacgctttaatgaataaacactaatcacctgggataatttcattatttgtatacaaaagtatctatcaatcttcttaagcatttttttttctgaactccccctctgcaaccctgtttaagatatgtgtcatttgtgtggcggggagggaggggggacgggrgtggcaaaaagttaatcaaggcagcaactaaaggtaacctagataaattaacccaacattggcttcctactgtatccataacttggcttttctttgtttatacagaaagactctttctgttaaaaatgtatttttattcactccatcttatttctggtacatttttttttttactcaaaagctttgcgagcctaaaaatgcgagtgtaaattaaattttcctaaatcttgaagcatggatgtccaatcaggatcttggtatgtagagaaattctatatgtgaatctttctctcaaacaaaaaattaaataatcactccctaaatatagatttacatatatgaagtttgactaatatatgatatacttctctactttagtttttcttacttgtattattttcaataatatgcacatttctcataacaaaagttcctgttaagacaactccctcgtcacacacac

SEQ ID NO: 697334 - DNA, 758 bp, Homo sapiens
gataaatttgttcatttgagattttttaaattatggaataattttagcaacatgcatatttaccactttaaactgcagcttattggtaaggactgggctaaatagggaaggccaagaactaatctttaatgatggacgctttaatgaataaacactaatcacctgggataatttcattatttgtatacaaaagtatctatcaatcttcttaagcatttttttttctgaactccccctctgcaaccctgtttaagatatgtgtcatttgtgtggcggggagggaggggggacgggagtggcaaaaagttaatcaaggcagcaactaaaggtaacctagataaattaacccaacattggcttcytactgtatccataacttggcttttctttgtttatacagaaagactctttctgttaaaaatgtatttttattcactccatcttatttctggtacatttttttttttactcaaaagctttgcgagcctaaaaatgcgagtgtaaattaaattttcctaaatcttgaagcatggatgtccaatcaggatcttggtatgtagagaaattctatatgtgaatctttctctcaaacaaaaaattaaataatcactccctaaatatagatttacatatatgaagtttgactaatatatgatatacttctctactttagtttttcttacttgtattattttcaataatatgcacatttctcataacaaaagttcctgttaagacaactccctcgtcacacacac

SEQ ID NO: 697335 - DNA, 1496 bp, Homo sapiens
tgccgtgtgaagtcttcccaattgggaattatcagcaataaacagacgcataccagcgccatagtgaagccacagtctagctcctgttcctatatctgccagcactgcctcgtccaccttggagacattggtgagcctttgctgtgaaggaattgataatatgttcctccttttctttggaatagtcatagaaagaaactgttttcctttaagcggagcatacacacacaatttagattgtcataagaagaaactataaaatgtattctaaggaacttaaaatttctcaatatttttgggattggcagagcatcgtgaagaaagtaactttcatattaagatttaaattttattccaactttatgtaatttatataggcaaataataaacagcaaaaacataatcaaagcttaatttttcaaagtggtgccataatttctaaattaaatgtactcttctggaataaatgaggtttataaattactcctgaagcgaaattgccttctttctttcttaccaatggactaaaagttgatttttaattttgcttcctttttaaagtttaatttgtatttctattatttgcattttatctgggaatattatataacttatttattcttgttcattcctttaaggtgacctagaaaggttgtaaaacaaattaactataggattatgttttgcttgtcctcaaataacaaagaatggagaacattactgcttttaagtttgaaattttagatttcttaatattgtaagtcagcggttccatgaggaggtcacatcagagtaagcagtgagtttggcagggagattcattgatactgtgtttaggttgttttgctttaaatataatctttgcacacacatatttaatattgcrataggaatgagacatttttcaaaatcactttataaaatattgaaaaatacataattttcagatcatattgtatagtgtattttgttttgttttgtttttaagtgccatataactcaccccttcttgtgggccggctccaggtcaccagcatagtccatagtgggagctggtgatgcatgacactggaggacctgaaaatggggtctaggtaagctttaaaattggttacatgctgaatgtcccaaataaggaaggctgatggacacttcacacataatcctatagttaatttgttttaaagtattttgtctttaattttaaattaactttaatgtctttattatctttagaacttaaaactatagctgttttggaaatactaccctactgtttgttttttgggttttttaaaactaattttcttcttcttagctcgatacagaaaccagaccagccaggcagagtcctactataggcatgcagctcagcttgtcccctccaatggtgagtggacctgtcaacctgagattgaccgtgacactttgttctttataacaatgtggcagataactcagggctcacctttgaagttttatgaaagcaataaatg

SEQ ID NO: 697336 - DNA, 613 bp, Homo sapiens
atttgtttatggctgctttcacactacagtggcagagttgagtggttgtgatagagaccctttggcctacaaaactgaaattatttataatctagcccttgctgaagccgctctctaccctaatattgactgtttaacctgtatatgatagtgtgtactgtcgctgaagtgtgctgttggaccttacgctggtttgcaatgaggcagtcatatttaccttataaaaatactccccattgtttgagtatttaaacactgatcatttgtattcttatagcaagactttgtcactcttggggttactccagaatcttaactttctcctgtaggtcagccttataatcagttggctatcttagcttcttccaaaggagaccatctgaccacaattttytactactgcagaagcattgctgtgaagttccctttcccagctgcctccactaatctgcaaaaagcactttctaaagcactggaaaggtagggttgtttggttttttttttctctttccaagaggactttgtaacctggagccttaattcctcataatttggtttacagaaaataacggcctatgcttctcttatttctaaacatatagatttttcataa

SEQ ID NO: 697337 - DNA, 634 bp, Homo sapiens
tctcctgaatcctgacattgctgatcatcaataccaacagggtttccatctttcctctccctatcggataggtctaaagacttactctcatcaccactgctgaggtgaacgctgaccaccatttctttctctactaaagagtttttacaagtagctgggtaacagtgcagatggccactcacaaaggcttcctcctgcaggcctcggtcagaaggcaccagcacacatgagaaaagctcctcatcttcccaacaaccttgtcggctgccgttacccacacacagtagatcacagaccccctcagaattctgctcattaacaacaatatctgaattcttgtcattctcacccaagttttcataccttgttgagaatgtatatataaaagaggaaagagggttcaatgactgcttgggtctatgaccctgtttgtgcccagaccctgcgaaaatccttgtccgcgcgctaacgccagctacacygctggctccactgccagtacggtgaacctcctcacctttgacggtatcaaataatgaagacaaagttttacttatcttgttttctggttccttttcctccacagatttttgtaacaggccagttttttcactgtcattgtcactacttagtt

SEQ ID NO: 697338 - DNA, 2327 bp, Homo sapiens
caacctccacttcccgggttcaagcgattctcttgcctcagcctcgcaggtagctgggattacaggtgtgcactaccacgcccagctaagttttgtatttttagtagacacggggttttaccatgttggccaggctggtcgcgaactcctgacctcaggtgatccgcctgcctcagcctcccaaagtgctaggattataggcatgggccactgtgcctggccaaggtgattttcaaatttgctctgtgtgtgtgtgtgtgtgtgtgtgtgtgtgtgtgtgtacacatatatatcctaatgaataatccaatagcattttactggtgactagagtttaaatttacttctactagacaaaaagtgtgttaacagttgaacttctttaatgataatgttaaagtaagtaaagaatatttagtgacaaatcagaaattcctattgcaaggcaactggcattttcctgtatactcaaaacaacatgttttcatctcacagagtacaggaaatgtttttaccttaggaatatgacactaaattgagggaccagatgacttccccaccccaccttagatatttatacttccttccctacctaggagggttgatgacttgagtgtatgtgtggcacagtacaattgatgatttacactgaaaaggtaattatatcacaagacttcttgcagaaattctccatctataattagacattttaaaagacatttttaaagacctaaaaaaagaggacctatatcattactttttcttgttgcatcaagcttaatatttgagtaataaaatattcastgatttcctagtagtcagtgtagttacttccctctaatttgcaagctttttctacttctccatctataacttatctacacacacacacaagccacagagatcttaagttctgcattttataagctaaatatctaactgacaatgataaatcatcctgtagatattgaaaagtcacagctgtgttcttaagcctaaaattttttgtcctatgtaatagaatcacagtttgaaactataaaccatagtcagggtcagcagtttgtataattttttcacattcatatagatggaatacagtagctaagcagatttagttaaattattacatgtaaagtaagaaaatgggatggaaataataataaatgattttctttagaagtccccataaacgcagtcccaggcatttgctccagggtgggtcatggttcatgacacacttctctttgcttctgcagctggaaccactgtgtggtttctctaatatccaggaaacatgtctgtgcaggttgtggcagtatactacctaaattcactgaataaatagtaaaggttagtgggtgagactatccctccacgacatttaaaaaaatttgttatgattttttaagacagggtctcactgtgttactcaagctggtctcgaactcctaggctcaagacaccctcctgcctttgcctccgaaaatgttgggattacggacatgagccactgtgcccaacccttggtggtattttaagcccactttttacagtagtgtagaagacagtagttctgttgtggctgattcataaatgcagcattttcacattggctacattcagaattataagcagcattaggtaccatcccacatccctttgtgctgttgatgcttagtggtcagactttgtagctgtcttcgacctctagtgcaagcatcaacttggtcttgaagacaggccttagtgggcttccaaattctttgggatatattttctgcgtcacctaagaatctgactccaattaggccttgaccccatgaggcttttaatggacacattggggcttcctttgacttttctgagtgctcttggagattcctgacctctaacctctatgtagcagattggctacatgttcctggtaggtacagttcatggttgactattggaggttttcaaatggatccaaatttagggatattttagggctcttattagtattctctcaggttgagagaaatctaatttatgaagcatcaaaaaattaggaaatagatatttatttggttcaccagggaaatttttctacttaattttaaataggtaactttgatctcaaacttctgtaaggcatgagatccttagtttaacagacttgccttctttagatgaggggagttagaatagaaatgtactctgttgtctaaatgttcagtccttcatcttccttactgtttccagagaaaagatagagaagaagattaaaggcagcaactcagctgacagtggtagcctcctttcagcttagggctccttcctgc

SEQ ID NO: 697339 - DNA, 653 bp, Homo sapiens
ttcttaatagctaaataggatttaagattaaccatcacaccatcagatctgagcccttcaacaacccttaactttggataggaaataggaaagtggtttatccctaggctacactatttcataattaatagaaatgaatgagatatatttctttgacattttataggtcactaagcactttcacctctgttaccttgttgaacatgatctctattgcatttcatgccccttaagacagtttcataattatgaaaatagttgttagggattttccaagggaacaacatcagtatttatacaaggaaggcctttgtatttttaaaatttctactgtagctataattggttcccattgttatttctaatactataaatttgtgcattctttttctttatccacttttatggaagatggtgtgttttaataacttttttttaacttagcttttgattttggatattttgctcattgattaccagtgattttttcttttcttacaggagcttttaagtccacaatttccctgtscatagtgctttagctgactcctaaaagttttgctatgcagtggttgttaatcactcccaggcttttctactttccattattacttctgtggcttgtgagtgttaaatttctttttattttcatt

SEQ ID NO: 697340 - DNA, 587 bp, Homo sapiens
tgttgccactgtgagcttcaggcttgggccagcaggtcaggaaatgtttagaaagccaagagccctctgtactcatccaccattcccaaggacaggcgctcagaatcagctaaatcgtcctaaggatgtggaatgagcaccaccctctgctgagtggaaatgaagccagcgctgccaccctgtctcggtgtctccagagaaatgtagcaaggaggcaggtacgacaatgtatttcagaggccctatcagtgacgccgatagaaacagccagccccttcggaaggcaggtacgacaacrtatttcagaggccctatcagtgacgctgagggaaacagccagccccttcgggaggcaggtatgacaacgtatttcagaggccctatcggtgacgccaatagaaacagccagccccttcgggaggcacgtgcgacaacgtattatttcagaggccctatcagtgatgccgacggaaacagccagccccttcgggaggcaggtacgacagcgtattatttcagaggccctatcagtgatgccgacggaaacagccagcccctccaggaggcatgtgcgacaacgtatttca

SEQ ID NO: 697341 - DNA, 667 bp, Homo sapiens
cctcactcccatggcccaaggtggagagcagtggcgcgatcccagcttactgcagccttgacttcccaggctcaggtgatcctgccacctcagcccccgagtagctgggactgcaaatgcttgccacaatgctcagctaatttttgcattttttgcacagacagggttttgccatgttgcctagggaggtctcaaactcctgggctcaaggtgatttgctgccttggcattccaaagtgctgggattataggcacgatccactgtgcctggccaagacctgctttttaagacctaaaagacaccctaaaagataacaaatggaatgctctatctaaggatgattcagagactgaaagcttccagtaraatcatgtgtaagactgcaactaacaaatgattgccagaagtagatactgaagagtggaatgattactcctacttaagtagctcactcccattagaaaaccgacatataagttctcccgatgtcattttttatattttcccctatctacatgtatttttattacttattttctctttaatcctatttctgcatggatttcccccctacttttctttgtctactagactatgactcaacctctacttgttctaatattaaatacacagcgccacacatttgatgcttacagtagttcattg

SEQ ID NO: 697342 - DNA, 644 bp, Homo sapiens
cagctgttttggcatgcacctgtaatcccagctacttgggaggctgaggcaagagaatcacttgaacccgtgaggcagaggttgcagtgagccgagatcacgtcactgcactccagcctgagtgatagagcaagactccatctcaaaaaaaaaaaaaaaaaaaaaatttacttggatactttaaggctaaagacaaaaaaatcaatcatatatacatatacatacacactgtaatctaatatatatggattagtatagtatatactataatttagcaaaagtgtttgttattaatatagtttatcaattctgaaactactttatgtgcacattactattaagcaaataagtaaaattatctatttgtatataatgacagtcagtgttctcactggtggaaaaagaatatttagctaaaatgaaccttgtaaaaaaaaaaaaaaaaattagccaggtgtggtagtttgcacttgtagtactagctacgtggaaggctgaggtagaaggatcccttgaacccaggatttcgaggcttcagtaagctgtgattgcaccgctcactccagcctggrcaacagagcaagaccttgtcttaaaaaaaaaattaaaaatattggattttaacttatgtttataaataaaaa

SEQ ID NO: 697343 - DNA, 589 bp, Homo sapiens
aattccaacactatgagaggctgaagcaggaggctcgctttagcccaggagttcaagaccagcttggacaaaatagtgagacccccaacttctaaaaatttaaaaaatgaactgggtgtggtggtacacatctgaggctccagctactctggaggctgaggtgggaggattgcttgagcccaggaggaggctgcagtgagccattgctgtccagcctgggctacacgagaacctgtctcgggaaaaggagaaaacagtgagacctctttttctctcctccttctctccactgcctaagccctacaagcacaaaaaggacaccacatgagcacatagtgagaatgctgctgccaccaacaagtcaggaagagagcgttcacctagaaactgaattggccagcacctggatcttggacttctgagcttccagaactgtgagaaagttattttttttttagcgactaagtctatastattttattacagcagctcaaggtaactaacatagtagaagggatgaattatggagatcacaagtccacgcctccagaaaaagacttccctaaaaattagtctgagcaaaattcga

SEQ ID NO: 697344 - DNA, 632 bp, Homo sapiens
tgacagtttgagattacttattgtcttttctgggaagacaaaaacatgtcggagactgctccacttgctcctaccattcctgcacccgcagaaaaaacacctgtgaagaaaaaggcgaagaaggcaggcgcaactgctgggaaacgcaaagcatccggacccccagtatctgagcttatcaccaaggcagtggcagcttctaaggagcgcagcggcgtttctctggccgcgcttaagaaagcgcttgcggctgcyggctacgatgtagaaaaaaacaacagccgtatcaagcttggcctcaagagcttggtgagcaaaggtactctggtgcagaccaaaggtaccggtgcttctggctccttcaaactcaacaagaaagcggcttccggggaaggcaaacccaaggccaaaaaggctggcgcagccaagcctaggaagcctgctggggcagccaagaagcccaagaaggtggctggcgccgctaccccgaagaaaagcatcaaaaagactcctaagaaggtaaagaagccagcaaccgctgctgggaccaagaaagtggccaagagtgcgaaaaaggtgaaaacacctcagccaaaaaaagctgccaagagtccagctaaggccaaagcccc

SEQ ID NO: 697345 - DNA, 632 bp, Homo sapiens
tgacagtttgagattacttattgtcttttctgggaagacaaaaacatgtcggagactgctccacttgctcctaccattcctgcacccgcagaaaaaacacctgtgaagaaaaaggcgaagaaggcaggcgcaactgctgggaaacgcaaagcatccggacccccagtatctgagcttatcaccaaggcagtggcagcttctaaggagcgcagcggcgtttctctggccgcgcttaagaaagcgcttgcggctgctggctacgatgtaraaaaaaacaacagccgtatcaagcttggcctcaagagcttggtgagcaaaggtactctggtgcagaccaaaggtaccggtgcttctggctccttcaaactcaacaagaaagcggcttccggggaaggcaaacccaaggccaaaaaggctggcgcagccaagcctaggaagcctgctggggcagccaagaagcccaagaaggtggctggcgccgctaccccgaagaaaagcatcaaaaagactcctaagaaggtaaagaagccagcaaccgctgctgggaccaagaaagtggccaagagtgcgaaaaaggtgaaaacacctcagccaaaaaaagctgccaagagtccagctaaggccaaagcccc

SEQ ID NO: 697346 - DNA, 632 bp, Homo sapiens
tgacagtttgagattacttattgtcttttctgggaagacaaaaacatgtcggagactgctccacttgctcctaccattcctgcacccgcagaaaaaacacctgtgaagaaaaaggcgaagaaggcaggcgcaactgctgggaaacgcaaagcatccggacccccagtatctgagcttatcaccaaggcagtggcagcttctaaggagcgcagcggcgtttctctggccgcgcttaagaaagcgcttgcggctgctggctacgatgtagaaaaaaacaacagccgtatcaagcttggcctcaagagcttggtgagcaaaggtacyctggtgcagaccaaaggtaccggtgcttctggctccttcaaactcaacaagaaagcggcttccggggaaggcaaacccaaggccaaaaaggctggcgcagccaagcctaggaagcctgctggggcagccaagaagcccaagaaggtggctggcgccgctaccccgaagaaaagcatcaaaaagactcctaagaaggtaaagaagccagcaaccgctgctgggaccaagaaagtggccaagagtgcgaaaaaggtgaaaacacctcagccaaaaaaagctgccaagagtccagctaaggccaaagcccc

SEQ ID NO: 697347 - DNA, 683 bp, Homo sapiens
tgctaccatatctccacctagactgggattttcttacaagaagggcttttgccttgtttatcttcatatccctaatagctggcacacagtttctgtccagctaatgtttttttaatgtttaatgtttgttgaatgcacaagttactttttgcaattaatagggttttctatttacatttagcaggtttacaaaatgccttgtattcactatctcaatatcttactatcttactctcacttgatatctcaattattatctcactcctgcactaacgctgagaattgggttgtttatctaattttatagacaagggggcctggcacagtggctgccgcctgtaatctcagcactttgggaggccaaggcaggtggatcacttgaggccaggaattgagaccatcctggccaacatgaagaaaacccacctctactaaaagtataaaaattagggttgataggtgcagcaaaccaccatggcacatgtatacctatatgacaaatctgcacgttctgtacatgtatccyagaacttacagtacaataaaaataaataaattaattaattttaaaaagtagggccaggcgccgtggctcacgcctgttatcccagcactttgggaggccgaggcgggcagatcacgaggtcaggagatcgagaccatcctggctaacacggtgaaac

SEQ ID NO: 697348 - DNA, 654 bp, Homo sapiens
tagactcatttgatatagtgtcacttgtaacagtgaaacagaaatggttccacaagtacaggggaaattgatttataacaaattttggaaattagtagaagaaagaccaaatagttaatatatggcattgggaaaatcagctatcatatgacataacaatgaattattgctattttcttctcatttccaggaaaactcacccaaagaaacttcaatgtttttatcatccagtattcctttaacttgaagttttgtttgtttgtttgtttgttttttgggttttgtttttttttttttgcctgccagtataccaggctcttgatctttccattttatttgtttctttctgatctcaagctcttccctagatttcttggttgattacatgaaccactctctcatcaacaccctcagattcttcaaattcatggggtttttttgtttgttttttgtttttgtttttgtttttttatattccwtatggaaaaatcccaaccttggatcaatttcacagttggccttttctgatccagaacactgactgcatggtaaaaattacacagtcatgcacactggtgccatgtagattcaaattcatggatttcagtctcagcactcgatcactgtttatatttaaccagaactttggttatc

SEQ ID NO: 697349 - DNA, 1370 bp, Homo sapiens
aaaagtcaaagcataccacagggtagacaacaaaaaatgatggccctatactttcctccctcagacacctgtttctcagatacaacccctctgtttcttttgctatttccatatagattataaatgttttaatagcactatttccagattatcctatttaaaatttatttgttggtttcctactacggcaggtaagaatttgactatcttaaaccattgtcctcttctccttcagcttcctccttctcctctcctagataattaaaaattccttcttgggctgggtgccatggctcatgcctgtaatcccagcactttgagaggccaaggcgggtggatcacctgaggtcaggagtttgagaccagcctggccaaaatggtgaaactctgtctctactaaaaatacaaaaattagctgagcgtgatggcatgtgcctgtaatcccagctatgtgggaggctgaggcaggagaatcacttgaacccaggaggcaaaggttgcagcaagctgagatcatgccactgcactgcagcctaggcgactagagagagactccatctcaaaaaaaaaaaaaaaatccttctcagtgccaactgtcttttgtaactgtgtctatgattatacctattagtttgtgctctatttattttctcatgtgcctgttttgtctaacagactgcgctattctcagctttgcacccagtgtataaatcagtgcctagtccttagtaggaactcaggtttgctgaacagaattaaattacagtaatctgtgagcacaaaactttatgtggtgtcatctgtagacaatcatcaatgttcatggacactaccagggttagtgtggcaacaataactcagaaatccagaaactacttgttacaaaaaatagatttatggacaaaaacagaaactgtcaaatttaacgtatcagaatatctcccagcattcaattcccagaagttttactttaagccattatcctgagctaagctgttaggcctaacaacatactaaaatgtaatatttatagcttccccctggaactattagaacagtttaaaaaagaaatcactcagttatctgaaaataaatttcagaaactcaaatatraacttttacctactttaatacaggaaataaaccaaggcaggtatttccaaagactatacaggtagcaaacctagggacataccagcagatacttttgagtgactttaaagtttgtgtagataggaagatggcaaatacttagcacctaggccactgcttccccttctcagtcaaggataactgagccctcctcttgagccttgttccttgcaacagtcaagagccctcaaaatgccatttggagatacaaacaatga

SEQ ID NO: 697350 - DNA, 2620 bp, Homo sapiens
agtaaatgttttctttctgtcacattcttctaaatcaaaagttcgctgtgtaggactgacattaatgcttttcctaccctttaaagccctggccagggtcagtgataggaatttcctgagttcagcaagtagattaactatgagaagtttattcaacactaatagttaagaaaaaaaggatggggcagtggtgtgctggatacagcccctactgattcccaagacccagtggtcacattttagaattttgcctgcagttgttaagcattggttatgaaaattgaatcatataaatttacaattaatgttaaagctaaaagtggtttcggcttaatgagtctaatatgtaccatggtaagaaacagttttaacagtagatcacgtatcagattgaatgataataaatttattgggaaatgagttagatttggacagtctgccatttttcaaatcacagttgaaagacaatcaatcataggttgactgtaggagttgagcaaaaagcaattaagtatccttttaaaaaagcattttagttctttcctgagcaactaagtatactgtgagaatcaactggctatatgggatttacaataaagtatttgtatcttattatttgttaattgtgttatatgttcttgctatcagcaaaatttataacaaacatgtatagttgaatacataattttctcccagaagagtgaactgctaaacatttaccagcacaccactggattgggagaatggggagaaagggggaaatatttttaaaccaaagaaggaagtctgatgttttttcatttggtttttcagtttgccttcagcatccaactgccacagtgtgctttaagtacttgcctgcagatattaatgcccaaatagctctggtaaaacacacatgccccatccccactgctaagaattaaaagcactttaattgaaaaaaatcaactttattttttctaggtttaaaaaaaatagaaccagctattaatttttgttgagaaaatgcttcttttggtgttcacatctaaatttctgaaaaggtgatctggttaccaaaatcatcccaaatgcattcataaaccagatccacgtgtgaccagccctttacaaaaattaattacagttgccacagcctttacattcattcttatcacacgttacaacatgcagataacacaaagaaaggtcaacaagctgaagtaaacattacagcatcaggaaaatgaaaacccatctgtataaaataaatacaattttataataactgtaaagaaaatgaaagcacttaataaaaataatggcagttgaaagtataactgtctcatcacccgatcataaaataagttactgtaaaatgcatagactccttacacgtaaagaatttgtgcatcacagtcatgtgttcaacagttttacacaataaaaataaagccattcaagatatgtgtgcatactttgcaactagaatacacttaaaaaacgtttgctctttaaactgtcttaaaaaaatattaaatgtaaaaaccctcagatggaaattttgcagaaaaacccatattttatcttccatgtggctacagtcacccttccccaacagttcagcaccctcagcttattcccagggtccagttcctaattgttggggattggcgcaaaatgattacaataaagcaccaaccaatgactgctccagagaatgcccagcccctctgtgatctggaaatctctaacttagatggttttggtcccaaacatattagtctctacccttcctgctatccactgctgcttttgactttgtccttcatattaacagatataaggctcatagcactgcagagcaaaaaaacataacaaaccatttttatccatcctctgtggaccagagctgaacacactcataatggtaactctggagtgaagtcctgtgtaatgacttcaaaaaaagaacaaagaaaacatttaactcttcctactcagtagggcaaataaaacattttcttttcaaatataaaaataatccaagaagactatccatgattaaaggctactctctatgattaaccaggtccaactagttcagaagagtctttaaggaagtgattgtcaaaaaacactcagacaaatccacaagaagtgggcaacatgagcaaagaatgaagacgcttcttaacatgaatccaagacagcaacactagaataatgttcccaggtttacatttggtgatttcagatttcattttcataaaaaggcttgagaacaatgccaatactgccaatttttgattattcagggatgcttttctaacccatagattattcaggcttctgtatttcctcttcctgatagctgtctttccgcatcawttcactactcattaacacagtcataaatatataggcaaaaaacccctaagaaacaacttaaatcatttaattagtaagcgtccctagaaaaaaaatgtctgatgagagtaagaattcaaactcctaaataaaagtaatttttgatttacctatcatttattaccagattatctatccagaaagtaatcaatctagtaatccttcctttatagtggaaagttaaggattggttgtaatattaaagacc

SEQ ID NO: 697351 - DNA, 882 bp, Homo sapiens
caaaaattaaaaaaaataaaataactaaatgagtataattgaattgtttgtaacactaagaaaggataactgcttgaagtgatggataccccattcaccctgatgtgattattatgcattatatgcctgtatcaaaacatctcaggtacctcataaatgtatggtatctacaaaaaataaaaattataaaaaaatgcaactaatgtgagacatgtggtgtaggtaggaaatgtttcagcaaaatgggggaaggtaagtgtgtggatatatgtggggagaaatggttgtaagagagagtagtgtgaacaaaggcacagattcaagaaagtacaccatattctagaagaagccaaagatgttcaacttggctgaaatttagtgttaaaaaaattataaagatattactgtgcagtaatatgcacaggtaggcaggcaccaaaatggartgaacctctggtgatgtaatggattttagtttaaatctgaggcaggaatagactcaaccaattctcttctctctaaggctcactattcttttccagtcccaggaatgctcctctaatttatttgttttgctcagggttgattgatgattttatacaacaacacaatttttatgtaactgtgagcaaagagactacagggcttgggtgtgaggcaacctgagaaaatctgtttattggggtcagccaggaatctctgtggagctggagactcagtaattaaattgaattaaactcaaagtggcctgaaagccttgttgcaggaaaatgcagagaagcttttcctgagagattaaacccacttaggcatattagtttttatggtattcctaatggccactagaaagtcagtataagtaatgtaaaatttatggtgata

SEQ ID NO: 697352 - DNA, 587 bp, Homo sapiens
taaatattagatttttttttttwaaaaatgtacttttcagatgggaaactattttcttgatgtggaaggttaaattgttcatgttagttagatgtgtttgctatgattacagttttaatagctgtatataaaaataaggattgtgagagagaaatcctttgatatatttgaacaacgttgcattaaagccagatagccttggctttatttgttctttaatttatccaacaaatatttatcaagtgcctattaggcattagatgctaagaatggatttttcatttgctggctgtgtaactatgggcaggttacttaaagtagccaagtgtcagtttctttatttgtaaatgagggataatacctaccgtattgagttattgtaagggttatagattatccaaagtaaccaacagcacctgacatataattggacaataataaattgtagttagtgttattattcttcatagtaacaaaacataatgtaattttagcttgctattatatataatattgctgtggtagtcatttagcatatagggtaattgatgatggttataattttattaatagggaggagaatggag

SEQ ID NO: 697353 - DNA, 1095 bp, Homo sapiens
tgcgataaacctaaatgtgtaagttaaaactgtaactcttccaaaagaaaatttagaacatctttacaaccttaggcaaaagttttaagtagatgtgtgaatggtcaataagtacatgtagcagtgctcagcagagaaatgctttaaaactgcaattagatactacttcacacttaggagaatagctttaaaaaaaaaaaaaaccctgacaacaccaaatgttcacagagaaatgaagcaacatgtattaaacaatactggtgaaagtaaaaaaaaaaaaaaaaaaaaaaaaarggttgcaatgtctcaactacaaggaatacaaaatttgggagaaagaaattatcaggataaaaaacaataaatggtgtttgtgtgttaatataatttttgttttaaaatacatgttctattagcgaggcatggtgtaacatgtctatagtccaagtgactcaagaggctgagatgggaggatcacttgagaccagggggtcgaggctgcagttagccatgatcatgccactgcacttcatcctggggaacagagcgagaccttgcctcaaaaaaatataatataataaaatacataagtaaaataaaatatgtgttatattttaaaagtataaactgaaccgttagggtttctggtttagcacgtacagacctaaaagtagcaactctgttcttacaagtaaaaacccaaacaaactgaaaaatcaaaaactcttcttagatccatcaaagaagtgaagtcatagggcaaaccctcaatcttcctgttttcattgttgcaccttgtttttcttctgttatgtctagtcagcacaataaggcaagaaaaaaatatttataggctggaaatgaagtaatcaattttgtctacatagactgtattattagcaaagagaggacacaaggttaacacacaaaaattaattgcatttccatatactagcaattgccagttaaaaatcaaaacagtaggctaggcatggtggttcatgcctgtaatctcagcactttgggaggccaaggcaggcagatcacctgaggtcaggagttcgagaccagcctggccaacatggtgaaaaccca

SEQ ID NO: 697354 - DNA, 600 bp, Homo sapiens
tgggtcgaacaggatgccactaaattttagtgaaggaaagaaaaacaggttgttaagaacagattttagattttttggattatgtgactaacaaaagcaatgtcctaatgtactcacagctacatccaagaggagttctcctctcgtcccatggagaatcttcaccaggttgccaatgctcttctcccagatgtacagggcatgctgccgggcagaacctgccacgatgtattccccatccccagagaaacaacatttcttccatggggtcctaaaggacaaggaaagtaccaaggagagctggaactcaagcccaggtcatgaatgatcacatattcttctaggttgtgatacatacctattcaccaaatcctgcaatttctgcataggttcaggctctccatctcttccacatgttaagatttctctgccatcataaactctgattattcgatctgccgtgttaattaaaaagcaactacgggaaggataaaaatatcaacacsagaggtcagaaatctgttccttagtactacaaaacgactaataaactagggaagaattgaggaaaaatcaaagtaatagactagaatatttata

SEQ ID NO: 697355 - DNA, 326 bp, Homo sapiens
tttactttaaataaaggtgatgctcatgatgtgcaatcctgaaactaatttatctagagaagaacgaactatttgacatcagaatagacaccttgatgatctttttctaaaaaaaaagtacatttttccatttactattattttaattgtatattgagagggagagragataattccagtagatagcttaaagtcaataaagtacagaatttatatgatgtgagaacactatttcagttgctagacattatgaaattttattataataatctcctgtgcccctttaccctcgataactctattctgctctactttaattatagctt

SEQ ID NO: 697356 - DNA, 326 bp, Homo sapiens
tttactttaaataaaggtgatgctcatgatgtgcaatcctgaaactaatttatctagagaagaacgaactatttgacatcagaatagacaccttgatgatctttttctaaaaaaaaagtacatttttccatttactattattttaattgtatattgagagggagagaagataattccagtagatagcttaaagtcaataaagtacagaatttatatgatgtgagaacactatttcagttgctagacattatgaaattttattataataatctcctgtgcccctttaccctcgataactctattctgctstactttaattatagctt

SEQ ID NO: 697357 - DNA, 1077 bp, Homo sapiens
gtaatacaaatatgtttttgagtcattttcagctagaataaatgaattcaatagactgaggctttaacgacaatttgtgccaataaaaatcaatttttatcttttacagtcagtaaataagaatatggaacatttttcattaatatggtgaagtaaatgttcttttttgtccaatttttttctctcagaaagcagcaaaaatgtgacacaataaaatggaaaataaaaaaatacaatatcttaatgaaattatgagacatctataattttcaatcgttagaataaaataaaaacaygctgcaaatatattgaaatttgactaaattcagagaaataaaaggtttaaatctacatttacatatttgtaatggcaaacaataattatggaaaataggcagcataacctgaaaggattcaattatattttaattaagttatgtattttatgtattcattttctcatggaacagcgatattggggggcataaatgaccatgagaatgtcatgaagtcttggtgaatatcagagagtagtaaaagaggaaaaactcttaaacaaaatgctaactccaaagtaatatttcccaaagagctttgaattgtctaaaatatgtcatttgtttccccgtctgcttctttctacttaattctaatttcaccagcaaattatgtcacttctattccctctatttttttctctggcctactgaatgatcagccccctttttctaggattttctaaagaaatcagcactcaccttgtacaaaatttccctcatattacttaaattatctcaagaactcctactaggattttctttaattctgaagttgataaatgcagttacatctatattgtgaaataaaacacactgtttttcaacgaagttataaaataattatataaattttttttcatgttgtcatctactgatgtaccacatttaattcagcaatttactacccttatcttttcaaggaaaacctcataattatgttcctgtagcttaagaagggtccatatatagaacaaatttttggaatacttcagtaccaaattttgccttatgaaagttt

SEQ ID NO: 697358 - DNA, 626 bp, Homo sapiens
aataaaaaagaaagtctgagaaactatcataacaaagaggagtctaaggaaacatcaatagggaaatttgttatggcacatgtgggaactctttgtcctaacctctcattctttcaaaaaacctaaaactgttcttaaaaagagacattttttttaaaaagagaaaaaatgttacataagttgagagcrattacatatatcaaaggtttcaggaaagtaatttgggaaattcttttagtatcaagaaagatgacaaagcagcatgaatgagaaagcaggtaggtgtctaaatatttctaaggatgaatattcaacatttgtatcaatttttacatatttatatatgagggcttttttatgtttttataaaaggcagtagtgggtaaatgattttgttgatggtacaggcatcaccttatcccttgcatctcatgaagtgtagagaaaaacttatttccttatgtgagtttccatcacaacacttatagccagtgtccacatcaatttatttgttatttaagctgactataatgtgatgacaggttataaaatttattccaaaacatagttaggttttgcaatcatataaactttgagtagaaggaggagagagtgttcttaataag

SEQ ID NO: 697359 - DNA, 626 bp, Homo sapiens
aataaaaaagaaagtctgagaaactatcataacaaagaggagtctaaggaaacatcaatagggaaatttgttatggcacatgtgggaactctttgtcctaacctctcattctttcaaaaaacctaaaactgttcttaaaaagagacattttttttaaaaagagaaaaaatgttacataagttgagagcaattacatatatcaaaggtttcaggaaagtaatttgggaaattcttttagtatcaagaaagatgacaaagcagcatgaatgagaaagcaggtaggtgtctaaatatttctaaggatgaatattcaacatttgtatcaayttttacatatttatatatgagggcttttttatgtttttataaaaggcagtagtgggtaaatgattttgttgatggtacaggcatcaccttatcccttgcatctcatgaagtgtagagaaaaacttatttccttatgtgagtttccatcacaacacttatagccagtgtccacatcaatttatttgttatttaagctgactataatgtgatgacaggttataaaatttattccaaaacatagttaggttttgcaatcatataaactttgagtagaaggaggagagagtgttcttaataag

SEQ ID NO: 697360 - DNA, 626 bp, Homo sapiens
aataaaaaagaaagtctgagaaactatcataacaaagaggagtctaaggaaacatcaatagggaaatttgttatggcacatgtgggaactctttgtcctaacctctcattctttcaaaaaacctaaaactgttcttaaaaagagacattttttttaaaaagagaaaaaatgttacataagttgagagcaattacatatatcaaaggtttcaggaaagtaatttgggaaattcttttagtatcaagaaagatgacaaagcagcatgaatgagaaagcaggtaggtgtctaaatatttctaaggatgaatattcaacatttgtatcaatttttacatatttatatatgagggcttttttatgtttttataaaaggcagtagtgggtaaatgattttgttgatggtacaggcatcaccttatcccttgcatctcatgaagtgtagagaaaaacttatttccttatgtgagtttccatcacaacacttatagccagtgtccacatcaatttatttgttatttaagctgactataatgtgatgacaggttataaaatttattscaaaacatagttaggttttgcaatcatataaactttgagtagaaggaggagagagtgttcttaataag

SEQ ID NO: 697361 - DNA, 626 bp, Homo sapiens
aataaaaaagaaagtctgagaaactatcataacaaagaggagtctaaggaaacatcaatagggaaatttgttatggcacatgtgggaactctttgtcctaacctctcattctttcaaaaaacctaaaactgttcttaaaaagagacattttttttaaaaagagaaaaaatgttacataagttgagagcaattacatatatcaaaggtttcaggaaagtaatttgggaaattcttttagtatcaagaaagatgacaaagcagcatgaatgagaaagcaggtaggtgtctaaatatttctaaggatgaatattcaacatttgtatcaatttttacatatttatatatgagggcttttttatgtttttataaaaggcagtagtgggtaaatgattttgttgatggtacaggcatcaccttatcccttgcatctcatgaagtgtagagaaaaacttatttccttatgtgagtttccatcacaacacttatagccagtgtccacatcaatttatttgttatttaagctgactataatgtgatgacaggttataaaatttattccaaaacatmgttaggttttgcaatcatataaactttgagtagaaggaggagagagtgttcttaataag

SEQ ID NO: 697362 - DNA, 649 bp, Homo sapiens
gtctcaatcagatcaccaaagatgaaactcatcaaatctacagcaatttttttaacccatctcttgttttgaagacacgcacctgcatgcgtgtgcatacacacacacacacacacaaaamaaaaaaaaaaacatagatttggttcatttggattatttgcatctacaaatttactacttactttagtcctacttttttacatttgtttatatctggtcaggatgagaattattgaattctgttctctaagggtaactttcataaacatagtatctctgaagttttatttatttatatgttaaatatagactatacattctactcgagaacatacatatcttttataaagtacttccctccaaaattcaggtgtaattgaattagtgccatgcttattttaagattcttggaaatatgagtctgattgtcttttggaagaaaattatattatttattactgagcttcttatgattcttatattgaaagaaatatagcttttgtttcaatatctactattaaagtgcactacagtcatatttttaaaccaataattccattaaaagcacattcagatgtctttgtttcagacagcatgatatttttccacatagttcaaatgaactaaacttctgcattcttttaagcca

SEQ ID NO: 697363 - DNA, 649 bp, Homo sapiens
gtctcaatcagatcaccaaagatgaaactcatcaaatctacagcaatttttttaacccatctcttgttttgaagacacgcacctgcatgcgtgtgcatacacacacacacacacacaaaaaamaaaaaaaaacatagatttggttcatttggattatttgcatctacaaatttactacttactttagtcctacttttttacatttgtttatatctggtcaggatgagaattattgaattctgttctctaagggtaactttcataaacatagtatctctgaagttttatttatttatatgttaaatatagactatacattctactcgagaacatacatatcttttataaagtacttccctccaaaattcaggtgtaattgaattagtgccatgcttattttaagattcttggaaatatgagtctgattgtcttttggaagaaaattatattatttattactgagcttcttatgattcttatattgaaagaaatatagcttttgtttcaatatctactattaaagtgcactacagtcatatttttaaaccaataattccattaaaagcacattcagatgtctttgtttcagacagcatgatatttttccacatagttcaaatgaactaaacttctgcattcttttaagcca

SEQ ID NO: 697364 - DNA, 649 bp, Homo sapiens
gtctcaatcagatcaccaaagatgaaactcatcaaatctacagcaatttttttaacccatctcttgttttgaagacacgcacctgcatgcgtgtgcatacacacacacacacacacaaaaaaaamaaaaaaacatagatttggttcatttggattatttgcatctacaaatttactacttactttagtcctacttttttacatttgtttatatctggtcaggatgagaattattgaattctgttctctaagggtaactttcataaacatagtatctctgaagttttatttatttatatgttaaatatagactatacattctactcgagaacatacatatcttttataaagtacttccctccaaaattcaggtgtaattgaattagtgccatgcttattttaagattcttggaaatatgagtctgattgtcttttggaagaaaattatattatttattactgagcttcttatgattcttatattgaaagaaatatagcttttgtttcaatatctactattaaagtgcactacagtcatatttttaaaccaataattccattaaaagcacattcagatgtctttgtttcagacagcatgatatttttccacatagttcaaatgaactaaacttctgcattcttttaagcca

SEQ ID NO: 697365 - DNA, 649 bp, Homo sapiens
gtctcaatcagatcaccaaagatgaaactcatcaaatctacagcaatttttttaacccatctcttgttttgaagacacgcacctgcatgcgtgtgcatacacacacacacacacacaaaaaaaaaamaaaaacatagatttggttcatttggattatttgcatctacaaatttactacttactttagtcctacttttttacatttgtttatatctggtcaggatgagaattattgaattctgttctctaagggtaactttcataaacatagtatctctgaagttttatttatttatatgttaaatatagactatacattctactcgagaacatacatatcttttataaagtacttccctccaaaattcaggtgtaattgaattagtgccatgcttattttaagattcttggaaatatgagtctgattgtcttttggaagaaaattatattatttattactgagcttcttatgattcttatattgaaagaaatatagcttttgtttcaatatctactattaaagtgcactacagtcatatttttaaaccaataattccattaaaagcacattcagatgtctttgtttcagacagcatgatatttttccacatagttcaaatgaactaaacttctgcattcttttaagcca

SEQ ID NO: 697366 - DNA, 598 bp, Homo sapiens
tgtggacaataataaaatagattgtctaattgtgattacttactaatatagttagggttacttattctagaaaatgaagtctctgttttcatcttttattttttttcttgcattaatgtttgtcagtccttgtgacaggaaaaaaatattagaaatttaacctcttcttatttcaacccctcccattcatatcatcctttaagaaaaaagtgagggccttgaatcctagaatgactagtgaaagtgttttaaaaaaaaagagaagaaatttgaaaatcggctttttttctgatatgaaatttctagagttaatttttaatcttggagcttgatgatacatatgtcatatagtcatgtgtactctaatatggtatatttttttatgaagcataactgtaaatatctattttataaagcaaaactgtaaataataaagaattgagaatttggtctccatgtcattagtaacataatttggataaacaatcttttttgacttctgtcttaaattccatgagaatgatgaagtttgaataatataaaatggtatgtttacattccaaggcatraacttgttaaaattacaattaatctgcaa

SEQ ID NO: 697367 - DNA, 1028 bp, Homo sapiens
ttaaaaattcaaattccttggcatgagagacacagcccttcacgacccagtccttccgtatatttatcctcccaaatacacacatgtgtatgcatgtttgtgaacatatgcatgtacacagacacacacacacacacacacatacactcaattacctgcttttgaatttcactaaactgcctgcagttcttaaagatatagtggctctgtgctttttctcctcccatacactacctcgtagccatagtaactcttcgcttcaaaactaaaatcaggatcacatcatctaagacctattctttgaccacacatcaaggttcctcccagcactggattaaagttcttcctcgatgctgccatagctttctgtgcaacctcaatagtatcacatgttacattgtattataatttaatccaactttttttctacaaatttattttcctacacgaacacagaaaaatacggtagaatatctacaacttgaacaatcctctctgtggtaggaagaccttcattgcccccagtaatgcccatttcctggtatttgtgcctttgtgtgatcccttacccttgaatgtgggatgatttatgggctttttgtaatgagtagaatacagcagaagttataggattccactttcaagactaggttataaaaagactgtggcttccatcttgggtattctcacatattctctctctcctttccagttgacgtgttttgagaacactyaggtccatgtgatgagaaaccaaggcctgccagcaatcacataaatgagcttggaagccaatcttttcagtccaggcaacatctttgtgaaattagaagcaaattctctagtccatgtcaagtcttgatatgattactgctctaaccaatgacttggctgtaaccttataagagacctccaatacaattttgaatacaagtggcaagagtagacacccttgtcttgttcttgatctcggaaggaaagtattcagtctttcactatcaagtacggatttacctgtgggcttttca

SEQ ID NO: 697368 - DNA, 607 bp, Homo sapiens
cccattgtgcacgataagaggtgtgaggtcacagacccggtcacccgctgtgcacgatgagaggtatgcgaggttagggacctggtcacccactgtgcagtcagagccatgcgacgttacagacctggtcaccagctgtgcccaatcagaagcttttgaggttagggacctggtcacccgctgtgcacagaggcgtgaggttacggacctggtcacccgctgtgtccaatcagagacgtatgaggttacagacctagtcaccagctgcamacaatcagaagctttcaaggttagggacctggtcacccgctgtgtccaaccagagctgtgcgaggttacagacctagtcaccagctgtgcccaatcagaagcttttgaggttagggacctggtcacccgctatgcacagaggcgtgaggttacggacttggtcactcgctgtgcactatcagaggtgtgtgaggttagggacccggtcacccgctgtgtccaatcagaggcgtgcgaggttagggactgtgtgcgcggtgacggacctggtcatcagccaagattcctgatgtttccagtgtcatctcagcttccttcaaaacttgaaatctttaga

SEQ ID NO: 697369 - DNA, 607 bp, Homo sapiens
cccattgtgcacgataagaggtgtgaggtcacagacccggtcacccgctgtgcacgatgagaggtatgcgaggttagggacctggtcacccactgtgcagtcagagccatgcgacgttacagacctggtcaccagctgtgcccaatcagaagcttttgaggttagggacctggtcacccgctgtgcacagaggcgtgaggttacggacctggtcacccgctgtgtccaatcagagacgtatgaggttacagacctagtcaccagctgcacacaatcagaagctttcaaggttagggacctggtcacccgctgtgtccaaccagagctgtgcgaggttacagacctagtcaccagctgtgcccaatcagaagcttttgaggttagggacctggtcacccgctatgcacagaggcgtgaggttackgacttggtcactcgctgtgcactatcagaggtgtgtgaggttagggacccggtcacccgctgtgtccaatcagaggcgtgcgaggttagggactgtgtgcgcggtgacggacctggtcatcagccaagattcctgatgtttccagtgtcatctcagcttccttcaaaacttgaaatctttaga

SEQ ID NO: 697370 - DNA, 610 bp, Homo sapiens
caagtgatctgcccgcctcggcctcccaaagtgctgggactacaggcatgagccacagcacccagccctgacagatatctcttaagtacacatcagtttcaggcattcagggttgtttggactcccccactttcagcccatgctccatgctgctgctaaagtgatcttcaaaccctgactggcccccactgtcccttcacctaaaatattctagtggatcccatcatcttcaggatcaagtccaaattcccgagcgtgatgcacaagatgctataacccagccgctcctacctaacttcttgccgttccccaaatgtgtcacactccctcatcttccttcaaaatatagaagccaggcagtatttcaggtgcttggcctayacgaatgaacagaacagagatcctggcctgtgtggacctcgtattcttatggaagaaagtgagaggtggggaggtggatggtggaagaatggctgagtagtggggtaaatggatgaaatgtttgatagatggacggatggtggacgtaaatggatgcttgataggtaagtagatgattggcgaatatgtagacagatgcagagaggttgataaatggatggatgattga

SEQ ID NO: 697371 - DNA, 625 bp, Homo sapiens
ccatgaattctcacactgcttttttttttttttttttttttttaagatggagtcttgttctgttgcccggctggagagcaatggcgcaatctccactcactgcaacatctgcctcccaggttcaagtgattcttctacctcagcgtcccgaggagctggaattacaggcacccatcacgatgcctggctaatttttaatattttttagtagagatggggtttcaacatgttagccaggctgatcttgaactcttgacctcatgatttgtccgcctcagcckcccaaagtgctggaattataggcatgagccaatgcgcccgtccccacactgtcctcctttctatccatctttcatgagcccaaatctttgccacacatcagtatatatttgcttagcaacccttttcctattataatgttttaacttgattagggactcatacactggaaattgtcagtgatccagggacgggagagtctgacgtctgcatctcatccgccagcctgagctccagtcgacgctcactggatgagggttctcatccggcagcctgagagccggttcacgctcactggatgagtgtcatccgccagcctgagctccggtccatgctcactggatga

SEQ ID NO: 697372 - DNA, 608 bp, Homo sapiens
  misc_feature 32: n = A,T,C or G
gtatgcaaaaaacacaatcaaaataagaaaanaaagtcatacagagtgacaaactcaaataaccagtgaaacaatataagaagttcgggtatactaatccagatagcagagaagctgtggtaggcagaattctaagatgacttccagtgatccatgactttgtataatcccctctcctttgagtatgggaagagcttttaaattaattttgatgaatggaatatggcaaaggtgatgagctataactgtcatgattatgttaaattgtgtggcaaaggtaaaggtattttgcagatgtaattaaggctcttgattagttgactttaagttaatyaaaaggacgactatccttggtgagcctaacttaatcaggtgaagccattaaaagaacgtccaaggattaaagaaagaaatcacacactatcctgaaggtctttaaaaaagccactacgagttccacagctgcaaggaacgaattctgctaacaatcaccagagcttttaaggaccctaagtatcaggtaagactcaaaccaccatcagcaccaaggatcaaaggacctagatgaaaacagctaagatgtgtgtaggcttcttgacccacagacc

SEQ ID NO: 697373 - DNA, 1224 bp, Homo sapiens
ctacatgctaatccaaaaataaatgttagattgtgacctttaaatgtttactccaaattgtcatttctacctattatttaccatctaagtttatgaccctttgagcatagctccacaaatacatgtgcaatgcagaaattgtggctccaaaagtgtggcacagtcttaaataaatgagtgtagatgaacataatttggattattttttcaaattcccaccttattagcttaatagacttttataagcaaggaactccaagcataagaatttttaaaagctcaaaataagaatgaaattttttaaatagaatttattaaggctccttcagtgacttgaatatattcctcgctttacacctcatgtttggaggtgtaaaaaagtaaagtttttcaaaatattctactctgtatcctcagtgcctagcttaatgtctatggggcagcagcatgattataaatcctgtcctttatacttggtaagaaaaaaaagacatggagaaagagaatcaacaaagcactcatctcagagttaaaagctaaaaaatgagatagagtctagaaaatmtattgtatatgtattttcaaaaagaagaggcaattgtttactagatagaagctggaaagaaacagcatgagtgaaatgagtataagattgagatggctatttcatagaggacagaaaataaattaatgtgactggaaagtaataaacatatagatgtgattaatccacatacttatgttggtaataggtacaactcttctgctattctttctcctagtttgaacatagcattatgggatttgaggctcaatgagtcttccatttcaagtattttcaagcttatggattttaaataaattcactatacaatgtattaattcctatgcacagtgaaaggtacagccatctactaactaccctgttacacaaatgtgccctgatcttactggcctttatatctttttacatgttgtgtgtagtctgtacggccctcacttgcctggactcttactacaaaatgtagtaaaggcctcacatctttagtaaacttcccctgacctttactaaccttgtgttaaaaatatatcccttgtgcactcatagcatcatattatttattcccaccaccccaatcatacttttcaatcacaaccacatcacaattgccagtttacttacttgtcttagccatttttcttcaagataacctacttaaggca

SEQ ID NO: 697374 - DNA, 655 bp, Homo sapiens
taatcttatataaaaatagagctcaatattaaaattgaccttaatattcatacaacaatatttgtatgctctactaaatgaagttttaagaaatccaaaatccagtgaggcaggacaagtcaagaaaagaaacaattgcaataaaatatgatgtgtagtaaaatatgaaggtttgcacatagtttgaaaattctgattcgttctaagacaaagaaacaacataggttttaatatattttgaatactattttctgactgtgctatattttttaatacagaaaaacacactgaggaaaagccacctgtgttaccacaacccagagatagtcgatgttaatattttgtgtatatttttcccatcatttgatgaattcagaagtcacctcttctgagattttgctttctgcaatttcagttacctgctgtcaattgtggccagaaaatttttaaaaattttctgaaaaaaattcctcgaaaattcctgaaaaaaaraaaaacaatttttttaggttgttgcaaaagtaattgcaatttttgccattacctttaatggcaaaattttaaattgtgtgcgtttctgagtagtgtgatgaaatctcgcacgatcccactccaacccgcccaggacatgaagaatgaagaatatagtacaata

SEQ ID NO: 697375 - DNA, 668 bp, Homo sapiens
ttcttgagaactcaggtacacatttatttattatattttaatcaaacagttcttggcatttccagaataacttttaggtaacatttccagaactgaagctaacacataaagagataaaaaaatatgtgtaagcagttaagagatttggaggatagaataagaaaggccaatgtatgcctatagaacttccagaaggatataataaaaagaatggtgagaggtactatttgaagaattttgtagagattgaatagcacatgctaatctaatgtatttattccttttcatttgaagctttgttcattatcaattgctatttcactttkgagggcaaagtgctatcaatcaatcataatgtaatatatattacctactgctatggtttggatgtttgtcctcaccaagtctcataatgaaattaaattcctatatgaacagacacttctcaaaagaagatgtttatgcagccaacagacacatgaaaaaaagctcatcatcactggtcatcagagaaatgcaaatcaaaaccacaatgagataccatctcacaccagttagaatggcaatcattaaaaagttgggaaacaacaggtcctggagaggatgtggagaaatatgaaagcttttacactgttggtgggagtgtaaattagttcaaccattgtgga

SEQ ID NO: 697376 - DNA, 724 bp, Homo sapiens
tgcagtgagaaatgagtacacatatatattttattagttatggtacattttactggatatagcatgttcttgaaagaatcaggtttaaattgaatttttgatagcttttaaaataaactaaatgaatattaatatattttcccaaagacccagaaccagtaagtggcagagccaatatggaaactcaggtcataaagactgcaaagcttatacatttagttaccaccttatgtgtggtgctctgtctgagtctttcatggcatgtgggtggagaatgctgagctcgtttctgttagtttctcgttcctttccttgcagggctttctttcatctttgcaaagtgatcagataggtgtaaatgaataggaagcatgaaaatgtcattggcttaaatgtgagctaataaaatatgcaactgaaggaacaaatggtagaaatagcagaaagttgtgtaatgtgggattatttgctagtttatccctctttcatgataagtcttgcaaattggtggcactgacttcatatatgtgaaggtaataaagatctattgactttttatctttaaycactttaatgtggattttcaaatcctttattttttatggaagtataatttacacagagtgaaatgctttgaagtgtacaatgcagtcagtttaataaatgcacacacctacataacccacatgtctatgaagatgtggaagtctccattagcctcaga

SEQ ID NO: 697377 - DNA, 633 bp, Homo sapiens
caaaatttctttgcagaaaatagttatttcctgccatggcttgttagtgaaagcttatgggtctatgtacaataggttaatgggtaaatatttttattggtttccagaggctaataggttaacatttttgttggtttccagaggcacaatgccttaagcacttttcataagtgcatcttttgaaacaaaactcttgttttgaaagagcaacatttgttttgtccctgctactatgaggcactaatactgttagttttttcatatacttagaaataaaatggagaaggatggtgtctatgtctmaatttgagaagtgctctatatcttaatcacctgatttaaattcacatgtatattagtatatcaaaggagtcccacataggatacttaaaaaaaggaatctaactctatttagctccagatttcctgaagtatttgaacacagaagacctcttaggagcccacagaacccattttgggaaataccaccttccatgatgctgggaattacagatacattggcaaattgttgggagagataatgaagaacaagatagagttttactttcctttcaaattccacaatgtatatggatacctgatgtatccgtacatgattatatttgagattat

SEQ ID NO: 697378 - DNA, 650 bp, Homo sapiens
acactgtgaacaaatatatctcataatggtggtggttttaaagcctaggcccaagtctttgacacccctccatagagaggcggggtgtcccccatgaaatctgggcaggcttgtgactgcatcgaccagtaaagccctgcagaagtgacactgtgtgacttccaaagttagggcagaaaagtccaagtccacacagcttccactggtcctgcaatgttcattctctgggggcctcctctcaggaaattccctctcagaagccagctgtcatagtgtgaaaagtccaagtcacgtggggaggccatgtgtaggcgctttgctgacccatcctagttgacccagctttcaagttaccccagtccaggcaggctgagattcctgagaatcttctcagaagtggatcctctagccccagctgttccagctatcagccatttcagtctcccgagctgaggctccagatacaaggagcaaagaagaattatcttggtgtgctctgtccaagctcctgaccacagaatttgtgatcagaaaraaatggttgtgttaagctgctaaatttgggggtaatttgtgacacagtgatagtaactggaacacttatgccacacccctgcttaaaatgttccagtgattctgcatcaccacca

SEQ ID NO: 697379 - DNA, 676 bp, Homo sapiens
ttgatgtcatcttagtacttcctaaatactctttttaaaatctctctggatcgattcctatttatctgtgatgcttacaggttcctggtctttcyggaggtactttagaaatgtgaaggatatagcaaacgagaatcaagaatcttcctactgcaacctttggagattattacacagtggtgcgggccacggggattgagggattcgagggaccttctgtcgcccatgtgacgcagatttccccaggctcactgctggaaagcctgtccgcatcgttttcatccttgcgacgtctaaattgcagaaaggcagagtcgtcttctccctcatttctagaggctcgggtcccgcgggtgtggagccgcacccttggtagtgacaaggtctagatgcttctctgcccggggaatggctctggcactgatccagaggccatctgctctgtggggagggaagtgggagtatgggtaagcaggaaaaatgaggtcagctttcagagcagtcaaccgtctctgacgagctggctagactgcgaactgtacaatatgtactgcagggagatgtccgcaacaggagacactcagtctggccagacccagagcccccaccccagggcatcaggacgacacagtcacaacacaggggacgcagattcatagccaggcaccaaatctct

SEQ ID NO: 697380 - DNA, 1247 bp, Homo sapiens
ggtttaaaataacaattaatttaagaacttaaaataaatgtttttaaaaagatatataatagtattatatgtcttaataattatatttattaaatataataaatattactattatactatatttacaatattatatactattatatttatatttataaatatgttatataatagttatatttatattatatatttatatttatataataatatataaatataaatataataactatattataaatataatagttataaagacaatatgacaaataaatattaaccatttaatttatatcagtcactaccctaaggattgttcttttatctaatacattttattctaataactctgttaattaggaattcatgttcccatctaacagattaagacattgaaggacaagaaggtcaaataaagggctgaaaaaaatctcgtaacttctaagtgaaccaggcagtttccaaaacctgccttttagctattaagctataaatatttgaaaaaagtatttacattgacaaataactatgaagtttttagaacttatgaagatcatgatgaagaaaaaactatttgtaatattatcaaattgcttattcctttctgaagtcatttattcaatatcatttatttgcagataataggtaccaggcattgagaaattcagaataaataagaaaatggaataaacaaagggttataaaaaaatctaggatgggttattcattttaaaagagaatggggcttaggtgaaaaaaagmaaaaatatacacaaggacttgaacattctaacataatgagcaagtcataccctgccagatgcacgagagtggatgacaggatgtgctggaaaggaacatgggaagtacctaaaatgaaaaggacctgaaatgcaattctaaagatttcgtctaaaagaaatggcaagttggcagataatttttaaattcaagtgtaaataatctgataagtattttagaaagctgactggatggtataaagagggtgcattagagaaggaaaatatgggtggcagggagatctatgagggttttgtgatgggttgaatggtgtcctcccaggagatatgttgaagccctatttttggtacctgtgaatatgacttcatttggaaataggatctttgcagatgaaatctagttaagatgggttcattaaggtgggccctaattcaatatgactgttttccttataaaaaaaggaaaagacggagaaacgggga

SEQ ID NO: 697381 - DNA, 1247 bp, Homo sapiens
ggtttaaaataacaattaatttaagaacttaaaataaatgtttttaaaaagatatataatagtattatatgtcttaataattatatttattaaatataataaatattactattatactatatttacaatattatatactattatatttatatttataaatatgttatataatagttatatttatattatatatttatatttatataataatatataaatataaatataataactatattataaatataatagttataaagacaatatgacaaataaatattaaccatttaatttatatcagtcactaccctaaggattgttcttttatctaatacattttattctaataactctgttaattaggaattcatgttcccatctaacagattaagacattgaaggacaagaaggtcaaataaagggctgaaaaaaatctcgtaacttctaagtgaaccaggcagtttccaaaacctgccttttagctattaagctataaatatttgaaaaaagtatttacattgacaaataactatgaagtttttagaacttatgaagatcatgatgaagaaaaaactatttgtaatattatcaaattgcttattcctttctgaagtcatttattcaatatcatttatttgcagataataggtaccaggcattgagaaattcagaataaataagaaaatggaataaacaaagggttataaaaaaatctaggatgggttattcattttaaaagagaatggggcttaggtgaaaaaaagcaaaaatatacacaaggacttgaacattctaacataatgagcaagtcataccctgccagatgcacgagagtggatgacaggatgtgctggaaaggaacatgggaagtacctaaaatgaaaaggacctgaaatgcaattctaaagatttcgtctaaaagaaatggcaagttggcagataatttttaaattcaagtgtaaataatctgataagtattttagaaagctgactggatggtataaagagggtgsattagagaaggaaaatatgggtggcagggagatctatgagggttttgtgatgggttgaatggtgtcctcccaggagatatgttgaagccctatttttggtacctgtgaatatgacttcatttggaaataggatctttgcagatgaaatctagttaagatgggttcattaaggtgggccctaattcaatatgactgttttccttataaaaaaaggaaaagacggagaaacgggga

SEQ ID NO: 697382 - DNA, 1247 bp, Homo sapiens
ggtttaaaataacaattaatttaagaacttaaaataaatgtttttaaaaagatatataatagtattatatgtcttaataattatatttattaaatataataaatattactattatactatatttacaatattatatactattatatttatatttataaatatgttatataatagttatatttatattatatatttatatttatataataatatataaatataaatataataactatattataaatataatagttataaagacaatatgacaaataaatattaaccatttaatttatatcagtcactaccctaaggattgttcttttatctaatacattttattctaataactctgttaattaggaattcatgttcccatctaacagattaagacattgaaggacaagaaggtcaaataaagggctgaaaaaaatctcgtaacttctaagtgaaccaggcagtttccaaaacctgccttttagctattaagctataaatatttgaaaaaagtatttacattgacaaataactatgaagtttttagaacttatgaagatcatgatgaagaaaaaactatttgtaatattatcaaattgcttattcctttctgaagtcatttattcaatatcatttatttgcagataataggtaccaggcattgagaaattcagaataaataagaaaatggaataaacaaagggttataaaaaaatctaggatgggttattcattttaaaagagaatggggcttaggtgaaaaaaagcaaaaatatacacaaggacttgaacattctaacataatgagcaagtcataccctgccagatgcacgagagtggatgacaggatgtgctggaaaggaacatgggaagtacctaaaatgaaaaggacctgaaatgcaattctaaagatttcgtctaaaagaaatggcaagttggcagataatttttaaattcaagtgtaaataatctgataagtattttagaaagctgactggatggtataaagagggtgcattagagaaggaaaatatgggtggcagggagatctatgagggttttgtgatggrttgaatggtgtcctcccaggagatatgttgaagccctatttttggtacctgtgaatatgacttcatttggaaataggatctttgcagatgaaatctagttaagatgggttcattaaggtgggccctaattcaatatgactgttttccttataaaaaaaggaaaagacggagaaacgggga

SEQ ID NO: 697383 - DNA, 1503 bp, Homo sapiens
ttagtgcaataatttctctccttttctataaacctcagtcattctaagaaacccctctcctcttacatacaaacccatatacttggatccaagcaataatagataaatgtaattccagccttatatggaattccatctctaacttggcttgcccttcgggcagaattgaaggggaataataacatgtcctttgataaggttggagtctcattagtatgctttgggatccaggaggtgtctctacagcctcatatgccttgtgaaagagcccagaaaccttttgcatgggtagaccttttattttagtacagaactctgggtactgggttttctttacctggctttttaaatagtgaatacatgagtataaagggggaggcatggaaattcaagatacaaattcttatgtaatcctgagagtgatggaggagttgctggaggactgagtgatctggttcacttcctgtgtttggaaaaaatgatttgaggtctagcatccagaaaagtttggaactaaatgaaggagaacctacgtttccagggagctaaagccaaggtgtgatgattatttacaggcatgtcgatgcccttcttacaagaagccttcttaggcagatactaccagccaaaatcacatgaagaaatccgtggtcttcttaatctcttctacatctagaattctcttctaggattaatgaaactagttgagctttcatcaggaagatactttaagactatcacaggaaaaaccactgaaaattttcttctttaatttggcaaaacaaaatgaaaagtatttgaaaagaaaatgaaaaggagaatattttcatgataatgtatttgactgtagtcccttaacccaaatcacaactttctcttttctatttgcctgtgatgaaatatatccaactaagtgttggcttgagcttctgacatgaagataaagaccttttcaaatttcagcacagctaaacttgtatgtagtgtagtacctggaatggagacttcagcaaggaatgttttgggcatggctagtgggagcatttttcctgttgtattagaaatgccaccaatggaaggaaaaggtcactgtgctgtgggacataccttctgtgagatgaggctctgaccactaatgacacttgtgcttttcattacgacagatgtgttaaccacatcgtgctggtcatgctccagccccaagccattgtagctttctgcttctgcaaccttcctcrtcttcactttggttggctgtagaattctttacttcctgtcctaaatttttgtgaggtgtcatggctgttaaacagctgccatgttgcaggccagatgtggctgcactttagtgcgcatgaaatgttcttcctataaaatattagatagtttaaaaatctgttttgaaggtttgtaaaacacttaggattccttcagataagagggctatttgtatattcttaaattgtgtgtgaaattgtgccaaagtataaaatacaaatgctg

SEQ ID NO: 697384 - DNA, 591 bp, Homo sapiens
aggctctgcacaatctagacatggcctgatttgaagcttcaaactgctatttcttcatcaagctggaggtcaaacacccactcccgcgaagcctcccctgacctctcaccaaccccctaacacccagtggctcagttcaatgaagcagtcccctaacacatttccatgatcatctcagcagcatgtgagtctatcccccattcaactgggggcttctctgcactgggtacttttggtctttgtgttgccgctgcagtgtgttaagggctaccgaatgttctggcaacacacagacaggaagccctacttcccactacacagtatagaggcctctgactctgctcccttgtctggtatcaccacagcactagaaatggaattgagcacatgtcttcacctcaaagccttgccctaggacagaaaccacatagccaggaaccaaggctcagagatgtgmgaacagaaaatgaactctgcttgatggtggaggcattatgacctgaaggagcacttcactctgccaagctcaggggagggcacccacgttcacttgagagaaggggcatgcctacctcctgcctccctctcttg

SEQ ID NO: 697385 - DNA, 1090 bp, Homo sapiens
agtcatttcaaatagtcctttgtgtggttatacaacccatttattacagaggctaatttgatttctattccttttagatttttgggattgccatttaagtttcgatattcttgtattagataaaatatgtagatgattccaaagtcaaaccttcaaagcagagtatattcagagaagtccagtttttatacctgtccccctcctctgtttcctcctccttctagacatgtccattctaaaattttctttctttttaaaaatagatatatttaattcttttttccatgtcccctcccctctatcatttctttctcaatatggaagattccagggtactcaaggtcactgaagccagaaacaagagagaaacaaaagccagaggcaagaacttcatgcttgaaggatcagaacgtgccttaagagaagtagctgggtagattggatggggacagagctacctgtgtcacttgtctggagctacatttattggccttagatgagatcaaaagttgggcagtgagccagggatgaagtagaaatctctgctattagggtgaatagattttgttactctaagtggttattgcttaaattgactgagcactcacagaatgcacagaaaattagcaccagtctttggaaatgcattttctagctactgctggcatgggtgaggcaacataagaaaaactgtgtactgttcctgggagggcaatttgtcaatatatagcccatgtctaaaacaaaattaaatgaaactctgcttgccctttgacccaaaataatgcacatagcataaaagaatatgttcatgaaggtgcaagaactatattgccttcttagcattactcatagtgagaatgtgaaaagtaagctaaatgtctatcaatagagaatctgctaatttatggcacttaacacattagaattccatttaaacaatgatgataattgaggactatccttattatataaaagactgtcagtgatatcttaggtagaaaagaaaaatgacaggaaagygtgggtagtataagctagtctttgttatatatgtatacatgtaaaatatatatacatataatttgtg

SEQ ID NO: 697386 - DNA, 433 bp, Homo sapiens
ccagactggagagcagtggcacaatctcagctcactgcaacctctgcctcccaggttcaagcaattatcctgcttcagcctcctgagtagctgggattacaggtgcctgctgccacgcccagctcatttttgtatttttagtagacacagggtgttgccatgttggccaggatggtctcgaactcctgacctcaagtgatcyacccacctcggcctcccaaagtgctaggattacaggcgtgaaccactgtgcccagcccaattacagtgaatcttaatacactggctgaaaattctgggacacagccagtctctctctttccaacaggacatgtacaaggacctgtacaaccctgggagatgctggcatattggggccacaagcagtgctgacctgaagaaaagggcaacacctcagaaaacaaagtagata

SEQ ID NO: 697387 - DNA, 642 bp, Homo sapiens
acactgtcttccacaatggttgaactaattatactcccactgaagattttcaattgttgttttaaatatttttttctgttcctttctctttcttctccttctggtattcccattacatgtaggttacaccttttgcagttktcccacagtccttggattctttaccttttttttttctttatattctttgcttttcagtgagtaaagatttttcaggccaaaagtgaaagaaatcgatacagagaataagttggatatacaagctacttttgatggctttgttaattgtggagtgattatattaatatctgatgtatttgactccaaggcaagcagtatttactagagataatgaaggccatttcataatgatgaaagggtcaattcattagaaagacatgatgtatctaataatataacttaaaaatacatgaagtaaagatggacaaaagtaacttgaaaacagaaaaatcttcaatcagttggaaattttatcattcactgttggttattgatagcataactagaccaaacatttagtaagaatgtagcaaatggccaggcgtggtggctcatgcctgtaatcccagcactttgggaggccgaggcaggcagatcacgaggtcaggagttcaagaccag

SEQ ID NO: 697388 - DNA, 640 bp, Homo sapiens
  misc_feature 456: n = A,T,C or G
aataatacataacaatctaggaagccctattgtatttttaaataaggacatcaaatagatatcataaattgaccaaaaggtttttatgtctttgctttcctgtcaatacatccaagtgaccaacaacaacagcaaagaagactaaaagaaaatatcttttaaatgaaacatgcaagcccctgaaaaataagcaaacttattccaacatgtaatttatcaagctgtgagatttctactattctgaacaaaacaagacaaaaaataaggaaaaataaataaatgaataatgtgactggaatcttgggaaaattcctttcaacaaaatgtaaatctgggtttttttgtcatcgttgttattaaccataaagctgacctatacatattagattttggagggggctaaataatttaccaaccgtaataagaaatagttgcattggctgcactaagtgtagntaaaaaagtcaggttttggccttgtatttattttggtaaatcttttaamataataataatatgtttcataaaactcttaacgtaaatccttcacacttctgagtgctaagactgggttggcattggatttgaaacggaagaaaatttaaccaatgatttttagaggattattttttctacagcc

SEQ ID NO: 697389 - DNA, 1508 bp, Homo sapiens
attgcatggccctggcagaacagggaccaggacccaggccctcgacctcccacatccaccatctagttccaggttcttgagccacccaccagaatgctcccccagccatttttatatctaagtgaaagagacagctgagaagaaaactggccaacatccatccatcccacaaatattcccgaggtgcccaggggacaggtgctgttggaggggctgattgcaaggtgaacactcaacatagtccttgactttgcagaatcaatagtcttgggattttttctagagggactttcaagaacagggtggactcagggaacacccaaccttctcttcttccatcacctccccatctgtgtagagaccactgtacttgttttttttttttttaagagacagggtctcactctgttgtccaggctggagtgcagtggtgcaatcatgattcactgtagcctcgaactcggggtaagacaatcttcccacctcaccctcccaagttccaggctaagaactacaggcatgtgtcaccaagctcagctaatttttaaaattatttgtagagatggggtcttgctatgttgcccaggctggtcttgaactcctgggctcaaacaatcttcccaacttgccctcctaaagtkagggattacaggcatgggccaccgtgcctggcctatgcatgcattttagtagctctgcaaacagaggaggtggtcctgtgcctccctctggaaatactctggctaatccaggtctctcccctcaggaaaaagtgatcagacacctccgcctagactggatcccctactggaggggacaacgctataaaggacattatttaacaaatctaaacaagaacggtagattacagtattatcacaacattaaacttatataagttgataatgtactgcagtaatgtaagagaatatttgtatttttaggaaacagtatttagggatgaagggctaagatggatgtaacttaccctcaaagagttctgaaaacaaaaaattatacacacacctacacattcagagggagaaagagaaccaaaaaaaaaggaaagaatgtggacttgtgtcctttgttagtgatgtgcatggagggaggtgaaaattttctctctttcaagtggtctctgcctcttctacagcaggacaggggagagaggtgcatgcttcctgccctgtcctggcagggcggtacctggagctagggtcttagaaggacactgcacccacaggccctggcccaggtctccatgggaccactgaccctttttttttttttttttttggacatggagtctcgtcttgttgctcaggctggggtgcagcggtgcgatcccggatcactgcaacctccacctcccaggttcaagcaattctccctgcctcggcctcctgagtagctgggattacaggtgcgtgccaccacacccagctagtttttgtattttttagtagggacggggttttgccatgttggccaggctggtcttgaac

SEQ ID NO: 697390 - DNA, 1508 bp, Homo sapiens
attgcatggccctggcagaacagggaccaggacccaggccctcgacctcccacatccaccatctagttccaggttcttgagccacccaccagaatgctcccccagccatttttatatctaagtgaaagagacagctgagaagaaaactggccaacatccatccatcccacaaatattcccgaggtgcccaggggacaggtgctgttggaggggctgattgcaaggtgaacactcaacatagtccttgactttgcagaatcaatagtcttgggattttttctagagggactttcaagaacagggtggactcagggaacacccaaccttctcttcttccatcacctccccatctgtgtagagaccactgtacttgttttttttttttttaagagacagggtctcactctgttgtccaggctggagtgcagtggtgcaatcatgattcactgtagcctcgaactcggggtaagacaatcttcccacctcaccctcccaagttccaggctaagaactacaggcatgtgtcaccaagctcagctaatttttaaaattatttgtagagatggggtcttgctatgttgcccaggctggtcttgaactcctgggctcaaacaatcttcccaacttgccctcctaaagttagggattacaggcatgggccaccgtgcctggcctatgcatgcattttagtagctctgcaaacagaggaggtggtcctgtgcctccctctggaaatactctggctaatccaggtctctcccctcaggaaaaagtgatcagacacctccgcctagactggatcccctactggaggggacaacgctataaaggacattatttaacaaatctaaacaagaacggtagattacagtattatcacaacattaaacttatakaagttgataatgtactgcagtaatgtaagagaatatttgtatttttaggaaacagtatttagggatgaagggctaagatggatgtaacttaccctcaaagagttctgaaaacaaaaaattatacacacacctacacattcagagggagaaagagaaccaaaaaaaaaggaaagaatgtggacttgtgtcctttgttagtgatgtgcatggagggaggtgaaaattttctctctttcaagtggtctctgcctcttctacagcaggacaggggagagaggtgcatgcttcctgccctgtcctggcagggcggtacctggagctagggtcttagaaggacactgcacccacaggccctggcccaggtctccatgggaccactgaccctttttttttttttttttttggacatggagtctcgtcttgttgctcaggctggggtgcagcggtgcgatcccggatcactgcaacctccacctcccaggttcaagcaattctccctgcctcggcctcctgagtagctgggattacaggtgcgtgccaccacacccagctagtttttgtattttttagtagggacggggttttgccatgttggccaggctggtcttgaac

SEQ ID NO: 697391 - DNA, 1097 bp, Homo sapiens
agcaagtgttacccttgccttaggaaggaagaaaagtacaaacaccctcactctaagaccaaagaaaagaaaaaaacatatatggcaaccaagaactaaaattttaaataatatcaatatgacagggattgagagagcaagaaagagaggccaarggtataataagcatcaaaaatacttttattgttaagggaaaaatgtatatattaatatttgcttaagaaaataaaagaagcaaataaacatatatttggatattaaattaaggcaactgtcatagaacataaattatagttataacttttaaatcaataaaagaatataatgggaaaaagtaaatgtaaatatgaagttggaaggaataatcactaatataacaaaaattacaaaatataaatgggttaaatccaacaattaaaaggctgagactctcagaatttgaaacaaaaacatatccaacagtatgtggtctccagaagaaacttaaagagacggtagaattaaaaataaaactctagcctgtaatcccagcactttgggaggtgaaggcaggtggatcacttgagaccagactagcaaacatggtgaaaccctgtctctattaaaaatacaaaaattagccggacatgatggtgggtacctgtagtcccagctacacaggaggctgaggcaagagaatcatttgaacctgggagacagaggttgcagtgagccgagattgtgccactgcactctagcctgggtgacagagtgagactttgtctaaaaaaattaaagtaaaattaaattaaaaattctggaaatagatagccctaatatataaaaggaaaacaaacttttccaaatcagaatataattcttttgaattactttttcactcacagtcagttacccaagcttttgagcatactcaaatgccctctgtgataatgatagaatttgtgatgaagcactgtttaagagtgcttcaatgttgtctgagatttttttttctttcaagacatggatgccatttttaagttgatgccagtgctttagtgatcttacgagaacttgcaatcagtgcaaggttttcagacaacaaacagaaatcgtgt

SEQ ID NO: 697392 - DNA, 1097 bp, Homo sapiens
agcaagtgttacccttgccttaggaaggaagaaaagtacaaacaccctcactctaagaccaaagaaaagaaaaaaacatatatggcaaccaagaactaaaattttaaataatatcaatatgacagggattgagagagcaagaaagagaggccaaaggtataataagcatcaaaaatacttttattgttaagggaaaaatgtatatattaatatttgcttaagaaaataaaagaagcaaataaacatatatttggatattaaattaaggcaactgtcatagaacataaattatagttataacttttaaatcaataaaagaatataatgggaaaaagtaaatgtaaatatgaagttggaaggaataatcactaatataacaraaattacaaaatataaatgggttaaatccaacaattaaaaggctgagactctcagaatttgaaacaaaaacatatccaacagtatgtggtctccagaagaaacttaaagagacggtagaattaaaaataaaactctagcctgtaatcccagcactttgggaggtgaaggcaggtggatcacttgagaccagactagcaaacatggtgaaaccctgtctctattaaaaatacaaaaattagccggacatgatggtgggtacctgtagtcccagctacacaggaggctgaggcaagagaatcatttgaacctgggagacagaggttgcagtgagccgagattgtgccactgcactctagcctgggtgacagagtgagactttgtctaaaaaaattaaagtaaaattaaattaaaaattctggaaatagatagccctaatatataaaaggaaaacaaacttttccaaatcagaatataattcttttgaattactttttcactcacagtcagttacccaagcttttgagcatactcaaatgccctctgtgataatgatagaatttgtgatgaagcactgtttaagagtgcttcaatgttgtctgagatttttttttctttcaagacatggatgccatttttaagttgatgccagtgctttagtgatcttacgagaacttgcaatcagtgcaaggttttcagacaacaaacagaaatcgtgt

SEQ ID NO: 697393 - DNA, 663 bp, Homo sapiens
gcctgagagcacctgaattccagattttttgagctgaaattcctaaataagtgctccatttttatttcttttttctatattcacagaaaaaaatgtagcattgtgcttttgagagattaatagaaaaatcccacatcactcctgtagtgaaggcccagtgaaatgcaaattaagtgacttgcccagaatagggttgccaaataaaatacagaactgcagttaagtttaaaatttagatcaacagcaaatagtattttagtataggtacgtcctgtgaaatatttgaagcatatatatcctaaaaataaatttgaagtttagagttaggagactttaaccgaaggagaccccaagagtgaagtttttctatccttaccagcattagtatcaagcatcagaagaatatccaatattctgcttcctgattaggagtcacttaaaatactaacttgtctcataaacacaaaatctggactaaaaattctaaacrgttttcattttccaaccataataaatatttacatttaaacaattatgtttgctatttgttttgtcctttaaaagatacaatatgttcaagaatatctcccacgcatagaatatgggtgggagggagatcacctctaaaagacaaatggtaatacaaatcactgtgcttccata

SEQ ID NO: 697394 - DNA, 616 bp, Homo sapiens
gcaatatttggataaacctacacatgtcacacaagatttgtggactttataataaggaagcctaatcactaattcaaatactatgacatgcttgcaagaattaaaagtgcatatcttccattttcttttaattctagtcagttttatatctagcatataattagtcattggttcctttctccaactcacctgtttaattggtattgcatttttttttattttattatactttaagttctgggatacatgtgcagaatgtgcagttttgttacataggtatacatgtgccatgctgatttgctgcacccatcaacccatcatctacattaggtatttttcctaatgctttccctcycctaggcccccacccaccgacaggccctgctgtgtgatgttcccttccctgtgtccatgttctcattgttcaactcccatttatgagtgagaacatgcggtgtttggttttctgttcctgttattttgctgagaacaatggcttccagcttcatacatgtccctgcgaaggacatgaactcaaccttttttatggctgcacagtattccatggtgtatatgtgccacattttctttatccagtctgtcattgatgggcatt

SEQ ID NO: 697395 - DNA, 616 bp, Homo sapiens
gcaatatttggataaacctacacatgtcacacaagatttgtggactttataataaggaagcctaatcactaattcaaatactatgacatgcttgcaagaattaaaagtgcatatcttccattttcttttaattctagtcagttttatatctagcatataattagtcattggttcctttctccaactcacctgtttaattggtattgcatttttttttattttattatactttaagttctgggatacatgtgcagaatgtgcagttttgttacataggtatacatgtgccatgctgatttgctgcacccatcaacccatcatctacattaggtatttttcctaatgctttccctcccctaggcccccacccmccgacaggccctgctgtgtgatgttcccttccctgtgtccatgttctcattgttcaactcccatttatgagtgagaacatgcggtgtttggttttctgttcctgttattttgctgagaacaatggcttccagcttcatacatgtccctgcgaaggacatgaactcaaccttttttatggctgcacagtattccatggtgtatatgtgccacattttctttatccagtctgtcattgatgggcatt

SEQ ID NO: 697396 - DNA, 618 bp, Homo sapiens
gcaatgtttgaatactagtaatgccctattagaacaatggcttagccttgtaatatcactataaatatacaattgagtaattgacttagtcctgtaatttttggttggaatctaactaattgtatagacagtgtttaaatatttaagagaacttaagtttcactgtatttaaaagtcttatttatttatttcttgagactgagttttgctcttcttgctcaggctggagtgcaatggcgtaatctcggctcactgcaacctctgtctcccaggttcaagcaattctcctgcctcagcctcccaagtagctgggattaccggcatgttccaccatgcctggctaattttgtgtttttagtagagacagggtttctccatgtgggtcaggctggtctggaactcccgacctcaggtgatccgcccgcctcagcctcccaaagtactgggattataggcatgagccaccgcgcccgaccttaaaagtctaatttgttagacttamaaaaatcagttaagtatgggaaatgttttctggtcagataagcgaagtgtttaaagaggaagttgaagatattaaattataaacgtagtttaaaatttgtaaaagggcttaaccaa

SEQ ID NO: 697397 - DNA, 1521 bp, Homo sapiens
caggtgatcacttaggcccaggcagctctggggcttgaagtatttcacagagtttgttctacttaaaggcaaagggttaggcttctcaacatctgcccatcattgtcgtcattgaccatgagcctcctgagggactgtgaattctcaggtactttaggctttctgtgcatccgccaatactctgaagaaagttgtgaagaatgccaaagcttgggatgagcacaaagaactgtaaaagatctccaaggatctgggtagagcattaataacttctgctacatgcagtttctcaagacctttaccatataratataaattgtgaatggccaagagaaaaagtgaacacttagtgttttccaaatttatttgaccaccgagtacgcttttcccctcaatccttctcagactgttttttttcttgtgcatgtgtgtgaaacattcttcggtaaatgctgcatatatttttctctcttttgaaaattttgttttaaaacatagattaaaattgtgccaatgggcatgagttggctagtgattccctgctttccagcccatttcagcttattggcctgcatgccgctcaaaagtatgcaatacttttgagagctgaagatatttaatgtcacctagggaaagtgaggaggtgatggtcctttgagatttaaatggcattttggtcttgggtttcaggaactaaaaagcatgtatattacaaaataggtgaatataaaatttgcatacctacaaacaatgataagacactagataaaaggacaatattaaaatatcttctttctaaatactccgttgagtaacagctagtaattttccctctttgtaacacctctggcagatattaacccaaggccaaagcctggttttgtccactttttccagagagctgagaattagtaaagaatgctccaggctaggtgcggcagctcatacctgtaatcccagcactgtgggaggccaaggcaagtggatcacctgaggtcaggcgctcgagaccagcctggccaacatggtgaacccctcctctactaaaaatacaaaagctaggggggcatggtagcacatgcctgtaatcccagctactcaagaggctgaggcaggagaatcgcttgaacccgggaggcggaagttgcagtgagccaagagtgtgccattgcactccagcctgggcgacaaggcaagactctgtctcaaaaaaaaaaaaaagttccaaatttaataaatccatctcagatacagggagaaagagtaggaagggggagaggagagaagaaagggaagaaggaacacccaccatttctgtccatgagaccaaccacccaatcactggaatggcaggctacatttataccctgtcccgaagagtttgcagaaatagctcttccagatctagagaagtgtgagtttatttttttttaacccaaaacatttccaaattctgagaaggaaaaatgtcttagtgtcgcaagagccaaatggtagaggcaatagttgagtcctatacaa

SEQ ID NO: 697398 - DNA, 1521 bp, Homo sapiens
caggtgatcacttaggcccaggcagctctggggcttgaagtatttcacagagtttgttctacttaaaggcaaagggttaggcttctcaacatctgcccatcattgtcgtcattgaccatgagcctcctgagggactgtgaattctcaggtactttaggctttctgtgcatccgccaatactctgaagaaagttgtgaagaatgccaaagcttgggatgagcacaaagaactgtaaaagatctccaaggatctgggtagagcattaataacttctgctacatgcagtttctcaagacctttaccatatagatataaattgtgaatggccaagagaaaaagtgaacacttagtgttttccaaatttatttgaccaccgagtacgcttttcccctcaatccttctcagactgttttttttcttgtgcatgtgtgtgaaacattcttcggtaaatgctgcatatatttttctctcttttgaaaattttgttttaaaacatagattaaaattgtgccaatgggcatgagttggctagtgattccctgctttccagcccatttcagcttattggcctgcatgccgctcaaaagtatgcaatacttttgagagctgaagatatttaatgtcacctagggaaagtgaggaggtgatggtcctttgagatttaaatggcattttggtcttgggtttcaggaactaaaaagcatgtatattacaaaataggtgaatataaaatttgcatacctacaaacaatgataagacactagataaaaggacaatattaaaatatcttctttctaaatactccgttgagtaacagctagtaattttccctctttgtaacacctctggcagatattaacccaaggccaaagcctggttttgtccactttttccagagagctgagaattagtaaagaatgctccaggctaggtgcggcagctcatacctgtaatcccagcactgtgggaggccaaggcaagtggatcacctgaggtcaggcgctcgagaccagcctggccaacatggtgaacccctcctctactaaaaatacaaaagctagsggggcatggtagcacatgcctgtaatcccagctactcaagaggctgaggcaggagaatcgcttgaacccgggaggcggaagttgcagtgagccaagagtgtgccattgcactccagcctgggcgacaaggcaagactctgtctcaaaaaaaaaaaaaagttccaaatttaataaatccatctcagatacagggagaaagagtaggaagggggagaggagagaagaaagggaagaaggaacacccaccatttctgtccatgagaccaaccacccaatcactggaatggcaggctacatttataccctgtcccgaagagtttgcagaaatagctcttccagatctagagaagtgtgagtttatttttttttaacccaaaacatttccaaattctgagaaggaaaaatgtcttagtgtcgcaagagccaaatggtagaggcaatagttgagtcctatacaa

SEQ ID NO: 697399 - DNA, 1521 bp, Homo sapiens
caggtgatcacttaggcccaggcagctctggggcttgaagtatttcacagagtttgttctacttaaaggcaaagggttaggcttctcaacatctgcccatcattgtcgtcattgaccatgagcctcctgagggactgtgaattctcaggtactttaggctttctgtgcatccgccaatactctgaagaaagttgtgaagaatgccaaagcttgggatgagcacaaagaactgtaaaagatctccaaggatctgggtagagcattaataacttctgctacatgcagtttctcaagacctttaccatatagatataaattgtgaatggccaagagaaaaagtgaacacttagtgttttccaaatttatttgaccaccgagtacgcttttcccctcaatccttctcagactgttttttttcttgtgcatgtgtgtgaaacattcttcggtaaatgctgcatatatttttctctcttttgaaaattttgttttaaaacatagattaaaattgtgccaatgggcatgagttggctagtgattccctgctttccagcccatttcagcttattggcctgcatgccgctcaaaagtatgcaatacttttgagagctgaagatatttaatgtcacctagggaaagtgaggaggtgatggtcctttgagatttaaatggcattttggtcttgggtttcaggaactaaaaagcatgtatattacaaaataggtgaatataaaatttgcatacctacaaacaatgataagacactagataaaaggacaatattaaaatatcttctttctaaatactccgttgagtaacagctagtaattttccctctttgtaacacctctggcagatattaacccaaggccaaagcctggttttgtccactttttccagagagctgagaattagtaaagaatgctccaggctaggtgcggcagctcatacctgtaatcccagcactgtgggaggccaaggcaagtggatcacctgaggtcaggcgctcgagaccagcctggccaacatggtgaacccctcctctactaaaaatacaaaagctaggggggcatggtagcacatgcctgtaatcccagctactcaagaggctgaggcaggagaatcgcttgaacccgggaggcggaagttgcagtgagccaagagtgtgccattgcactccagcctgggcgacaaggcaagactctgtctcaaaaaaaaaaaaaagttccaaatttaataaatccatctcagatacagggagaaagagtaggaagggggagaggagagaagaaagggaagaaggaacacccaccatttctgtccatgagaccaaccacccaatcactggaatggcaggctacatttataccctgtcccgaagagtttgcagaaatagctcttccagrtctagagaagtgtgagtttatttttttttaacccaaaacatttccaaattctgagaaggaaaaatgtcttagtgtcgcaagagccaaatggtagaggcaatagttgagtcctatacaa

SEQ ID NO: 697400 - DNA, 490 bp, Homo sapiens
aaaagcccatatatctgcatttccttaaatgtgcccaaattttggaaggaaaagaaaccttcttgaataaagctattcttcctacttgaaactgccaaagtcctaaaaaagattaggtaaggtcagaatgcagccagctccattaatactttgcattaaaggtttcattaatcttttatagattgtatgataataagactattttatctcaaatgatcctggcctggattttgcttgacacgtgttttattaagtgctcttatctgccgtcttaataatacagagctagtattaaaaktttttgttaaatcacatttttccatgcaattccccatttgctgaagttgaaagtgttttatcgttactttattaatatgtgctgtctttctctgctggagatgtatagatagtatttctctttctattatcctagcatgtcctcctactgtgcattatttctgcttgtttcttcccaagacagtgtctagta

SEQ ID NO: 697401 - DNA, 648 bp, Homo sapiens
aatgcagtatgttttccccatgagtgtagttttctaatctggctgacatcctgtatgagatcaaaagtgtgagaagcagaggccaagcagctttcacattttcgtctgttcactgggctaattttggtgagcatttccttcctccttgactggtgagggcattctgaagctaaggaaaaggacagccttaacctgttaaggggcatcctttagttaagatcatataaaccacaagggttaatttgtgtagaaggaaagccctgaggccagggtaggaaattctgatgaatatcaagagcttagaggaaggtctagaagtcaatatccagcatatatcctcccttctctgcaaatctggtgtcttttaacctacctaatggtccagcacacacttttccaggatcttcatgagccccgtagaccagcamttgatgtcttggtattgagtcaacagccatgcaatattgtaccaggcatgggttaataacctacttctactttgatggttgttttcaaagttctactctagtaaatctttctggtactatgcctcattcttactgttctcctggatccatgagtctgaatgtatgtccaggttcctgacatatcacctgataagtaacttacttgcatagccagtatcac

SEQ ID NO: 697402 - DNA, 608 bp, Homo sapiens
ctttttttttttaaccacctgtttaagatgtccagctgtcattctcttaccttgcttctccttgctgctggattgtgaatggaaggccatattcttcaagtcctgccacgtgagagcctccagatacagctcctctatcactctgtctacaaaaggattgtttctttcaaatctgagccactcgacacttctgatgttcctggctttgtctgctgattactgaattcaaacagaaaaaataaagtttcaaaagtcaggcccaagtgaggagctatagrggtttgggacaatcttatgcaagatagatgggaaatgtaaaaacaaaagctgccaactttataatttgctcatttttcttaacataggaaactgaaccttgaatcactttgaagctcttctccagagcagaactggactccatatagttttattgttgttctttttctttattaaaataggggtttattttcatagtaacaaaacttatagcacagtattcaggctgatacaatattttcttcacctagaactgcaaaaaggagattttcactgaaatggtaggaatataggggtgggcagtggtgggagtactatttgtatttatgtaa

SEQ ID NO: 697403 - DNA, 608 bp, Homo sapiens
ctttttttttttaaccacctgtttaagatgtccagctgtcattctcttaccttgcttctccttgctgctggattgtgaatggaaggccatattcttcaagtcctgccacgtgagagcctccagatacagctcctctatcactctgtctacaaaaggattgtttctttcaaatctgagccactcgacacttctgatgttcctggctttgtctgctgattactgaattcaaacagaaaaaataaagtttcaaaagtcaggcccaagtgaggagctataggggtttrggacaatcttatgcaagatagatgggaaatgtaaaaacaaaagctgccaactttataatttgctcatttttcttaacataggaaactgaaccttgaatcactttgaagctcttctccagagcagaactggactccatatagttttattgttgttctttttctttattaaaataggggtttattttcatagtaacaaaacttatagcacagtattcaggctgatacaatattttcttcacctagaactgcaaaaaggagattttcactgaaatggtaggaatataggggtgggcagtggtgggagtactatttgtatttatgtaa

SEQ ID NO: 697404 - DNA, 554 bp, Homo sapiens
atcgtttgtgactcaaaaacagagtcaattaccaaacaatttttattctatttttcacacagaagcatcgtacatatgcctcctaactttaactccctacgacctactactctaacatttgctgtggagtaattttgtgccagaaactgcaaagatgtttacacagattatctctggtcctcataacyagccggcaaagcaggatcagttatcctcattctacacattagacaaatgaggctcagaaaggcttagtaaaaggttgatgaaattccaagaaaacacaggtttgtgtggttcaatgcctactgcctttcagctgctacacaaagctacctttctcccatcgtacctgtgataaaccctctttgactggaattgcattaattcaacagcttcctaagtggatctccctgcctcaggtctcaccaccggtcaaccctctctaatacttttaataattggatatatcctttataacagctttcagtgatctcttaggcacaagaaacaagagcctcacaagacaacttattcagtaaagcagaaggatg

SEQ ID NO: 697405 - DNA, 638 bp, Homo sapiens
caataattggaattgtaggatagatacctctctctgtatataactatatcattcatttattcatttattcacagaataaactttgagttcctacaaatgacatgcagtacagtacatttgagtttgaaatgattttaagacaggtgagatgacatgggtatcaaatgagcagttgtatttatggaatggagatgagaatttgaaactgaacaacatttgaagccgtggttatggaytatattatgcattagtatgtaagactatgcagggtgataaggcaaacagcctgttgactgacacctgggaaacagcaatatttaataagtggaagattaggtgatcatagatataactgagaagaaccatccagaaaggaggaaaattagcagagagaagtgctacaggagtcaatgatgaagaaatattttaagaggaaaagtataggcaaacatccaaaatgctcatgagagtcaggtaataaaaatattagatatcaatttgattttacaaaacaaaatgttaccttggagaaaataatttctgaggagtgatagatacagagggaatgcatgggagatcaagaggtatagataacatttctaaactaaatttttaaaagtagatttgttaagaagata

SEQ ID NO: 697406 - DNA, 1293 bp, Homo sapiens
gtgcctgtagtcccaactgttagggaagctaaggcaggaggattacctgagcccaggagtttgacttcagcctgggcaacaaagtgagacctcatctcttaaaaaaacagtaaaaaaaaaaggattacatgttgctagataatttaccacaataaattcaatcaatacatgtttgttgaaattctatgtgtagggcattaggctaatggtggttcttatcattctgagaagatctgaactagcaagtgttacgggtggattgtcttgactacaagttttccaggttgttggcattttcaacagagaattggacaaaatgcacaaacaaagcaacgaaagaatgaagcaaggaaagcacagatttattgaaatgaatgtacactccacagagtgggggaaggctccagcaagtgacacaagaacgctggttactttattttctgtggcttaaatactctctagaggtttcccattggttacttggttacacctgatgtaaataaatagtgacctgtgaccagtctcattggttgtggaaggcgacaaatcagaggctgaagtgaagttacaaagttacaccctatgcaaatgtctgattggttgcaggaagggaccaatcagaggcactttccatttttcatctgctacacagaaaggtgtgagtggatccttttgttacttgggcgtggaaagttggagttttccttttgattcatttctaggaagtcagcacaaatcagccttatgttccctgcctccagaccttattctcctgcctcatttccccccctcgaggaacgtgataccctttgatctttatgggaggcagagggacaratggtctttcttctgtaactgcttcatgctgacttgtggcacactccctacctattggggatcaagggactctcatcatgctctgtctagtggagtcagggtagcttcttgatggccagcagttgtgccttcacctggacctggctggaaaccttgtcacatgatcatctggagcttgatggtctctaggcaagaggaaatgaatacaactacccagaggtatttttgtaccagggaatcaaagggcaactagatgtctcaggattagtacagtcttcccaagggaaaatgtgaacccagctagtgggcttaccttgacagtacttagactgtatatcctttaaagtgcccttaactagggatagtttccatgaaaaccatacaggttttttatatgatgcattttgggtaacttcatagcttacatgatcatgtagggggttaatctctagggca

SEQ ID NO: 697407 - DNA, 1806 bp, Homo sapiens
gaagcaaagactactttgggcatctcaacagatgagatatgcagttgagctttggaaattatgcaggtggaaataaattgatttagttaagcactttatgcaatagctttttattcaccagacttaaaaaaattactcacaagcaaaatatgtggaaaaagcttatatgtaaactcagtctacactgatggcttatatataaatatgtagatttgcattcaattttatatcaaaaatgagattgaaatagaaaattgctatatattttagcaaaatggttctagctattgtgcaagtaaatttcatctaagtcaaggatagaaaagaagttagaataagtgcatagtgcagcttttcaaataattgggcttacaaaaattttatttcataaacagactttgcaatcacacattttgcccatttgcttttattcatgtcacctgcttcrtttcctggctaacccccaacacagtgttggtgcccacttcagtaaattaacaggaattcaagcatcttcctgtagtcaagctcatgtaattaactctgcattatccatgtgtttttaattctagaatgtttccctttgcatctatgcatacctctaaatgccaccttatcctgtcagctgatatctgcttagggaatgagatctaatttgaatatttaccaaagtaatgtataattagcctagctactaatctataatgcaatgcatttgtggccaaatagaaataagcttttaattggtagcatctttgctccttgctgttagcctacattattgagaacttactgaacccttgtaaatgatagtatttggaggcaagttgctgtatttcctttaggctcagtgacttaaagtttctaaatctactgttagagttttttaagcccacactgatttattttaatacttggaacatgcttacttttataactagacaaatgggaagtttctgcattctagttatctagtcttccaattactaattgcttgattcatcattttcttccaatctgagatgtatctcttgtttatattatgtcaagattatgttggcaggtgtgttttctcccaattaagcaatgaaataatgtagtatataaatgaatggctgacgctgtgtggctgttgcagcagtgactgttggaataggagcaagaattccttgtctaatgattcagaaactgacaaacatatttagttttgcagtgccttccctgagcctttatagttctcaggtgctagtgttatccattgataatgattttgtgtgcagctgcctatgttttccttttaaagcagctctaatgtatcttttcaatcatagaatactctctcagtattttggtttgttttttttttaattttcaggtggctagaagagcagggcataaggggagggtgaaaagtagagataaaggttatttgccttatttgaagagtcacagtagatttgatgcaacatcaagagagacattgcaatgatttagatttatatgatgtgcaatatagctggatacttgagatgaactattggcaaatgaagattgccaaaggaacaaaataaagatgcagtcatccttggataactgtacttttcctcaagattttcattcagtttgagaattaacatttttttctaaatataaagcaatagctacctagacaagaggtgtgaaactttaaaagcttgaattgtttcatgaagaaaaaaaaattttaaaagacaatcattttgggcttttaaatgcctgagaaactttgatagccttttatattctggagaaaacaggaagagaaac

SEQ ID NO: 697408 - DNA, 1806 bp, Homo sapiens
gaagcaaagactactttgggcatctcaacagatgagatatgcagttgagctttggaaattatgcaggtggaaataaattgatttagttaagcactttatgcaatagctttttattcaccagacttaaaaaaattactcacaagcaaaatatgtggaaaaagcttatatgtaaactcagtctacactgatggcttatatataaatatgtagatttgcattcaattttatatcaaaaatgagattgaaatagaaaattgctatatattttagcaaaatggttctagctattgtgcaagtaaatttcatctaagtcaaggatagaaaagaagttagaataagtgcatagtgcagcttttcaaataattgggcttacaaaaattttatttcataaacagactttgcaatcacacattttgcccatttgcttttattcatgtcacctgcttcatttcctggctaacccccaacacagtgttggtgcccacttcagtaaattaacaggaattcaagcatcttcctgtagtcaagctcatgtaattaactytgcattatccatgtgtttttaattctagaatgtttccctttgcatctatgcatacctctaaatgccaccttatcctgtcagctgatatctgcttagggaatgagatctaatttgaatatttaccaaagtaatgtataattagcctagctactaatctataatgcaatgcatttgtggccaaatagaaataagcttttaattggtagcatctttgctccttgctgttagcctacattattgagaacttactgaacccttgtaaatgatagtatttggaggcaagttgctgtatttcctttaggctcagtgacttaaagtttctaaatctactgttagagttttttaagcccacactgatttattttaatacttggaacatgcttacttttataactagacaaatgggaagtttctgcattctagttatctagtcttccaattactaattgcttgattcatcattttcttccaatctgagatgtatctcttgtttatattatgtcaagattatgttggcaggtgtgttttctcccaattaagcaatgaaataatgtagtatataaatgaatggctgacgctgtgtggctgttgcagcagtgactgttggaataggagcaagaattccttgtctaatgattcagaaactgacaaacatatttagttttgcagtgccttccctgagcctttatagttctcaggtgctagtgttatccattgataatgattttgtgtgcagctgcctatgttttccttttaaagcagctctaatgtatcttttcaatcatagaatactctctcagtattttggtttgttttttttttaattttcaggtggctagaagagcagggcataaggggagggtgaaaagtagagataaaggttatttgccttatttgaagagtcacagtagatttgatgcaacatcaagagagacattgcaatgatttagatttatatgatgtgcaatatagctggatacttgagatgaactattggcaaatgaagattgccaaaggaacaaaataaagatgcagtcatccttggataactgtacttttcctcaagattttcattcagtttgagaattaacatttttttctaaatataaagcaatagctacctagacaagaggtgtgaaactttaaaagcttgaattgtttcatgaagaaaaaaaaattttaaaagacaatcattttgggcttttaaatgcctgagaaactttgatagccttttatattctggagaaaacaggaagagaaac

SEQ ID NO: 697409 - DNA, 603 bp, Homo sapiens
atagtttccaaagtgtctcgtatagttcataacaatttgtgtgttcaacagtggaagttatacatacattttgttgttgattttttttactgtcttttttttgctacagtataagataatgaaggcagtgatgactgctgacttggttcaccaacactctcctctatgcttagtacaatgataacatgttattggtgcttggtacatacttgttaattgattgaatgagcaaatagatagataaatatatgaatgtataaataaattcaaggccagagcaatgaagagagaataagggcttagactaggaaaaaaatgggcctataatcccagcactttgggaggcsgaggtgggcagactacttgaggtcaggagttcgaggccactctgcccaacatggtgaaactccatctgtactaaaaatgcaaaaaatagctgggcgtgctggtgcatgtctgtaatcccagctatttgggaggctgaggtgggagaattacttggacccaggaggcggaggttccagtgagccaagatcacaccactgcactctagtctgggcaacaagagtgaaactccacctcaaaaataaataaataaataaa

SEQ ID NO: 697410 - DNA, 640 bp, Homo sapiens
aacacccaggggctgtgggcaggtgaatatggttttattcagcagctctctcagcagcagctttttcacactagctccctcacactgtctacctttatcatggctgtttgctgtggctctgcgcctcctctcggcagcctgctttgtgcctcctgtggtccccacacctgcagctgcacagctgtctctcccttgccttcatggtcagcagcttaactctttccctctgggcatgagtgtgagcatgttgagccctgttgtgccctggctcctctctgtccatctgtaagacagacaaagctggttctctctctttctttgggcgccagcccgagccatgctgaactgagccctgtgcacaacatcagcagggcatttatamcttctgcagacaatagtggctcagagactagtgtgaacttacacaaacaggttatataacaagtggagtatgcgcctggcaccttaaactcactgagtcatgcaggcctggatgtctgcctcggcataatcttgaccaaagcacacccatataccttatagcttaatttttcttcaaagaatctgtgttataaaactatcaacatttgtcaaattatctctattctttaggagaaaaatcaaatatatatctgtccct

SEQ ID NO: 697411 - DNA, 1349 bp, Homo sapiens
tggaaatacactctgtcaaagcataccatcaagcctctttgattagattagtatctagaaaactgtccttactgaagaaatgacaaagaatcatgctatattcaaaagcaggcaatgttctttcatttgcaaggagaaatctagaagagaaagctttcttccagtcaacagtactgcctgattataacaatgatgcatatattgcttaaaatccagcttgacaataaagtcaaccatcatctacagctgtaaggcttaagcaatcaccatctctaagccacatgtgctttaatcataaaatgagtgataatattttgtcttcataaatcagagaattgtactaaagaattccctttctacattttgtgatcttctacatcatatattcaatattttgasaaaaatgcctttcatcgactaggaacagaaacagctgtcctactgacttacaaggcatgatcatacaagtttccttcaatacttccatagaggaatataaccttaagaaacccagcaatagcaaacttacacttcaaagaagcatttaaaggaaagcctcagtttttttagtataaggcatataagtaattcttgggaatttttcatttaagtcaattttggtagaagacagactatcacaaaacacatttcactggatgtgttaatcactcaaaatgcagaaaatacttaagaataataacaacatcattaagagtttaactgctactaatctacatttttgtcctgaaactttgggagttttctacggaacaaagacccagaaactactttttaatataaaaaaatttgaaaaacacagaatagtagaaaaaaattacacaaaaataaaaataaggcttcattcaattcttctgtgaacaaataggttcacgtagaataaagagaagataaagcatctcaaattactactggaaaaaatcctttgaaactatcctaggaaaataattcaccaccatccctctccccagaaaaactaaaaatccatgaagatagctgaaaaggatgcaaagctaaaaaataacaatacaataattctatctaaaataagactaaagcatttctttattctacagtttaagaaaaattaaactaaagccttataaacaacagaaaagttgttttttagtgtcctcaatcttagaaagtggaactgagatactgcttttatgagattctttagtatccataggacactaaagagaagaaatatatcaacttgaaattaaagcataaattggctatttactacttcccagattaccttaaaacaatgcaattactatgtgtgtgtcacaggctcatatgaatatttattgccaatatctgaa

SEQ ID NO: 697412 - DNA, 2215 bp, Homo sapiens
cagaagagaagaagtaggtgtgcctataaaaggtcaacatgaggaatccttgtgatggaaatattctgtatcttaactgtacgaagtgtcaatatcctagttgtggtattgtatgatagctttgcaggattagagaactgggtaaagggtagacaagatccacaattatataaaaataaaaagattacttaaaaatagggcaaggaataaaaagaragaaggattcagaattacccttggaaggtacaactatgtcctccattcataggtgctgaatatatatatgtatgcgtcaaaatataccttattctacttcaacatgggtagcctcttaccccaaaacaagctacagttatcttaccgtgatataaatttttaaaaagaaaaaaaatgcattagcgttgtatagagttcctctaacacaaatgtttggtataatatacttattcagtataactttcttatattctaatagttatcactgtatgtttaatttacttcttatttacttatttttatatttgcttatattcaccttaatggcattttcataaaatattggctgcagctaaaacacacacacacacacacacacacatacacacgaggcaggaactctcttttctgcacactgttgtcttcggttgaagttctctctttcttgtgtactggggcctggagctatcccccctggttcccattcacatttttccggtgcagcagtggttttggtttcccttgtttttttctcttttccaggcctaaccaaaaatgaggtggccacgtggcagagacccagtgtctgcccagaaacagaatctagcacatggtacttgtctgcaccatcatcccaaggagatgtgaccacggaaaagaaggcctggcaattggtggcatgtgtctaagagagtctggaaatgtcaggggcatcggtccctgaggggctgcagatgagattctgaggcaactggagtttagtgctctctccactcccctctcctccctttcaagtctcatagaactctggccatctagatttccgttagtcttcaaaaaaaaaagacttaaaaaatttcaaaataagtaaataatcattacagaaatacaaagatgaaaaaattagataataggccgggcgcagtggctcacacttgtaatctcagcactttgggaggctgaggcgggtggatcacctggggtcaggagttcaagaccagcccggccaaaatggcaaaaccccgtctctactaaaaatacaaaaaattagccgggcgtggtggcagacgcctgtaatcccagctactcgggaggctgaggcaggagaatcacttgaacctgggaggcagaggttgcagtgagccgagatggtgccactgcactccagcctgggcaagaaggcaagactccatctcaaaaaaaaaaaaaagaaaagaaagaaaaaagaggatgataaaaattatcaaaatcccagttgctagtgataacatttttggtggatatatacacacaaacacctattttcccacttagactccttggtttgtacctccccccagccttccgggtaaagtaaaaacatgttatgtgaaaaagctatattgccataatacagaaacattctgcataaggccccgtattacatgttcccctagcaaagtcctctgtaaaaaaatgctctccctacctacaaagtgtgcatgtatgtatatttttttcttgcaaattatataccatacagacagttttgtaacctcttttttttccactcagtaatgaatcttgaacatctttccaggtcaataagtatgcttttatgatatcttaatggctgcacaatattccattgtatggctgcaccataattaatttaactagtctcccaatggtggacaattaaattgtttccaaatattttttgctgctgtaaacaatgttccaataaatattctatagcaaaatctttgccctcatccttaattatttccttaggaaacctccctggaagagaatagctggatagacatttgtacattgttgaggttagagaaaggttttatccaattgtcctggagtttatttgctcccatcagctatgtatgaagatgtccacttcttatcccttctccccaacacacacactgtcttcatcacttgagtgtcattctaattttcaagaagctgccaattaatttgtgatttgctcttaacatatgca

SEQ ID NO: 697413 - DNA, 627 bp, Homo sapiens
ttttacccaaaacggtgactatagttatgttacctgcgactcaatatgcattcttcttttcttcttcactagtattacttcagtttggtcaggggctggcaattttttcaatttaaaatttcatttcctagatttacatttccatgaaactaagtttccaagtggaaacttccagtttcctggagaggaagtcctttggagagagttttgttttctttatgtagacaccaccactctttccttcttgctgcttccaccttcctcataatgtctgaaattaaggtctggggttttgagatacaggaactattttgcaaccatgaaacaagtcacacattgaagatggcacagttgaaagagagaagctgatactaggacatttgtgatagcatcaagccactgcatcacccagagctgcccactccagagttcattcaactatacaaaacaaacctttatttgataaagctaccatctctgaaggttttcttttcatgcattttatctgaataccaattgtgataggatgcccaaatagttttcaccttttctccaacatttatactaagctcaactctgaacactgcgatgatagaaatttaaaacttgagrgagcttatctcagcc

SEQ ID NO: 697414 - DNA, 1805 bp, Homo sapiens
taaatatatctaatacattttagagtataaatgttcaatgtattattgtagatataatatgaaactgtgcatgggagtggagtgaggaataatgaagaaaaggctcttgctgaaccaatttacctaggggagatcagaatatgccaccccaatttaggatggtttggcataaggtttgctgagctgaaggcaattaagaagcagatgaagaaaagctctctgcctctatttacctaaaaggacgatatacatttacaaagacaaaaaatatcccccttcccctctaaaccggggaggacaaatgttatccactgaagagaactttagactgttatgggcctggagatggcaccagaggaatctacattaacaagctttacttagcctttatctgccttttctttgccttgcctcaagttgctgtctttagaaattcaaaatccttttcctttgtcatgtcgcttccctaaaactttactgttctttgttgaacaatgcgttatataagctgaaattcaaactcacctccttggcggctactcattcccttgctgtcttccatgtatatatgaaatacacgtcaataaacttctctggcttttctcttgttaatctctcttttggtccatgggtccattccaactaatactttatcagaattgaggaaaaaaatattattcctcttccaaatagctatttagtattttctggctgacagagcaagtgtcttgacagagaactcacatttcattctctttccaacactcttcttttgatacactttaattataatccttaaaaatcagtctctgtgttagaagttgacatgatatatgaaggaaaagggccactttttaattctggaagttaatgcaataacataaagtagaaaaatagcatattttgaaatatatttcatgtcaaacacagacatatccttctaaaatgcagcatcaggaaatacttaggcataataacaaaagttcaaactatgatttcaaaacagagaatttgacaattcaagtatggatatgataagcctttattctgatttttttccaaatattccgacagtggaaaatgttcaaacaaaatttgaaggaggaggactgtgtactatcttattttccctcaatatttttcttatatactttaaagtaattttattctgcaatattgtgtcgaactatgaatttctcaaccattgtttctgaattgcaataaagtcaaaccgagcaagatggctttaatattgccctcatcttgacgaaactttaaacacttttcttcctgactgcatgtcctgacctttattttcttagagtgtttacttcagaaaattttccattgtaaattcttcctatgactctttgagatgtaaatagtctcccagccacttgtgagttttataacccagggatgtcttaaaaaacttggagacatccctttgaaatattgttatccagaaagatattttcccagtctcccagtttgtatggataataggagcctaaattccataagcaacaattaaacaattaaatgtggtccaaactcagggaacaaccttcccttcacttccyccaatgcttttccactaaaattttcttgcattgtgtttcaaaagaactgagttcaatttctatccactattgcaatagccttgaataaagtcttgcctgtttaactctatctggtataatttttcttcaagagaaccttaattagtcaagttctattttggcaatgggattcatattggaacttaattttatattataaaaatggataaataatcacaaaca

SEQ ID NO: 697415 - DNA, 1805 bp, Homo sapiens
taaatatatctaatacattttagagtataaatgttcaatgtattattgtagatataatatgaaactgtgcatgggagtggagtgaggaataatgaagaaaaggctcttgctgaaccaatttacctaggggagatcagaatatgccaccccaatttaggatggtttggcataaggtttgctgagctgaaggcaattaagaagcagatgaagaaaagctctctgcctctatttacctaaaaggacgatatacatttacaaagacaaaaaatatcccccttcccctctaaaccggggaggacaaatgttatccactgaagagaactttagactgttatgggcctggagatggcaccagaggaatctacattaacaagctttacttagcctttatctgccttttctttgccttgcctcaagttgctgtctttagaaattcaaaatccttttcctttgtcatgtcgcttccctaaaactttactgttctttgttgaacaatgcgttatataagctgaaattcaaactcacctccttggcggctactcattcccttgctgtcttccatgtatatatgaaatacacgtcaataaacttctctggcttttctcttgttaatctctcttttggtccatgggtccattccaactaatactttatcagaattgaggaaaaaaatattattcctcttccaaatagctatttagtattttctggctgacagagcaagtgtcttgacagagaactcacatttcattctctttccaacactcttcttttgatacactttaattataatccttaaaaatcagtctctgtgttagaagttgacatgatatatgaaggaaaagggccactttttaattctggaagttaatgcaataacataaagtagaaaaatagcatattttgaaatatatttcatgtcaaacacagacatatccttctaaaatgcagcatcaggaaatacttaggcataataacaaaagttcaaactatgatttcaaaacagagaatttgacaattcaagtatggatatgataagcctttattctgatttttttccaaatattccgacagtggaaaatgttcaaacaaaatttgaaggaggaggactgtgtactatcttattttccctcaatatttttcttatatactttaaagtaattttattctgcaatattgtgtcgaactatgaatttctcaaccattgtttctgaattgcaataaagtcaaaccgagcaagatggctttaatattgccctcatcttgacgaaactttaaacacttttcttcctgactgcatgtcctgacctttattttcttagagtgtttacttcagaaaattttccattgtaaattcttcctatgactctttgagatgtaaatagtctcccagccacttgtgagttttataacccagggatgtcttaaaaaacttggagacatccctttgaaatattgttatccagaaagatattttcccagtctcccagtttgtatggataataggagcctaaattccataagcaacaattaaacaattaaatgtggtccaaactcagggaacaaccttcccttcacttcctccaatgcttttccactaaaattttcttgcattgtgtttcaaaakaactgagttcaatttctatccactattgcaatagccttgaataaagtcttgcctgtttaactctatctggtataatttttcttcaagagaaccttaattagtcaagttctattttggcaatgggattcatattggaacttaattttatattataaaaatggataaataatcacaaaca

SEQ ID NO: 697416 - DNA, 1414 bp, Homo sapiens
tcaaggactttagcctagggatcttgactccctagcacagaattatttttattttaccaactacctccttggctgcgtcatttagttcaagtcatcaatgttggccaaatcatggcattctggaattgtaacttgttttatgttttttgattgaaaaaaataacttggtatcaaattgttatttttaagttattacaaacracaaaccaaatggaatacacacaccctttccattctggtcaaaatcagtttttttttgtttttttttttgtttttttgagacgtagtcttgctctattgccaggctggagggcagtggcacaatctcggctcactgcaacctccacctcccgcgttcaagcaattttcctgcctcagcctcctgagtagctgggattataggtgcacgctgccacaactggctaattttttgtattttaaaagagacggggtttcactgtttgcccaggccggtctcaaactcctgagctcaggcaatccgcccgcctcagtctcccaaagtgctaggattacaggcgtgagccaccaagcctggcctaaaaccaatttttaaaaatgaagtgagtatttcatggaaattcaatcctttttgtgatgctttaaaatatttaatttctttcacaaatattatttgatcttccctaaagacataactaataatccaaagaaaacatgctagcatgtgatttttagactatcataagaaatgaaagcgcaattaaaacagaaaaaaggcattctcatcttagacataagacataaatttgtgcaaaaaaccccccgaaaattcccattatatggtaaaaattgtttctaaatgagacaaactactcattgaatcatcaaactactatgaatcatcaaactaccaatcatttattttaaaactatggcagggaaatggcttaggaaatcatatggtttaacggtttcagagatttctaattggtgttatttttagagaatatctgaatttgatttgcctgtcattcctttggattgtgctgaatcacaaatgcacacgtgaactgtaaactctgagagtatttaaagggacacatacacttggggtgctgtcaacaccaatgagagagagagagagcaggagagacagtgagaaaaagagactgtattggagagtcactcaaattgtgctgcagtaaactgtgaaggtcgcatgctgtgcttagaggatgtcagaatcatgccacttatcttgatattaaagttgccttttactatcaaaatagattagaagcagctattgtcaaacaacatatccaagaaagccaataagatagcataaaaatcaatattggggataaaaaggaagtaaatgctcatgcggtttatttctaccaaatccaaactgggacagtttctgctgttagat

SEQ ID NO: 697417 - DNA, 625 bp, Homo sapiens
ggaatgcctgtggggatgaaaagccactaagagataataaaccatagaagagcgtatgtggagtgaaaacggttgatctgaaggcgaagcttgcagccagtcagctttgcctggcatgctggttgtggggaggtagaggcttaacgtttggtcttgtctagccacagagcaggctaggcagggacagggcctggctgcggaggtggaaggcctgggctctagtctgagcttggctaccacacacttggaggcttaggtctgctgtttgctctgttcagaacctgttgaggttctgaatcttctacacgaaggcagatgaaagctgaaaattgactttgatatgtgattaaagtccataggtggtttggtgactctcagacaaagattaagtagacttttgaggctgtgacttcactatagagacacagtgtgcagaatggattgaggctctcatacgcaaatccaatccaccgttaagattgtcactcgtggccaggcatggtggctcacgcctgtaatcctggcactttgggaggccaaggtgggcggatcaygaggtcaggagttccagaccagcctgaccgacatggtgaaaccctgtctctactaaaaatacaagaaaaaa

SEQ ID NO: 697418 - DNA, 626 bp, Homo sapiens
tctgataaaatgggattgtttctactgaagactcatctggctacaaaacagaactactatcaacctgagaaagaatccagctgttgctttaaaattaacaacttcccattacatcatcaagcctgataatcatcttgcctgcaactccaattccatctcaccctttaatactccttctttcccctaggtcactgggaagcttgcttgtggcactctctgggatcctgtttccagttactggttgcgtaatgtattgataaagcaaagccaaatatgagtaagaagaaaagcctaattagaaatgaagcacgcagtgtcccaasaagaaaaatgccagggcttcaaaaataggaaatcagtgatgcatagtttcttctgtcactgaagaaatcatcccagtacttaataagccagaaaatggattaagcagatggggggaagttgtcagcggcaaagaatgggcacctacggagaaacagaattatttagaatcaaaatgactgactggcacacattaaagaatatctgtttgtgtcttgaaatgaatgctatagaaaatatagtaggtatgaaatatagaaaatatagtaggtatgaaaacaaatgcaaaatcggccaccaagaga

SEQ ID NO: 697419 - DNA, 605 bp, Homo sapiens
taccttgcgtgttttattctcttcatattataaataaaaaacaactgcctgaacattttaaactcaaggccacattatgaatgagctataatgcttgtcttgctgtaaaaaagagtttaaaattcatgctcytgcagatactagagatagattttctgcctgtaaaactattggaggactgctctgagtgttgaatgtttattctcatcaatttgctattttttgtaaaaatctatagctgtaatacaatagctttcatctctttctttagtctgcaagtataggcatacctcagagatgttatgggcttggttacagaccaccacaataaaatgaatattgtactaaagtcacacaaattatctggtttcccagtgcatataaaagttaggtttatgctacactatagtctatttaagtataaagtattatttctaaaaaatgtacatatgttaattataaaataaattattgataaaaatgccaatgatttcctgaaccttcagtgagtcagtctttttgctggttagggtcttgacttgatcttgatggctgctgactgaaaacggtagtggttgctgaaggttagagtggttgtggtaatt

SEQ ID NO: 697420 - DNA, 605 bp, Homo sapiens
taccttgcgtgttttattctcttcatattataaataaaaaacaactgcctgaacattttaaactcaaggccacattatgaatgagctataatgcttgtcttgctgtaaaaaagagtttaaaattcatgctcctgcagatactagagatagattttctgcctgtaaaactattggaggactgctctgagtgttgaatgtttattctcatcaatttgctattttttgtaaaaatctatagctgtaatacaatagctttcatctctttctttagtctgcaagtatagrcatacctcagagatgttatgggcttggttacagaccaccacaataaaatgaatattgtactaaagtcacacaaattatctggtttcccagtgcatataaaagttaggtttatgctacactatagtctatttaagtataaagtattatttctaaaaaatgtacatatgttaattataaaataaattattgataaaaatgccaatgatttcctgaaccttcagtgagtcagtctttttgctggttagggtcttgacttgatcttgatggctgctgactgaaaacggtagtggttgctgaaggttagagtggttgtggtaatt

SEQ ID NO: 697421 - DNA, 605 bp, Homo sapiens
taccttgcgtgttttattctcttcatattataaataaaaaacaactgcctgaacattttaaactcaaggccacattatgaatgagctataatgcttgtcttgctgtaaaaaagagtttaaaattcatgctcctgcagatactagagatagattttctgcctgtaaaactattggaggactgctctgagtgttgaatgtttattctcatcaatttgctattttttgtaaaaatctatagctgtaatacaatagctttcatctctttctttagtctgcaagtataggcatacctcagagatgttatgggcttggttacagaccaccacaataaaatgaatattgtactaaagtcacacaaattatctggtttcccagtgcatataaaagttaggtttaygctacactatagtctatttaagtataaagtattatttctaaaaaatgtacatatgttaattataaaataaattattgataaaaatgccaatgatttcctgaaccttcagtgagtcagtctttttgctggttagggtcttgacttgatcttgatggctgctgactgaaaacggtagtggttgctgaaggttagagtggttgtggtaatt

SEQ ID NO: 697422 - DNA, 1106 bp, Homo sapiens
gagaatttattttctgagagataaaatacgaagcagaaatcagaaagatgaaatctgacaggtattaatctacaaaacgaatctacgaaasaaatagatatttatttatacttctcaacctacaaataggtttcataaattctttcatatatgtcttagttcattcaggccatgataacaaaattaactgggtagcttataaacaacataaacttatttctaacagttctgtaggctgggaaatccaagatcaaggcactggcagattcattgtctcgcaagggccttttcaacctagacagcatcttttggtcataaccttacatggccagaatggctacctaactctctggagtctcttttataaggcacaaattctactcatgaaggctccaccttcatgacctaataacttcccaaaggtctcgcctcctaataccatcaccttgggggttagaatttcaacacttggggggacacaaccattcggaccacagcaatatgcatagaatattacattataaatataaaaaatgtaatagtaaaaatccttcaaaagatcattgcataaaagtgcagatgttccaagacacaggaattggataactaaaaatttatataataatttattaatattaaataggtcagaaaaaaatagagaaatcaaaagttgtatattgaaaaaatcaataaaattgataaacctttgtctagactgatcaggaaaaaaaaagaaagaggacacaaattaccattatccataataagagagttaacatcagtagagattctaaagatattaaaaataataagatggaaatattataggcatcactacatcaataaatttgacaaccgtaatgaaaacagacaaattccttgagaggcacagactaccaagattcactcaagaagaaacaggaaacattaatagccctctatctattaaggaaattaaatgtaaagctcaaaatctcataagaaaacttcaaccttcattagtgaattcttccaaacatttaaggagaaataatatgaaatatatacaaactctttcagaaaaactgaagaggaggaagttttatttaatttttctatgaggcaaa

SEQ ID NO: 697423 - DNA, 1106 bp, Homo sapiens
gagaatttattttctgagagataaaatacgaagcagaaatcagaaagatgaaatctgacaggtattaatctacaaaacgaatctacgaaagaaatagatatttatttatacttctcaacctacaaataggtttcataaattctttcatatatgtcttagttcattcaggccatgataacaaaattaactgggtagcttataaacaacataaacttatttctaacagttctgtaggctgggaaatccaagatcaaggcactggcagattcattgtctcgcaagggccttttcaacctagacagcatcttttggtcataacctyacatggccagaatggctacctaactctctggagtctcttttataaggcacaaattctactcatgaaggctccaccttcatgacctaataacttcccaaaggtctcgcctcctaataccatcaccttgggggttagaatttcaacacttggggggacacaaccattcggaccacagcaatatgcatagaatattacattataaatataaaaaatgtaatagtaaaaatccttcaaaagatcattgcataaaagtgcagatgttccaagacacaggaattggataactaaaaatttatataataatttattaatattaaataggtcagaaaaaaatagagaaatcaaaagttgtatattgaaaaaatcaataaaattgataaacctttgtctagactgatcaggaaaaaaaaagaaagaggacacaaattaccattatccataataagagagttaacatcagtagagattctaaagatattaaaaataataagatggaaatattataggcatcactacatcaataaatttgacaaccgtaatgaaaacagacaaattccttgagaggcacagactaccaagattcactcaagaagaaacaggaaacattaatagccctctatctattaaggaaattaaatgtaaagctcaaaatctcataagaaaacttcaaccttcattagtgaattcttccaaacatttaaggagaaataatatgaaatatatacaaactctttcagaaaaactgaagaggaggaagttttatttaatttttctatgaggcaaa

SEQ ID NO: 697424 - DNA, 404 bp, Homo sapiens
  misc_feature 2, 3, 4, 5, 6, 7, 8, 9, 10, 11, 12, 13, 14, 15, 16, 17, 18,19, 20, 21, 22, 23, 24, 25, 26, 27, 28, 29, 30, 31, 32,33, 34, 35, 36, 37, 38, 39, 40, 41, 42, 43, 44, 45, 46,47, 48, 49, 50, 51, 52, 53, 54, 55, 56, 57, 58, 59, 60,61: n = A,T,C or G
  misc_feature 62, 63, 64, 65, 66, 67, 68, 69, 70, 71, 72, 73, 74, 75, 76,77, 78, 79, 80, 81, 82, 83, 84, 85, 86, 87, 88, 89, 90,91, 92, 93, 94, 95, 96, 97, 98, 99, 100, 101: n = A,T,C or G
tnnnnnnnnnnnnnnnnnnnnnnnnnnnnnnnnnnnnnnnnnnnnnnnnnnnnnnnnnnnnnnnnnnnnnnnnnnnnnnnnnnnnnnnnnnnnnnnnnnnnaatctcttctcttgaaaatattacttagttttgaataaccaaaatatcaggtaatgacctactccggataccaacattggtagattggaatatgcttactttcacttaagaatttcagaatatcggggtcttggttccaagatggctgaataggaacrgctcaagtctacagctcccagtgtgagcgacatagaagacggtgatttctgcacttccacctgaggtactgggttcatatcactggggctagttggacagtaggtgcaggacagtgggtgcagcccatggattgtgaactgaagc

SEQ ID NO: 697425 - DNA, 1021 bp, Homo sapiens
tttttattttaagacagagtctcgctctgtcacccaggctggagtgcagtgacgcaatcttggctcactgcaacctccacctcccaggttcaagcaactctctgcctcagcctcccgagtagctgggattacaggcgcctatcaccacgcttgactaatttttgtwtttttagtggagacggggtttcaccatgttggccaggctggtctcgaacttctgacctcaggtgatccgcctgcctcggcctcccaaagtgctgggattacaggcgtgagccactgcacccgacccacatttttttctttattttccacaatagctcttgggagagggtgcagtgaggatacataacactctcttctccatctgagttctagatcaacagagaaagaagacaagagaataatcaaataggggacaaatatcccctttaataagctgatttggaaactgtggcttatatagggtcaagggtctcctcacattaaactccaaagataggcagactcacatactctggagcactagaactctgaaggcctcccccaacctcacccaactaggaagacctgcccctggaggagcagaacaagatgtgtagttaaaagactaggccatgcctgccctttcttctcgcactcaagcaactcgctcatctccccagagggtgagtaaaggtgagacagaggccaggggtatttgggggaaaccccatctttgaaacaaaaaatggacaagaagtattcgccatctaacaacctctatatgcagcatggattgaataagcacccttatttccccacaagaatttagagggtacatgaaatagtggtgacaagcccaacctggaggcagctgctcagttttgaactcaggctctgccacttactagctatgtgaccttgagcgagttatttctccttcctgagcctctgtcttgtttttaaattgtacatatttaagatgtgtaacacgttttgctacacttatcttgaggtacatatacatgccaaggtgatt

SEQ ID NO: 697426 - DNA, 587 bp, Homo sapiens
aaggtagttactattattgagaatcttacatcttagatctctcttgacaagtaaacaactaactagcaggcwatgggaccaacactttacaagcagtccactcccaaggctttgggaataaagaggaggaaataactatattgagatatcactcaatacacacacacacacacacacatttctagtggtcagtttaggctcagaacacatttaatccagtcttctcaactattgattcctaaccctggctacagattagaatcacttgaggagttttttcttaaatgcctatgtccaggccccaagtgtaatcaattatctaagaacagggtgtgggagcaggcattggtttgtgttttattatctgctgccctaggtgactgagagatgcagccagggttgaggactctgacctccactgttctccatctccacttctagtcccaaactttagcaggtccagatgacttaaaggccttcaagggctcacaaaaattccatttcagtcactcaccagactattctctgagccagtacaataagtctgctactgccaaaacattttttgtaaccaaaacataaacaaa

SEQ ID NO: 697427 - DNA, 643 bp, Homo sapiens
gaggttgtgttattaggtatagtatgttaatttttgcatttattgttacatctattgatcaaaatgttcaatataggggtcccgtggcaacttagagtgtggatagatctacatgctataagggtggcttggtaatggtgaaagcatccctctgggtgggctgggtaaattggattttcagctccagggaagaaacacccttaaaatcaaaattgcaccttcttgaagagttcttaaatttgacattgccraacaaaattaacaccctcatatcctcaagtgccagaggcttttgtcgttattgaaaacactcttaaaagctgcattccttctgggatgcatgaggggttgggaaggaaagctttatttttcatgggccttacagacattacttctggttggtcagacatgtttcagacccttggactttcttcttcttactgcctagtattttctatgagacttgagccaaatcctgttacctctctgccttttaggttcaatgactggttcccttttcccctgacagaagtgaggtgtggagaaattgaaataatagttgcatagggattctaaataatttattagttccctcacttgctctgcaggaaacaaaaataaagtctatagaagacagtgttca

SEQ ID NO: 697428 - DNA, 2560 bp, Homo sapiens
tttcagcccagtacctccatgaagccattcctactattccagcttgctctcacttctcccgtcagaggtccctccagacagcttgcccatccacagactgcatgcactatctgttcctccctacataaccccacagtggagcccaatctgattgaggaaagagacagcatcagtggcttcccttcttgcctgcaaattcaccctcactgaggacagggtacctaggaaaccctcagcctatatttatgttgaaggagctcagatctcctgttctgtacatttttaaatcattcatccttctgaaagatgtgttgatcaaagtgagccagtatgtttgaactatttctttgagcagactattataaatctccagccctcatgcacatcctgttgatataatgtcaatcccgaggttactgatggttccgcacctcttctttctttggattgcttgatgtatgttcatataaatgggctgtggaatgaagttgtaggataagcatttgacattcttcccttctagaagtgataaatcgagcctgcgcccaaaatggacttgtgggcttgatcaagaattctctatgaagttgtgtctgtttcactgcttgattccaaagaacacacagccccaaacagcctccagggcctgaagattggagcagagaattccttgttttatcccaaagtctggccagaaggtccacctttccaaagtgtatgaaaataagttatgtcttagtccattttgtgctgctatcacagaatacctgatattaggtagtatattgaaaaactacctgttggatactatgtttattacctgggtgatgaaataatctgtatacccgtccctcataacatgcaatttacttatataacaagcctgtgtatatacccctgaatctaaaataagttttttttttttttttttttttttttaaagaacagagatttatttcttatacttctggaggctgggaagtccaaagttgaggagtstgcatcattggcaagggcctttgtgctgtgccatcccatgtcagaaagcaggagggcaagagagggtaagagagagtgagcaggagagcaagagggagtcaaactcacccttttataaggaagccactcttgcaatgctgacattaatctatacatgaggatggtgccccatgacacaaacaccttctattagaccccactctcaactctgttgcattgggaattaagtttctaacacatgtttttttggggatacattcgaaccatagcaagttctatataagaagttttggagtttgggttctcagctagttttccaggcttggtgcagaaaatcgatattccttttattttgttttgctgccgattttccctcttctgtcagcccctgcacaagccatgctcatccctgctgtgccctggtccagccaccttgcatcagtcagtgttcttagtcatcaacaacagaagcctgctctagttagcttaaggaaaaggagaatttattgacttctgatggactttggatttattgacttctaattgattagacaagtctgattggttgcccatgtttatccctgctctcccctaaactattctaaaatgatggcaaagggttaaagtgttgcaaatctacaagatcaaagaattcataagaggagacaacagtggataggtgcttggggccagtttttggaaaatagaaagtggatggagggctgggcacagtggctcatattagcactttgagaggttgaggcaggagcatccctgagtccagaagttcgagaccagccagggtaacataatgagactccatctttacaaaaaattaaaaagaaaattaaccaggctttgtagcatgtgcctgtagtaatagctactcaggagactgaggtgggaggatcacttgagcccaggatgtcaagactgcattgagccaggattgtgccactgcactcagcctgggtgatagagggagaccctgtctcaatttttaaaaaagtggatggaagaagggtaactgatgtagcagatgcaaggatgttacagtgttagtgcttggtaataaagatactattgtggggtgagcctggttctgccggcaggcctctgagagcctcagcacccagaaactccagaaagcccaggttaggcaggtggtacaaaccaggaaaaattaagcagagattgacatgttcgatagtagaacctttggctgcttcttctgacctgctcccaggatgccagcggctggagtgctctcttctggcaggatataataggagtcttttctggagaaactgaaggactctggagaaaatacctccaaatgctgacattggggaatcttccattgcaaaggacaggaagtccccctatccacaagtcacacccatacccttcaatgagcttcttaatgcttcatattaaacatgaaaggacaattaaggatcattatgcatttgaggaatgtcttttatatgaaacagagagtacaacacaaagggataccaaagggatccaggacaaactaaataatgtaaggaaaaagaga

SEQ ID NO: 697429 - DNA, 668 bp, Homo sapiens
tggaagcccatgtttttcctttgcagtactcacaggtctgtgtttatatttaaatggctatttcctattttttaagcatacgcaaagtcatatcagggtgacacatagctaaagagttaaacaaaacaaaccattttcttctctggaagctttagtgtggaaatacctaagtgtcagccctctctccacttgtgtttgctccccttagggtactgttctaacaggagatatttgcttcacagtggaaaggtgagataggagaggtggtgtgttctgtttaaattggaataaaaacttgttgctggctgccagtcttaaagaatgattcctcgtcattgaacatgttacattgtagagtcagatgtttgccaccacaacactgggctattatgcaaggtagttctaccttgtagttccgatatatttagttaattgaaagcctaaaatattgccacataactgaacatctstcataatgctatattatcaaagaatttaatttcagattaaaatggttttatagttttctatattgttccactgttttctaagagattcacattctcgtgtgtgatgcctaaagagaatggaaaaaacaaaagcagtttggatttagttccaatttagttaggtaacttattttcttgtttctttgccatggaacaaaa

SEQ ID NO: 697430 - DNA, 1804 bp, Homo sapiens
ataaataaggattctgtacaatcaaattactttagtcagtataaagtatagagtacactgcctgccgccagcgtgaaattaaccgtgatgacactgggcattgttttagacagcaaaacagtacctaccctaactccttggattagcccaataagtggctgggagttgaattgagttactactcattagggtttatctcttgccttatcttaaaataraaatccactcccacccactaccctcctccccatttttgtacagggaatacttgggaggtaaactccctgagtttaaatcctgcttaccagctgtgggatcttgctagttgcttggtctctcagcctcaacttcctcatctataaaatgggaatactaatagcaactacttcgcagggttgtagtaatgatgaaagaggcagtattgataaagcacttagaacaggtcctttttttagcataataaaatatcaagtaatagaataggtcttaatgtgacctacaagactgatacactcagcacaaagcaatatgaagtcatagaatttttaaagttggaaaggagcctagagatcatttaacctagtctcctaatttcagcaatgaaaaattgggatcctagcacaaggtcacagggctgattaagtagcagagttggaactaggctccaactctcttcttggcttacagtttaccatcccagttgggtggtcaaaacccagaacaataacacagatttattgcttgtcctgattgtgcaatgtcttctttgcttttttttttttttttttttttgagaagggattgcagtggcatgatcttggctcactgcaacctccgccttcctggttcaagcgatcctcctgcctcagcctccagagtagctgggactacaggtgcgcaccacgacagctagctaattttttgtatttttagtagagatgaggtttcaccatgttggccgggatggtctcgatctcttgaccttgtgatctgcccgcctcgtcctcccaaagtgctgggattacaggcgtgagccacggcacccagcctgcttttttgttttttacaaatagtcttactgctattttagagctactaggagtgttgctggttcaccatgagtttagctatcatatgccaatggagacagcctggtatagtgggaaataagcctggatcaggaatcaggtgacctagactcttatctctttcactagttaacaatttgggaagccagatagccttcctggctcccagtttccttatatatagggctttaatatatagcataatgtgaaagtactaaacatgatagttgtcccatggtggataacactgtaacccagtgcttttataaattacattgctcagaactactgagtgctctaatatgcattgtaagaatatatatacaacttttttttttttttttttttttttttacagaaaataaactactgctctacctttaatcttgcttcggtgaaattctaatttatcatggcttcagggcaacatcaaaagatggtagagaagtagattagctttcccagaaaccaagtaagggaaaaaagtttatagatgaatctcacagacattcagtgaaagaaatacaaaagattatattgtgtaattccactaagttaaagttcaagaagtgataaaacaggccagggcacagtggctaacacctgtaatcccagcactttgggaggcccaggcaggtggatcacttgagtccaggagtttgagaccagcctggacaacatggtaaaaccctgtctctacaaaaaattactaaaaa

SEQ ID NO: 697431 - DNA, 1804 bp, Homo sapiens
ataaataaggattctgtacaatcaaattactttagtcagtataaagtatagagtacactgcctgccgccagcgtgaaattaaccgtgatgacactgggcattgttttagacagcaaaacagtacctaccctaactccttggattagcccaataagtggctgggagttgaattgagttactactcattagggtttatctcttgccttatcttaaaataaaaatccactcccacccactaccctcctccccatttttgtacagggaatacttgggaggtaaactccctgagtttaaatcctgcttaccagctgtgggatcttgctagttgcttggtctctcagcctcaacttcctcatctataaaatgggaatactaatagcaactacttcgcagggttgtagtaatgatgaaagaggcagtattgataaagcacttagaacaggtcctttttttagcataataaaatatcaagtaatagaataggtcttaatgtgacctacaagactgatacactcagcacaaagcaatatgaagtcatagaatttttaaagttggaaaggagcctagagatcatttaacctagtctcctaatttcagcaatgaaaaattgggrtcctagcacaaggtcacagggctgattaagtagcagagttggaactaggctccaactctcttcttggcttacagtttaccatcccagttgggtggtcaaaacccagaacaataacacagatttattgcttgtcctgattgtgcaatgtcttctttgcttttttttttttttttttttttgagaagggattgcagtggcatgatcttggctcactgcaacctccgccttcctggttcaagcgatcctcctgcctcagcctccagagtagctgggactacaggtgcgcaccacgacagctagctaattttttgtatttttagtagagatgaggtttcaccatgttggccgggatggtctcgatctcttgaccttgtgatctgcccgcctcgtcctcccaaagtgctgggattacaggcgtgagccacggcacccagcctgcttttttgttttttacaaatagtcttactgctattttagagctactaggagtgttgctggttcaccatgagtttagctatcatatgccaatggagacagcctggtatagtgggaaataagcctggatcaggaatcaggtgacctagactcttatctctttcactagttaacaatttgggaagccagatagccttcctggctcccagtttccttatatatagggctttaatatatagcataatgtgaaagtactaaacatgatagttgtcccatggtggataacactgtaacccagtgcttttataaattacattgctcagaactactgagtgctctaatatgcattgtaagaatatatatacaacttttttttttttttttttttttttttacagaaaataaactactgctctacctttaatcttgcttcggtgaaattctaatttatcatggcttcagggcaacatcaaaagatggtagagaagtagattagctttcccagaaaccaagtaagggaaaaaagtttatagatgaatctcacagacattcagtgaaagaaatacaaaagattatattgtgtaattccactaagttaaagttcaagaagtgataaaacaggccagggcacagtggctaacacctgtaatcccagcactttgggaggcccaggcaggtggatcacttgagtccaggagtttgagaccagcctggacaacatggtaaaaccctgtctctacaaaaaattactaaaaa

SEQ ID NO: 697432 - DNA, 672 bp, Homo sapiens
tgattactatcagatttctgggtgaaattgcgacagtaatttcccaagaggaggaaggaacacagatcttcctctttcttaagtcctggccaagtttcaaactcttgagtgggtaaagaggggctatattagttctcctttcatatttctgccctcaaaaacctagagaatctgtggtgactactggaagaaaattcaatttaaaaacatttatttgaggctgggcgcagtggctcatgcctgtaatccaagtactttgggaggctcaggcaggcggatcacctgaggtcaggagttcgagaccagcctggccaacgtggtgaaaccccatctctaccaaaaatacaaaaaaaattagctgggcatggtggcgggcrcctgtaatcccagctacttgggaggctgaggcaggagaattgcctgaacgcgggaggtggaggttgcagtgagctgggatcgcgccactgcactgcagcctgggtgacaagagtgaaactccatctcaaaaaaaaaaaacaacaacatttatttgatacttttttgattagtcagggctcttcactgctgatgaatcatgacaaacttaatgaaagagagaactcattggctcatgtaactgaaaaatccaggggcagaaaaccttcaggcgtggttggatccaggtgcttacaa

SEQ ID NO: 697433 - DNA, 1995 bp, Homo sapiens
cctcgctcagcctcctgagtagctgggaccacagaaatatgccatctcacttcactaatttttttatttttaatagagacgaggtattgatatgttgcccaggctggtctcaaactcctgggctcaaaygatcctcctgactcggtctcccaaagtgttaggattataggcatgagtcactgcacctgttaatttgtcactgacacgtgataatcattttatgccacggttgcaaatatggaaagcaaaccaaggaaactattggggccagggcagtacttttctgctcagaagtttctcttttttctggcccttggtctgatgcttcaggagaacagctctgcttattcattttttttttgttttgttttgagacagggtctctctctgtcatccagactggagtaaagtggcatgattatagctcactgcaacctctgactcccaggctcaagtgatcctcccactgcagcctccctaatagctgggactacaggtgtataccaccatgcccaggtaatttgtgtatgttttgtagagacagggtttcaccatgtcccccaggctggtcttcaactcctgggcttaagtgatccaccttcctcagctcctcaaagtgctgggatcacaggcatgagccactgcacctggccagtttagtctttaggtaacttatttcgtacagttttcattatgcattaatatgaaaatgttcttttattacatttgattatcagcttttattatttcattactatatagtacttattatcagtttattattatatattagtatttattgttctattatttattgttattagacataattgtagattaaaaatcaagaacttggaatgtttaaatgtacatatacttacttgccataaaaatggaaattatattatatgtcttgacattgcttagaaaaatatgtttttctctcttgttcacgtatattagaaacacaaataattcctgattcaataggctaattctctaattcaataggttaattttttttttttgagagtctcattctgttatccaggctggagtgcagtggcgtgatcttggctcattgcaacctctgcctcccgggttcaagcaattctcatgtctcagcctcctaagtatctgggattacaggtgtgcaccaccacgcctggctaattttttgtatttttagtagagatggagttttgccatgttgcccaggctggtcttgaactcctagcctcaagcaatccacccacctcagcctcccaaagtgttgggattacaggcgtgagccaccgtgcctggcaggttaattttgtatttatacgaataatagtagttataaagtatgttctgtgccaccaaaaattaatgttaacttactgtatttcaaaaatggattagaagtggagttggttgaccatggaatttctgtaatttaaaataaaagtggatgctatttcactgtactccaaaaaattgtctccctcacaaaaaaatagacacagacgggatgacataatgctttctgaacatatcactatttccccaagaggaagaaaagctaaaactttaccaactgcataaatgtgacacagctgatatgccagaagcacatatttgggcaaatcacttagtctgaggacctcagttttctcattaataaaacaagggagtggaacaaagtgatttctaagcttccttccagatacaagttctatgagtctatgtggaaagatgttacatgggctctaaatgacctctccagaagcttctccatttgttcacatctgtttaaatattacatgaacagggatatatgtatagtagaaaatcagacagaccattttgttacaaggaatgtgaaaaccattgatatctttctttatatgaattttttctgatgtcccattaggcaaaccatacttaaatgaaccatattccagtatttactttactataaacttagtataaacaacagattattactaacag

SEQ ID NO: 697434 - DNA, 1995 bp, Homo sapiens
cctcgctcagcctcctgagtagctgggaccacagaaatatgccatctcacttcactaatttttttatttttaatagagacgaggtattgatatgttgcccaggctggtctcaaactcctgggctcaaacgatcctcctgactcggtctcccaaagtgttaggattataggcatgagtcactgcacctgttaatttgtcactgacacgtgataatcattttatgccacggttgcaaatatggaaagcaaaccaaggaaactattggggccagggcagtacttttctgctcagaagtttctcttttttctggcccttggtctgatgcttcaggagaacagctctgcttattcattttttttttgttttgttttgagacagggtctctctctgtcatccagactggagtaaagtggcatgattatagctcactgcaacctctgactcccaggctcaagtgatcctcccactgcagcctccctaatagctgggactacaggtgtataccaccatgcccaggtaatttgtgtatgttttgtagagacagggtttcaccatgtcccccaggctggtcttcaactcctgggcttaagtgatccaccttcctcagctcctcaaagtgctgggatcacaggcatgagccactgcacctggccagtttagtctttaggtaacttatttcgtacagttttcattatgcattaatatgaaaatgttcttttattacatttgattatcagcttttattatttcattactatatagtacttattatcagtttattattatatattagtatttattgttctattatttattgttattagacataattgtagattaaaaatcaagaacttggaatgtttaaatgtacatatacttacttgccataaaaatggaaattatattatatgtcttgacattgcttagaaaaatatgtttttctctcttgttcacgtatattagaaacacaaataattcctgattcaataggctaattctctaattcaataggttaattttttttttttgagagtctcattctgttatccaggctggagtgcagtggcgtgatcttggctcattgcaacctctgcctcccgggttcaagcaattctcatgtctcagcctcctaagtatctgggattacaggtgtgcaccaccacgcctggctaattttttgtatttttagtagagatggagttttgccatgttgcccaggctggtcttgaactcctagcctcaagcaatccacccacctcagcctcccaaagtgttgggattacaggcrtgagccaccgtgcctggcaggttaattttgtatttatacgaataatagtagttataaagtatgttctgtgccaccaaaaattaatgttaacttactgtatttcaaaaatggattagaagtggagttggttgaccatggaatttctgtaatttaaaataaaagtggatgctatttcactgtactccaaaaaattgtctccctcacaaaaaaatagacacagacgggatgacataatgctttctgaacatatcactatttccccaagaggaagaaaagctaaaactttaccaactgcataaatgtgacacagctgatatgccagaagcacatatttgggcaaatcacttagtctgaggacctcagttttctcattaataaaacaagggagtggaacaaagtgatttctaagcttccttccagatacaagttctatgagtctatgtggaaagatgttacatgggctctaaatgacctctccagaagcttctccatttgttcacatctgtttaaatattacatgaacagggatatatgtatagtagaaaatcagacagaccattttgttacaaggaatgtgaaaaccattgatatctttctttatatgaattttttctgatgtcccattaggcaaaccatacttaaatgaaccatattccagtatttactttactataaacttagtataaacaacagattattactaacag

SEQ ID NO: 697435 - DNA, 1995 bp, Homo sapiens
cctcgctcagcctcctgagtagctgggaccacagaaatatgccatctcacttcactaatttttttatttttaatagagacgaggtattgatatgttgcccaggctggtctcaaactcctgggctcaaacgatcctcctgactcggtctcccaaagtgttaggattataggcatgagtcactgcacctgttaatttgtcactgacacgtgataatcattttatgccacggttgcaaatatggaaagcaaaccaaggaaactattggggccagggcagtacttttctgctcagaagtttctcttttttctggcccttggtctgatgcttcaggagaacagctctgcttattcattttttttttgttttgttttgagacagggtctctctctgtcatccagactggagtaaagtggcatgattatagctcactgcaacctctgactcccaggctcaagtgatcctcccactgcagcctccctaatagctgggactacaggtgtataccaccatgcccaggtaatttgtgtatgttttgtagagacagggtttcaccatgtcccccaggctggtcttcaactcctgggcttaagtgatccaccttcctcagctcctcaaagtgctgggatcacaggcatgagccactgcacctggccagtttagtctttaggtaacttatttcgtacagttttcattatgcattaatatgaaaatgttcttttattacatttgattatcagcttttattatttcattactatatagtacttattatcagtttattattatatattagtatttattgttctattatttattgttattagacataattgtagattaaaaatcaagaacttggaatgtttaaatgtacatatacttacttgccataaaaatggaaattatattatatgtcttgacattgcttagaaaaatatgtttttctctcttgttcacgtatattagaaacacaaataattcctgattcaataggctaattctctaattcaataggttaattttttttttttgagagtctcattctgttatccaggctggagtgcagtggcgtgatcttggctcattgcaacctctgcctcccgggttcaagcaattctcatgtctcagcctcctaagtatctgggattacaggtgtgcaccaccacgcctggctaattttttgtatttttagtagagatggagttttgccatgttgcccaggctggtcttgaactcctagcctcaagcaatccacccacctcagcctcccaaagtgttgggattacaggcgtgagccaccgtgcctggcaggttaattttgtatttatacgaataatagtagttataaagtatsttctgtgccaccaaaaattaatgttaacttactgtatttcaaaaatggattagaagtggagttggttgaccatggaatttctgtaatttaaaataaaagtggatgctatttcactgtactccaaaaaattgtctccctcacaaaaaaatagacacagacgggatgacataatgctttctgaacatatcactatttccccaagaggaagaaaagctaaaactttaccaactgcataaatgtgacacagctgatatgccagaagcacatatttgggcaaatcacttagtctgaggacctcagttttctcattaataaaacaagggagtggaacaaagtgatttctaagcttccttccagatacaagttctatgagtctatgtggaaagatgttacatgggctctaaatgacctctccagaagcttctccatttgttcacatctgtttaaatattacatgaacagggatatatgtatagtagaaaatcagacagaccattttgttacaaggaatgtgaaaaccattgatatctttctttatatgaattttttctgatgtcccattaggcaaaccatacttaaatgaaccatattccagtatttactttactataaacttagtataaacaacagattattactaacag

SEQ ID NO: 697436 - DNA, 613 bp, Homo sapiens
caacaatgtgaatgtacccatattgaaccatacttcaaaatggttaaaaacaaaaataataaaaggttaaaatagtaaattttatgttgtgtwtagtttgccacaataaaaaatatttgactttagatggctgtgtagataaccagcaataactcgaattagaatacctattactctcactaatatttgctagtgttaaagaaagggtcagaattttaaattatatcaccattacttaaaaaaacttgttaatcaaatcactttgttgatatatatatctatatataatatagatatgtatagacatatacatattatatatattatatatagacatatacatattatatatattatatatagacatatgtattttatatatatataatatatatattatatatatgtagacagagagtcactctgtcactcaggctgaagtacaaggctcaatctcagctcatgcagcctctgcctcccaggttcaagcaattctcctgcctcagcctcctgtatagctgggattacaggtacgtgccaccacgcccagctaatttttgtatttttcgtagagacagggtttcactatgtggccaggctggtcttgaactcc

SEQ ID NO: 697437 - DNA, 613 bp, Homo sapiens
caacaatgtgaatgtacccatattgaaccatacttcaaaatggttaaaaacaaaaataataaaaggttaaaatagtaaattttatgttgtgtatagtttgccacaataaaaaatatttgactttagatggctgtgtagataaccagcaataactcgaattagaayacctattactctcactaatatttgctagtgttaaagaaagggtcagaattttaaattatatcaccattacttaaaaaaacttgttaatcaaatcactttgttgatatatatatctatatataatatagatatgtatagacatatacatattatatatattatatatagacatatacatattatatatattatatatagacatatgtattttatatatatataatatatatattatatatatgtagacagagagtcactctgtcactcaggctgaagtacaaggctcaatctcagctcatgcagcctctgcctcccaggttcaagcaattctcctgcctcagcctcctgtatagctgggattacaggtacgtgccaccacgcccagctaatttttgtatttttcgtagagacagggtttcactatgtggccaggctggtcttgaactcc

SEQ ID NO: 697438 - DNA, 613 bp, Homo sapiens
caacaatgtgaatgtacccatattgaaccatacttcaaaatggttaaaaacaaaaataataaaaggttaaaatagtaaattttatgttgtgtatagtttgccacaataaaaaatatttgactttagatggctgtgtagataaccagcaataactcgaattagaatacctattactctcactaatatttgctagtgttaaagaaagggtcagaattttaaattatatcaccattacttaaaaaaacttgttaatcaaatcactttgttgatatatatatctatatataatatagatatgtatagacatatacatattatatatattatatatagacatatacatattatatatattatatatagacatatgtattttatatatatataatatatatattatatatatgtagacagagastcactctgtcactcaggctgaagtacaaggctcaatctcagctcatgcagcctctgcctcccaggttcaagcaattctcctgcctcagcctcctgtatagctgggattacaggtacgtgccaccacgcccagctaatttttgtatttttcgtagagacagggtttcactatgtggccaggctggtcttgaactcc

SEQ ID NO: 697439 - DNA, 628 bp, Homo sapiens
taactatatcaacatttatcacataattataattgtgtgatttcttggctatcactccgtctagactgcaaatctctggaggaagaacatattccgttcatctttgtttcctagcacctaacacagggattgtcacaacagaaatgcttggaaaggtttcttatgmagtaacaggaatccatttccgagcatttctgagaatgaggaaggtggggatctctgggttcttggagatttgtatctgtcaatctgaacagaccacctactttttctctcccattgttaaccatctgtgaggaaccatgactatcaattccacaaagaagcttaaccatgcaacacaggtattggggaatcacaaactatttctgttctgcttccatatgaaaattggtgatgcctaagaagaggttataaagaatctgtttttcttaaatctctttgtctctttgaaaatctctgtgcacgactttcttcattaagtgccaaactaatagggcttaaaaatgactcagctataaaagaacttctagttctgcaaagacatacttgttttcttgaatctgtttggtgtatcaaaactaaatgccatggtaaccagaaactgtggtggattttgtgaaatgcc

SEQ ID NO: 697440 - DNA, 2304 bp, Homo sapiens
acattttaagaatgaaataagttccctttagctaagacgagcaaacagaaaattcatcacaatttattttattattaggggatttgtgagaagaaatggggagtggtacattgaaggaagggcacattacagagagagagagagagagacagagggagagggtgtgtgtacacaaaacaaaatgctcgtgcttcatatctatgtcagaacatttactgggattaacagaaatgcgttgggtgcccttaatctatacattcacaaagtatgtcactaacatctttgcctcccgaaagtgctgggattacaggcatgagccaccacgcccagcctgtcaatatagtcttgtgtattttcaccaaaagagtcttcccagtcaaatgtttagtcaatttaagataatatacttagcactcagtacagactaactctttcttacatatactgttcctatactaacctcaacaaaaagtggaaaatccagggcagtacttaagacctccccatccaaacgtcacacttgtttgtatactctttgagttatatatgtggttctaacacttcaccagtcattaaaatgacgtgggaatactctgtaaaatgctggttccaggatccccatcagaaatactgaaaatttggtctaggaagaagcccaggaattactttcacaagctcttcaggtcattgtaacatgcagccaagacagctctagaagagaattattgctctagaagagacagcattgcatatcagccctaagggacctcatgaaaaatacagattctgaatgaataggtctggatggggcctgagactctgcatttccatcaagtccccagacgatggagtcactagccacaccggctatttagattcagctcctcagttacccttgcctcatttcaagggctctacagcttcatggagtcagtggtcacaggatcatccaaaaacacatctctctgaaatttttttagtattaagcaatgtaattaattttttagtattaagcaaggacactgaatttagctaaagtataattaaataaccattaactatatactctcagttctatcaactcagaaaagatctgagggatttccactacttctttctaactttaatttgaaaaagttatatagaaataattgtttttctacttatcaaacatagggcaaaataatctgcattttctaacacctctttgaattttttcatgaaatatgtttatgtttgtccctcttgggaatgataacacatgcacatgactccccaaggaagtaaacaaatttacagaagcatttttttattaaagtgctatatttagaactagctcactgtgacaattcaaatcctattgcaaatttgtatacaaaacaggaagtttcaataataatcaaggaaaacaataattctctatttagcattttaagaaaaccaaacaaatgcttggctgctttttaattgaggagataaagcactttaatattgataaaatgtttctgttatttaagtagcacttttacaactctaaagccaagaactttatccataactttgccagtctgtcagacaaccaggcaaacagaattcaacccagtcgtggtttcctaggcaacaagcacagatagaaccactggggggaaaaaaaatgaaaacaagaaaaagcatcgcagcatttccagtaggcttaagaaatgcattttaattgtcaaaatgtcacagacaacaatattgaaaatcatttccttggaaatgattcaaagcagaatgccattttcattacagcaaacgaggtgtggaaaaagagaaaaattagattcccttcctttgctctgaattaagtagggatggtgatcaatcttatttgattttacaaaatgtatctacattagtacggatttctaatatgcctcgttagttttctctgcaaacattaccatacaytgaatcaacataaaaagaagagtcatccaggatgacgggctagcacaggacgaagcatgtggctgaagatcatctgctgcaaagacaggctcgcacctgctcaggtcttaattcacagggtaaaccacacacttcaaaacaccgattcaaacagaacaaggctgtccacattcacgcatggctctagtttcctcatctataacaaaaagggcttaccttctatcttaaaaacttctgtccctaacagcttttgatttttggaaataaaatatagaagggctgttctgtctagaaagattgcttacaaaataaatactatattctaaagcattttaaaactttttctttatagga

SEQ ID NO: 697441 - DNA, 1474 bp, Homo sapiens
ttaaaaaaaaggtatctgaggccgggcacagtggctcatgcctgtaattccagcactttgggaggccgaggcaggcggatcacctgaggtcaggagttcgagaccagactggctaacatggtgaaaccccgtttctacaaaaaaattagccaggcgcagtggcacgcgcctgtaatcccagctactcaggaggctgaggcaggagaatcgcttgaacccaggaggtggaggttgcagtgagctgagatcacgctattgcactccagcttgggcaacaagagcaaaactccatctcaaaaaaaaaaaaaaaagtacctgcaaaagagacttataaatgctcatagcagctttattcacaacagccaaaactgagacaaccccaaagtttacaaacagaagaatgaataaacaaaatgtgataaagtcataccatggaatactacyccacaataacaaggaatgaactactgatccatgcacaatatggatgaatctcacagacagtatggtcaatgaaagaagctggaccaaatgagtatacactttaagagtccataagtttaagacaaaaccaagattaaaaaaatcagaacagagatgagtaatttaaaaatatgaagatgggtcaaacatacatagagtcaaacaggaattcagacttgatacagaacggaaatagaggcgtccttcaagtagttaagtggttaactacttgccaagtgagattcaatactttatagagagtaaattttacttttatacacattttaaaataaaaactccttgatagcagcaaatgtgtctgacttgatttgttttggagctatcttaacacaggtgaaatgtgtacaaaagtttttacagcaatgaagataaaggcacagataatgtgtgatgacaataaaacttctttaaaagtggttctgatttcaagtaaaagagcaagcgaacatagatgtcagaagaggccataaggtgaataatgtgaatacaatttcaatgtaaataatcttaaaatagattaaaatataagattaataatataaaggatgttgtatatctgatccaatgtcagatctaccatcatatgttgcttaacaacagggatacattctgagaaattcattgttaggtgattttgtgttatgcaaacatcagagtgtacttacacaaacacagatggtatagcctactacacaacctaggctgtacggtacagtctgttgctccaaggctacaaacgtgtacagcatgttactgtactgaatagtgtaggcaactgtaatacaatgctaaatatttgtgtatctcaacatagaaaaggtacagtaaaaatatggtttagggaacacttattctattttatgaaatgaaatgttgcctgattctagatcacaaataaaggcattgagatcttaaaatacacccttcctacatactttcacacacacatacacactcacacacacataca

SEQ ID NO: 697442 - DNA, 678 bp, Homo sapiens
gaggggacaccatgtggtacagtgaaaaaggagtatgagaaaatataacctgccctccttgcagtcagaaggtcactgagcacttaaaatcactagagagtgcgacttgatgtaccttctgcagagggtttgtgaaagcagggagtgaagttccaaagcattaggaacaggaaaattaaaaaagctaatggaggccaggtgcagtggctcacacctgtaataccagcactttgggaggctgaagtgggatgattgctctgaaccaaaagtttgagaccagcctgggcaacatatcgagaccccrtttccacatacgcacacagcatggtggcatgcacctgtaatccaggctactcaggaggctgaggcgggaggattgcttgagcctgggagttcaaggctgcagtgagctatgattgcaccgctgtactccagcctgggcaagagagtgagaccctgtctccaaaaaatgttgaataactgaataaatttgctttcttatcgacaaaaattggtcttaaaatagtgtaggaactgggggttaaacctcatttccttctcagttctgtgtgggacactgaattaattatctattgctgtgtagcaaattaccccaaaacttatcacctggaaatagtgtctgtgggacaatctgagtggttctgaattaggcctttc

SEQ ID NO: 697443 - DNA, 678 bp, Homo sapiens
gaggggacaccatgtggtacagtgaaaaaggagtatgagaaaatataacctgccctccttgcagtcagaaggtcactgagcacttaaaatcactagagagtgcgacttgatgtaccttctgcagagggtttgtgaaagcagggagtgaagttccaaagcattaggaacaggaaaattaaaaaagctaatggaggccaggtgcagtggctcacacctgtaataccagcactttgggaggctgaagtgggatgattgctctgaaccaaaagtttgagaccagcctgggcaacatatcgagaccccgtttccacataygcacacagcatggtggcatgcacctgtaatccaggctactcaggaggctgaggcgggaggattgcttgagcctgggagttcaaggctgcagtgagctatgattgcaccgctgtactccagcctgggcaagagagtgagaccctgtctccaaaaaatgttgaataactgaataaatttgctttcttatcgacaaaaattggtcttaaaatagtgtaggaactgggggttaaacctcatttccttctcagttctgtgtgggacactgaattaattatctattgctgtgtagcaaattaccccaaaacttatcacctggaaatagtgtctgtgggacaatctgagtggttctgaattaggcctttc

SEQ ID NO: 697444 - DNA, 2842 bp, Homo sapiens
gttgccttggatacctaagatttttttttttttaattctcctggatttcatcrttttgttccaggaaacatgtatttctagattcatacaggcaaagggaagtaacatttattgagagttctcttcatgacaagcacttgacttacattattacattggtccgcacaaaatttctctgggctcaataattcttcctccattctattaaaaaagaaacttattcagggtcactgttcaggctgaattgcgtccttccaaaattcatatgttgaagtcctaatccccatgacctcagaatgtgaccttgtttgaaaatagggtccttacagaggtaatcaagttaaaaccaggtcattaggatggaccctaatcaaatatgactggtgttcttctaggaagtagaaatttggacacagatgatgtgaagacacaggaagaagagccatctataagccaagaagagaggcctggaacagttctttctctcatggctctcgtggtttctcaatgctttgattttggacgtccagtcttgggaactgtgagacaatacctttctattgtttaagtcacccagtctgtggtacttgttaaggcagccctagtaaactaaagcagtcatatagttagtatgtgacaaagatgtattcaaactgaggtctagtacccaagcatatgcatggccttttcagtctcttttctgtgattttgagtgttctggggcagaacgatctggtgaatctcaagttgggcactggtgggacaagggtgttctctgcacttattaataggcagaggagaagccctaccacctaaaagagctttggagaggtgctctggggtctctggttggcacagcttgagctgtgtctggagcaagactggatctattttccttaagcacttctgctcccaccgcgttaaccctcctttttattggctcctccttccctaccccagatggagcgaacaaaagcaagaacttggaaatgggggcaaactgtaatattttgaacagctgcctttaaagacacaagagaataaaagtatgagaaaggcaggcttcattcactaaggagaaaataatcagaagcttgggggcagataaatgtgccctttattttgataagatacagaaactgctcattaaaaaaatcaatgatgatgacacaatgaataaatcatctgacatgtttaacaccctttaaggtcatatgcttttcactcaaatggatctgaagagaaaaatactccattgggcacatctgtctcttaagtagcacacattataaaccaaattggaaggatcagttttaaaagaaataagctttaatctttgcaaatattttaaatgtcttagtagcatgttgcctaaaaagtgagccatctgaatgattatttggtcacaaagtatgagcctacattaaataaagtctcagattaagtgtctccaaggggaagaccatattttataaattatccaagtagatatatttagaaaagtcaacattatatcggaaaaattatatttgtaaatgatatagatatgttcccaagcatacgaatttgtgagagctcactctaataagtctctaagatctaatttaaactgctttattggggcaaagatactcacggcaggaagtgcaaagaaagaaatgccaaggagtgcaaagcctgcagaaagcaatcttcccagccaagttaggggagttttgtctccatagccaatagttgtcaatgtaatctagaaacaaaataaatagaatgtgcagcttaagtacttgagaggaaagttaggacctatgaacaggaggcaagcaacgtttccactaaatcattattcaacaaatcttgttcgtgctttttattactgggctttaattttccatgacgcatgacagaacttctctttgtttaaggaaaggaataacctacatacttgttcctcccttataacacagttttccgtcttttctaagtgtatttaaggaaagagtatttaagtaaggggataaccatcagtgatacagaaatgatagcaccatggatttaggactggatcagtacacaaataataatttatgttaatttaggctgtcccttcgttaccttagcaggcatttcctgaaggtctggtgtgtgcaaggtatgtgttaagatttgtagtggaacaaaaatgagggcatagttcttgtcctaagatatttatggcctaataagagaaacatgccacacatgaataattaaaatgcaaaacaggatgagagaggtattataatggaggtacaaataacctgctatgggaattcaaggaagagattagttattataagcttccggtgttgagggagctttactagggagatgtcatcatacctgggctttgaaagaggggtaacattttgagaagcagaaatgataaagaaggtgatctagggaggagaaagaggtggctagctgcagaacagtgagaacacatagagtagattctgaaaagtatgagttgttcagctggactggggcatggtggatttaaaaaggattagtgactttttcaatttatttttttaatattttatagactactgtgtacaggtctttcagctccttggttaaatttattcctaagtattttaatttttgtagctactgtaaatgggattgctctcttgatttcttttttggaaagtttgttgttaatgtatagaaatgctagtgatttttgtggtgttgattgtgtctcctgtaactgtactgaatttattagttctagcagtttttttctggaatctttagggttttctatatataagattatgttgtcagcaaacagcaaaaa

SEQ ID NO: 697445 - DNA, 2842 bp, Homo sapiens
gttgccttggatacctaagatttttttttttttaattctcctggatttcatcattttgttccaggaaacatgtatttctagattcatacaggcaaagggaagtaacatttattgagagttctcttcatgacaagcacttgacttacattattacattggtccgcacaaaatttctctgggctcaataattcttcctccattctattaaaaaagaaacttattcagggtcactgttcaggctgaattgcgtccttccaaaattcatatgttgaagtcctaatccccatgacctcagaatgtgaccttgtttgaaaatagggtccttacagaggtaatcaagttaaaaccaggtcattaggatggaccctaatcaaatatgactggtgttcttctaggaagtagaaatttggacacagatgatgtgaagacacaggaagaagagccatctataagccaagaagagaggcctggaacagttctttctctcatggctctcgtggtttctcaatgctttgattttggacgtccagtcttgggaactgtgagacaatacctttctattgtttaagtcacccagtctgtggtacttgttaaggcagccctagtaaactaaagcagtcatatagttagtatgtgacaaagatgtattcaaactgaggtctagtacccaagcatatgcatggccttttcagtctcttttctgtgattttgagtgttctggggcagaacgatctggtgaatctcaagttgggcactggtgggacaagggtgttctctgcacttattaataggcagaggagaagccctaccacctaaaagagctttggagaggtgctctggggtctctggttggcacagcttgagctgtgtctggagcaagactggatctattttccttaagcacttctgctcccaccgcgttaaccctcctttttattggctcctccttccctaccccagrtggagcgaacaaaagcaagaacttggaaatgggggcaaactgtaatattttgaacagctgcctttaaagacacaagagaataaaagtatgagaaaggcaggcttcattcactaaggagaaaataatcagaagcttgggggcagataaatgtgccctttattttgataagatacagaaactgctcattaaaaaaatcaatgatgatgacacaatgaataaatcatctgacatgtttaacaccctttaaggtcatatgcttttcactcaaatggatctgaagagaaaaatactccattgggcacatctgtctcttaagtagcacacattataaaccaaattggaaggatcagttttaaaagaaataagctttaatctttgcaaatattttaaatgtcttagtagcatgttgcctaaaaagtgagccatctgaatgattatttggtcacaaagtatgagcctacattaaataaagtctcagattaagtgtctccaaggggaagaccatattttataaattatccaagtagatatatttagaaaagtcaacattatatcggaaaaattatatttgtaaatgatatagatatgttcccaagcatacgaatttgtgagagctcactctaataagtctctaagatctaatttaaactgctttattggggcaaagatactcacggcaggaagtgcaaagaaagaaatgccaaggagtgcaaagcctgcagaaagcaatcttcccagccaagttaggggagttttgtctccatagccaatagttgtcaatgtaatctagaaacaaaataaatagaatgtgcagcttaagtacttgagaggaaagttaggacctatgaacaggaggcaagcaacgtttccactaaatcattattcaacaaatcttgttcgtgctttttattactgggctttaattttccatgacgcatgacagaacttctctttgtttaaggaaaggaataacctacatacttgttcctcccttataacacagttttccgtcttttctaagtgtatttaaggaaagagtatttaagtaaggggataaccatcagtgatacagaaatgatagcaccatggatttaggactggatcagtacacaaataataatttatgttaatttaggctgtcccttcgttaccttagcaggcatttcctgaaggtctggtgtgtgcaaggtatgtgttaagatttgtagtggaacaaaaatgagggcatagttcttgtcctaagatatttatggcctaataagagaaacatgccacacatgaataattaaaatgcaaaacaggatgagagaggtattataatggaggtacaaataacctgctatgggaattcaaggaagagattagttattataagcttccggtgttgagggagctttactagggagatgtcatcatacctgggctttgaaagaggggtaacattttgagaagcagaaatgataaagaaggtgatctagggaggagaaagaggtggctagctgcagaacagtgagaacacatagagtagattctgaaaagtatgagttgttcagctggactggggcatggtggatttaaaaaggattagtgactttttcaatttatttttttaatattttatagactactgtgtacaggtctttcagctccttggttaaatttattcctaagtattttaatttttgtagctactgtaaatgggattgctctcttgatttcttttttggaaagtttgttgttaatgtatagaaatgctagtgatttttgtggtgttgattgtgtctcctgtaactgtactgaatttattagttctagcagtttttttctggaatctttagggttttctatatataagattatgttgtcagcaaacagcaaaaa

SEQ ID NO: 697446 - DNA, 2842 bp, Homo sapiens
gttgccttggatacctaagatttttttttttttaattctcctggatttcatcattttgttccaggaaacatgtatttctagattcatacaggcaaagggaagtaacatttattgagagttctcttcatgacaagcacttgacttacattattacattggtccgcacaaaatttctctgggctcaataattcttcctccattctattaaaaaagaaacttattcagggtcactgttcaggctgaattgcgtccttccaaaattcatatgttgaagtcctaatccccatgacctcagaatgtgaccttgtttgaaaatagggtccttacagaggtaatcaagttaaaaccaggtcattaggatggaccctaatcaaatatgactggtgttcttctaggaagtagaaatttggacacagatgatgtgaagacacaggaagaagagccatctataagccaagaagagaggcctggaacagttctttctctcatggctctcgtggtttctcaatgctttgattttggacgtccagtcttgggaactgtgagacaatacctttctattgtttaagtcacccagtctgtggtacttgttaaggcagccctagtaaactaaagcagtcatatagttagtatgtgacaaagatgtattcaaactgaggtctagtacccaagcatatgcatggccttttcagtctcttttctgtgattttgagtgttctggggcagaacgatctggtgaatctcaagttgggcactggtgggacaagggtgttctctgcacttattaataggcagaggagaagccctaccacctaaaagagctttggagaggtgctctggggtctctggttggcacagcttgagctgtgtctggagcaagactggatctattttccttaagcacttctgctcccaccgcgttaaccctcctttttattggctcctccttccctaccccagatggagcgaacaaaagcaagaacttggaaatgggggcaaactgtaatattttgaacagctgcctttaaagacacaagagaataaaagyatgagaaaggcaggcttcattcactaaggagaaaataatcagaagcttgggggcagataaatgtgccctttattttgataagatacagaaactgctcattaaaaaaatcaatgatgatgacacaatgaataaatcatctgacatgtttaacaccctttaaggtcatatgcttttcactcaaatggatctgaagagaaaaatactccattgggcacatctgtctcttaagtagcacacattataaaccaaattggaaggatcagttttaaaagaaataagctttaatctttgcaaatattttaaatgtcttagtagcatgttgcctaaaaagtgagccatctgaatgattatttggtcacaaagtatgagcctacattaaataaagtctcagattaagtgtctccaaggggaagaccatattttataaattatccaagtagatatatttagaaaagtcaacattatatcggaaaaattatatttgtaaatgatatagatatgttcccaagcatacgaatttgtgagagctcactctaataagtctctaagatctaatttaaactgctttattggggcaaagatactcacggcaggaagtgcaaagaaagaaatgccaaggagtgcaaagcctgcagaaagcaatcttcccagccaagttaggggagttttgtctccatagccaatagttgtcaatgtaatctagaaacaaaataaatagaatgtgcagcttaagtacttgagaggaaagttaggacctatgaacaggaggcaagcaacgtttccactaaatcattattcaacaaatcttgttcgtgctttttattactgggctttaattttccatgacgcatgacagaacttctctttgtttaaggaaaggaataacctacatacttgttcctcccttataacacagttttccgtcttttctaagtgtatttaaggaaagagtatttaagtaaggggataaccatcagtgatacagaaatgatagcaccatggatttaggactggatcagtacacaaataataatttatgttaatttaggctgtcccttcgttaccttagcaggcatttcctgaaggtctggtgtgtgcaaggtatgtgttaagatttgtagtggaacaaaaatgagggcatagttcttgtcctaagatatttatggcctaataagagaaacatgccacacatgaataattaaaatgcaaaacaggatgagagaggtattataatggaggtacaaataacctgctatgggaattcaaggaagagattagttattataagcttccggtgttgagggagctttactagggagatgtcatcatacctgggctttgaaagaggggtaacattttgagaagcagaaatgataaagaaggtgatctagggaggagaaagaggtggctagctgcagaacagtgagaacacatagagtagattctgaaaagtatgagttgttcagctggactggggcatggtggatttaaaaaggattagtgactttttcaatttatttttttaatattttatagactactgtgtacaggtctttcagctccttggttaaatttattcctaagtattttaatttttgtagctactgtaaatgggattgctctcttgatttcttttttggaaagtttgttgttaatgtatagaaatgctagtgatttttgtggtgttgattgtgtctcctgtaactgtactgaatttattagttctagcagtttttttctggaatctttagggttttctatatataagattatgttgtcagcaaacagcaaaaa

SEQ ID NO: 697447 - DNA, 2842 bp, Homo sapiens
gttgccttggatacctaagatttttttttttttaattctcctggatttcatcattttgttccaggaaacatgtatttctagattcatacaggcaaagggaagtaacatttattgagagttctcttcatgacaagcacttgacttacattattacattggtccgcacaaaatttctctgggctcaataattcttcctccattctattaaaaaagaaacttattcagggtcactgttcaggctgaattgcgtccttccaaaattcatatgttgaagtcctaatccccatgacctcagaatgtgaccttgtttgaaaatagggtccttacagaggtaatcaagttaaaaccaggtcattaggatggaccctaatcaaatatgactggtgttcttctaggaagtagaaatttggacacagatgatgtgaagacacaggaagaagagccatctataagccaagaagagaggcctggaacagttctttctctcatggctctcgtggtttctcaatgctttgattttggacgtccagtcttgggaactgtgagacaatacctttctattgtttaagtcacccagtctgtggtacttgttaaggcagccctagtaaactaaagcagtcatatagttagtatgtgacaaagatgtattcaaactgaggtctagtacccaagcatatgcatggccttttcagtctcttttctgtgattttgagtgttctggggcagaacgatctggtgaatctcaagttgggcactggtgggacaagggtgttctctgcacttattaataggcagaggagaagccctaccacctaaaagagctttggagaggtgctctggggtctctggttggcacagcttgagctgtgtctggagcaagactggatctattttccttaagcacttctgctcccaccgcgttaaccctcctttttattggctcctccttccctaccccagatggagcgaacaaaagcaagaacttggaaatgggggcaaactgtaatattttgaacagctgcctttaaagacacaagagaataaaagtatgagaaaggcaggcttcattcactaaggagaaaataatcagaagcttgggggcagataaatgtgccctttattttgataagatacagaaactgctcattaaaaaaatcaatgatgatgacacaatgaataaatcatctgacatgtttaacaccctttaaggtcatatgcttttcactcaaatggatctgaagagaaaaatactccattgggcacatctgtctcttaagtagcacacattataaaccaaattggaaggatcagttttaaaagaaawaagctttaatctttgcaaatattttaaatgtcttagtagcatgttgcctaaaaagtgagccatctgaatgattatttggtcacaaagtatgagcctacattaaataaagtctcagattaagtgtctccaaggggaagaccatattttataaattatccaagtagatatatttagaaaagtcaacattatatcggaaaaattatatttgtaaatgatatagatatgttcccaagcatacgaatttgtgagagctcactctaataagtctctaagatctaatttaaactgctttattggggcaaagatactcacggcaggaagtgcaaagaaagaaatgccaaggagtgcaaagcctgcagaaagcaatcttcccagccaagttaggggagttttgtctccatagccaatagttgtcaatgtaatctagaaacaaaataaatagaatgtgcagcttaagtacttgagaggaaagttaggacctatgaacaggaggcaagcaacgtttccactaaatcattattcaacaaatcttgttcgtgctttttattactgggctttaattttccatgacgcatgacagaacttctctttgtttaaggaaaggaataacctacatacttgttcctcccttataacacagttttccgtcttttctaagtgtatttaaggaaagagtatttaagtaaggggataaccatcagtgatacagaaatgatagcaccatggatttaggactggatcagtacacaaataataatttatgttaatttaggctgtcccttcgttaccttagcaggcatttcctgaaggtctggtgtgtgcaaggtatgtgttaagatttgtagtggaacaaaaatgagggcatagttcttgtcctaagatatttatggcctaataagagaaacatgccacacatgaataattaaaatgcaaaacaggatgagagaggtattataatggaggtacaaataacctgctatgggaattcaaggaagagattagttattataagcttccggtgttgagggagctttactagggagatgtcatcatacctgggctttgaaagaggggtaacattttgagaagcagaaatgataaagaaggtgatctagggaggagaaagaggtggctagctgcagaacagtgagaacacatagagtagattctgaaaagtatgagttgttcagctggactggggcatggtggatttaaaaaggattagtgactttttcaatttatttttttaatattttatagactactgtgtacaggtctttcagctccttggttaaatttattcctaagtattttaatttttgtagctactgtaaatgggattgctctcttgatttcttttttggaaagtttgttgttaatgtatagaaatgctagtgatttttgtggtgttgattgtgtctcctgtaactgtactgaatttattagttctagcagtttttttctggaatctttagggttttctatatataagattatgttgtcagcaaacagcaaaaa

SEQ ID NO: 697448 - DNA, 2842 bp, Homo sapiens
gttgccttggatacctaagatttttttttttttaattctcctggatttcatcattttgttccaggaaacatgtatttctagattcatacaggcaaagggaagtaacatttattgagagttctcttcatgacaagcacttgacttacattattacattggtccgcacaaaatttctctgggctcaataattcttcctccattctattaaaaaagaaacttattcagggtcactgttcaggctgaattgcgtccttccaaaattcatatgttgaagtcctaatccccatgacctcagaatgtgaccttgtttgaaaatagggtccttacagaggtaatcaagttaaaaccaggtcattaggatggaccctaatcaaatatgactggtgttcttctaggaagtagaaatttggacacagatgatgtgaagacacaggaagaagagccatctataagccaagaagagaggcctggaacagttctttctctcatggctctcgtggtttctcaatgctttgattttggacgtccagtcttgggaactgtgagacaatacctttctattgtttaagtcacccagtctgtggtacttgttaaggcagccctagtaaactaaagcagtcatatagttagtatgtgacaaagatgtattcaaactgaggtctagtacccaagcatatgcatggccttttcagtctcttttctgtgattttgagtgttctggggcagaacgatctggtgaatctcaagttgggcactggtgggacaagggtgttctctgcacttattaataggcagaggagaagccctaccacctaaaagagctttggagaggtgctctggggtctctggttggcacagcttgagctgtgtctggagcaagactggatctattttccttaagcacttctgctcccaccgcgttaaccctcctttttattggctcctccttccctaccccagatggagcgaacaaaagcaagaacttggaaatgggggcaaactgtaatattttgaacagctgcctttaaagacacaagagaataaaagtatgagaaaggcaggcttcattcactaaggagaaaataatcagaagcttgggggcagataaatgtgccctttattttgataagatacagaaactgctcattaaaaaaatcaatgatgatgacacaatgaataaatcatctgacatgtttaacaccctttaaggtcatatgcttttcactcaaatggatctgaagagaaaaatactccattgggcacatctgtctcttaagtagcacacattataaaccaaattggaaggatcagttttaaaagaaatwagctttaatctttgcaaatattttaaatgtcttagtagcatgttgcctaaaaagtgagccatctgaatgattatttggtcacaaagtatgagcctacattaaataaagtctcagattaagtgtctccaaggggaagaccatattttataaattatccaagtagatatatttagaaaagtcaacattatatcggaaaaattatatttgtaaatgatatagatatgttcccaagcatacgaatttgtgagagctcactctaataagtctctaagatctaatttaaactgctttattggggcaaagatactcacggcaggaagtgcaaagaaagaaatgccaaggagtgcaaagcctgcagaaagcaatcttcccagccaagttaggggagttttgtctccatagccaatagttgtcaatgtaatctagaaacaaaataaatagaatgtgcagcttaagtacttgagaggaaagttaggacctatgaacaggaggcaagcaacgtttccactaaatcattattcaacaaatcttgttcgtgctttttattactgggctttaattttccatgacgcatgacagaacttctctttgtttaaggaaaggaataacctacatacttgttcctcccttataacacagttttccgtcttttctaagtgtatttaaggaaagagtatttaagtaaggggataaccatcagtgatacagaaatgatagcaccatggatttaggactggatcagtacacaaataataatttatgttaatttaggctgtcccttcgttaccttagcaggcatttcctgaaggtctggtgtgtgcaaggtatgtgttaagatttgtagtggaacaaaaatgagggcatagttcttgtcctaagatatttatggcctaataagagaaacatgccacacatgaataattaaaatgcaaaacaggatgagagaggtattataatggaggtacaaataacctgctatgggaattcaaggaagagattagttattataagcttccggtgttgagggagctttactagggagatgtcatcatacctgggctttgaaagaggggtaacattttgagaagcagaaatgataaagaaggtgatctagggaggagaaagaggtggctagctgcagaacagtgagaacacatagagtagattctgaaaagtatgagttgttcagctggactggggcatggtggatttaaaaaggattagtgactttttcaatttatttttttaatattttatagactactgtgtacaggtctttcagctccttggttaaatttattcctaagtattttaatttttgtagctactgtaaatgggattgctctcttgatttcttttttggaaagtttgttgttaatgtatagaaatgctagtgatttttgtggtgttgattgtgtctcctgtaactgtactgaatttattagttctagcagtttttttctggaatctttagggttttctatatataagattatgttgtcagcaaacagcaaaaa

SEQ ID NO: 697449 - DNA, 2842 bp, Homo sapiens
gttgccttggatacctaagatttttttttttttaattctcctggatttcatcattttgttccaggaaacatgtatttctagattcatacaggcaaagggaagtaacatttattgagagttctcttcatgacaagcacttgacttacattattacattggtccgcacaaaatttctctgggctcaataattcttcctccattctattaaaaaagaaacttattcagggtcactgttcaggctgaattgcgtccttccaaaattcatatgttgaagtcctaatccccatgacctcagaatgtgaccttgtttgaaaatagggtccttacagaggtaatcaagttaaaaccaggtcattaggatggaccctaatcaaatatgactggtgttcttctaggaagtagaaatttggacacagatgatgtgaagacacaggaagaagagccatctataagccaagaagagaggcctggaacagttctttctctcatggctctcgtggtttctcaatgctttgattttggacgtccagtcttgggaactgtgagacaatacctttctattgtttaagtcacccagtctgtggtacttgttaaggcagccctagtaaactaaagcagtcatatagttagtatgtgacaaagatgtattcaaactgaggtctagtacccaagcatatgcatggccttttcagtctcttttctgtgattttgagtgttctggggcagaacgatctggtgaatctcaagttgggcactggtgggacaagggtgttctctgcacttattaataggcagaggagaagccctaccacctaaaagagctttggagaggtgctctggggtctctggttggcacagcttgagctgtgtctggagcaagactggatctattttccttaagcacttctgctcccaccgcgttaaccctcctttttattggctcctccttccctaccccagatggagcgaacaaaagcaagaacttggaaatgggggcaaactgtaatattttgaacagctgcctttaaagacacaagagaataaaagtatgagaaaggcaggcttcattcactaaggagaaaataatcagaagcttgggggcagataaatgtgccctttattttgataagatacagaaactgctcattaaaaaaatcaatgatgatgacacaatgaataaatcatctgacatgtttaacaccctttaaggtcatatgcttttcactcaaatggatctgaagagaaaaatactccattgggcacatctgtctcttaagtagcacacattataaaccaaattggaaggatcagttttaaaagaaataagctttaatctttgcaaatattttaaatgtcttagtagcatgttgcctaaaaagtgagccatctgaatgattatttggtcacaaagtatgagcctacattaaataaagtctcagattaagtgtctccaaggggaagaccatattttataaattatccaagtagatatatttagaaaagtcaacattatatcggaaaaattatatttgtaaatgatatagatatgttcccaagcatacgaatttgtgagagctcactctaataagtctctaagatctaatttaaactgctttattggggcaaagatactcacggcaggaagtgcaaagaaagaaatgccaaggagtgcaaagcctgcagaaagcaatcttcccagccaagttaggggagttttgtctccatagccaatagttgtcaatgtaatctagaaacaaaataaatagaatgtgcagcttaagtacttgagaggaaagttaggacctatgaacaggaggcaagcaacgtttccactaaatcattattcaacaaatcttgttcgtgctttttattactgggctttaattttccrtgacgcatgacagaacttctctttgtttaaggaaaggaataacctacatacttgttcctcccttataacacagttttccgtcttttctaagtgtatttaaggaaagagtatttaagtaaggggataaccatcagtgatacagaaatgatagcaccatggatttaggactggatcagtacacaaataataatttatgttaatttaggctgtcccttcgttaccttagcaggcatttcctgaaggtctggtgtgtgcaaggtatgtgttaagatttgtagtggaacaaaaatgagggcatagttcttgtcctaagatatttatggcctaataagagaaacatgccacacatgaataattaaaatgcaaaacaggatgagagaggtattataatggaggtacaaataacctgctatgggaattcaaggaagagattagttattataagcttccggtgttgagggagctttactagggagatgtcatcatacctgggctttgaaagaggggtaacattttgagaagcagaaatgataaagaaggtgatctagggaggagaaagaggtggctagctgcagaacagtgagaacacatagagtagattctgaaaagtatgagttgttcagctggactggggcatggtggatttaaaaaggattagtgactttttcaatttatttttttaatattttatagactactgtgtacaggtctttcagctccttggttaaatttattcctaagtattttaatttttgtagctactgtaaatgggattgctctcttgatttcttttttggaaagtttgttgttaatgtatagaaatgctagtgatttttgtggtgttgattgtgtctcctgtaactgtactgaatttattagttctagcagtttttttctggaatctttagggttttctatatataagattatgttgtcagcaaacagcaaaaa

SEQ ID NO: 697450 - DNA, 2842 bp, Homo sapiens
gttgccttggatacctaagatttttttttttttaattctcctggatttcatcattttgttccaggaaacatgtatttctagattcatacaggcaaagggaagtaacatttattgagagttctcttcatgacaagcacttgacttacattattacattggtccgcacaaaatttctctgggctcaataattcttcctccattctattaaaaaagaaacttattcagggtcactgttcaggctgaattgcgtccttccaaaattcatatgttgaagtcctaatccccatgacctcagaatgtgaccttgtttgaaaatagggtccttacagaggtaatcaagttaaaaccaggtcattaggatggaccctaatcaaatatgactggtgttcttctaggaagtagaaatttggacacagatgatgtgaagacacaggaagaagagccatctataagccaagaagagaggcctggaacagttctttctctcatggctctcgtggtttctcaatgctttgattttggacgtccagtcttgggaactgtgagacaatacctttctattgtttaagtcacccagtctgtggtacttgttaaggcagccctagtaaactaaagcagtcatatagttagtatgtgacaaagatgtattcaaactgaggtctagtacccaagcatatgcatggccttttcagtctcttttctgtgattttgagtgttctggggcagaacgatctggtgaatctcaagttgggcactggtgggacaagggtgttctctgcacttattaataggcagaggagaagccctaccacctaaaagagctttggagaggtgctctggggtctctggttggcacagcttgagctgtgtctggagcaagactggatctattttccttaagcacttctgctcccaccgcgttaaccctcctttttattggctcctccttccctaccccagatggagcgaacaaaagcaagaacttggaaatgggggcaaactgtaatattttgaacagctgcctttaaagacacaagagaataaaagtatgagaaaggcaggcttcattcactaaggagaaaataatcagaagcttgggggcagataaatgtgccctttattttgataagatacagaaactgctcattaaaaaaatcaatgatgatgacacaatgaataaatcatctgacatgtttaacaccctttaaggtcatatgcttttcactcaaatggatctgaagagaaaaatactccattgggcacatctgtctcttaagtagcacacattataaaccaaattggaaggatcagttttaaaagaaataagctttaatctttgcaaatattttaaatgtcttagtagcatgttgcctaaaaagtgagccatctgaatgattatttggtcacaaagtatgagcctacattaaataaagtctcagattaagtgtctccaaggggaagaccatattttataaattatccaagtagatatatttagaaaagtcaacattatatcggaaaaattatatttgtaaatgatatagatatgttcccaagcatacgaatttgtgagagctcactctaataagtctctaagatctaatttaaactgctttattggggcaaagatactcacggcaggaagtgcaaagaaagaaatgccaaggagtgcaaagcctgcagaaagcaatcttcccagccaagttaggggagttttgtctccatagccaatagttgtcaatgtaatctagaaacaaaataaatagaatgtgcagcttaagtacttgagaggaaagttaggacctatgaacaggaggcaagcaacgtttccactaaatcattattcaacaaatcttgttcgtgctttttattactgggctttaattttccatgacgcatgacagaacttctctttgtttaaggaaaggaataacctacatacttgttcctcccttataacacagttttccrtcttttctaagtgtatttaaggaaagagtatttaagtaaggggataaccatcagtgatacagaaatgatagcaccatggatttaggactggatcagtacacaaataataatttatgttaatttaggctgtcccttcgttaccttagcaggcatttcctgaaggtctggtgtgtgcaaggtatgtgttaagatttgtagtggaacaaaaatgagggcatagttcttgtcctaagatatttatggcctaataagagaaacatgccacacatgaataattaaaatgcaaaacaggatgagagaggtattataatggaggtacaaataacctgctatgggaattcaaggaagagattagttattataagcttccggtgttgagggagctttactagggagatgtcatcatacctgggctttgaaagaggggtaacattttgagaagcagaaatgataaagaaggtgatctagggaggagaaagaggtggctagctgcagaacagtgagaacacatagagtagattctgaaaagtatgagttgttcagctggactggggcatggtggatttaaaaaggattagtgactttttcaatttatttttttaatattttatagactactgtgtacaggtctttcagctccttggttaaatttattcctaagtattttaatttttgtagctactgtaaatgggattgctctcttgatttcttttttggaaagtttgttgttaatgtatagaaatgctagtgatttttgtggtgttgattgtgtctcctgtaactgtactgaatttattagttctagcagtttttttctggaatctttagggttttctatatataagattatgttgtcagcaaacagcaaaaa

SEQ ID NO: 697451 - DNA, 2842 bp, Homo sapiens
gttgccttggatacctaagatttttttttttttaattctcctggatttcatcattttgttccaggaaacatgtatttctagattcatacaggcaaagggaagtaacatttattgagagttctcttcatgacaagcacttgacttacattattacattggtccgcacaaaatttctctgggctcaataattcttcctccattctattaaaaaagaaacttattcagggtcactgttcaggctgaattgcgtccttccaaaattcatatgttgaagtcctaatccccatgacctcagaatgtgaccttgtttgaaaatagggtccttacagaggtaatcaagttaaaaccaggtcattaggatggaccctaatcaaatatgactggtgttcttctaggaagtagaaatttggacacagatgatgtgaagacacaggaagaagagccatctataagccaagaagagaggcctggaacagttctttctctcatggctctcgtggtttctcaatgctttgattttggacgtccagtcttgggaactgtgagacaatacctttctattgtttaagtcacccagtctgtggtacttgttaaggcagccctagtaaactaaagcagtcatatagttagtatgtgacaaagatgtattcaaactgaggtctagtacccaagcatatgcatggccttttcagtctcttttctgtgattttgagtgttctggggcagaacgatctggtgaatctcaagttgggcactggtgggacaagggtgttctctgcacttattaataggcagaggagaagccctaccacctaaaagagctttggagaggtgctctggggtctctggttggcacagcttgagctgtgtctggagcaagactggatctattttccttaagcacttctgctcccaccgcgttaaccctcctttttattggctcctccttccctaccccagatggagcgaacaaaagcaagaacttggaaatgggggcaaactgtaatattttgaacagctgcctttaaagacacaagagaataaaagtatgagaaaggcaggcttcattcactaaggagaaaataatcagaagcttgggggcagataaatgtgccctttattttgataagatacagaaactgctcattaaaaaaatcaatgatgatgacacaatgaataaatcatctgacatgtttaacaccctttaaggtcatatgcttttcactcaaatggatctgaagagaaaaatactccattgggcacatctgtctcttaagtagcacacattataaaccaaattggaaggatcagttttaaaagaaataagctttaatctttgcaaatattttaaatgtcttagtagcatgttgcctaaaaagtgagccatctgaatgattatttggtcacaaagtatgagcctacattaaataaagtctcagattaagtgtctccaaggggaagaccatattttataaattatccaagtagatatatttagaaaagtcaacattatatcggaaaaattatatttgtaaatgatatagatatgttcccaagcatacgaatttgtgagagctcactctaataagtctctaagatctaatttaaactgctttattggggcaaagatactcacggcaggaagtgcaaagaaagaaatgccaaggagtgcaaagcctgcagaaagcaatcttcccagccaagttaggggagttttgtctccatagccaatagttgtcaatgtaatctagaaacaaaataaatagaatgtgcagcttaagtacttgagaggaaagttaggacctatgaacaggaggcaagcaacgtttccactaaatcattattcaacaaatcttgttcgtgctttttattactgggctttaattttccatgacgcatgacagaacttctctttgtttaaggaaaggaataacctacatacttgttcctcccttataacacagttttccgtcttttctaagtgtatttaaggaaagagtatttaagtaaggggataaccatcagtgatacagaaatgatagcaccatggatttaggactggatcagtacacaaataataatttatgttaatttaggctgtcccttcgttaccttagcaggcatttcctgaaggtctggtgtgtgcaaggtatgtgttaagatttgtagtggaacaaaaatgagggcatagttcttgtcctaagatatttatggcctaataagagaaacatgccacacatgaataattaaaatgcaaaacaggatgagagaggtattataatggaggtacaaataacctgctatgggaattcaaggaagagattagttattataagcttccggtgttgagggagctttactagggagatgtcatcatacctgggctttgaaagaggggtaacattttgagaagcagaaatgataaagaaggtgatctagggaggagaaagaggtggctagctgcagaacagtgagaacacatagagtagattctgaaaagtatgagttgttcagctggactggggcatggtggatttaaaaaggattagtgactttttcaatttatttttttaatattttatagactactgtgtacaggtctttcagctccttggttaaatttattcctaartattttaatttttgtagctactgtaaatgggattgctctcttgatttcttttttggaaagtttgttgttaatgtatagaaatgctagtgatttttgtggtgttgattgtgtctcctgtaactgtactgaatttattagttctagcagtttttttctggaatctttagggttttctatatataagattatgttgtcagcaaacagcaaaaa

SEQ ID NO: 697452 - DNA, 2842 bp, Homo sapiens
gttgccttggatacctaagatttttttttttttaattctcctggatttcatcattttgttccaggaaacatgtatttctagattcatacaggcaaagggaagtaacatttattgagagttctcttcatgacaagcacttgacttacattattacattggtccgcacaaaatttctctgggctcaataattcttcctccattctattaaaaaagaaacttattcagggtcactgttcaggctgaattgcgtccttccaaaattcatatgttgaagtcctaatccccatgacctcagaatgtgaccttgtttgaaaatagggtccttacagaggtaatcaagttaaaaccaggtcattaggatggaccctaatcaaatatgactggtgttcttctaggaagtagaaatttggacacagatgatgtgaagacacaggaagaagagccatctataagccaagaagagaggcctggaacagttctttctctcatggctctcgtggtttctcaatgctttgattttggacgtccagtcttgggaactgtgagacaatacctttctattgtttaagtcacccagtctgtggtacttgttaaggcagccctagtaaactaaagcagtcatatagttagtatgtgacaaagatgtattcaaactgaggtctagtacccaagcatatgcatggccttttcagtctcttttctgtgattttgagtgttctggggcagaacgatctggtgaatctcaagttgggcactggtgggacaagggtgttctctgcacttattaataggcagaggagaagccctaccacctaaaagagctttggagaggtgctctggggtctctggttggcacagcttgagctgtgtctggagcaagactggatctattttccttaagcacttctgctcccaccgcgttaaccctcctttttattggctcctccttccctaccccagatggagcgaacaaaagcaagaacttggaaatgggggcaaactgtaatattttgaacagctgcctttaaagacacaagagaataaaagtatgagaaaggcaggcttcattcactaaggagaaaataatcagaagcttgggggcagataaatgtgccctttattttgataagatacagaaactgctcattaaaaaaatcaatgatgatgacacaatgaataaatcatctgacatgtttaacaccctttaaggtcatatgcttttcactcaaatggatctgaagagaaaaatactccattgggcacatctgtctcttaagtagcacacattataaaccaaattggaaggatcagttttaaaagaaataagctttaatctttgcaaatattttaaatgtcttagtagcatgttgcctaaaaagtgagccatctgaatgattatttggtcacaaagtatgagcctacattaaataaagtctcagattaagtgtctccaaggggaagaccatattttataaattatccaagtagatatatttagaaaagtcaacattatatcggaaaaattatatttgtaaatgatatagatatgttcccaagcatacgaatttgtgagagctcactctaataagtctctaagatctaatttaaactgctttattggggcaaagatactcacggcaggaagtgcaaagaaagaaatgccaaggagtgcaaagcctgcagaaagcaatcttcccagccaagttaggggagttttgtctccatagccaatagttgtcaatgtaatctagaaacaaaataaatagaatgtgcagcttaagtacttgagaggaaagttaggacctatgaacaggaggcaagcaacgtttccactaaatcattattcaacaaatcttgttcgtgctttttattactgggctttaattttccatgacgcatgacagaacttctctttgtttaaggaaaggaataacctacatacttgttcctcccttataacacagttttccgtcttttctaagtgtatttaaggaaagagtatttaagtaaggggataaccatcagtgatacagaaatgatagcaccatggatttaggactggatcagtacacaaataataatttatgttaatttaggctgtcccttcgttaccttagcaggcatttcctgaaggtctggtgtgtgcaaggtatgtgttaagatttgtagtggaacaaaaatgagggcatagttcttgtcctaagatatttatggcctaataagagaaacatgccacacatgaataattaaaatgcaaaacaggatgagagaggtattataatggaggtacaaataacctgctatgggaattcaaggaagagattagttattataagcttccggtgttgagggagctttactagggagatgtcatcatacctgggctttgaaagaggggtaacattttgagaagcagaaatgataaagaaggtgatctagggaggagaaagaggtggctagctgcagaacagtgagaacacatagagtagattctgaaaagtatgagttgttcagctggactggggcatggtggatttaaaaaggattagtgactttttcaatttatttttttaatattttatagactactgtgtacaggtctttcagctccttggttaaatttattcctaagtattttaatttttgtagctactgtaaatgggattgctctcttgatttcttttttggaaagtttgttgttartgtatagaaatgctagtgatttttgtggtgttgattgtgtctcctgtaactgtactgaatttattagttctagcagtttttttctggaatctttagggttttctatatataagattatgttgtcagcaaacagcaaaaa

SEQ ID NO: 697453 - DNA, 3682 bp, Homo sapiens
  misc_feature 1901, 1902, 1903, 1904, 1905, 1906, 1907, 1908, 1909, 1910,1911, 1912, 1913, 1914, 1915, 1916, 1917, 1918, 1919, 1920,1921, 1922, 1923, 1924, 1925, 1926, 1927, 1928, 1929, 1930,1931, 1932, 1933, 1934, 1935, 1936, 1937, 1938, 1939: n = A,T,C or G
  misc_feature 1940, 1941, 1942, 1943, 1944, 1945, 1946, 1947, 1948, 1949,1950, 1951, 1952, 1953, 1954, 1955, 1956, 1957, 1958, 1959,1960, 1961, 1962, 1963, 1964, 1965, 1966, 1967, 1968, 1969,1970, 1971, 1972, 1973, 1974, 1975, 1976, 1977, 1978: n = A,T,C or G
  misc_feature 1979, 1980, 1981, 1982, 1983, 1984, 1985, 1986, 1987, 1988,1989, 1990, 1991, 1992, 1993, 1994, 1995, 1996, 1997, 1998,1999, 2000: n = A,T,C or G
tcctttgagagaggtagattttaagagttctggattacctggcttttttttttattcatgtgacttagagctcctccttgtttattagcagttctatttctttctctagccccattttctcttgaagcagccataaaagtaccatctgtttttcagcatcattttatttctgctttctcctccctgcacttttctcttctctgaatgctttatgcgataacaatttattcctgatttattatccacctgctttcatagcctccccctttctgttcctcctccatccctatcccaccctggatggagtggtataccataattcttaaggacacagctttggagtcaagtaagggccagctcaaccacttatgcatgttagtgacttgaccactatgagcctcaatttcttcatttataagaaagagaaggttataatatcatctactacataggttggcttgaagaattaaataaaataatgtacatcagggtttctcagccttggcactattgacatttggggctgagtcattctttgttctggaggctgtcctgggcattgtaggatggttagcagcaaccctagtctctaccactagatgctggtagcaacccccttcccagctatgacaatgcaaaatgtctccagacattgctaaatgtcccagggaggcaaaattgtccccattcggaatcattgatgtatataaaacatttagcacagtgcctggtacatagtagggacttgatcaataattgtgatggatggatggtcagatgaatgattgaatattcatttttaatacaagtgtctaatataattcttgacagtcaattaactacttaatacataaatggataaacaaatgaacctgaagccagtgagcttcaagggctgtccatagtttctaccttacaccaaaatgtgttatcttcactaaaaacaagcttcctatgtttcaaaaaatattttagacaattaactaacggcacagcttaagctactcccccaatttaatatatakgcatatactttaaataatagggagattttaaaataaactctaatggatgatagctataacaattatgttgctatagaattcagagctagaaattgaagtgatcctttgattaacctgagtattttaggttgatatcccagtcaacaagccattgatgtggtaagagaacaaagctcagccaacttttaagtgttttttaatctaatttatcttatttaaatatttattgagtgcctactatatttcaggcactgttctaggtactcaggatccaattgtgaacaaaacaatgataaaacactgtggaaccaccattctatgaaatagtagatcacaaaaatagtaaatacataaatagaagtaaaaataaagactactcataacttgtaaaatactagcctaggaaatagtctaggtggtactgacagcaaaattccagtggatgactgtaacccaaccagaaacatttttgtgactgcactcactgtttgccatttggttgctcatctatgatttcagtttactgaactctaactttctcgtctgatctgaattacaatgagggtattaaatcaaatctgtggttacctttgcatattttggaacttcaaacatttagattgtgattcactgtgtgcataattttttaaattgtctcaaatcaacaatctttctcttacttttctaggttttctctaatgaactaactttatagcatactttttgtgctgtagtctaacaaaccgatagctgagtttttttaaaaatgaatacaatatatgctttttctgcctcgcttttttcatctgtaaaatgggatctgtgggatacctaacacataaagtcattgtaagaattaaataaggtaatgtttannnnnnnnnnnnnnnnnnnnnnnnnnnnnnnnnnnnnnnnnnnnnnnnnnnnnnnnnnnnnnnnnnnnnnnnnnnnnnnnnnnnnnnnnnnnnnnnnnnntgaaagccacactgaagcgcggggggggggggcagccctcccaggtaggtatcagtgtcacagctgcccctgtagttgagtctttcaagtctgttaacccacccatacccccacacacaaaaaaaggtgttaaggtttggcttctcttattctcggtggctcctaaagagattcaaacctatttagtagcagttcgggcacaaaactaaatggaatcagtatcattcctcacaatccacagacgggggttaaagattaaaataaggtaaattttatagagatttatttttactatttcaggcttcctgggaatggtctcatttcgtaaagcccccagcatcctaaaggtaagcaccacagttcttgaaaaacaaggattatttattttgcacccatcgcctgaccccaagagatgagtgcttagagagtaatccatctttgtacgtttagatctctcaatcccatttctcatctggaccctctcgggagggtcttcaagcttttacttgcagatcaaactcacatcagaggcaaaaaaagagaaaaataggagtcctaataggattatagtttacaatgaggcaatgggacccatcggattaaaatttggaatttgctttcacaattttaaagtaagactacttttcttcacatttcattggccaaagtaaatcactcatccatgcctaaactcaaagaaaatggggaagtacaattttaccttttaccatgtgcctataaagacgcaagaaccaaggacattatggacagtcctaatgattaccacagagatctgtaattaaaaaaaaaaaaaagggcttagtcttggagtcttggaaacctggactctatttcaactatcacagaaaatgttaaatcatattcaccacctaattaaagaagtcctcattgaaatacccaagcagtaagtcatgagaaaggctttctgtgagtcacccagcttgattagcgtagtcagttcctcaggttgttcaaaagttattaaattgctcatcccacatttgagagcaccagctgcttttattcatagcccaacaaaaccttaatcctagtggcttcatgggattcaggacacctaactactgtgactcacaaaaaaccacctgttcttactgatcttgggagatatcagctgaggaaacctccatgacattccctggcagtaccgtcttaatggaggtttgtgatgcagcagaatgcataccattgggaagcaccagatccatcattaactacattacttccctgttctgcccttggcctcagttttcccacccacaaagagaaggacaagagttgggcaagatgattcctaagctctaatgggaaatgcctcctggtgggtggtatctaaaattcttgtcagcacctaggacagagatattcatagcactccagggatttcagagaggatggaaccttagcatggatagaagcatggatgctgttgaatgcatgtttggattaaaatcctcttttcatttagatcttgaagtttagttgaactttttatggagtttaagaccctttcaacattttgatattaaaaaaccgaaaatagaacctaactcctgtgccatttattccttgggagtatgaaccaaaaataaaaattatatagaaattgtatttcttgtcttcatgaagtttgctaggtaaat

SEQ ID NO: 697454 - DNA, 609 bp, Homo sapiens
tgcctttattccaattaatctccttttgtgagttgatttttcagcaaaccttcagaggaagaagggggatttttttctttgtcccctacagcattctgtccctcagagcaccccctgaacctgcctcagtaagaccagcatgtggaaaggggagaaatctagtacacagcctcattcagtgcctgtccctccagcctgagccaccagccccggagaggcccgggccaccaggggatgcatacctgagagctgcctccggggcggcatccatgttycctatacccctgagatggctcaccagggagcccatggctgaaatctgaagacaatcaggtctgaagacttcctgctttcccagaacaccaccaagagatggccacgtcctcaggttctgcatcagactgaaggaagctcaaggatgttggtgattccagtgctggcagagatcatggcttgctccaggcgtctctccccacttcacagtggccagcgagacaccttgcatgtggctcaccagaagaagccacgttttctctagaggcggcatacacatctggaacgcgtctccctcccaaggaatttgtggtgccttcacaggagggtgtgtgg

SEQ ID NO: 697455 - DNA, 609 bp, Homo sapiens
tgcctttattccaattaatctccttttgtgagttgatttttcagcaaaccttcagaggaagaagggggatttttttctttgtcccctacagcattctgtccctcagagcaccccctgaacctgcctcagtaagaccagcatgtggaaaggggagaaatctagtacacagcctcattcagtgcctgtccctccagcctgagccaccagccccggagaggcccgggccaccaggggatgcatacctgagagctgcctccggggcggcatccatgtttcctatacccctgagatggctcaccagggagcccatggctgaaatctgaagacaatcaggtctgaagacttcctgctttcccagaacaccaccaagagatggccacgtcctcaggttctgcatcagactgaaggaagctcaaggatgttggtgattccagtgctggcagagatcatggcttgctccaggcgtctctccccacttcacagtggccagcgagacaccttgcatgtggctcaccagaagaagccacgttttctctagaggcgrcatacacatctggaacgcgtctccctcccaaggaatttgtggtgccttcacaggagggtgtgtgg

SEQ ID NO: 697456 - DNA, 2220 bp, Homo sapiens
  misc_feature 988, 989, 990, 991, 992, 993, 994, 995, 996, 997, 998, 999,1000, 1001, 1002, 1003, 1004, 1005, 1006, 1007, 1008, 1009,1010, 1011, 1012, 1013, 1014, 1015, 1016, 1017, 1018, 1019,1020, 1021, 1022, 1023, 1024, 1025, 1026, 1027, 1028: n = A,T,C or G
  misc_feature 1029, 1030, 1031, 1032, 1033, 1034, 1035, 1036, 1037, 1038,1039, 1040, 1041, 1042, 1043, 1044, 1045, 1046, 1047, 1048,1049, 1050, 1051, 1052, 1053, 1054, 1055, 1056, 1057, 1058,1059, 1060, 1061, 1062, 1063, 1064, 1065, 1066, 1067: n = A,T,C or G
  misc_feature 1068, 1069, 1070, 1071, 1072, 1073, 1074, 1075, 1076, 1077,1078, 1079, 1080, 1081, 1082, 1083, 1084, 1085, 1086, 1087: n = A,T,C or G
gatctgtttattcttgggtcatagttgtagtatagtttccaggttggtaataaggactagaactctttcttgtttttttttttaatgttaattataatgtaattattggacacttaaaatatttttgatacaacttttggatggttagtgccactcattctttgttcagagatcttttgaaattcagcgttttattaataatatatctgtatataacttattgtctaagcagtttcttaaatgttcagttacaaagggactctgctagatactatgcagatcacctcataaacatgcttctaaagagctagcattatatctccaattttttaaggaacatgtcatggtatccctcaactatactgtagattaagaacacattccttccaaaaagtctccatggattgaaaaatgggaaagaattgatttcaaaattctttaaatttatttagcctcagaagtctttcaatttgttattctgtagttacttaaaagtaaagagaataccagatgggaaaaatctagtgaatatttgggttaaactttgttaattagaactcctaaaaattctgggtggagtttgtgattatactgcctgtgaagaaaaatattttatcagagtgtaattgtaccaacaatatttcagaaggtttaattattataaagtaagataaatttagttcaagtaatcaaatatctatttggatatattctagtaatggatatggaaggtatagcagatactttaagcttagccttatgaattattataaaaccttgaccttgatggagtagaaatagagctgtgctctgattttacctcacctctagagtctgttttatatgtagactacttaaggcacttccttcggacagtgttgggagagacagtgatagattttttttcagatgcctgacttgctttttttcagatgtcattacaatgtactgaaatacttttttcaaatacgtaatattcagatagagnnnnnnnnnnnnnnnnnnnnnnnnnnnnnnnnnnnnnnnnnnnnnnnnnnnnnnnnnnnnnnnnnnnnnnnnnnnnnnnnnnnnnnnnnnnnnnnnnnnnttattttactgaattatttattcttatagcttttttgtagattgcttgtgatttttcttatacgtagtcatgtcttctgtgaagagatacttttactttttccttcttgatttttataccttttatattttttttcttgtcgtactgcagtggctaggagttctaatacattgttcaaagtaagtggcgagaatggacatactaggtttgttcccaactttaggggttaagcatccagtcttttgccattaactatgttgtgtcaactgtaggttttttaaagatgctgtttattaggttgaggatgtctccttgtaattgtagtttactgagagttttatcatgaatgagtgttgaattttgtcagatgcattgtcttcatttttctctagatgactgtatgattttttttcctttattctgttaacatggtaaattacattgttttttggatgttaaattagtcttatattcctgggttaaactccactttgtcgtggtatggtatctgtcttagrtgttgctaatttttcttaaggaattttgcatctgtgttcttgagatacattggtcttgagttttcttgtaatatctttgcttgattttggtgtctgattaatgctggctgcataaagcaagttgggaaatgtttaatgaatagtatgctgttaaatgaatagatttttggtctactattatataattcgtctgatatataattaaatactctgctattgtataactcagaactccttgggttgtaagacactcagctcaaactaagtgatacaaatagtatttattggtttaatggctctaaacaagggcttcaagtttggctgaatccaagcctgtagatattattgtgagtgttaagcatctgtctctctttccttttgctagtttctccatgctggcagagagccattatcagctccaggattatatattacatagaccatcagattgcagaataaaaaagccctctatctcatggtgtcaataacaatatgtgtaaaaagaacttgattgttcctacctgaatcacatgtatccactcactttgtttagggcaggggttgacagctgcaacctgtgggccaaattctgcttgctgtctgttttttaaaaat

SEQ ID NO: 697457 - DNA, 604 bp, Homo sapiens
cacagagcgctagatttttaaaagcaggatcagataaaccatacgctcaacattaaaaaagatattcagatgggttgcttaaattgttattgtcacttgctgtcatttctaagttattcacattaagatgcaaaaagacaagaaggaagtggacttctgaacttctgagaaaaaattagaatattaaaacatcctgataccctcacatttaattcaaaaacttgtcctcatgatgtcattcaatataatatacttgaacattaaaatgtatataataaaatatatttattcaaagatttattcaaaataaaatgaatatataaaataagagacagggaaagagaggtgtctggggagtgactagtgattagtatcacagaaatccttgcttcatctttaccgaccccctggtgaargacaatttaatctcccgacaaactctttctcattattgtataaacaaaaaacagtctctcttactttaaagaaaaataaaaggctgccatttacttcatgacccctatctcccttttatcagtcactcttctgttaagagtattctttgcttccatgtttttatttggataaaactgactatgatgca

SEQ ID NO: 697458 - DNA, 1225 bp, Homo sapiens
tatttatgatttaaatataccttacacatataatgtgaaggtaattttatataatatttctaataatttggtgcatgaaacaaattttttactgcatttgactatgacccattgcatggggtgaagtgtgaaatcttccacttatggcgtcatgtctgtgctcaaaaagttttggcttttggagcattctagattttgaattttggaattagggatgctaacctgtacattgtctgtcttctgacttattacggtattatgaaatgttttgctattttacaacataaattgccatctttccaactttttccaactattttgctgcatagcactaggataatgtcataaatcgtagtacttttgctacattaataactcattttaagtcaacaatttctgtgtgtagaatagtctatgatctgtaagaaaaaaattacaaatgcaattacttgccacaataacacattaacacaagagtataatgtggctgtttgagtcatgccttgaaagaaatatccaaagattaaagtttcttaccttccttagtatttcagtcctctatagggaaggcagatgagggaagagatggagaaagtggaaaagatcatgagaggatttttagatctgaaatgccacatcagattttcctttactttctttgacctgtcacatgacctatcctcattttgtttatgatattaattaaaatgtctcgttttaagttcttcaacttcttaataagaaattgcattttattatgtcaaaggtaacagagctttcaggagaaaatgtccattaaccaaagaagaaaataaaattgcccattcttggatggttattgccaaattttgccggtgacttttcctataattctattcttataatcttttagcatattattttttcagctatgttaataccttccataactaccctgtgagttgtatttcttcaggtgactctatttctactctgacgcatttgtggatttcaaaactgattatttagagaagaaacttgttctcattatttgagttcttgccagtcatcaattgtctcttccatatactctttattttagcatttttttctatttactcaagtaaggaggttgcaagggtttgtgaattcccatgcctgaaaagaagccagagctgtcgggaaagtactttgccaaactcactggacaatgccccatggtaagatrttgcggcttctagtggtc

SEQ ID NO: 697459 - DNA, 663 bp, Homo sapiens
tttggaatagcagtgttccagtgtgtgaacgtgagtagaaagaactacgtagtttggatagctctccttatttttgttttccagtgttttactgcacggaatcacttgtctggatctttacttaactaaattactgattaaaatacttctctgttggaagaatttcaagaagggtcttgtaggacttttctgacatttgttactaatctgtaaatcacttagtttaatgactgtttaattttgtggggaatgtgtggcaagaaactaaatgacataaaagtgcagcacattttagtcagtcatttatttttaattttcttataaggagtaatctttcttacattttttttttcttttttgagacagttacccaggacagaatgcagtggtgcaatcacagctcactgcagtttcaatggcctgggctgtagtgaccctcccacttcagcctcccagtagttgggactacaggtgcatgccaccacacctggctaattttttatattttgtagagatggagtcttgccatattgcccaggctggtctcaaactcctgggctcaagctatcctcccaycttggcctccaaaagtgttaggattacaagtgtgagccaccgtacccagccaaattcttatgttcttttatcccctcacgtatcata

SEQ ID NO: 697460 - DNA, 663 bp, Homo sapiens
tttggaatagcagtgttccagtgtgtgaacgtgagtagaaagaactacgtagtttggatagctctccttatttttgttttccagtgttttactgcacggaatcacttgtctggatctttacttaactaaattactgattaaaatacttctctgttggaagaatttcaagaagggtcttgtaggacttttctgacatttgttactaatctgtaaatcacttagtttaatgactgtttaattttgtggggaatgtgtggcaagaaactaaatgacataaaagtgcagcacattttagtcagtcatttatttttaattttcttataaggagtaatctttcttacattttttttttcttttttgagacagttacccaggacagaatgcagtggtgcaatcacagctcactgcagtttcaatggcctgggctgtagtgaccctcccacttcagcctcccagtagttgggactacaggtgcatgccaccacacctggctaattttttatattttgtagagatggagtcttgccatattgcccaggctggtctcaaactcctgggctcaagctatcctcccatcttggcctccaaaagtgttaggattacaagtgtgagccacygtacccagccaaattcttatgttcttttatcccctcacgtatcata

SEQ ID NO: 697461 - DNA, 595 bp, Homo sapiens
ggccttaacctgtgggtctcaaactcaaacrtaagcagggaccaaggatgggaccgggctgattttgcagaggcatcttcagttgtgtcttctttcccagtcgtcagtatgttcagcactacaaaggaatcagtttctgttttccttgaaacatgagcccctccagacctatctttcagttttccatttttttttcttaataaggtgtaatttccattacagtgaaatgcacaagtgagggctgaggagttttgacaaatgtagacacctgtgtaaccacagaatcaagatagagggtatttccaggacattctcattccccagaacattccctcatgtgcccttccagtaagtctcatcctcggaggtggctgctgttctgatgtctgtcgccatatggcttagttttcttgttttgaagctgcatgtaaatcatttcacttttgaccaagacaaggatatgagaaatatttctctcttttttaaaagtaagaaacaacattgacatgatgaaaattggcagctcaccctggggccacagtgaggaggagataaggggttggggtgggctgtggaaccccagggactcgtggcc

SEQ ID NO: 697462 - DNA, 666 bp, Homo sapiens
ttaaacagtaaattattgttaatatcaactccaacattcagctggcataatggacacattttcctttccaatggacccaacaatggttccaaaattcctatctagctgaaataaacagaaaaaggatttgtcaaagtatatttaaatttaatttcttgcaccagaatagaaagtaaaaatctaaaaagcctgtatcattttttgmagagacacaccattaacatggacaaataataacaaggtaactatccattccccgcaatatattttttaaaactatcctgatattctgacgccagtgtagtgtaaaaagggagcgaaagcatccctgtattctgtttttaatattctaaagcagactgtattctaactttcaagtgtacgagatgatgattcacttttacaaataaagccatttgtgttagccataaaaacattctgccaagatacttgtgagtatttagcccattttggttggaagggtgacaaggtaggtctcatgtacagaagttcatctctttctgactcttgcgtgttaatcacacagccaatttttgtaataatggatagagcaatggaaacaaagacaaagtcatagtaattccttgaaatattatatatttgcctagtgctttacatagtgatttcaaaattctggctgacttg

SEQ ID NO: 697463 - DNA, 640 bp, Homo sapiens
tccttccttatttccactctctatagaaaatatatttctccttggctttcatttaaagaaatcagcaactgtgtagtaaactaacatgaattttaacagctaactggatacctatcccatgtggttcagccatggtctccaatgtagaaataattacactctagagagacacaggacagagagcaggccrgaaactctggccctgctgctcacttctctgctgatttttctttctttcagtccaagataaaatgccgagcatctttctagagccaacaatgtggaaaatgtttggaatgcccttcctgaggtttaaaatagaattttttttagttatcggtgtcatttaaaaatattcttgcctaagaggatcctcttttcttacagaaaaaaaaattctatagaaaacaataccacttggccctagatttctttttcagttaagctcagatatttaattctagttttttttgtggtttttaaaaaaaatctgatcgtaaggtaaattgcctgggttctgatttcagctctgctctgtgaccacttctccacgcctcagtttcttcacctgtaaaatggacataatggttaccaaccccataggggttttgtaaggcttatattaactaatacaggaaag

SEQ ID NO: 697464 - DNA, 1061 bp, Homo sapiens
  misc_feature 2, 3, 4, 5, 6, 7, 8, 9, 10, 11, 12, 13, 14, 15, 16, 17, 18,19, 20, 21, 22, 23, 24, 25, 26, 27, 28, 29, 30, 31, 32,33, 34, 35, 36, 37, 38, 39, 40, 41, 42, 43, 44, 45, 46,47, 48, 49, 50, 51, 52, 53, 54, 55, 56, 57, 58, 59, 60,61: n = A,T,C or G
  misc_feature 62, 63, 64, 65, 66, 67, 68, 69, 70, 71, 72, 73, 74, 75, 76,77, 78, 79, 80, 81, 82, 83, 84, 85, 86, 87, 88, 89, 90,91, 92, 93, 94, 95, 96, 97, 98, 99, 100, 101: n = A,T,C or G
gnnnnnnnnnnnnnnnnnnnnnnnnnnnnnnnnnnnnnnnnnnnnnnnnnnnnnnnnnnnnnnnnnnnnnnnnnnnnnnnnnnnnnnnnnnnnnnnnnnnntgcaaagctggctagcaaaatatttttgtctctggggtgaaacaaaaacaacaatgccatttttctaaccttggttataaaaaccctaggctggaacatgtaaatcaacttacaaaaataggcacgcattggaaatggactcagactggggaggtgggtatcatcaggtggcaaggtttatttattttttgtcagttgggagaatgtcaaagagcagggtggatccgtggaaatagcactggggaacaaaatacatttggagtcagtcccagctccttccctaactatgtgactctgggcaaattatgcacctcctttgaccctttaaatttcttacctacaaaatgggtaaaataatggctataataatatctaccttacagggccagcatatggattaaattagataatattataaagcgcccagtgcagagcctggtacatggcagatattcaatgaatgtgagtttttccccattattttcctagactacatatttgtttactattttcccctattccatatctttcttggatactgttgaccttgtagcctccctgtatgtaccagagcaacctgtgtagaggattcctttaaaatatttacataaattccatctttactccagtaagtctatctgattataataaaatcactcattctttatcttccattaaattattttattgatcctataaaggtgtctcataaaatttagtatgtaaagatctaagatgcttgatacagctgccgaccatkaagttataaaatacggaacactaaaccaaggggaaattcagagaaccttttaatttccttactccatttcttcagaataacacccaaataaaggtattaaataaaaaagattgcattttattttcctggatggaaaaggattaacactaagcaacagtgtctgaaagttattattatggtttgtgtgtgtgtgtgtgtgt

SEQ ID NO: 697465 - DNA, 1061 bp, Homo sapiens
  misc_feature 2, 3, 4, 5, 6, 7, 8, 9, 10, 11, 12, 13, 14, 15, 16, 17, 18,19, 20, 21, 22, 23, 24, 25, 26, 27, 28, 29, 30, 31, 32,33, 34, 35, 36, 37, 38, 39, 40, 41, 42, 43, 44, 45, 46,47, 48, 49, 50, 51, 52, 53, 54, 55, 56, 57, 58, 59, 60,61: n = A,T,C or G
  misc_feature 62, 63, 64, 65, 66, 67, 68, 69, 70, 71, 72, 73, 74, 75, 76,77, 78, 79, 80, 81, 82, 83, 84, 85, 86, 87, 88, 89, 90,91, 92, 93, 94, 95, 96, 97, 98, 99, 100, 101: n = A,T,C or G
gnnnnnnnnnnnnnnnnnnnnnnnnnnnnnnnnnnnnnnnnnnnnnnnnnnnnnnnnnnnnnnnnnnnnnnnnnnnnnnnnnnnnnnnnnnnnnnnnnnnntgcaaagctggctagcaaaatatttttgtctctggggtgaaacaaaaacaacaatgccatttttctaaccttggttataaaaaccctaggctggaacatgtaaatcaacttacaaaaataggcacgcattggaaatggactcagactggggaggtgggtatcatcaggtggcaaggtttatttattttttgtcagttgggagaatgtcaaagagcagggtggatccgtggaaatagcactggggaacaaaatacatttggagtcagtcccagctccttccctaactatgtgactctgggcaaattatgcacctcctttgaccctttaaatttcttacctacaaaatgggtaaaataatggctataataatatctaccttacagggccagcatatggattaaattagataatattataaagcgcccagtgcagagcctggtacatggcagatattcaatgaatgtgagtttttccccattattttcctagactacatatttgtttactattttcccctattccatatctttcttggatactgttgaccttgtagcctccctgtatgtaccagagcaacctgtgtagaggattcctttaaaatatttacataaattccatctttactccagtaagtctatctgattataataaaatcactcattctttatcttccattaaattattttattgatcctataaaggtgtctcataaaatttagtatgtaaagatctaagatgcttgatacagctgccgaccatgaagttataaaatacggaacactaaaccaaggggaaattcagagaaccttttaatttccttactccatttcttcagaataacacccaaataaaggtattaaataaaaaagattgcattttattttcctggatggaaaaggattaacactaagcaacagtgtctgaaagttattattatggtktgtgtgtgtgtgtgtgtgt

SEQ ID NO: 697466 - DNA, 1420 bp, Homo sapiens
ttgtaactcattcatctacaccacagcactcatttattcatacatccaccttttcattcattcattcagcaagatttactggacccaatcttcagaagctcagccttggggtcagagagttgcagtagtgattttttttttttaattttattttttagatggaatctcactctgttgtccaggctggggttcagtgatgtggtcttggctcactgcagtctctgacttcaagcaattcttctgcctcagcctcctgggtagctgggactacaggcatgccccatcatgcctggctaatttttgtatttttagtagacacatggttttgccatgttggtctggttggtcttgaactcctgacctcaagtgatctgcctgtcttggcctcccaaactgctgggattacaggcgtgagtcactgtacccagtcatgattttttttttttttttgcactcgttcatctgtatatttgtttcctccttcacactgaaagcctcatttggttttatatccctaatgcctggcttaataaatgtttgttaaataaatgaagataattatgaaacaaacaagcacagactgttaaggtggagcttgaagcagccctaactcaaactgagaggatcagggaaggcttcctgggagaggtgatgtctgagctgaaatttacttatttcttgcctttccctctcaaactgtgagcatctgaagggcaaagattctgtcttattcacatttttgtctgggctagcatataacataatgcttggtacgtattagttaattcaagaattttttttcaggctgggtgtgggggctcatgcctgtaaaccctagcactttaggaggccgaggtgggcagataacttgaggccaggagttggagaccagtctggccaatatggyaaaatctcatctctactaaaaatacaaaaattagccgggtatgctggcacatgcctgtagtcctagctactcgggaggctgaggttgcagtgagcctagattgtgccactgcactccagcctgcacaacagagagagagaatctgtctcaaaaaaaaagattttttttcaacttttaaaaattgtagtaaaatacacagaacaaaatgtatcatcttaagtgtatggttcagtggtattaaatatattcatttttgtgcgaccagcaccaccctccaatttccagaatgctctttcatcttgcaaaacaggaaatatttttgaatgcatgtcaaatatctttttccttgctccccattcctgcacgtctaccccatattcagtttttgagacagtccaataattcagctcacccacagccagcacctcttgtttaacatgaggcttagccacagtgtacacaaccagccaacaagacttagaataactaccaggaatgctcagatttagattg

SEQ ID NO: 697467 - DNA, 1420 bp, Homo sapiens
ttgtaactcattcatctacaccacagcactcatttattcatacatccaccttttcattcattcattcagcaagatttactggacccaatcttcagaagctcagccttggggtcagagagttgcagtagtgattttttttttttaattttattttttagatggaatctcactctgttgtccaggctggggttcagtgatgtggtcttggctcactgcagtctctgacttcaagcaattcttctgcctcagcctcctgggtagctgggactacaggcatgccccatcatgcctggctaatttttgtatttttagtagacacatggttttgccatgttggtctggttggtcttgaactcctgacctcaagtgatctgcctgtcttggcctcccaaactgctgggattacaggcgtgagtcactgtacccagtcatgattttttttttttttttgcactcgttcatctgtatatttgtttcctccttcacactgaaagcctcatttggttttatatccctaatgcctggcttaataaatgtttgttaaataaatgaagataattatgaaacaaacaagcacagactgttaaggtggagcttgaagcagccctaactcaaactgagaggatcagggaaggcttcctgggagaggtgatgtctgagctgaaatttacttatttcttgcctttccctctcaaactgtgagcatctgaagggcaaagattctgtcttattcacatttttgtctgggctagcatataacataatgcttggtacgtattagttaattcaagaattttttttcaggctgggtgtgggggctcatgcctgtaaaccctagcactttaggaggccgaggtgggcagataacttgaggccaggagttggagaccagtctggccaatatggcaaaatctcatctctactaaaaatacaaaaattagcygggtatgctggcacatgcctgtagtcctagctactcgggaggctgaggttgcagtgagcctagattgtgccactgcactccagcctgcacaacagagagagagaatctgtctcaaaaaaaaagattttttttcaacttttaaaaattgtagtaaaatacacagaacaaaatgtatcatcttaagtgtatggttcagtggtattaaatatattcatttttgtgcgaccagcaccaccctccaatttccagaatgctctttcatcttgcaaaacaggaaatatttttgaatgcatgtcaaatatctttttccttgctccccattcctgcacgtctaccccatattcagtttttgagacagtccaataattcagctcacccacagccagcacctcttgtttaacatgaggcttagccacagtgtacacaaccagccaacaagacttagaataactaccaggaatgctcagatttagattg

SEQ ID NO: 697468 - DNA, 640 bp, Homo sapiens
acattcatgaatactagtaatataaatgtcaaaaaatggtgaaatgtcatgaaatatacatgtttcagggtaaaattctatcatttggaaattaagatactctaaaaatagaattgccttttattcttcaccaaatatgcacaaatattggaggattgtctcacatctgtaaaatgtccccatgcctatatgttgacttgattggtagattcttttcatcattaagcaagaatagagttcaagccatcaacatggtttccctgcatctaaaacttcacagatggagaagtgtttttttttcttcttctagataattcaacaacttggctaattatattgtctttataatttagtatcaatggagtaaataaccagatgtgaccaccagttcttcttcctatattctgttgaacatataaacarctgcagttctcagaaagtaataaataaaacttacaactaaaatattaagcaaacttagtgacctgttacatttgtctaaatagtgggtttctctcttccagagaaaattgcagacaatgtattgttattacattgacaatatttcctttggaagttaacaactgttaatttttttctatttatagtatatcactttctctaaaggtaataaaatttg

SEQ ID NO: 697469 - DNA, 686 bp, Homo sapiens
ccatttgttgagtgtgtggagtactctgaggcccagtagaaggtggatacccaagacggaagaccacccaatgaagaacaccacttttggatttcgtatgagtaaaaaattttattgcatccaaccatgagattgtgggtcccactctgtcacccaggctgtacagtggcatgatcttgcctcactgcaacttctgcctcccaggctcaagcaattctcccatcttagcctcccgagtagctgggactacaggcgtgcaccactaaacccagctaattcttttgtatttttagtagagatggggtttcgccacgttgctcaggctggtctcaaacacctgagctaagcgatctgccygccttggcctcacacagtgctgggattacaggtgtgagccactgctcccagctctaaacattcttgagtactgttttgccatttgtatatgcagatgatggttttgttctgacagcaattatctgacaccaactggttgtcctgctattcaattcaattgtgacattaactactcaggagttagtgcagaccccacaggttaagggtttctgtctcacaaggtgtcccctgcttcagatgccagtcacaagttctgggtgttcccaagccacctgcacttctgcccagctggctacatatttgggggttctgatgaccactcatccttt

SEQ ID NO: 697470 - DNA, 438 bp, Homo sapiens
ctttttaattcataactctttcacatgtagttttcagccaaaaatatttggaagtatgtgataacatttttttatagtcactatgactacatgtacatagtgattgggacccaggaatattgcataatacagcataataaatatcccacatgaatgcaacagtagtcctggtgaaaaaaaaaaaacaaaaaacstgacacactgatatgggttggctgtgttccaacccaaatctcatcttgaattgtagctccagtaattcccatgtgttgtgggagggacccggtgggagataattgaatcatgggggcagttttccccatactgttctcgtggtagtaagtctcatgagatctgatggtttcataaggggtttcccctttcaattggctcccattctctcttgtctgtcggcatgtaagacatgcctttcacctt

SEQ ID NO: 697471 - DNA, 438 bp, Homo sapiens
ctttttaattcataactctttcacatgtagttttcagccaaaaatatttggaagtatgtgataacatttttttatagtcactatgactacatgtacatagtgattgggacccaggaatattgcataatacagcataataaatatcccacatgaatgcaacagtagtcctggtgaaaaaaaaaaaacaaaaaacgtgacacactgatatgggttggctgtgttccaacccaaatctcatcttgaattgtagctccagtaattcccatgtgttgtgggagggacccggtgggagataattgaatcatgggggcagttttccccatactgttctygtggtagtaagtctcatgagatctgatggtttcataaggggtttcccctttcaattggctcccattctctcttgtctgtcggcatgtaagacatgcctttcacctt

SEQ ID NO: 697472 - DNA, 583 bp, Homo sapiens
cacttttagtctggctatttcagctttctcttctcataggaagtggacactcagtggggaagagcaaagagatttagcttagatgttacccagtaactagaacaaagtcatgaataatacggagttgaagtcagagactaactgtttcagttaagtgaaaaccatttggaataatgaaagaggactggaattagtttataagttgctaattcctgctctgggccaatgcttatcaaacactaggcattataccagtgccaacacatttaatcctcaaatgaggtgtcccattttaaagttaaagaaacaaaggataggagaggtgagtcaccaagctcatgggtrgaattttaattcttatgacaatctttaaaaacctctatatacatactctggaccatctaatacataggtcctggatgataaccttataatcaagtactgccatgcaatttcagggacctcattttgtttatgtttatgactaagtgaacttcaagtgaagatcatatgacattgaagcttactctaagaatgaaggtttcctagcagtgatgtgagaactgagtcatcaccggtcatc

SEQ ID NO: 697473 - DNA, 647 bp, Homo sapiens
tggtatcctccttattagcctatagctctcctagagcatgcctctgaatggcgtgaatctaaacagctaaatagtgggagagactcttatcaccttgcaaaccatataagtgattttgattagagggatataaaaagatcagttctggtcatggctaatgtccccacaagagactggactcttgggctgtatgcccactatgagaaacactaggttattattgtatagcacatggagaagctggtatcagctgaggcctgtaggcacttccagcctgagcatgttggagcctgcagaataccatggcctcaccttctccttgmttcagccaaactctacatgtgcaacaaagtccaggctcctgtgtgtggcattcaagaaccctgattagcccctttggcctatacagaagttcttatagtcctatgaactaaatgtttgcatccccccaaattcatacgttgaaactcttatccccccccaatgtaatggtatttggagttgtgacctttgggaggtgattaggtcataaaaacaaatctctcatgagtgggattagtgcccttataagaagagatactgtttaccacaagaggacacagcaagaagatggccatgtgtaaactaagaagaaggacctcaccaga

SEQ ID NO: 697474 - DNA, 612 bp, Homo sapiens
gaaagaccttatcatgtgtttgcttagataaaggtcctgaggacatcccagagtctccagctgtttcccacctaacttgagaacgttcttctgtgacctgatctcacctcaacctcatccaaatgcccttaagttctggttctgtgacacatttccatggagaagttcgtgatgtcatcaaggcaggccactctgaactattccgaatgtggatatcgtctggagtgggtggctgtcatggccacagcccctggctccaataccaccttgggtttcgtcccgtgatgagccttagcatgaaggagtggggcacctgctgctcacttgtgggtcctagtcgcctctgggacacaggagaccttgctgccatgtgcctgaatacatccaaggactcaccagcaggagggaggggcggttgtcagcccaagcagctgccacygtgagcagtggacacaggaccagcttccggggatggtcctgtcctcctagcacagccccatgcatggacagggcatccacgctatccgtgtcacccagggcaggtcactgagcctcccgcagccccatttccccgagtcgcccaggcgtggtggagcatacgcagcacaattg

SEQ ID NO: 697475 - DNA, 636 bp, Homo sapiens
gtgaagaattttgtgggaaggtgtggcatcatcatttttgcatttacagttatgttggcagcgggtgcagcaccacgagcaggcagaaagtgggaaactgagtcagcagagggtgagcagaagtgggggagcacgggakcaatgttctggagggtttccagctccccctcaccagctgtgtggatacggacatcctccttttttctcttattctcagtgtcttcacctgtaagatggactgataatggaaatggcaccagggcaggctgatgttatgccaggtgggtgtacagaacacctgccagagcccgagttccccaggcagaacttctgccctgtctgccagtgccgaaaggagcccagtgcacagagcacctctgagtctgcacctcccctcaagctcatgtcctcagcctggctgctaatagctcagtgagggcagagccttgatggggaacaagacctttctcgaaaaacaccctgtgcttggctgaaatgcgtccttagtatgcaaggatgctgggtccattaacatcgagtgcaccatcataccacaggagtgattgtttctcaaatagaattacttcctctgattatcctctaaagagacaggccaggggatatgggcgtgaggtg

SEQ ID NO: 697476 - DNA, 636 bp, Homo sapiens
gtgaagaattttgtgggaaggtgtggcatcatcatttttgcatttacagttatgttggcagcgggtgcagcaccacgagcaggcagaaagtgggaaactgagtcagcagagggtgagcagaagtgggggagcacgggagcaatgttctggagggtttccagctccccctcaccagctgtgtggatacggacatcctccttttttctcttattctcagtgtcttcacctgtaagatggactgataatggaaatggcaccagggcaggctgatgttatgccaggtgggtgtacagaacacctgccagagcccgagttccccaggcagaacttctgccctgtctgccagtgccsaaaggagcccagtgcacagagcacctctgagtctgcacctcccctcaagctcatgtcctcagcctggctgctaatagctcagtgagggcagagccttgatggggaacaagacctttctcgaaaaacaccctgtgcttggctgaaatgcgtccttagtatgcaaggatgctgggtccattaacatcgagtgcaccatcataccacaggagtgattgtttctcaaatagaattacttcctctgattatcctctaaagagacaggccaggggatatgggcgtgaggtg

SEQ ID NO: 697477 - DNA, 630 bp, Homo sapiens
tggggcctctggcttaggtgggctggcaatgcctctcctttcattcctgataaacatgctgggccggagcacagcggccatggggctgtttcttgtgagccacggctagttctaaactgtactgatttggacacctgccaccagatgagaaattagtaaaatgtggttaccaagggactgcttctctgctctagctgtgaacggggtccttagcggcctgcatgcccgcgcctctccagactgagaccaaagacttccgcgccaccgtcggcagctcgcgaacttagacttcagaccgtctgccgcactgcaataaagagaccatggtggggataccttttaaatgatttaaatgtgtccttccttctgcagcacacacacgtcctcctgaactggacacctggccaggccaacgaaaaaggagaagctcttttgtaaggtggcagggacgcacccccttagctagagacaggcttctaggtggctcgccttctactggtagaacatgtagggttatctgctaaagtgtgggacctgytacattgaagccaatcttctctgagcaggactcaatttatttttttcttaattgcaacacatgaaaattttaggtcaccaagaaacactagt

SEQ ID NO: 697478 - DNA, 670 bp, Homo sapiens
ttcctttatcatgttactgaggcgacatctaattgtatccttctttttaccttacgtgagacactaatgggtggttttctccttgatcttttacagaagcaaacacagcatcaaacagcaaggggcttctaataggggatttgcagatggccagcctatctcagaataggacacaaagatcttggggtaccttgtttaggattcagacagtagtccctgtgaatcctatatacttgctatgaaaaggaaaaattggcttgtcaatttgaggtcaaaatggtggataggaggcaggactagcagctcctactcagacagagcagcacgtggagattcacatcatgaactacctcaagaacataccaggaaacctgagagaatccacagaccccttgaaggaggtggattgccactgcaggctccatgggacagctgaggaaactgccagtctgtttgctytctcacctggaaggcttgtagcctggggcaagttctcagccctgctcactggctgcctggaaataaactgagtgctgttgggggaccacagtgggagtgagatcagccttttgggctgtgggctgcatggcagctgggtgacgcctgtggctgccagctttcccccccttccctggcaacctgtgtgatgcagcagaagcagctataatcc

SEQ ID NO: 697479 - DNA, 600 bp, Homo sapiens
tgaggcaggagaatcgcttgaacctgggaggcggaggttgcagtgagctgagatcgtgccactgcactccagcctgggcgacagagcaagactctgtctaaaaaaaaaaaaaaaaaaaaatatatatatatatatatatayacacacacacacacacacacacacacatacacatacaaaaatatatatatatatacacacacacacacccacatatatatacatatatatatatacctagtcaatttatatctcctctctatatatattatagatactcttaagaagtaaaaacaatatatttatctaccttgagtgggatgaagaaaaaaataaaggtaatatatttaggtcaatcgatagttttctttgggtgcagacatatggatacatttttccatttttctacttttctgtatttgtaagtagtctgtaatggctgcattgcttttaaatagaaaataaaacacattgaggggttattttaattcatagtttcataattatatattttttatgaagacctaacagcaaagttgtgttccttgtatatactgtggagaaatagggttcaagaggagctgatcatatttgtgtctt

SEQ ID NO: 697480 - DNA, 651 bp, Homo sapiens
catcccgggccccaggagattttcatcttgtattctctttataatcctatcttagtgtttcatcctcatggctaagttcagcaatacttctgcattccagacagtaaaatgtgtaagaagagatgtaaaaacaatcggctttgcctttatggagattaacttaaatttatgctcataatataattcatattatatttgatcaaaattaatcactgataagagactatagaaggtaatctcctgcttgtggtcatatgtacttaggattctattactaaacaaaatgaaagaatgcattatatgcacaattagtggtctytagtacaaagaaattaccaggtcatttccaattctcaatattaaaaaaaagtttatttcttactgcactatcaaattggaaaggtcagtacaggggcattcaataatagtaaaaatatgaataacaatcatgtataacaacagaatcatttaaaaagatgtatatttaaaatgtgattattgcattttatttcccctggcagaaaataataaactggagaaaaatcacatttgattgatgtctgttacatggatttttaaaatttgtatcaatgaatgctttttaaaggtaaactaattgaggcctaccgaaggtaaataaatctttagtta

SEQ ID NO: 697481 - DNA, 672 bp, Homo sapiens
tatcctaaaaattaaaagtgatatacattgagtaagactttacagtcctcagaatagtataatggaaaaatatgtatttgatatgttttcctgccatttcactatctagaaattgtcctaatccttaaaagagatcattagctagccactgaaatctcaggggaaaagctgttaaaactgacagctacattttttaacactacacatatagacatctcagagtttaaatacattggatttgtaatctctctgttatttagaagaggtgctgtataggtgaaggactcattttgtgaacctttcttagtatawcagctaatttattcttagaacatttctagagaaagaaaaacagcaagagatcatcagagaataaaaaaaggtattataaatatgagttaaaatcatttaaagtagcagtttatttttcagaaaagaattttaagcctctacatatttatgaagaagaatggaaactcttgaacaacagtcatgaaaatttaaaatacagatctgataaaaaattcctctgcctgttttatcaaatgtgtttagattggaaataaatagggagtttgtttcatagctcccctggttggaggtaaaaagtttctattccttaggaaatggaataaaataaattggttaaaagaagttttgagattcattcgt

SEQ ID NO: 697482 - DNA, 672 bp, Homo sapiens
tatcctaaaaattaaaagtgatatacattgagtaagactttacagtcctcagaatagtataatggaaaaatatgtatttgatatgttttcctgccatttcactatctagaaattgtcctaatccttaaaagagatcattagctagccactgaaatctcaggggaaaagctgttaaaactgacagctacattttttaacactacacatatagacatctcagagtttaaatacattggatttgtaatctctctgttatttagaagaggtgctgtataggtgaaggactcattttgtgaacctttcttagtatatcagctaatttattcttagaacatttctagagaaagaaaaacagcaagagatcatcagagaataaaaaaaggtattataaatatgagttaaaatcatttaaartagcagtttatttttcagaaaagaattttaagcctctacatatttatgaagaagaatggaaactcttgaacaacagtcatgaaaatttaaaatacagatctgataaaaaattcctctgcctgttttatcaaatgtgtttagattggaaataaatagggagtttgtttcatagctcccctggttggaggtaaaaagtttctattccttaggaaatggaataaaataaattggttaaaagaagttttgagattcattcgt

SEQ ID NO: 697483 - DNA, 2402 bp, Homo sapiens
tacaatttcaaaagtaaacttcagtagctactaaagcaagattgtttataataaaaagacaatgtatctcattctcactctatacatctcatcaagaatataaatttgaaacacaaagctttaaaattttaaaagcaatttaggctgaatctcagagtatgaaaaaaattttcaaaccagcacaaaaactgactggagcaagatgatttgtaagtttggtcccactcatatcaagagtatctgttccttctaaatcaccattggtaaaatgaaaaatcatcataaagagcatggcaacatttgcaagtacataacaatctagtaaaattcacgatacaattaatctctgttaaggatttagaaaaagacataaaaattaaaataggaaaatacataagcagactttttaaataataaaaaagttaaaatatatgaaatggtaccaaagcttattattaattcaaattaaaactataaaacaacaaaatacaatttctttttttttttttttgagagggagtctcactctgtcactcaggctggagtgcagtggcatgatctcagctcattgcaacatccacctcctggattcaagctattctcctgcctcagcctctcaagtagctgggattacaggcacgcaccaccacacccagctaatttttgtatttttagtagagaaggggtttccccatgttggccaggctggtcttgaactcctgacctctgttgatccgcccaccttggcctcccaaagtgttgggattacaggcacgaaccactgcgcccagcccaaaatgtaatttcatatacatcacattataaatttttagactgcatttatttttgtgtgagtttggatgtagggcaattcaaacttttatatactactattggcatacaaattaatgtgattacattgtacaacaatttaacattatctaataatgttgatcatgtgccaaccctgtgacccaggaattccatttccagagacatcttagctcttgcatttctggtgacaagtacacaataagcaaagtagcattgtcaatttaaaaaaatcacaatagcatttaaaatttcagaaaactgaacaaattaatgttcacaagaagcagaaaaataaagtgtgatttactcattccttggaatagtgacacacatatcagattggattattccgagaacaggacttagagagagagagaaaaaagcaaattaaatcaaagagaaccaacaggatgaaagatttactctattagacatcgaaactttataacatacagcaattcagacacatcttgttcttgaagatggatagtatgctggagtcaccttgcctcagcttctggctacgaagtctcccctgaactcctcatgaagatgggctttataaatacaaactaaccaattcccaaactcatactctatagggctgtcacactccaggccactgtgcttctgtcctaatcacgctagggccaaaaaccagagaaccagagacagctcttatgccccagagcccactgaaattattcaaatgagccagtcctaagcttgtttaccctgcttggtttcttcctgcaaacaccacagtctagggtcttgctcctgaattcctccctctctctgtttcctgatggacctgagttcttccctgtagtctctcctggtgtgacatgctcccttctcttggaaattgtgagtatcttttcaatggcaattgtcttctgatctgtttgctttactataccttagcttttctattaatacgctatatattaaaacaatatttaacataggtgaaaaattgagaaaagatattctaaaaaatggtaaagcagaatcacacacaaagagtatgtgaaaaagaatgaggtaaatacaaatagaatgacgtggctagtgtgtgtggttggtgggaaaataaagagggaaatgatgtgttttaagtttgaggttagaaaattagagtaaaattgagaaatacggttttaagttcaaactattgaatctattaaatctagaaaaatcaacaataaagtatctatttagagtaataactaaatctgcctttccttttttcaattaaaatagaaacaaatattgtrgcattatttttattgttgtaacagttttgggctgcttttgagtctttgttttgggaaagtttttatttttaggttatttttcttttgtaatattctagacaacgtcttgtataaatgttaaaatgtaattttactacctttcaggcatattttaatgtgccctagttgttaacaaatttattcaagattaagtactatatttttaacttcttaaaaaaattaatttctttctatgcaatgattgaccttgaaaatacaaaagtatgtacagtatgcacataatattca

SEQ ID NO: 697484 - DNA, 2402 bp, Homo sapiens
tacaatttcaaaagtaaacttcagtagctactaaagcaagattgtttataataaaaagacaatgtatctcattctcactctatacatctcatcaagaatataaatttgaaacacaaagctttaaaattttaaaagcaatttaggctgaatctcagagtatgaaaaaaattttcaaaccagcacaaaaactgactggagcaagatgatttgtaagtttggtcccactcatatcaagagtatctgttccttctaaatcaccattggtaaaatgaaaaatcatcataaagagcatggcaacatttgcaagtacataacaatctagtaaaattcacgatacaattaatctctgttaaggatttagaaaaagacataaaaattaaaataggaaaatacataagcagactttttaaataataaaaaagttaaaatatatgaaatggtaccaaagcttattattaattcaaattaaaactataaaacaacaaaatacaatttctttttttttttttttgagagggagtctcactctgtcactcaggctggagtgcagtggcatgatctcagctcattgcaacatccacctcctggattcaagctattctcctgcctcagcctctcaagtagctgggattacaggcacgcaccaccacacccagctaatttttgtatttttagtagagaaggggtttccccatgttggccaggctggtcttgaactcctgacctctgttgatccgcccaccttggcctcccaaagtgttgggattacaggcacgaaccactgcgcccagcccaaaatgtaatttcatatacatcacattataaatttttagactgcatttatttttgtgtgagtttggatgtagggcaattcaaacttttatatactactattggcatacaaattaatgtgattacattgtacaacaatttaacattatctaataatgttgatcatgtgccaaccctgtgacccaggaattccatttccagagacatcttagctcttgcatttctggtgacaagtacacaataagcaaagtagcattgtcaatttaaaaaaatcacaatagcatttaaaatttcagaaaactgaacaaattaatgttcacaagaagcagaaaaataaagtgtgatttactcattccttggaatagtgacacacatatcagattggattattccgagaacaggacttagagagagagagaaaaaagcaaattaaatcaaagagaaccaacaggatgaaagatttactctattagacatcgaaactttataacatacagcaattcagacacatcttgttcttgaagatggatagtatgctggagtcaccttgcctcagcttctggctacgaagtctcccctgaactcctcatgaagatgggctttataaatacaaactaaccaattcccaaactcatactctatagggctgtcacactccaggccactgtgcttctgtcctaatcacgctagggccaaaaaccagagaaccagagacagctcttatgccccagagcccactgaaattattcaaatgagccagtcctaagcttgtttaccctgcttggtttcttcctgcaaacaccacagtctagggtcttgctcctgaattcctccctctctctgtttcctgatggacctgagttcttccctgtagtctctcctggtgtgacatgctcccttctcttggaaattgtgagtatcttttcaatggcaattgtcttctgatctgtttgctttactataccttagcttttctattaatacgctatatattaaaacaatatttaacataggtgaaaaattgagaaaagatattctaaaaaatggtaaagcagaatcacacacaaagagtatgtgaaaaagaatgaggtaaatacaaatagaatgacgtggctagtgtgtgtggttggtgggaaaataaagagggaaatgatgtgttttaagtttgaggttagaaaattagagtaaaattgagaaatacggttttaagttcaaactattgaatctattaaatctagaaaaatcaacaataaagtatctatttagagtaataactaaatctgcctttccttttttcaattaaaatagaaacaaatattgtggcattatttttattgttgtaacagttttgggctgcttttgagtctttgttttgggaaagtttttatttttaggttatttttcttttgtaatattctagacaacstcttgtataaatgttaaaatgtaattttactacctttcaggcatattttaatgtgccctagttgttaacaaatttattcaagattaagtactatatttttaacttcttaaaaaaattaatttctttctatgcaatgattgaccttgaaaatacaaaagtatgtacagtatgcacataatattca

SEQ ID NO: 697485 - DNA, 586 bp, Homo sapiens
tatacatcatagatgtctcatttcaatgttttcctccttctaactgatgattctatttaaatttctctggcatttgaactgagattttaaaagatattaaacatgcatatgtatacacatataatacctctatattaaattcatatgtatgtaaacataagatttctaattttatttcattttatataggtacctatatacaaagaataaattgtgagaccaaaggaaatgttttacattaaaacaacatttttattacataaaaaaatggctgacatattaaatgcatttatttatagttatttcagataaaaactaaaaaaaataaaattgtgtttaaacattgtcatcattgttgggtaaatcaartaccataaagatttagatatagaaaatgccaatttgttgaataaaatcttaaagcattttaagaaatctatattttaatttcatatcaagagtatatataatgactattgataatcactagttgtaggatgtcattttcaaatagtttgatattggacatcccatataaatttgacttgttatacaaaagcacaaggaatttttcacacttaagttc

SEQ ID NO: 697486 - DNA, 694 bp, Homo sapiens
ccaggcatggtggcacacgcctatagtcccagctactcaagaggctgaggtgggaggatcacctgagcccaggagtttgagacctcagtgagctctaattgcaccactgctctcccacctgggtgacaaagagagcccttttctctaattttaaacaaaaaaaaaatattgagccaaggagataagaaaattacaacattctttatttcagctgccatgtcttgattctcagataagacaattgcacacattctctcttttaatcctatcaacagcccctatggggtacattctttcctcttcattttcacaggtgaggaaactgagtctcagtgaggttaaataagcaacttgcctgaggtctcacagccaggaagtcggaaagcagaggcccagcgaacacaggtgtgtctggctgccaatcctgtgygcctccccctaggctgcactgctaaagctttggccggtcagcaggccattgcagggccatgtcgtggactcttgtcccaaggcccaccccttgcgcccgccaagacatgtctggcggtactcagcaattcatgttgacctggagctggtgacagcagaggctcagggaagcacctgggggccccacccacctactttttgtattgcatcccacagcccagggagggcctcaaacccaaatgtccccagaccacgtctgagcaaa

SEQ ID NO: 697487 - DNA, 1312 bp, Homo sapiens
aggatggtgctaaaccattcataagaaatctaccggcatgatccaatcatctcctgtcagaccccacctctaacattggagattacatttcaacatgagatttgggcagggtaagtatctgaactatatcaggtactatttttcctattgatacatatatatgtatacacacacacacacacacacacacacacacacactattgttaggatgttcctgtatatgagaagttaagaaatagcacctgatatagtttggatattttccccacccaaatctcacattgaattgtaatccccagtgttggagatggggcctggtgggaggtgattgaaacatgggggtggatttctcatgaatggtttagcaccatccccttagcactgtccttgagatagtgaatgtgttctcgtgagatctggttatttagaagtgtgtctctcatttgcttctgctttcaccatgtgacgtgcctgcttccccttcaccttccgtcatgattgcaggcttcccaaggcctcccagaagccaagcaacatgcttcctgtaaagtctgcagaactgtgagccaattaaacctcttttcttcataaattacccagtctcaggtatttctttatagcaatgcgagaaggcctaatattgtaccagatgatgtcttcagcctcatcacaaagatgcacatgattaactactgaaggagcatgggaagccacagggcactgagttctaaagagacagagggaggttacaagattccagtgcggggagtgggtgggaccttgtaggccaagggagtgttgagccaaccatgaagcatacatggagttctgatagacccattaaaggaaggtggacgagaacagccatgaaggtatgagagagagagagatttattacagggattggctcatgagattatggagactaagaagtcccacaacctgctgtttgcaaactggagacccaagaaagccagtgatgtcattcagtctgaatatgaagtactgagacctggaagggaatggggctgggaaacaatggcataatacaagtcctggtccaagtccawaggcctgagaaccaggagcactgatgtctgagggtaggagaagatggatgtcgcgacccaaacatagacagcaaattggcccttcctttgccttttgttctcttccagccctcaacaaattgcatggtgccccccacacacacacacagagtggtgagagccatattctttactcagtttactgattcagatgccagtctcttctggaaacacactcaggtacatactcagaattaaggt

SEQ ID NO: 697488 - DNA, 1312 bp, Homo sapiens
aggatggtgctaaaccattcataagaaatctaccggcatgatccaatcatctcctgtcagaccccacctctaacattggagattacatttcaacatgagatttgggcagggtaagtatctgaactatatcaggtactatttttcctattgatacatatatatgtatacacacacacacacacacacacacacacacacactattgttaggatgttcctgtatatgagaagttaagaaatagcacctgatatagtttggatattttccccacccaaatctcacattgaattgtaatccccagtgttggagatggggcctggtgggaggtgattgaaacatgggggtggatttctcatgaatggtttagcaccatccccttagcactgtccttgagatagtgaatgtgttctcgtgagatctggttatttagaagtgtgtctctcatttgcttctgctttcaccatgtgacgtgcctgcttccccttcaccttccgtcatgattgcaggcttcccaaggcctcccagaagccaagcaacatgcttcctgtaaagtctgcagaactgtgagccaattaaacctcttttcttcataaattacccagtctcaggtatttctttatagcaatgcgagaaggcctaatattgtaccagatgatgtcttcagcctcatcacaaagatgcacatgattaactactgaaggagcatgggaagccacagggcactgagttctaaagagacagagggaggttacaagattccagtgcggggagtgggtgggaccttgtaggccaagggagtgttgagccaaccatgaagcatacatggagttctgatagacccattaaaggaaggtggacgagaacagccatgaaggtatgagagagagagagatttattacagggattggctcatgagattatggagactaagaagtcccacaacctgctgtttgcaaactggagacccaagaaagccagtgatgtcattcagtctgaatatgaagtactgagacctggaagggaatggggctgggaaacaatggcataatacaagtcctggtccaagtccataggcctgagaaccaggagcactgatgtctgagggtaggagaagatggatgtcgcgacccaaacatagacagcaaattggcccttcctttgccttttgttctcttccagccctcaacaaattgcatggtgccccccmcacacacacacagagtggtgagagccatattctttactcagtttactgattcagatgccagtctcttctggaaacacactcaggtacatactcagaattaaggt

SEQ ID NO: 697489 - DNA, 2092 bp, Homo sapiens
ggatccagttaatgggcccttgaaggtgagtatgggaagcttggacgtcactgaccctgtctaggtttagatgccccaaacattccacctaggctttcgctcagccttattcctggcacccaccttccaccacccaatatgagtccatcctccacactgatgctgtcatgatcttcctgaaacacaacttggcctatcccagcactccctccttcagctccttcaatgtatccttatggagtaaagtccaaactcctaagcctgcctttcaaagtcctccacaacctccttttgagcatgatccttcatgcacctgtccttctacaggccccacctctctggctgactcgtgttgggccctctacccattctccttcctctctgcaacctcccttgccttctcccagggtcttctgttgaagatctgttattctttaaggcctggttctaatctcatgtccttcaaaactccttttaagatcttctagtttgaaatagtctctcaagccactgtatttgtatatcatgtatctacactagcacttatctgtctgcccagtatcagagttatttataaatgtctgtttctcctattatgttgtatgctcttagaaagcaaaaatagaattgacaaaagaaatatttgatgagtttctcgtatkggagtttataaaaacctttttggaatagttctatagatatctaaacactaagagcaaccatcctgagcctaggacatgctgatctttcaagacccacacaatttctactccttgttctatggtaggttatcactagataagaaatgccaccctgacaggccaagaatcctccccgcccctctcagcccagtgttgtgtctaaccgtggagccaggctggcgatttggggcagagcatggtgttgatatcaaaacatttggacatcatccaccacactgccttagtccctttactcgactctggatctatcatctgaggtgaacacatgactgtttagtctgtgaggaatggaggaacgcaggaacttagcaagggaggcaagtggttatacagggggaaaagcagccatctgagataatttattgagtatacttatgtgccaggctctggaccagagactctgggtgatacaaccctgaaaggtaagaaatatggttaagtagaagtcaggataatgtgcagtagacagacagattgtgctcctgaaccacaggaaacttaaaatgtttactttggagaaacctatgaataggaaagtgaggtttccagtctattccagaggagccaatttaattcataatgtaactaactatagtatcttaacattatagaactcaagaagcttttaaaatctgattccaacagaaaaagtcattttgcattccagtatgaatgccatttcctccaagtacagccctggccacacgcttgaaggtcctctcccctgcacagggcccatgtagtggcagaatgtgccctcagccagtataaatggcagggaaggagagttcctgaagtgtctagtgtttgaagtgggtgcctaagtgtccccagcagcaaggaggagaggagagtttgaatgcttccttgcttcagggatgcgagtccttggctggaatggtcatttgtgtggaatgggcattcactgagcatgatttgtatgctgggaagggtctatttacttaatttgttgaattggagaatataagagctgaaaagatcatttaaggtgaactaatcgaaggtgcacactttatagaggaggagacagacactaaagacttgcctctggctatacaaaaattgtggcaagaccaggctatgaacccagatcttccatggagcagttcacttcatctgagttcagtttcttcatttgtttagtgggaatgatcatgtctccccagctcccagggttgttgggaggttcaaatgaggacatgcttatggaatctttataaattgcaaaaagccatgcaaatggaagttacttctgcttcttctgttcccaactgcttcttactcccgtcttcaaacttagtagtataatgaagtaatacaggagccaggatgtgtgatagcaggatccc

SEQ ID NO: 697490 - DNA, 2092 bp, Homo sapiens
ggatccagttaatgggcccttgaaggtgagtatgggaagcttggacgtcactgaccctgtctaggtttagatgccccaaacattccacctaggctttcgctcagccttattcctggcacccaccttccaccacccaatatgagtccatcctccacactgatgctgtcatgatcttcctgaaacacaacttggcctatcccagcactccctccttcagctccttcaatgtatccttatggagtaaagtccaaactcctaagcctgcctttcaaagtcctccacaacctccttttgagcatgatccttcatgcacctgtccttctacaggccccacctctctggctgactcgtgttgggccctctacccattctccttcctctctgcaacctcccttgccttctcccagggtcttctgttgaagatctgttattctttaaggcctggttctaatctcatgtccttcaaaactccttttaagatcttctagtttgaaatagtctctcaagccactgtatttgtatatcatgtatctacactagcacttatctgtctgcccagtatcagagttatttataaatgtctgtttctcctattatgttgtatgctcttagaaagcaaaaatagaattgacaaaagaaatatttgatgagtttctcgtatgggagtttataaaaacctttttggaatagttctatagatatctaaacactaagagcaaccatcctgagcctaggacatgctgatctttcaagacccacacaatttctactccttgttctatggtaggttatcactagataagaaatgccaccctgacaggccaagaatcctccccgcccctctcagcccagtgttgtgtctaaccgtggagccaggctggcgatttggggcagagcatggtgttgatatcaaaacatttggacatcatccaccacactgccttagtccctttactcgactctggayctatcatctgaggtgaacacatgactgtttagtctgtgaggaatggaggaacgcaggaacttagcaagggaggcaagtggttatacagggggaaaagcagccatctgagataatttattgagtatacttatgtgccaggctctggaccagagactctgggtgatacaaccctgaaaggtaagaaatatggttaagtagaagtcaggataatgtgcagtagacagacagattgtgctcctgaaccacaggaaacttaaaatgtttactttggagaaacctatgaataggaaagtgaggtttccagtctattccagaggagccaatttaattcataatgtaactaactatagtatcttaacattatagaactcaagaagcttttaaaatctgattccaacagaaaaagtcattttgcattccagtatgaatgccatttcctccaagtacagccctggccacacgcttgaaggtcctctcccctgcacagggcccatgtagtggcagaatgtgccctcagccagtataaatggcagggaaggagagttcctgaagtgtctagtgtttgaagtgggtgcctaagtgtccccagcagcaaggaggagaggagagtttgaatgcttccttgcttcagggatgcgagtccttggctggaatggtcatttgtgtggaatgggcattcactgagcatgatttgtatgctgggaagggtctatttacttaatttgttgaattggagaatataagagctgaaaagatcatttaaggtgaactaatcgaaggtgcacactttatagaggaggagacagacactaaagacttgcctctggctatacaaaaattgtggcaagaccaggctatgaacccagatcttccatggagcagttcacttcatctgagttcagtttcttcatttgtttagtgggaatgatcatgtctccccagctcccagggttgttgggaggttcaaatgaggacatgcttatggaatctttataaattgcaaaaagccatgcaaatggaagttacttctgcttcttctgttcccaactgcttcttactcccgtcttcaaacttagtagtataatgaagtaatacaggagccaggatgtgtgatagcaggatccc

SEQ ID NO: 697491 - DNA, 605 bp, Homo sapiens
taatttagccattgatgttcaaagcctaattcaataatgatatggttaggctttgtgtccctacccaaatctcatcttgaattataatccccataatccccatgtgtcaagggagagaccaggtagaggtaattgaatcatcagggcagttttccccatgctgttctcgtgatagtgagtgagttctcatgagacctgatggttttataaggggctcttccycctttgctcagcacttctccttcttgccaccgtgcaaagaaggtgctttgcttcccttcaccttccgccatgattgtaagttcctgaggcctccctagccaggttgaactgtgagtcaattaaaactctttcctttataaattactcagtctcaggcagttctctatggcagtatgaaaacgtactaatacaaataacaaaggttttatgtttcctcccaaattagtgtctagagtcaacgttagctcctagggtcaagctattatacaggattagaggcatttaggagattacaacttttccctggtttttcaaagattagtcacatgttcacttggctgaatacacaaggtagaatggacaggacttgaggcaaataacct

SEQ ID NO: 697492 - DNA, 373 bp, Homo sapiens
tgccaaaatacccagatatttccaaacatctgagtatttgacagcacgtttttactatagatccagatgtttggtattgtgtagacaaagaccaaacctaaacacggaaaagaaaaataackaactggaaataaggaagccaagaggtggttaagaggacagcaagaaggggaattgagtggtgatgggaaagaaaaggagaaattaaagacaaaaaaatgtaaagaaaggtaaaacataaaaaccagtaaattttttaaaaaagaacaacattctatttcttcatagcccacaccttggcctgattcttacctggctccatgaaaagcatttctgcttgtccaggtctgggttatatggggggtgggggggt

SEQ ID NO: 697493 - DNA, 373 bp, Homo sapiens
tgccaaaatacccagatatttccaaacatctgagtatttgacagcacgtttttactatagatccagatgtttggtattgtgtagacaaagaccaaacctaaacacggaaaagaaaaataactaactggraataaggaagccaagaggtggttaagaggacagcaagaaggggaattgagtggtgatgggaaagaaaaggagaaattaaagacaaaaaaatgtaaagaaaggtaaaacataaaaaccagtaaattttttaaaaaagaacaacattctatttcttcatagcccacaccttggcctgattcttacctggctccatgaaaagcatttctgcttgtccaggtctgggttatatggggggtgggggggt

SEQ ID NO: 697494 - DNA, 373 bp, Homo sapiens
tgccaaaatacccagatatttccaaacatctgagtatttgacagcacgtttttactatagatccagatgtttggtattgtgtagacaaagaccaaacctaaacacggaaaagaaaaataactaactggaaataaggaagccaagaggtggttaagaggacagcaagaaggggaattgagtggtgatgggaaagaaaaggagaaattaaakacaaaaaaatgtaaagaaaggtaaaacataaaaaccagtaaattttttaaaaaagaacaacattctatttcttcatagcccacaccttggcctgattcttacctggctccatgaaaagcatttctgcttgtccaggtctgggttatatggggggtgggggggt

SEQ ID NO: 697495 - DNA, 601 bp, Homo sapiens
ccaaatatagcagcacacaggaacttgttgcttttcatggtattgttcgctctccacctcctgcaatacaaacactagtacagacaccttggtccttaatgctggtatcagctgtataaccacagataacagtattatcagccattgatttttaaaaatggtctacatgaggcgaaatgcagcctagctaacaccatagcataaacaaaaaaaggaggaagccacaaaccaggactcaaattgggaaagattcacaggcaatgggaagatccagaggccatgtatgctgatctgggctgtagacctgacaatgccactgcaagttctgctctcttcccagagcagataaccaatatttgagtgggaactcacagggggatccaaaccagctgcctatctttctgaatcatgtcagaatgaatgatgcagccaaaataaacaaaaatgtgcctctgatatatgtggattcttgcatgaaattaaagggaccggggcacaggtaatwttttttagctttttacatttaaaagttatgaaattggtaaagaaaggaggatttggaaagtgaatagaaacacccgaagacaatttcaatgatttc

SEQ ID NO: 697496 - DNA, 2287 bp, Homo sapiens
  misc_feature 1977: n = A,T,C or G
atttacaaatattttctcccattccataggttacttttgtgtgtgtgagtgtaatttattttttaaattgatatatctgagttgtagataattttgggttcatatgtataatttcaaattaaaaaatcataagaatatgatttattcagttagattcggcaaacatttatagggtacttataatgtgtaaggtattttgtgcccagtgctaggcttgatttaaatggcagcctcctgacgtactcctttcactacagtttgaatccaatttcgccccaggaaggatggtcttaaaagtcagaattcagtctatgcattttcttgatactagctcaacctaaggttttgtatgcactaaagcactgcagggagactagggtgctgggtcttctcagccagctctcagctagggtgctgggagaccagttccatctaggggtttcagattaatcttgagccaatattagtgggatcatgagtcagtctcatgagggatgaataaaactaagtcagactccagacttttagtcttcagattcacagccttctcaaaggcagggtggaagcaaaccttggtttctagcctaagttttggagggcttgaagtccagctgaacatatcaaagatgtcaagtaattatcacttcctcactgctgtagcaaggtagtcctactgagttacacagagcctcagaatcctaaacactgttctccagacaaccagtcaatgagaaagcatacaagatgaaacctaattgccatctttgacctatatgccatacatattgttttgtgttgggctttctcttatgtaatacaatctcaactggaattgagtgatcaaattcttagtgaagaggactctagagatttttgtgccttggtatatatctattaatgaagttaaattttaatttagattttactctttccccagtaaatccatacaaaagcatgcaggaacccacctgtcactttgatatcccctgttgctttggcaatgtcattttcaatcatacaggagtatgtgttgttgatcgtaacattgtagagcacagacacaaccttcatggtcacattctcagagttcagctcaaagctggtattggagacttccgagaagttggctccctggtcaacttgggatgcccagaccactgtgggctgggggaaccatcggggagcctcacaccgcaaggtctctgagctggcattatagtccacattcacttccggcatgctgaaggctgcagggtcaaaagtcagaaagggcagatgccaaagtcagacacrtaagacaatatagcctttgaagcgctaggccttaaaaatgcagtcatttttttttttttttttttatcattgaagccactcagtacttcctcagaggtccacctgtgtatagcccattgtattataggtgcgaataattatttgctcatagtattgctatacatcacaaccctttggccaatcacaaaccccaaggacctaaattctaggtatattatggttacaatagaaaattttctccaagtaagaggaacttcagtggtcataaaaaagcctatcccttagggaattaggcattttcctagggatctgtgaagcttctggattttatgtatttttctccctggaggataaagttagggtgggtagggagaaggagaaagaagaaacaaacagcattcatctatcacccacagaaattccattcacaagctttgtcatcacagggatttggagtttgcttgggtagagattgtccagctctggtatccagggatagaaacagacatttgttttcctccaaggtaattctcctcgcaggagagttaactgcattttgaaattaagacttagcttccccccatatccaggcagagagacagttgtgggaaaatgtttaagcctggactttttattggggtaaaatataatttattaatttatttggcgtcttcctttacctgngactgagctggtgctgagtaagtagtaaaaggaaagcccttgcctaacccttaaggagtctgttctctagcaggggagacaagactcatgctcggagcaggcagggaacacgctcttgggcgatgatgtgggaaactaagtttacatgacaatgaaccaccattcattgagggtatattctgtgccagtactgtattccagaccttatttcatttgatcctcacaacactcctgtgaatactatcatccccattaaaaaaaaatcaacttttaattttgaaataatttcacgtgtacagaaaagttgcat

SEQ ID NO: 697497 - DNA, 637 bp, Homo sapiens
tagtaacttgagcaaacagaagcctctttatgagaactgtctttctctgtggtcagagacagctttgtccaaaaacttgttcatttggttttttcatgactgggaatttttgacgatacatgaaagctgtgagcaggggcgcctggtagcacaaagagttgttttgggggatatttcatgatacagaagggttacagatacttctatctaaaaagggtgaatggagtcttcatcaggtgatggagaagatgaggaaatcgaggaaagtggcagaaaagcaaacctcttatatatatagatgcagacagaaagaaaactatgaaataccagaatagtatctgcatcaaatacattaatttactcttcaacaagatcagttccaccttcatctaaaytacgtgttgagattccttgtaccattttgtttttaaagagttgtactgaggggtattcaaaaaggcttgaaaaccattgatctatttcaattccctcgatttaaatcaattacacagacattaattaagcacctgctacattttgtgaagtatccttgtttctagggatataaaaataaataagacacactttctgctctttagaagtttatcatcttgtgggaaaaacagactcattaatc

SEQ ID NO: 697498 - DNA, 637 bp, Homo sapiens
tagtaacttgagcaaacagaagcctctttatgagaactgtctttctctgtggtcagagacagctttgtccaaaaacttgttcatttggttttttcatgactgggaatttttgacgatacatgaaagctgtgagcaggggcgcctggtagcacaaagagttgttttgggggatatttcatgatacagaagggttacagatacttctatctaaaaagggtgaatggagtcttcatcaggtgatggagaagatgaggaaatcgaggaaagtggcagaaaagcaaacctcttatatatatagatgcagacagaaagaaaactatgaaataccagaatagtatctgcatcaaatacattaatttactcttcaacaagatcagttccaccttcatctaaactacgygttgagattccttgtaccattttgtttttaaagagttgtactgaggggtattcaaaaaggcttgaaaaccattgatctatttcaattccctcgatttaaatcaattacacagacattaattaagcacctgctacattttgtgaagtatccttgtttctagggatataaaaataaataagacacactttctgctctttagaagtttatcatcttgtgggaaaaacagactcattaatc

SEQ ID NO: 697499 - DNA, 162 bp, Homo sapiens
gccacccgggccctctcctgcggcccctctatgtggcagtcggcatggtagatgctgtgcacagactctgcgtcggggggtccgcggcctggggaaggtggcgagggrggcgcgccagctcggaccagcctggtgtcgcaggcgcctggctcggggccgggc

SEQ ID NO: 697500 - DNA, 646 bp, Homo sapiens
tatcatttaatattgaaggttgcttcaacatggacggtaaagtggataattatggtgattggacaattcaaagatattaaaacacctgttccacaataatttgaatgtgttccatcaaacttttgtttcrgaatttaaaactacttaattatatggttaaataaaatgcatttttatctttctttagtgtatgatagactaagtaatatgagaaggtgggtagagtatatcttggaaaaacaccatttaaagtaaaatattgtaagattttaaaatgttaagattttaaacaatggtccaaccacattagaaaacagcttagaaatttcttaagtacacttacagtctatattagccatttaagtcctagatatttacccaaaagaaatgaaagtacatttccaaacaaatacttgtgcataaatatttatagaagttttatttgtaatagctgaaactggaagcaaactaattgtccatcaacagatgaatgcacaaacagttgaatactgtttagtgataaaaagaattaattatgattatatacaacattgaagaatctcaaaatgattatattgagtgaaagaaaatgcaagctaatttgtaatggtgggaagcagatcagtggttgcctggggatggggta

SEQ ID NO: 697501 - DNA, 646 bp, Homo sapiens
tatcatttaatattgaaggttgcttcaacatggacggtaaagtggataattatggtgattggacaattcaaagatattaaaacacctgttccacaataatttgaatgtgttccatcaaacttttgtttcggaatttaaaactacttaattatatggttaaataaaatgcatttttatctttctttagtgtatgatagactaagtaatatgagaaggtgggtagagtatatcttggaaaaacaccatttaaagtaaaatattgtaagattttaaaatgttaagattttaaacaatggtccaaccacattagaaaacagcttagaaatttcttaartacacttacagtctatattagccatttaagtcctagatatttacccaaaagaaatgaaagtacatttccaaacaaatacttgtgcataaatatttatagaagttttatttgtaatagctgaaactggaagcaaactaattgtccatcaacagatgaatgcacaaacagttgaatactgtttagtgataaaaagaattaattatgattatatacaacattgaagaatctcaaaatgattatattgagtgaaagaaaatgcaagctaatttgtaatggtgggaagcagatcagtggttgcctggggatggggta

SEQ ID NO: 697502 - DNA, 646 bp, Homo sapiens
tatcatttaatattgaaggttgcttcaacatggacggtaaagtggataattatggtgattggacaattcaaagatattaaaacacctgttccacaataatttgaatgtgttccatcaaacttttgtttcggaatttaaaactacttaattatatggttaaataaaatgcatttttatctttctttagtgtatgatagactaagtaatatgagaaggtgggtagagtatatcttggaaaaacaccatttaaagtaaaatattgtaagattttaaaatgttaagattttaaacaatggtccaaccacattagaaaacagcttagaaatttcttaagtasacttacagtctatattagccatttaagtcctagatatttacccaaaagaaatgaaagtacatttccaaacaaatacttgtgcataaatatttatagaagttttatttgtaatagctgaaactggaagcaaactaattgtccatcaacagatgaatgcacaaacagttgaatactgtttagtgataaaaagaattaattatgattatatacaacattgaagaatctcaaaatgattatattgagtgaaagaaaatgcaagctaatttgtaatggtgggaagcagatcagtggttgcctggggatggggta

SEQ ID NO: 697503 - DNA, 646 bp, Homo sapiens
tatcatttaatattgaaggttgcttcaacatggacggtaaagtggataattatggtgattggacaattcaaagatattaaaacacctgttccacaataatttgaatgtgttccatcaaacttttgtttcggaatttaaaactacttaattatatggttaaataaaatgcatttttatctttctttagtgtatgatagactaagtaatatgagaaggtgggtagagtatatcttggaaaaacaccatttaaagtaaaatattgtaagattttaaaatgttaagattttaaacaatggtccaaccacattagaaaacagcttagaaatttcttaagtacacttacagtctatattagccatttaagtcctagatatttacccaaaagaaatgaaagtacatttccaaacaaatacttgtgcataaatatttatagaagttttatttgtaatagctgaaactggaagcaaactaattgtccatcaacagatgaatgcacaaacagttgaatactgtttagtgataaaaagaattaattatgattatatacaacattgaagaatctcaaaatgattataytgagtgaaagaaaatgcaagctaatttgtaatggtgggaagcagatcagtggttgcctggggatggggta

SEQ ID NO: 697504 - DNA, 671 bp, Homo sapiens
tttcacatgatgaaaattgagccaaagaggttgaataatgcatctgaagacttcaccaaaacacgtatttgatgtggtttcctaattctctgcatcatgaagattttgctgtagaattctcccattaaaaatagtcaatatgcgtaacatcttaggtttgggtgagtttccatgtttattgctatgtgtttaaatttttataaaacacagaaaaaaactagtcaaaattcctaagtggaacaatccagaaygatgaatggaatttctgattttattaattgcctcggaaattgaggccgaaagaggtcaaccgtccgaagttcacacaactagtcagtggtaaagttggaacgagtgccataaacttttgtttagtcagctttgcagtgcagcctctttagatgcagcgtatacagagagaaatgtgttgagagttctgatgacaggaaatcttggctggagttcataggtaaagagatcttctgaagaagtgattggcaataccaaaatgtcctctgatattactgaatttgtgttgttaagatttcaaatgtctgagatgtaaatatagtggtttaatgtgaacaaagagtaaatccaaaaataaaagtgaggaggtgaagaaaaagcagtgaaaacacttaacgccttaagcataaaataaatcagac

SEQ ID NO: 697505 - DNA, 998 bp, Homo sapiens
ctttccattgcctacaaaataaagtcaacctccccatcagacattcaaggctttcaatgatccatggcygccagctctctccaggctcatatcccactccactcctctgatgtttcctacactacactacactatactacactacagccaggtagaatgactgttcacccaacaccactcaggttgtcttctcaacttggaatactcttgcaccttcaaagctcatttcaaatgccccttcatttgtgaagccttctccaaatttccaagtcagaatgtctcttccttgtgctaccacaaccctttaactgagcctccattagtgcactgagaccattctgttcagtgtctgggtgaagcttcctggtgaaaaatatgttacctatttctttctgaaaagttggattcagggatattatcacggacctaaggtaatagttctagccaacctccctgtccactgccaggccgactacaaacccttctgttgctggcgagctggtccgcaccactagttctgcttcactctatttatctcttgatgtaaccatcttctttctccaggttttaagaaccagcccaactcctggttccctgatgaagcttttattcccctagccacatggaacttttcctttttggaacatgcctttagtttctgtgtagtttgccatgcagcacttcattgtacacattattaaaacagaattttaaggattagaatgaaccttaaaagatcatgcatctcaaaatttaatgtacatacaaattacccagggattttgttgaaataaaaattatttaattttaattaatataaataattcagtaggtctggggtgaggcctaaggttttacatttccaacaagctgccaggtaaagccagtacttctgtccggggatcacactttgcgtatcaaaggtctagatgacattatcattccaaagagtttcttttacaggctctcagatcagtgttcatccactacctgactac

SEQ ID NO: 697506 - DNA, 640 bp, Homo sapiens
  misc_feature 582: n = A,T,C or G
tgccacccctcctcattttgtgagtcagccgaggacctgcagccactctgtagggcattgaaggctcagtgctagtcctgcccctgcctcttgtagactgtatgaccctgggagagcctcagtttccccttttgtgaaatgtgggggatggactttgtaaggcagcgtacagttcaggcataaataggtgcttaaatgttctggtgcagtagctaagagaatgggctctagagagttccccgacccaggtttcaggccctgcacagcctcataccagctttgtggcttgctcaggagtggaacttttctgccyatctgggacaactccctccctcctatagggagagttggggggtaggggagtggctctccaggaccacacagtgctacgaggctggcatgtgccctgcaagttatagggggccctgaatgaggatgggggaaggggcctgggagtagatgaccagagaggcttcctgtgcatctgtggccatcagctctcaggctcctgagattcaaacccaggtctgtctgctctgtgccagtagtgtctcctggaagggaaggagggaagggtggcangcagcaagctggggccctggatctgcatagaccaatggtcaaactgggtctgggggct

SEQ ID NO: 697507 - DNA, 2745 bp, Homo sapiens
  misc_feature 1127, 1128, 1129, 1130, 1131, 1132, 1133, 1134, 1135, 1136,1137, 1138, 1139, 1140, 1141, 1142, 1143, 1144, 1145, 1146,1147, 1148, 1149, 1150, 1151, 1152, 1153, 1154, 1155, 1156,1157, 1158, 1159, 1160, 1161, 1162, 1163, 1164, 1165: n = A,T,C or G
  misc_feature 1166, 1167, 1168, 1169, 1170, 1171, 1172, 1173, 1174, 1175,1176, 1177, 1178, 1179, 1180, 1181, 1182, 1183, 1184, 1185,1186, 1187, 1188, 1189, 1190, 1191, 1192, 1193, 1194, 1195,1196, 1197, 1198, 1199, 1200, 1201, 1202, 1203, 1204: n = A,T,C or G
  misc_feature 1205, 1206, 1207, 1208, 1209, 1210, 1211, 1212, 1213, 1214,1215, 1216, 1217, 1218, 1219, 1220, 1221, 1222, 1223, 1224,1225, 1226: n = A,T,C or G
ccgggcgcagtggcaggcgcctgtagtcccagctacttgggaggctgaggcaggagaatgacttgaacccgggaggcggagcttgcaccgagccgagatcgtgccactgcactctagcctgggtaacagagtgagtgagactccgtctcaaaaaaaaaaaaaaaaaaaaatcatgtccagagtaaaaaccatgttaaagcaatttttccatttaaattagcaatataaatttaaaatatcattttgtatttttggaaggtaaaaatatgaggtgactgaaaatgaaattacattttcattttcccccatattaggagggaggggtatgtaggtttttccaatggtgtatcaacataaaatttcaatgaacttctgaaaaatgagcctatgttgtaaataattttgccaaatatatcctaggaaataggattaaaaagatataagggtgtctcttcttcctttccccctaatataaaaccagattattattaaatccttaatttctagtgattatgtcatatttatttctggcttccaaattatatggtcagtcaagttagtgttggcggttttcaccgcaactcatttctcttaagagaaattctccgtgaacctacagcaaagtgggcataatgctttgaatagttatcttgtagctttctgggaggaatttagaacagtaatatcccctcttggtccctcagtaaccatcatcttttaaactgaactctgatttatatggcctagcctttagtagtttgtataggtaagtctgcaagcccacaaatatatcagacattgttttaagggattatagataatttagactgtgtgtctttaatttctttttgtttagtttgtttcttagaactgttttcaacttgttttctcttgagcacattataattaatgttctgtgttttactctcccttcttattcctctttctttcacttagttgatttctgaatgtttccctttattcctgtaatcttttcttcatagcggcagtctctgggtgaagctttgcataaatctatcagcaatgtaagtgagcggcacttacaatttgtacacaagtccacccctctataatacatcttgcatagacaacatcactgcttaaannnnnnnnnnnnnnnnnnnnnnnnnnnnnnnnnnnnnnnnnnnnnnnnnnnnnnnnnnnnnnnnnnnnnnnnnnnnnnnnnnnnnnnnnnnnnnnnnnnnaaatttcattatttttatgtttactttgaaagatatagtattttttttgaaaaactattaactaggggaattataaaaatggaaataaatgtaaaatttttttgttgttaaactagtttattttttgaaaaactagcattagtgacttccttttttaaaagtactggattgttatgaaggtttatgggaattagaacatattttatacattgtaatgttataattatcaacagatgaaaagcaaaatagagtaaatccctttcctaagcattgacaaagtgatcactctttacttatgtacactcaggtatgcagaaattcatcttcaaaataatattccatttaacactcatttaaaaacatttttctttgtatatcataagaaaaagtgagatttattttcacaccaaacccatactcaacttgtcctttaaaattagatgacacagaattgaacattgttgaatatttttcttgatgtcctaaggcagaagtcagcagacttttctgtaaaggaccagatagtaaatacttttggctttgtgggccagacagtttctgtggcagaaactctatgccattgtagtgtgaaaatacttatagacagtatgtaaacgaataggtatgactgtattccagtaacaatttacaaaaacagattgtagtttactaatgccagccctagagaaatcaaagctttgagcctagagatgtcctgtgaaattctgatactcctggaatgaaactatttcctcataccccataagtttttcctactatgcaagaaaataaaaaktttacctagttttcatattcagtcttttttctatgtaaaaaataattaaaatatgcaaatacatttagcagcattttctttcatctcttaaaagaaacaacaaacatttatctcagtgttgctgaaataggctatatttagaaattctttttagcagtgacatagagcatagtacaaattttggcatgatagctatatcaatatagacattttgacatatgtgctaattgggatagaaataagaacccaaataggatatgattatttttaaaattaattgaattatactttagaatatttgtgacagcacagtcacattttctttaacagttgtactttttattcattaaacaaaaaccaccttattgaaattgcctattaataactagaatgaaagtgccttgattcatctcctacaaaaaaagtaaaaggggctggtaacacaatgaaatctcttttataacattatagtcattgaggatcacctttttactctgtcatcatccacagcaaaacatgactttgtcagagtgccgtgctctgcaggatgagcacctgcccactccctctgtacatggtgtgtaccccagctttccatacaagaattcagtgcttagcacattcaaaaacaagtgactgttattgatacatctgtccttcatagataactttctaattagttttagttaataataagaggatgattggggacatattccacaa

SEQ ID NO: 697508 - DNA, 2745 bp, Homo sapiens
  misc_feature 1127, 1128, 1129, 1130, 1131, 1132, 1133, 1134, 1135, 1136,1137, 1138, 1139, 1140, 1141, 1142, 1143, 1144, 1145, 1146,1147, 1148, 1149, 1150, 1151, 1152, 1153, 1154, 1155, 1156,1157, 1158, 1159, 1160, 1161, 1162, 1163, 1164, 1165: n = A,T,C or G
  misc_feature 1166, 1167, 1168, 1169, 1170, 1171, 1172, 1173, 1174, 1175,1176, 1177, 1178, 1179, 1180, 1181, 1182, 1183, 1184, 1185,1186, 1187, 1188, 1189, 1190, 1191, 1192, 1193, 1194, 1195,1196, 1197, 1198, 1199, 1200, 1201, 1202, 1203, 1204: n = A,T,C or G
  misc_feature 1205, 1206, 1207, 1208, 1209, 1210, 1211, 1212, 1213, 1214,1215, 1216, 1217, 1218, 1219, 1220, 1221, 1222, 1223, 1224,1225, 1226: n = A,T,C or G
ccgggcgcagtggcaggcgcctgtagtcccagctacttgggaggctgaggcaggagaatgacttgaacccgggaggcggagcttgcaccgagccgagatcgtgccactgcactctagcctgggtaacagagtgagtgagactccgtctcaaaaaaaaaaaaaaaaaaaaatcatgtccagagtaaaaaccatgttaaagcaatttttccatttaaattagcaatataaatttaaaatatcattttgtatttttggaaggtaaaaatatgaggtgactgaaaatgaaattacattttcattttcccccatattaggagggaggggtatgtaggtttttccaatggtgtatcaacataaaatttcaatgaacttctgaaaaatgagcctatgttgtaaataattttgccaaatatatcctaggaaataggattaaaaagatataagggtgtctcttcttcctttccccctaatataaaaccagattattattaaatccttaatttctagtgattatgtcatatttatttctggcttccaaattatatggtcagtcaagttagtgttggcggttttcaccgcaactcatttctcttaagagaaattctccgtgaacctacagcaaagtgggcataatgctttgaatagttatcttgtagctttctgggaggaatttagaacagtaatatcccctcttggtccctcagtaaccatcatcttttaaactgaactctgatttatatggcctagcctttagtagtttgtataggtaagtctgcaagcccacaaatatatcagacattgttttaagggattatagataatttagactgtgtgtctttaatttctttttgtttagtttgtttcttagaactgttttcaacttgttttctcttgagcacattataattaatgttctgtgttttactctcccttcttattcctctttctttcacttagttgatttctgaatgtttccctttattcctgtaatcttttcttcatagcggcagtctctgggtgaagctttgcataaatctatcagcaatgtaagtgagcggcacttacaatttgtacacaagtccacccctctataatacatcttgcatagacaacatcactgcttaaannnnnnnnnnnnnnnnnnnnnnnnnnnnnnnnnnnnnnnnnnnnnnnnnnnnnnnnnnnnnnnnnnnnnnnnnnnnnnnnnnnnnnnnnnnnnnnnnnnnaaatttcattatttttatgtttactttgaaagatatagtattttttttgaaaaactattaactaggggaattataaaaatggaaataaatgtaaaatttttttgttgttaaactagtttattttttgaaaaactagcattagtgacttccttttttaaaagtactggattgttatgaaggtttatgggaattagaacatattttatacattgtaatgttataattatcaacagatgaaaagcaaaatagagtaaatccctttcctaagcattgacaaagtgatcactctttacttatgtacactcaggtatgcagaaattcatcttcaaaataatattccatttaacactcatttaaaaacatttttctttgtatatcataagaaaaagtgagatttattttcacaccaaacccatactcaacttgtcctttaaaattagatgacacagaattgaacattgttgaatatttttcttgatgtcctaaggcagaagtcagcagacttttctgtaaaggaccagatagtaaatacttttggctttgtgggccagacagtttctgtggcagaaactctatgccattgtagtgtgaaaatacttatagacagtatgtaaacgaataggtatgactgtattccagtaacaatttacaaaaacagattgtagtttactaatgccagccctagagaaatcaaagctttgagcctagagatgtcctgtgaaattctgatactcctggaatgaaactatttcctcataccccataagtttttcctactatgcaagaaaataaaaattttacctagttttcatattcagtmttttttctatgtaaaaaataattaaaatatgcaaatacatttagcagcattttctttcatctcttaaaagaaacaacaaacatttatctcagtgttgctgaaataggctatatttagaaattctttttagcagtgacatagagcatagtacaaattttggcatgatagctatatcaatatagacattttgacatatgtgctaattgggatagaaataagaacccaaataggatatgattatttttaaaattaattgaattatactttagaatatttgtgacagcacagtcacattttctttaacagttgtactttttattcattaaacaaaaaccaccttattgaaattgcctattaataactagaatgaaagtgccttgattcatctcctacaaaaaaagtaaaaggggctggtaacacaatgaaatctcttttataacattatagtcattgaggatcacctttttactctgtcatcatccacagcaaaacatgactttgtcagagtgccgtgctctgcaggatgagcacctgcccactccctctgtacatggtgtgtaccccagctttccatacaagaattcagtgcttagcacattcaaaaacaagtgactgttattgatacatctgtccttcatagataactttctaattagttttagttaataataagaggatgattggggacatattccacaa

SEQ ID NO: 697509 - DNA, 747 bp, Homo sapiens
tttggagcaaagaagactgaagtgttatcaatattttgggcctcaaagggaaagccgtctgaccctgtttctcatcgataatgttgctgggagtcccagaccaagtcgttaaagctctcctcttcctcctttaaaacccactatgactgctagcatgaaaatcagattaaatttagacatttgtcaaagatttgtgaaaagccttttcatgtgctagagattgctgagcaaggagaattaaaaaatgaactactgccctgtctttgcacaggaattgtagtsaaatgtagaggtcgcctttatagaaatgtggccaaaagggaatacacattccacagctttgtcagggcaggcaaaaacagtcccagtgttggaactattgttgtttagtccattgaaacatgctccactaaacatgattcaaatatgtctttgttggccgggtgtggtggctcacacctctaatcccagtactttgggaggctgaggcaggtggatcacctgagggcgggattttgagatcagcctgaccaacatggtgaaactgcatctctactaaaaatacagaattagccaggcgtggtggcgcatgcctgtaatcctagctacttgggaggctgaggcgggagaatcgcttgaatctggaaggtcgagtttgcagtgagccaagatcacaccattgcattccagcctgggcaacaagagcaaaactctgtctcaaaaaataaataaataaataaataaaat

SEQ ID NO: 697510 - DNA, 747 bp, Homo sapiens
tttggagcaaagaagactgaagtgttatcaatattttgggcctcaaagggaaagccgtctgaccctgtttctcatcgataatgttgctgggagtcccagaccaagtcgttaaagctctcctcttcctcctttaaaacccactatgactgctagcatgaaaatcagattaaatttagacatttgtcaaagatttgtgaaaagccttttcatgtgctagagattgctgagcaaggagaattaaaaaatgaactactgccctgtctttgcacaggaattgtagtgaaatgtagaggtcgcctttatagaaatgtggccaaaagggaatacacattccacagctttgtcagggcaggcaaaaacagtcccagtgttggaactattgttgtttagtccattgaaacatgctccactaaacatgattyaaatatgtctttgttggccgggtgtggtggctcacacctctaatcccagtactttgggaggctgaggcaggtggatcacctgagggcgggattttgagatcagcctgaccaacatggtgaaactgcatctctactaaaaatacagaattagccaggcgtggtggcgcatgcctgtaatcctagctacttgggaggctgaggcgggagaatcgcttgaatctggaaggtcgagtttgcagtgagccaagatcacaccattgcattccagcctgggcaacaagagcaaaactctgtctcaaaaaataaataaataaataaataaaat

SEQ ID NO: 697511 - DNA, 1327 bp, Homo sapiens
tgacttttttagaaaaaggaactgagtcctatttagccggggtctagagattcaggaatgcttgtactgttgcatgaagagtgaactgggaaaatstttggagaggaaaatctgccattacgctttcaaaacttttttttttggatgttgattttcttttatttatttatttatttatttatttattattattatactttaagctttagggtacatgtgcacaatgtgcaggtttgttacatatgtatacatgtgccatgttggtgtgctgcacccattaactcgtcatttagcattaggtatatctcctaatgctatccctccccactccccccaccccacaacagtccctggagtgtgatgttccccttcctgtgtccatgtgttctcattgttcaattcccacctatgagtgagaacatgcagcgtttggttttttgtccttgcgatagtttgctgagaatgatggtttccagtttcatccatgtccctacaaaggacatgaactcatccttttttatggctgcatagtattccatggtgtatatgtgccacattttcttaatccatctatcgttgttggacatttgggttggttccaagtctttgctattgtgaatagtgccagaattaacatatgtgtgcatgtgtctttatagcagcatgatttataatcctttgggtatatacccagtaatgggatggctgggtcaaatggtatttctagttctagatccctgaggaattgccacactgacttccacaatggttgaactagtttacagtcccaccaacagtgtaaaagtgttgctatttctccacatcctctccagcacctgttgtttcctttttttttttaactttaaaaaaatgttaatagaaaaaaaatgcccagataaagataccgatcacagtatccacatctatacaatgattgatccagctgtggccctcccctctcacccagccccatgtggcttcctttgaaactgcagactggagatgacagtggtgaattctagtcctactcactggatatcagcatttcttttttttaaaattttattattattaaactaagttttagggtacatgtgcacaatgtgcaggttagttacatatgtatacatgtgccatgctggtgtgctgcacccattaactcgtcatttagcattaggtatatctgctaatgctatccctcccgcctcccccaaccccacaacagtccccagagtgtgatgttccccttcctgtgtccatgtgttctcattgttcagttcccacctatgagtgagaacatgtggtgtttggtttttcgtccttgcga

SEQ ID NO: 697512 - DNA, 1327 bp, Homo sapiens
tgacttttttagaaaaaggaactgagtcctatttagccggggtctagagattcaggaatgcttgtactgttgcatgaagagtgaactgggaaaatctttggagaggaaaatctgccattacgctttcaaaacttttttttttggatgttgattttcttttatttatttatttatttatttatttattattattatactttaagctttagggtacatgtgcacaatgtgcaggtttgttacatatgtatacatgtgccatgttggtgtgctgcacccattaactcgtcatttagcattaggtatatctcctaatgctatccctccccactccccccaccccacaacagtccctggagtgtgatgttccccttcctgtgtccatgtgttctcattgttcaattcccacctatgagtgagaacatgcagcgtttggttttttgtccttgcgatagtttgctgagaatgatggtttccagtttcatccatgtccctacaaaggacatgaactcatccttttttatggctgcatagtattccatggtgtatatgtgccacattttcttaatccatctatcgttgttggacatttgggttggttccaagtctttgctattgtgaatagtgccagaattaacatatgtgtgcatgtgtctttatagcagcatgatttataatcctttgggtatatacccagtaatgggatggctgggtcaaatggtatttctagttctagatccctgaggaattgccacactgacttccacaatggttgaactagtttacagtcccaccaacagtgtaaaagtgttgctatttctccacatcctctccagcacctgttgtttcctttttttttttaactttaaaaaaatgttaatagaaaaaaaatgcccagataaagataccgatcacagtatccacatctatacaatgattgatccagctgtggccctcccctctcacccagycccatgtggcttcctttgaaactgcagactggagatgacagtggtgaattctagtcctactcactggatatcagcatttcttttttttaaaattttattattattaaactaagttttagggtacatgtgcacaatgtgcaggttagttacatatgtatacatgtgccatgctggtgtgctgcacccattaactcgtcatttagcattaggtatatctgctaatgctatccctcccgcctcccccaaccccacaacagtccccagagtgtgatgttccccttcctgtgtccatgtgttctcattgttcagttcccacctatgagtgagaacatgtggtgtttggtttttcgtccttgcga

SEQ ID NO: 697513 - DNA, 1009 bp, Homo sapiens
ccaatagctattagctcattttagaatagtcaagactcctagattagagttttgcattaaataccaagttaatcacatccacctaaccttttatttgcccttcccaaaaactcttctaaagaaacttctgcaaggcctgacccaagtgtaataaggtgcagggtagacgttaaaaatgtgtgtttttaacacagtatctttaaactatagagtttcgtagaatctctcttaatatttatcttccaaaattttatgtgacgggtcaacagggcttcatatttgttttttaactttgatttcaaacaagattatttcaatatgaaccaaacattacctatataccacagattatatattaaggatattcaccaacttagtgacatgtttaggtaccaatttcaatactcctttagagatttgcaggagcaagtgagagtctagtgaagtcattgaaattgacttaatgctaagaaattaagtggaggttttagtttggcactgcacttcattgtaataaggatgaactcaacacagtgcagagactagtggttcctcaagaacaccggctaaagtgtaactgatgccaacatgctgcctggtgctgctggccttggctgccccttgatcaccattcacattattctccattctgctgctgtctctccttgattcttatcattttgttagcagcagcaggaaactttcaagctacctataccacaccagcacttggaacagcacccagacaggcctctaaagyacaaagcagaagtacagtgcgtgaactaacatataattcacactctgaacggtgggacgggagcacacagcacagacacttcattggtacctcaatataaaggacttcaggaaaaacaagagattctgtgttaaacatgtgaaacagaggaggcctttgttaggtctccctgaatctattcagagaggagagacatagtgaatgttgtcactggggcaggtggttgcggggctctgagaatacagtgaa

SEQ ID NO: 697514 - DNA, 643 bp, Homo sapiens
ggaagcttccagggaagacaccagcactgaggtcttaggaccacctctctgcaatgtctagagagtggtatgagccctttgaggagcttcctaggaaataaccaaacactgaacatttattgagcattaaccttctgccaggcactgtgtgaagtgctttatctccacsctgttaccccatcctcacaactgctcctcgaggtaggcacaattgtgcccatcctgaaaatgagggagccaaggatacgtggccataacttgcctgattacagttagtgagtagggaccaggatggaaacgtgtgtttaactgacttctgagccaggatcttaaccaacacgctgcagctgtgctgtcccatacagtgtcactggtcacacgtagctgtgtacacttagatttaaattaattaaagcaaagtcaaatttaaaattcagctcttcaaccatgctgcccacatttcaagagctcagtagtcgtgtgtggctagtggttaccatcttgggcagcaaagctatagaacattttcaacatcacagaaagttctattggacaatgctgtgccagaggaatggatcattattgactttcattcgtcatcacaaatgggatgatgagaaacttttttcttgccctagcctct

SEQ ID NO: 697515 - DNA, 643 bp, Homo sapiens
ggaagcttccagggaagacaccagcactgaggtcttaggaccacctctctgcaatgtctagagagtggtatgagccctttgaggagcttcctaggaaataaccaaacactgaacatttattgagcattaaccttctgccaggcactgtgtgaagtgctttatctccacgctgttaccccatcctcacaactgctcctcgaggtaggcacaattgtgcccatcctgaaaatgagggagccaaggatacgtggccataacttgcctgattacagttagtgagtagggaccaggatggaaacgtgtgtttawctgacttctgagccaggatcttaaccaacacgctgcagctgtgctgtcccatacagtgtcactggtcacacgtagctgtgtacacttagatttaaattaattaaagcaaagtcaaatttaaaattcagctcttcaaccatgctgcccacatttcaagagctcagtagtcgtgtgtggctagtggttaccatcttgggcagcaaagctatagaacattttcaacatcacagaaagttctattggacaatgctgtgccagaggaatggatcattattgactttcattcgtcatcacaaatgggatgatgagaaacttttttcttgccctagcctct

SEQ ID NO: 697516 - DNA, 704 bp, Homo sapiens
gtcacacgtgttctggaataggttcccacgtacctgagcgtctgctcttcttccccgctcctgagcgaccaggactgccttcccagctgttggcactcccaagatgaccactgttctggtgccactgagtcccctgacttaggccttgcagaaggagcacgcgctccccaccttctcctctgctccacctcattcctctccgcacccagcttaagctgggctataacctttaaccaggcattgtttgaagtgtcagcagaagggacgctcaaaacagggggrcttggggctgctactgctgccgctcagtcaggccccccgagcttgcctccctggagcagggcctgccccaccagggtgctgtgagcacacctgccccccgaccatgcagggcagccctccagagactcggtgagagaaggagctcctccacccatgggaggcaaactctgcctccctgttcctcagttcctgtcctaggacaggccactttccagaaggaccggcagtgggaattcccactccattcggggaagtccccatcccttacccagaggcctgcagcattgcttcctgaccccaagccacaggattccacttgcacgtaatagtccagaggctgcaaatcaggcacacagacctgtttcatttgggtcatgcagtttaaaaaatatatatgaattgttatcaatattcccattgag

SEQ ID NO: 697517 - DNA, 704 bp, Homo sapiens
gtcacacgtgttctggaataggttcccacgtacctgagcgtctgctcttcttccccgctcctgagcgaccaggactgccttcccagctgttggcactcccaagatgaccactgttctggtgccactgagtcccctgacttaggccttgcagaaggagcacgcgctccccaccttctcctctgctccacctcattcctctccgcacccagcttaagctgggctataacctttaaccaggcattgtttgaagtgtcagcagaagggacgctcaaaacaggggggcttggggctgctactgctgccgctcagtcaggccccccgagcttgcctccctggagcagggcctgccccaccagggtgctgtgagcacacctgccccccgaccatgcagggcagccctccagagactcggtgagagaaggagctcctccacccatgggaggcaaactctgcctccctgttcctcagttcctgtcctaggacaggccactttccagaaggaccggcagtgggaattcccactccattcggggaagtccccatcccttacccagaggcctgcagcattgcttcctgaccccaagccacaggattccacttgcacrtaatagtccagaggctgcaaatcaggcacacagacctgtttcatttgggtcatgcagtttaaaaaatatatatgaattgttatcaatattcccattgag

SEQ ID NO: 697518 - DNA, 2053 bp, Homo sapiens
atgtagtttatgtctttgttttcctttagaattaaagggaggcagacatgaatgggttttcatttatctctgtattcttggcatccagtataatcactggcacttgatgggtactcaagacatgtgttgaattgttaaatttagcaactgtttttcttttaaagcattctacttgggcttagtacggagacagatgcttgagaaaggaggaggagaaatgtcaagacatatgacattttctcatcttcaaaagctgtaaagagtttgtttgcttgtgaggtgttttaaaaagtgagcaaaccaggatggtctctccctttctaatgtctttttgggaagtatgatggttattttatgtgtcaacttgggtagaccacagcacccaggtatctggtcaaatgctatcctagatgtttctgtgaaaatattttctgggtaagattaacatgcaaatcactggacttcgagtaaagcagaytgccctccataatgcaagtgagcctcatcccgtcagtgaaggccttgagaaaaagactgaccttccccaaggagagggaatggggaattctgctagcagactgccttcagtctcatactgtgacttttttcttcagcctgcctgcctatccttcagattttggacttgccagcctcaacaatcatgtaagccagttccttaaaataaatctcaatcactctctctgtctctctctctctttctctctgtacacatcctgttggtttccctggagaatgctaatataggaagttcacttcaactgttcctgcagctgttcacgctatactttttctgagtactcttcccctgatagaaagttgtctgggactttcatgagtgaaaagtatttttaaatatcacttttccccttgcctactttatttttttcaaggcctaatttacatacaatgaaatgtaaagatcttatacagttcagttagttttggtaaaagcagatatatacccatgtaaccctcatctctatgaagatataaaacatttccatcaccccacaaagctcaattgatgtgtcttgtactgagtggaatattggagtctcttatttgtgtgtttatatgtatatatcttctatacgcctcctgtagttttctttataaagtggttgctatgttatctgatgcatagatattcacaattttatgtcttcattgtgaattgtgactttcagtattaaaaagtgccccttttatatttaatgcctttgccttgaattctgtgttttgagaaataagataggacttttaaacaatttccacttgcctgaaatacctttgttcatacctttatttaccctttctgtatctctctgtattcaggaaacatacagtatgtgattgggtttggctttgtaagccaagttgaaattgtttttcttttagtgggtaagttaggtttatttacattaatttttattactcatacatttggcctcagttgtcacagaaatattttataattacatgtgttgctttatttgttatattccttttttctatgaggtgtcttctatgctctttaaaacatttattttctggcatttatgaatgtttatatttgttttaattctctattattttacttgaacccgggaggcagaggttgcagtgagctgaaattgcgccactgcgctccagcctgggccacagaacgagactccgtctcagggggaaaaaaaaaaaaaaaaaaaaaaggtattgttttaactcccaccaattaacccatacaacagccatgcttattctactttcctctttctctctcccattttccatccaatttttattacaacatgtaacatttgtatatttgtcttataacttcaccttagtgtttttgtaatacatttggatatattaaaatcctcagtataataagttcttttggccaggtgtggtggctcactttgggggtactttgggacgttgaggcaggaggatggcttgagcccaggagctcgagaccagcctgggcaacacggggagaccccatctctaccaaaaaaaaaaaaaaaaa

SEQ ID NO: 697519 - DNA, 669 bp, Homo sapiens
tctgttgattataattgtcaagggcaaaagccttcccatataatttaaaatctgggatcttcttaaaattataaccacatttcaaaatcttacaacaactaggtcattgcacttcaaacttttcygcttaaaccgacagtaagaatacccttgaaatcttaacatagcacatacacacacacacgcaagtacacacaaaatagaagttaatcaaagaatactttacctttattatgtaaaatgccttatattttagtacattttatttaataatacctttagcaaaaagtacattttcttcaaagtagactgtgtcctgtaatttaaataatttaaataatatttccaatgtatatctcttaaaccactaagactgcaggaattatttaaggcagggactgttgatatatggatttaaaaaaaaaaacacttaaatacattcatttcttcacttacccttccattgattcattaattcaaaaattagtagatattggcctgatacatgaaagcttctgtgctaaggccctagggatagctgaatgagcattttaccactacaaacccacgtgttgttctttttttttttttttagtttccagaatttggctttattttgcagtatagaaatcatttggagccattttgagacagaagtagaggctctgt

SEQ ID NO: 697520 - DNA, 669 bp, Homo sapiens
tctgttgattataattgtcaagggcaaaagccttcccatataatttaaaatctgggatcttcttaaaattataaccacatttcaaaatcttacaacaactaggtcattgcacttcaaacttttctgcttaaaccgacagtaagaatacccttgaaatcttaacatagcacatacacacacacacgcaagtacacacaaaataraagttaatcaaagaatactttacctttattatgtaaaatgccttatattttagtacattttatttaataatacctttagcaaaaagtacattttcttcaaagtagactgtgtcctgtaatttaaataatttaaataatatttccaatgtatatctcttaaaccactaagactgcaggaattatttaaggcagggactgttgatatatggatttaaaaaaaaaaacacttaaatacattcatttcttcacttacccttccattgattcattaattcaaaaattagtagatattggcctgatacatgaaagcttctgtgctaaggccctagggatagctgaatgagcattttaccactacaaacccacgtgttgttctttttttttttttttagtttccagaatttggctttattttgcagtatagaaatcatttggagccattttgagacagaagtagaggctctgt

SEQ ID NO: 697521 - DNA, 656 bp, Homo sapiens
taatggcacatattctacaggactattgaggtactaagtgaggtcatgtaagtaaagtgtttagctcagtgcccagcacatggtgggtaccgaaaaaggtttgttgtttctcctcctttatgtcctgtatgtcaattgccagggtggttaagcagaaagttctgttggcttggcagagtttgttctgtctaggttctggccttctgttaaatgtcttcctgtttggtgcttcctcaataaatgggagatgtacctctcatcctacccccgccccagggtgaggctttggtatcccccacccctttagctgaatcaaatgtagtaagcccagggactactcctgagtccatgctctaacccccaaatcctgagtcacagatattctgggaattgtacataaagtcagggcatgtgtcttctccctctgcatacgctgttgagaataagggctgaataagccactgcaacctcaggcctgaaatatacaacaatccaccctgcttttcttttcctttcctttcccttcttttttttttttttttttttttttttaatttaagttctgggatacatgtgcagaacgtgcaggtttgttacataggtatacacgtgccatgytggtttgctgcacccattaacctgttatctacattaga

SEQ ID NO: 697522 - DNA, 2592 bp, Homo sapiens
aattctttctgatattattgcacatctagatgggttacttcccacactttaccccctctctctctcttcactgggaaactataatttcagtagttgattgaaaagttgatcagcaaagccacataaatgaagaaggacttttgaaatagcctccaaatatttttctggctaggcactaaggaacacagttgacagctgtgtagtattttctgctacaggaataacattccaacatcaagttaaaactaatgcaacaaaaatattcaatactaagagaaagtcacatggcggattgcacctttaaaaaaaaaaagtgtttttaggccgggcgcgttggctcatgcctgtaatcccagcattttaggaggccaaggcaggcagattactggaggtcagaagttcgagaccagcctggcaaatatggtgaaaccctgtctctaccaaacaaacaaaaaactagccaggcccagctacttgggaggctgaggcaggagaattgcctgaacctgggagggggaggttgcagtagctgagatagtgccactgtactccagcctgggtgacagggactccgttaaaaaaaaaaaaaaaaaatttcaagtagcatttagctgagttccagaataaaatttctcctgtgtgcagacagaacttgtgtagttgtaaggtctcagaagggtaagtgcacctgaatggtgaaatgctaaccatttggaaatatattgattatgaatttatgtattatgcattatattatatatttatatattttatgtataatacttgtacctatatatttatatcataattataattatcagccttccacaactaaaatgtaagttatcagagaacaaggattttgctctgttttattcacaattaacacaatagtttaaaaagtaaatgactaatagaatacattaacttgtaaggaaacttgtttataattgagcctgagttccacaagatgccagggtagctttggaggggcggatgggatggggtggcggtgcaggaagggctgtggggtgaggtggggtctgtgctgggcaaagagagggtggatggagaaagggaggaagccaagggtaggagttcaagctacagagatggaaactgtgttctcattggaatgttcatgggaggatttagtgggacccaggtcagggaaatacattcctgttttgttttttttttttccagttttgtatctcttctgctgttaattttttgaaaatgtgcatttgtctattttaaaatataaattgtccataatggtctcttatttgtctaatctattccaatgattttgatttttttcttacaatttttcttctttcatttatgtttttctcagtgacaatttcataaattagactatgtcgatggaggagttttcttattcaaataactccattcgaatgtatttgtttatttaaatgatggcctggtttgtaatttttcattcataaattctttcttctgatatcttcaagattttattctttccttttcttcttttctagagtcctgatgtgagtgtttgataatttaacagacaaaataactgtgtggctcctgaaattggccttttttgggggtctcttcagaggcttcagggagaggcaggggacccagggagaggtaggggacccagggagaggcaggggacccagggaagagcaggtgctgctaatttccatctcttttgcctggattttaaaatggctcacaatgccaaatcctaaactatattctttcaaacatcaaccaccttggaattgcccccttttggaattttaaaatacgagcttgctttgttttctctgccaccttgccatgacctcacccaaatgctgtctccagatttcccacctaggttttacaggcagaatatatatatatatacatacatatatatatacatatgtatatatatgtgtgtatatatatgtgtgtatatatatatattcctttttttttttttttgagacagagtcttactctgtggtctagggtggagtgcagtggtgcaatctcagctcaatgcaacctctgcttcccgggttaaagcaatcctcytgcctcagcctcccaagtagttgggactacaggcgtgcgccaccatgcccggctaatttttgtaattttagtagagatggggtctcgctatgttgcccaggctggtctcaaactcctggactcaagccatctgctggctttggcttcccaaagtgctgagattacaggcgtgagccactgggcccagcctgcaggcagaatactttatagtgatacaaagtagcgaccctgaagttccataatttcatgttctcatcccagctttgctacttcctcgctgcatgacctttctctggttatttagcccaagcctcagtctcctcacctgtcagatgagggtcatgatagcacctgcttcaaatagcacttccgagcatgaaaagagatggtgtatgtcaaagacctatcacaaaaggaatatttgctagtttgttaagcttttctaggggcttttacatacagggttgtttcttgttttgttttttgtttacgacagggtcttgctct

SEQ ID NO: 697523 - DNA, 584 bp, Homo sapiens
  misc_feature 414, 432, 484, 485, 486, 487, 488, 489, 490, 491, 492, 493,494, 495, 496, 497, 498, 499, 500, 501, 502, 503, 504, 505,506, 507, 508, 509, 510, 511, 512, 513, 514, 515, 516, 517,518, 519, 520, 521, 522, 523, 524, 525, 526, 527, 528: n = A,T,C or G
  misc_feature 529, 530, 531, 532, 533, 534, 535, 536, 537, 538, 539, 540,541, 542, 543, 544, 545, 546, 547, 548, 549, 550, 551, 552,553, 554, 555, 556, 557, 558, 559, 560, 561, 562, 563, 564,565, 566, 567, 568, 569, 570, 571, 572, 573, 574, 575: n = A,T,C or G
  misc_feature 576, 577, 578, 579, 580, 581, 582, 583: n = A,T,C or G
tgcctccctgaacttctgtctacagactgatcacctgtcctgcatcccagagttcagcctcaattatgtttgtttcatatttaaaaatctcatctttttgacaagcaagatttagaacgttgaaactgcctaactctttagagagtggcagtgagtattagcaaagggacatggcttggttatgaagacagttgtgttctgaggtagctattaatagatgtaagcactttgaactgagtatctagggagattttcactgtaagaaatcataaaattaatttctccatgccaaggataactggagtgagcagtgctatggcgtgaatgtttttgtccacctgccaaattcatatgttgaaacttaatccccraagtggtgatattgatgtgaaatgggacatgcttaggtcacangggctcattcttcctgantggaattagtgtcttttaaaaagaggccccagggagcctgtttgcctctttnnnnnnnnnnnnnnnnnnnnnnnnnnnnnnnnnnnnnnnnnnnnnnnnnnnnnnnnnnnnnnnnnnnnnnnnnnnnnnnnnnnnnnnnnnnnnnnnnnnna

SEQ ID NO: 697524 - DNA, 1272 bp, Homo sapiens
tctatctctagataaaatctgaacacaggaaaagtctttttgccaatctcccctttagcttttaccttccagctctgtttccttctattcttgattatatttactttcagtccccctccaaccttctcctaaagcatctctttcctctagtcatctgctaatcatcaattaaatgaatcgctaattctcagttacatgataaattgccagagacataagatacttcctctcccagggagatgtatgaattaataagtctttaaaaacaggacttcttgtaccccaacaagcaagagaagagctaattgggggcaaggacttaatcatctagcacagatgtctacatcttccactcataagcttggctcaatgagaaatgattttgttgaagattacatttttactagcatatagttattccgaggaatatgccttgtttttgctatctagaaattcaagcagctgctttcctggcgtgctcattctttggaaattattcaagtaatctatgtagaagaaaaacaagtggtacttactgcctccatcgatggctcagtaaggtaggccaagatggcatcatactgtgaattcagtactgtgagcatgagaggtaaaggattttaagctaaagttgaagtatatagttcaaatgcaatcttggtaaactgatttaaataaataagtaaatagatgacacaaaaggactttgaaaagatggccactgatttggagttctctttcatgaccaaggacatgagatgtcacattcatctatattaaaaggtatcacaaatgcttttgataaaagtgaagttttttttgtagaattacttcaaagaattaagcaagatagctatctcggagagttagacccaagtcatagaggggggctcagaatcagaagtcatagaaaagtaatagaaaagagcaattgatgctgagaaaagtgggtgagctaattatgtcattgactctgtgatggattttgcaaagcctattgttatcaattacctagataatgctaagtacctatacacaaaatgctaaagacacatacacatataaagagaaagaaaggaaatgtcayggcatttctagaaacaaatttctgcatattgaaatgtcttaaaatcatggtaatgaattatccgcttaaaagaatgaagttaggtaagattaagagaggtagagaggctttgaagtatattagggaatttcaatggaatcaaaaccaaaaggaaggaatattttatgctgcataaaagttgctgg

SEQ ID NO: 697525 - DNA, 1081 bp, Homo sapiens
gaacagaggtgaccaaacacctctgacagttgcccaggagtgctctccttccctgcacagggcactgcatcagcccagagcatagacacaactgtgtgaaaagggaggcagaagagatgccagtctaccacttaccaccacctggggggacccagctagaaacagaagctaagtcggtttagagaaggaaagagcacactgctgcattgctggatttggggcttccagtgtgtacctgacaaaatatttcactgattcctcctcaccatcccctctgcagactataaactactgaaggttgggagcagtgacctggtcaggtctgcagtgtacatacatgatatggtgcctgctcttctgagggactcaggggacccttcatggaattaaagtaaccttcatgctctggggaactaagcagggagaatgatcaggagcctctccccagctcgggacagcagtgacaatgaagacgatgaggatgatgatgatgataacgagaatggttatgatgacgacagcagctaataccattgattcagtccttaccttgtgccgggcactgtgccaaatcatttatatccagggtctatttcagtgtgagtcataagcctctgggcataggccccacaatttgcatcattttatgtttgaggtaactgaggcacagagagattaagtggctggtccatgccaggggtaagtgagcaaagagctagcgtgggaatctaagaacagatgccctcaagatactggacatctcctgtgggctgggccatggggtccctgcactggccttctacctcccacaccacccgccactccccaacccctcccctccaccccactcccctgctccgaaagagaatgcctgaaaagacgacgtctctaccaaagaatgcaaaaccaattttggaaatgttttctaaggcgaagcatccccagactaaatacacaccttaaacagattctaaattgaaacttcagagaaaagcactatatggagtaagaayaaaaatgaaagaaaaaagaaaaagtgtggttctcctgttgaattctacctaggacacaatgacccatg

SEQ ID NO: 697526 - DNA, 1372 bp, Homo sapiens
aagattagaacagtacaatttgtttgccaaacccacgaatattgtatcttaagagagacaaatgcaatagccttgagacttgtttccttcatttgcttgcagtaacttaataagaagtaggcttgaagaagactgagcaattctgattgaattagttggaagaatcggccaataccagaggctgagttctggagggcttcctgtttctaacaaggttgttatttccacacagggcatctctgttgttacacagctgcatagatattccatgacactctgtacctaaaatatgtaagatatttcagaattaagatctttttctactataatgccttcaatgttgtctgtaatgcaaccaattccaatctaggcacgattccctttaggctaatgagaatatgaagaagcatatatttccctctattgattttccttataagtttttggccaaaaaaattcttgctttttgtttttgttttttaatttgtactttgaagtgttagtgtccattatgcctatgtatgagactactcagtgaaggaggagtaggtcaccagacaaattttgagtatatttgtcaggagaaaaggggaatgaacttgagcaaaaaagaaaacaagagattccatctacatttttcttcctaagcagttaaaatttgtgtgagagaatgtcattatatgtgtcaaaagaaaatgctgtaccataatgaataattagtagtaaaatcatgaaattatagcaagtgaaaaaattaaacactattctttaagtaaaacaaaatatgttattatgtacatagaacaagagttcaatattctttttactgaaaaatacaatttagatatttatttatttccaatatatttcattagawgttcttacattttctatcatattcctattctacataggcaatggattttaatggaacacaactttcagaagttatttaaattgtaatctctctgggatttgaaaaggattatgttttcattctagtaattggtatgcatctaagttttggtggtagtagcccatgtttttctttattctgtgacacaacctctaaagcaacatgataggatgaaattattcttgcaatttaactcaattgttttttcacaattttatagcctcattagcaactttttttatttgggctctgtatcaaataaaggtgctttgcaagttggttttcatcattttgcaaattcatcaatttattattttttcttcttgttttcgaaaagcatgcattaaatgtagtagtctactatgttgtaggtactattaagtatacaacgatgtgcaacacgtagtctctaacttcaatgaggttgtagttttgccaaaaagccaagtaagccca

SEQ ID NO: 697527 - DNA, 539 bp, Homo sapiens
aatttcccccaaataataaaggtgaaataaaaacagaaggacaagagctcataaccgtaataaaagcccccacctcctttggttatgataaaccacatgtgctagtggatctacttgtggatgatagcggtaaagagtccttgattggttatagaccaacagaagattccaaagaattttcatgagatcagctaagttgcaccaactttgaagtctgattttcctggacagttttctgctttaatttcatgaaaagattatgatctcagaaattgtatcttagttggtatcaaccaaatggagtgacttagtgtacatgaaagcgtaaagaggatgtgtggcattttcacttttggcttgtaaagtacagacttttttttttttttaaacraaaaaagcattgtaacttatgaacctttacatccagataggttaccagtaacggaacagtatccagtactcctggttcctaggtgagcaggtgatgccccagggacctttgtagccacttcactttttttcttttctctgccttggta

SEQ ID NO: 697528 - DNA, 539 bp, Homo sapiens
aatttcccccaaataataaaggtgaaataaaaacagaaggacaagagctcataaccgtaataaaagcccccacctcctttggttatgataaaccacatgtgctagtggatctacttgtggatgatagcggtaaagagtccttgattggttatagaccaacagaagattccaaagaattttcatgagatcagctaagttgcaccaactttgaagtctgattttcctggacagttttctgctttaatttcatgaaaagattatgatctcagaaattgtatcttagttggtatcaaccaaatggagtgacttagtgtacatgaaagcgtaaagaggatgtgtggcattttcacttttggcttgtaaagtacagacttttttttttttttaaacaaaaaaagcatwgtaacttatgaacctttacatccagataggttaccagtaacggaacagtatccagtactcctggttcctaggtgagcaggtgatgccccagggacctttgtagccacttcactttttttcttttctctgccttggta

SEQ ID NO: 697529 - DNA, 728 bp, Homo sapiens
aaaaggaaaaaaggaaggaaagaaaaaaggaaggaaggagggaaggagggaaaaagggaaggagggaaggaaaggatgggaaagaaggaaaggaaggaagggaaagagagaaagagggaaggaggaacgcacggaacgccgacacgcacgcacgcacgcacgcacgcacgcacgccggccgcaacgagggagggagggatacagagagggagggaggggaagggaagaaaagggaggagaagggaaaggaggaagaaaaggaaaggaaaggaataaattttatttcttaacagttctggatgttaggaagtccaaggttgaggggcctgcatctggtaagggtcttcttgcygcatcatcccactacagaaggcagaaggaaaagagagtgcaagaaggcaagagggcaaaaggggctgaactctgttttataataagcccactctgtgattactaatctattaccacaataacaacattaactcattcatgaaggctattttattaggccccacatcccaactgttgcattgaggattgagtttccagcacataaactttgggggacacatttaaaccatagcagagcacttaggttaattcaactaagaggagctgggaaaatcaaaggcatgagaaagacagcaaaagctagcagagagaaatgcataggttaaggaaaaaagtcacagtgaatcctgtagtgcaggctactttatcaaaagcac

SEQ ID NO: 697530 - DNA, 608 bp, Homo sapiens
cttgaaacattatagtaagtaaaattggcaaaacacagaaaaccaaatattgtatgattcaatttttatgaaatgttcagaataagcaaatctttcgataccgaaagtaaatttgtgattgcctagggctgagtgtagggagagagggcagtggggagtggctgcttatcagtatgaggtttctttagaggatgataaaaatgttctggaattaaataattatgacacttgcagaactttgcaaacagtgaaaactgctgaaattgtatgcttaaaaataataaactagacagatgagagatgagagagagagaaaggcagagagacaaaatttgtgacctaagataatgcctacattmagagcctgacaactaaccaccccacacttctctagacctgtcattttatcttagattgaaagcttaaactaaatcctactcagccctgatactgtgtcgttccatgtcctcacaaatagtcctactctatcactaaaaatctaggccctaaatgatcaaggcagagattttttttcataaccctggaaaccatttcagaatgctgacatataatctatacctgtgcgctcttgaaaaacatcttgaatc

SEQ ID NO: 697531 - DNA, 608 bp, Homo sapiens
cttgaaacattatagtaagtaaaattggcaaaacacagaaaaccaaatattgtatgattcaatttttatgaaatgttcagaataagcaaatctttcgataccgaaagtaaatttgtgattgcctagggctgagtgtagggagagagggcagtggggagtggctgcttatcagtatgaggtttctttagaggatgataaaaatgttctggaattaaataattatgacacttgcagaactttgcaaacagtgaaaactgctgaaattgtatgcttaaaaataataaactagacagatgagagatgagagagagagaaaggcagagagacaaaatttgtgacctaagataatgcctacattcagagcctgacaactaaccaccccacacttctctagacctgtcattttatcttagattgaaagcttaaactaaatcctactcagccctgatactgtgtcgttccatgtcctcacaaatagtcctactctatcactaaaaatctaggccctaaatgatcaaggcagagattttttttcataaccctggaaaccatttcagaatgctgacatataayctatacctgtgcgctcttgaaaaacatcttgaatc

SEQ ID NO: 697532 - DNA, 608 bp, Homo sapiens
cttgaaacattatagtaagtaaaattggcaaaacacagaaaaccaaatattgtatgattcaatttttatgaaatgttcagaataagcaaatctttcgataccgaaagtaaatttgtgattgcctagggctgagtgtagggagagagggcagtggggagtggctgcttatcagtatgaggtttctttagaggatgataaaaatgttctggaattaaataattatgacacttgcagaactttgcaaacagtgaaaactgctgaaattgtatgcttaaaaataataaactagacagatgagagatgagagagagagaaaggcagagagacaaaatttgtgacctaagataatgcctacattcagagcctgacaactaaccaccccacacttctctagacctgtcattttatcttagattgaaagcttaaactaaatcctactcagccctgatactgtgtcgttccatgtcctcacaaatagtcctactctatcactaaaaatctaggccctaaatgatcaaggcagagattttttttcataaccctggaaaccatttcagaatgctgacatataatctatacctgtgcgctcttgaaaamcatcttgaatc

SEQ ID NO: 697533 - DNA, 799 bp, Homo sapiens
ttaaagttgctagttgaattatgagattatttttttctataactctcttgatttatgaataagttatactggcatcataagagggcacacagtctaaccttttctacattcctctacctgctcaatttgtctcttcaaatacattaatcaatgtagacttttgtcaggacattcattagttcattaatttaatcaatatgcatcgagtacctataatgctccaagcactctggtgagtgttttagtggggaaggtggcacgatgatggcttagtctgtgccagtggtgacatatggacccatatacatttgagcctcctgaggtgcacgtgaagatgcatattttggggctttaccctaggatctcctaaataagaaatattttaggtggagcttggaatagtttgcaatctgtttatgtaatttatttgattttcagaaagtttagagctactgacttcattctgataaaagcttgatgtttagaagatgagataaagaaataagtgaataattacaacaagcaaagagggttaagctaggtacaagcacagggcacgacagcattactgagaggaagtacagttctcacatttagtaccaaaataagtgggtctcaaactcctcttataccttttcaatccaacaatatttattttataagtttataagtagaatacatgacaaaactaggacaaaactcagtagggagaaatgaaagcatactayaaaaaatcacaatataaataaagtgctacaatattatttgaaggttgactgtgatgagttaaaaacgcaca

SEQ ID NO: 697534 - DNA, 1205 bp, Homo sapiens
cgccggacactcaaggcaccactatcagctggatgtatctttccttacatgtttccagactggtttccctgatgtctccatcacatactagagtaatcagggtatgctggctgctgtaacaaataacccccagatctcagtggcttatcacaaccaaggttgattgcccactcatgacacaatccaatgtagctggcagtgggggagcagtagagttctgctccacacagacatttaggaacccaggctgcctccatctagtgatggagacgatgaataatgataccatcatcttcaaattgccatctccaaggttaccatgcaagagaaggagagactgtggaggagaatgcagaaggatttggaaaggatggaaagcttagaagcagtgttcattcctttcctccatattcgattgtccagagctcagttatgtggcccaactgaactgcaagggagtctaggaaatgaagtctttctatgtgctcaagagaaaggatgcagcttgttgagtacataacattgtctctgtcacacatgccttgttcttagctctgagcctcttcctatactctttctctcaccttagaatgcttcccttcagtttctgataaatcctccccattcttgaaggccatactcaatcacagtcttttctttgaagccctctctgattgctctctcccctgaatgaataaaccatgaaattgtctgaaatgtgcaatttatcgcagggcacaggattgccctagcctttgtttgttttatgtgtgcaggtctggacggcagctgcaagacactctgagaagtcaaaggccatgccttatagacctgttccaaaacatgttggctggaaatgaacatcatcggaaatgggacaaattgaaacctggtaagatacaataaaagcatagtatccattctgtgatattcttgccaaagatgcataacttgaatctgatccrgagaaaacagacaaatccaaattgagaaacttacaaaataattgtcctgtaatctttaaagttgtcaaagtcaaggaaaagatcaaagaactgtttctgagtcaaggaagctacaaacatgacagctaaatgcaacgtgtgattcctgactgaatctttttgctacagaaggcattagagagacaactgtcaaaacatgaatggggtctgaggatcagatggtagtaacgcagcagaata

SEQ ID NO: 697535 - DNA, 1205 bp, Homo sapiens
cgccggacactcaaggcaccactatcagctggatgtatctttccttacatgtttccagactggtttccctgatgtctccatcacatactagagtaatcagggtatgctggctgctgtaacaaataacccccagatctcagtggcttatcacaaccaaggttgattgcccactcatgacacaatccaatgtagctggcagtgggggagcagtagagttctgctccacacagacatttaggaacccaggctgcctccatctagtgatggagacgatgaataatgataccatcatcttcaaattgccatctccaaggttaccatgcaagagaaggagagactgtggaggagaatgcagaaggatttggaaaggatggaaagcttagaagcagtgttcattcctttcctccatattcgattgtccagagctcagttatgtggcccaactgaactgcaagggagtctaggaaatgaagtctttctatgtgctcaagagaaaggatgcagcttgttgagtacataacattgtctctgtcacacatgccttgttcttagctctgagcctcttcctatactctttctctcaccttagaatgcttcccttcagtttctgataaatcctccccattcttgaaggccatactcaatcacagtcttttctttgaagccctctctgattgctctctcccctgaatgaataaaccatgaaattgtctgaaatgtgcaatttatcgcagggcacaggattgccctagcctttgtttgttttatgtgtgcaggtctggacggcagctgcaagacactctgagaagtcaaaggccatgccttatagacctgttccaaaacatgttggctggaaatgaacatcatcggaaatgggacaaattgaaacctggtaagatacaataaaagcatagtatccattctgtgatattcttgccaaagatgcataacttgaatctgatccagagaaaacagacaaatccaaattgagaaacttacaaaataaytgtcctgtaatctttaaagttgtcaaagtcaaggaaaagatcaaagaactgtttctgagtcaaggaagctacaaacatgacagctaaatgcaacgtgtgattcctgactgaatctttttgctacagaaggcattagagagacaactgtcaaaacatgaatggggtctgaggatcagatggtagtaacgcagcagaata

SEQ ID NO: 697536 - DNA, 1205 bp, Homo sapiens
cgccggacactcaaggcaccactatcagctggatgtatctttccttacatgtttccagactggtttccctgatgtctccatcacatactagagtaatcagggtatgctggctgctgtaacaaataacccccagatctcagtggcttatcacaaccaaggttgattgcccactcatgacacaatccaatgtagctggcagtgggggagcagtagagttctgctccacacagacatttaggaacccaggctgcctccatctagtgatggagacgatgaataatgataccatcatcttcaaattgccatctccaaggttaccatgcaagagaaggagagactgtggaggagaatgcagaaggatttggaaaggatggaaagcttagaagcagtgttcattcctttcctccatattcgattgtccagagctcagttatgtggcccaactgaactgcaagggagtctaggaaatgaagtctttctatgtgctcaagagaaaggatgcagcttgttgagtacataacattgtctctgtcacacatgccttgttcttagctctgagcctcttcctatactctttctctcaccttagaatgcttcccttcagtttctgataaatcctccccattcttgaaggccatactcaatcacagtcttttctttgaagccctctctgattgctctctcccctgaatgaataaaccatgaaattgtctgaaatgtgcaatttatcgcagggcacaggattgccctagcctttgtttgttttatgtgtgcaggtctggacggcagctgcaagacactctgagaagtcaaaggccatgccttatagacctgttccaaaacatgttggctggaaatgaacatcatcggaaatgggacaaattgaaacctggtaagatacaataaaagcatagtatccattctgtgatattcttgccaaagatgcataacttgaatctgatccagagaaaacagacaaatccaaattgagaaacttacaaaataattgkcctgtaatctttaaagttgtcaaagtcaaggaaaagatcaaagaactgtttctgagtcaaggaagctacaaacatgacagctaaatgcaacgtgtgattcctgactgaatctttttgctacagaaggcattagagagacaactgtcaaaacatgaatggggtctgaggatcagatggtagtaacgcagcagaata

SEQ ID NO: 697537 - DNA, 1376 bp, Homo sapiens
tgcctgtgcgtggcccagccttccccctctgcagctcctcctgcgaagggctgccccgttgcacagctgtgcaaatgggccatctgaggcattcagtgacctgttcaacatcaccaacacattaggctcagagacttggctccacccaggtctcctgacctctacctkgaacccaagtttcacaccctggtatgggatggaagcagggcatagcagggagggggcaggctgggagcctttcccccagggctgccccatcccacccccagaaggtcaagctctagggtcccagctcaatgctactcaggaaggagggcaagcagactccacaccctctttcatctcaatactgcctcttgccccaagcctggactgacagagtcacagccaatcacagtatcatcaccaggccactgcccaaggagtttccaactttagggactgcagcagggggcgaggggagggcagagttcacagaacctcttaggcagggtcctgcctatctcccatctctgatgtcccccagaccacccagtctgccccgccctctctcttctcacctgaacttcccctctcctcaaactctcgaggccacggtaagctgttagatgccaagaaagacgaattcagactcacatgacagccgtgtacaagctctccacaagctactcaaatgtctgtctgacttttagactgcacaaaaataatttttatgcactaaaataacctttgtaagcatttataacagtcctgacgtatgtccagccctgacagctagctttcaacagggctctctctactccacacaccctcagcctgcacggcctccacttcccctgctcctctgccttgcaggtcatcctctgcatgctccaaccctcccccaggaaccaccccctttagggtgcctccaccatcctcccaagggagaggtgccacctctcccacccaggaacgcctgctgacgctcagtgccatgggttcattactgtgccctacccgcccccagcaaatttcttttcttttttcttttttttttttttttgagatggagtctcattccgttgcctaggctggagtgcagtggcgcgatctcagcttactacaacctccgcctcccgggttcaagcgattctccttcctcagtctcccgagtagctgggactacaggcgtgcgccaccatgcccagcttacccagctaattttctgtatttttagtagagacagggtttcaccgtgttggccaggacggtctcgatctcttgacctcgtgatccgcccgcctcggcctcccaaagtgctgggattataggcgtgaaccactgtacccagccccaaatttctatattgacatctcaactctcagtatctcaga

SEQ ID NO: 697538 - DNA, 1376 bp, Homo sapiens
tgcctgtgcgtggcccagccttccccctctgcagctcctcctgcgaagggctgccccgttgcacagctgtgcaaatgggccatctgaggcattcagtgacctgttcaacatcaccaacacattaggctcagagacttggctccacccaggtctcctgacctctaccttgaacccaagtttcacaccctggtatgggatggaagcagggcatagcagggagggsgcaggctgggagcctttcccccagggctgccccatcccacccccagaaggtcaagctctagggtcccagctcaatgctactcaggaaggagggcaagcagactccacaccctctttcatctcaatactgcctcttgccccaagcctggactgacagagtcacagccaatcacagtatcatcaccaggccactgcccaaggagtttccaactttagggactgcagcagggggcgaggggagggcagagttcacagaacctcttaggcagggtcctgcctatctcccatctctgatgtcccccagaccacccagtctgccccgccctctctcttctcacctgaacttcccctctcctcaaactctcgaggccacggtaagctgttagatgccaagaaagacgaattcagactcacatgacagccgtgtacaagctctccacaagctactcaaatgtctgtctgacttttagactgcacaaaaataatttttatgcactaaaataacctttgtaagcatttataacagtcctgacgtatgtccagccctgacagctagctttcaacagggctctctctactccacacaccctcagcctgcacggcctccacttcccctgctcctctgccttgcaggtcatcctctgcatgctccaaccctcccccaggaaccaccccctttagggtgcctccaccatcctcccaagggagaggtgccacctctcccacccaggaacgcctgctgacgctcagtgccatgggttcattactgtgccctacccgcccccagcaaatttcttttcttttttcttttttttttttttttgagatggagtctcattccgttgcctaggctggagtgcagtggcgcgatctcagcttactacaacctccgcctcccgggttcaagcgattctccttcctcagtctcccgagtagctgggactacaggcgtgcgccaccatgcccagcttacccagctaattttctgtatttttagtagagacagggtttcaccgtgttggccaggacggtctcgatctcttgacctcgtgatccgcccgcctcggcctcccaaagtgctgggattataggcgtgaaccactgtacccagccccaaatttctatattgacatctcaactctcagtatctcaga

SEQ ID NO: 697539 - DNA, 1376 bp, Homo sapiens
tgcctgtgcgtggcccagccttccccctctgcagctcctcctgcgaagggctgccccgttgcacagctgtgcaaatgggccatctgaggcattcagtgacctgttcaacatcaccaacacattaggctcagagacttggctccacccaggtctcctgacctctaccttgaacccaagtttcacaccctggtatgggatggaagcagggcatagcagggagggggcaggctgggagcctttcccccagggctgccccatcccacccccagaaggtcaagctctagggtcccagctcaatgctactcaggaaggagggcaagcagactccacaccctctttcatctcaatactgcctcttgccccaagcctggactgacagagtcacagccaatcacagtatcatcaccaggccactgcccaaggagtttccaactttagggactgcagcagggggcgaggggagggcagagttcacagaacctcttaggcagggtcctgcctatctcccatctctgatgtcccccagaccacccagtctgccccgccctctctcttctcacctgaacttcccctctcctcaaactctcgaggccacggtaagctgttagatgccaagaaagacgaattcagactcacatgacagccgtgtacaagctctccacaagctactcaaatgtctgtctgacttttagactgcacaaaaataatttttatgcactaaaataacctttgtaagcatttataacagtcctgacgtatgtccagccctgacagctagctttcaacagggctctctctactccacacaccctcagcctgcacggcctccacttcccctgctcctctgccttgcaggtcatcctctgcatgctccaaccctcccccaggaaccaccccctttagggtgcctccaccatcctcccaagggagaggtgccacctctcccacccaggaacgcctgctgacgctcagtgccatgggttcattactgtgccctacccgcccccagcaaatttcttttcttttttcttttttttttttttttgagatggagtctcattcygttgcctaggctggagtgcagtggcgcgatctcagcttactacaacctccgcctcccgggttcaagcgattctccttcctcagtctcccgagtagctgggactacaggcgtgcgccaccatgcccagcttacccagctaattttctgtatttttagtagagacagggtttcaccgtgttggccaggacggtctcgatctcttgacctcgtgatccgcccgcctcggcctcccaaagtgctgggattataggcgtgaaccactgtacccagccccaaatttctatattgacatctcaactctcagtatctcaga

SEQ ID NO: 697540 - DNA, 1376 bp, Homo sapiens
tgcctgtgcgtggcccagccttccccctctgcagctcctcctgcgaagggctgccccgttgcacagctgtgcaaatgggccatctgaggcattcagtgacctgttcaacatcaccaacacattaggctcagagacttggctccacccaggtctcctgacctctaccttgaacccaagtttcacaccctggtatgggatggaagcagggcatagcagggagggggcaggctgggagcctttcccccagggctgccccatcccacccccagaaggtcaagctctagggtcccagctcaatgctactcaggaaggagggcaagcagactccacaccctctttcatctcaatactgcctcttgccccaagcctggactgacagagtcacagccaatcacagtatcatcaccaggccactgcccaaggagtttccaactttagggactgcagcagggggcgaggggagggcagagttcacagaacctcttaggcagggtcctgcctatctcccatctctgatgtcccccagaccacccagtctgccccgccctctctcttctcacctgaacttcccctctcctcaaactctcgaggccacggtaagctgttagatgccaagaaagacgaattcagactcacatgacagccgtgtacaagctctccacaagctactcaaatgtctgtctgacttttagactgcacaaaaataatttttatgcactaaaataacctttgtaagcatttataacagtcctgacgtatgtccagccctgacagctagctttcaacagggctctctctactccacacaccctcagcctgcacggcctccacttcccctgctcctctgccttgcaggtcatcctctgcatgctccaaccctcccccaggaaccaccccctttagggtgcctccaccatcctcccaagggagaggtgccacctctcccacccaggaacgcctgctgacgctcagtgccatgggttcattactgtgccctacccgcccccagcaaatttcttttcttttttcttttttttttttttttgagatggagtctcattccgttgcctaggctggagtgcagtggcgcgatctcagcttactacaacctccgcctcccgggttcaagcgattctccttcctcagtctcccgagtagctgggactacaggcgtgcgccrccatgcccagcttacccagctaattttctgtatttttagtagagacagggtttcaccgtgttggccaggacggtctcgatctcttgacctcgtgatccgcccgcctcggcctcccaaagtgctgggattataggcgtgaaccactgtacccagccccaaatttctatattgacatctcaactctcagtatctcaga

SEQ ID NO: 697541 - DNA, 661 bp, Homo sapiens
aggataatctattttgccaatttggtaaattatgctccttctctggccttggtcctgccctagggtgttaggcaaattgcttaactgccccgagccttgtgttcctcatctgtaaaatgggctcataatgatacctgcatagaggcatgctatgagggttagatgagttagatcatatgaatgggcttagaacagtgcwgacttcacaggaagagctccataacaataacaattattagtttctgagcaatgaggagttttgaaccacttcagggaccaaggagataagggtgcgaagggtgtaaggagattttttgtgaggctttagggagcggagccagctgtggaacccggagacagcagcctgtgtaaacaaattcaaatgtaaattctaaaaatgctctgcaagccaaacacagtgggtctgtggagtgtgcagagctctgggaccagcagtttcaatgggctgagctttatggctccttctaccatgacaaatctctgttatttaagttcaggctctaccactcaaatatggaaccagcagtgccttagagcccttcaagtccaaccaaccccttcacccattctacaggtgaggaaactgagacccatagaggggaagtggctgttccccatgcagggcactgtcccacacggc

SEQ ID NO: 697542 - DNA, 661 bp, Homo sapiens
aggataatctattttgccaatttggtaaattatgctccttctctggccttggtcctgccctagggtgttaggcaaattgcttaactgccccgagccttgtgttcctcatctgtaaaatgggctcataatgatacctgcatagaggcatgctatgagggttagatgagttagatcatatgaatgggcttagaacagtgcagacttcacaggaagagctccataacaataacaattattagtttctgagcaatgaggagttttgaaccacttcagggaccaaggagataagggtgcgaagggtgtaaggagatyttttgtgaggctttagggagcggagccagctgtggaacccggagacagcagcctgtgtaaacaaattcaaatgtaaattctaaaaatgctctgcaagccaaacacagtgggtctgtggagtgtgcagagctctgggaccagcagtttcaatgggctgagctttatggctccttctaccatgacaaatctctgttatttaagttcaggctctaccactcaaatatggaaccagcagtgccttagagcccttcaagtccaaccaaccccttcacccattctacaggtgaggaaactgagacccatagaggggaagtggctgttccccatgcagggcactgtcccacacggc

SEQ ID NO: 697543 - DNA, 460 bp, Homo sapiens
ttctcttgcctcagcctcccaagtagctgggatgacaggcgtgcgccaccacacctggctaattgttttgtatttttagtagagacggggtttcaccatgttggccaggctggtttcgaactcctgaccttartgatccgcctgcctcagcctcccaaagtgctgggattgtaggcatgagccactgcgcccggccacctggccaagtttttaaagtgggccttgctctgttgcccaggctggtctcaaactcctggcctcaagcagtcctcctgccttggcaccccaaagtgctgggattacaggcatgagccactgcacctagccagggagggatttaaattatgcttccccagtcccttcatctgtagagcacaaatggcttcaggttgtccaatctgaagaaatatgctaacacaggatggcacaacattttaaaatctacaactgttcagtttca

SEQ ID NO: 697544 - DNA, 907 bp, Homo sapiens
tgttttatatattttgttcttatttataattttacttaaaatatttgaagccatcatctaaaacctatataagtctgtgttctctatttattcatttatttattcatctatccccattggagtgttcttaaaagggcttggggatttacagagacatattctgtacaataaatacaaataagaagatgaagaaatagaaagaaagagaaaatcagattaaaataagatgaagccatgggcaaggtttgaggaaaaaaaaaatgcatgctgtgaccaattcctagaggtaagcaggcrtttctctctgaccctcctagtacctgaagcaaaaattatatggaataaggctgaaaattacaaagggaaagagcgctatttgctgtatttaccattgtagtcccaatttttaacatagggtctagaataagataagtggttaataaatctttctgaataagtggcaagaggaaactttttgctcagaagaaacataaccatttctgggaccttagaattgtttcttacagcagtccttattcagagggcactgaagattgtggattttattgttaatgaagcctcttgcctcctcacacagagcagaagcacctggagccagagataccatctcacacatcatgtcttccatggtgcctaccccaatatcccatacaacaggaatcctggaaatgctgatagattaactgtcccatatggacattccagcctaagctccccctggattctcaaagcaacttttgcttgcctcaacatctagcaagcatttaccaaaacacaatgcatcatgttagtatcagttaatagatgtattactactactgagctgtgcctgggacccttgagtacaggctccttctcttatatgtttatttgccttactatgaga

SEQ ID NO: 697545 - DNA, 1454 bp, Homo sapiens
  misc_feature 702, 703, 704, 705, 706, 707, 708, 709, 710, 711, 712, 713,714, 715, 716, 717, 718, 719, 720, 721, 722, 723, 724, 725,726, 727, 728, 729, 730, 731, 732, 733, 734, 735, 736, 737,738, 739, 740, 741, 742, 743, 744, 745, 746, 747, 748: n = A,T,C or G
  misc_feature 749, 750, 751, 752, 753, 754, 755, 756, 757, 758, 759, 760,761, 762, 763, 764, 765, 766, 767, 768, 769, 770, 771, 772,773, 774, 775, 776, 777, 778, 779, 780, 781, 782, 783, 784,785, 786, 787, 788, 789, 790, 791, 792, 793, 794, 795: n = A,T,C or G
  misc_feature 796, 797, 798, 799, 800, 801: n = A,T,C or G
gaaaaaacaatcaggaaagtggaagggccaaggtttactgagcaggaccattgctgtggaaccaggagagggacagagatgggagaggaggagatgaagaaacagactctagatggagggcaacggagctaggatggggacaggagagccagagaggagatccagcccctacggcaccatgggagggcacccaactacaacccacggtaatgcatttcacccccaacccaatgccaacacacatgggtgtgcagaaacttgaaatgaacattgcgcaaaactacacttccccctacaacatgtaaagcactctgttttctattctattctacttcatgtttttcaaatgctggtcacaacctactgttagggttgtgaccagccagggacaaagtccgtgcggagaccaagcacaggcatttagactctttatagcaattttttctcttgaatcccacaatacaaaatcggagtttgggccgggcgcagtggctcaagcctgaaatcctagcactttgggaggctgaggcgggcagactgcctgagctcaggagtttaaagaccagcctggccaacatggtaaaacttcgtctctactaaaatacaaaaaaatcagccaggcatggtcacaggtgcctgtaatctcagccactcaggaggctgaggcacaagaattgcttgagctcgggaggcggaggttgnnnnnnnnnnnnnnnnnnnnnnnnnnnnnnnnnnnnnnnnnnnnnnnnnnnnnnnnnnnnnnnnnnnnnnnnnnnnnnnnnnnnnnnnnnnnnnnnnnnncaaaccattttgaaagggatcctcccatttaaggcctgggaaacggagacaaactgttcttgtcacacctgtgccaaactacaggattgggatcaaatcaataattgttgtgcgctagataaccagaacatatgtggatggtccagggccctttgcaccgtctgaaaaactcaagtccattktacctttttcacaccaaaatagcaaacatgtcttacttgtgccttgacactagaacacatgggtaattactgatgctctggaaatacttacagattggccacctttccctccaaaacatgttcttcctctctcagcccttgtcaggtgttggtagcttggcttattactctgactttcagctcccggaatggctgtgggttctgtagaccacaccttctctctcataataaggccgctggggtcccgtgtcccttagagaagggttgagggcagtgtttggaggcacggtctgactgtgtcaatgatggatccccagtgcccacacgaataagtgtgcaatatgtgttgggggaatgaacaaatgaatgaatgattgaatggtgagtgaaaagtaactcatctggttcagagcaggagatcaaggtgagaggggagcagggggtctccagggagggtaaggccagtagaca

SEQ ID NO: 697546 - DNA, 590 bp, Homo sapiens
acttttccttctcactcacacaaggtagccattgtccactgtacaagggagaaccatctgtgctcatgttgcagtaaaaaaggttgtttacccagggtcgtcagcacagccttcatgctgtgtccccccactgcatggcaagtgcaggccaaacacgtgtgggcctcatgggcccacaggttaggtgcagaggacagacatgcaaggcctggaacagacacaagwtgggcacagaatggggatgcaggcttagaacagatacacgggcagctaccacttgaggccttagcaggtatggtcctttctcagctgtgagttccctctgctcaggcccttagatggatgctccctccattcctccttcctacctcctcacttaatccttactataaggtcaggagagtggttcacgcctgtaatcccatactctgggaggccaagatggaaagactgcttaaggccaggagtgtgagaccagcctaggcaacatagtgagaccctgtctctaaaaaaattaaaattagccaggcatggtggtgcgtacctacagtctcagctacttgcttaggcaggaggatcacttgagccca

SEQ ID NO: 697547 - DNA, 590 bp, Homo sapiens
acttttccttctcactcacacaaggtagccattgtccactgtacaagggagaaccatctgtgctcatgttgcagtaaaaaaggttgtttacccagggtcgtcagcacagccttcatgctgtgtccccccactgcatggcaagtgcaggccaaacacgtgtgggcctcatgggcccacaggttaggtgcagaggacagacatgcaaggcctggaacagacacaagatgggcacagaatggggatgcaggcttagaacagatacacgggcagctaccacttgaggccttagcaggtatggtcctttctcagctgtgagttccctctgctcaggcccttagatggatgctccctccattcctccttcctacctcctcacttaatccttactataaggycaggagagtggttcacgcctgtaatcccatactctgggaggccaagatggaaagactgcttaaggccaggagtgtgagaccagcctaggcaacatagtgagaccctgtctctaaaaaaattaaaattagccaggcatggtggtgcgtacctacagtctcagctacttgcttaggcaggaggatcacttgagccca

SEQ ID NO: 697548 - DNA, 1539 bp, Homo sapiens
ttatcgtcgttgcttttaagtagatattcacctgcaactgagtttacaggttcctatgtacagtagcttcctctgtctccattgcttcctccctgagaacagtcctagcccttatcctgggtcgcacagagaacagctccagtctaattccagagtttcttctatggggcgtgtgccactgtgtacccccagagaccctgcagtcttggttcagagccaccttcttttttttttttttatttttttaagatgmggtctagctgtgttgcccaggctggcctggaactcctgggctgaagcaatcctcccacctcagcctcttgagtagctggaacttcagagattcctttgctgtggaatctctggcaggagacgggggttcccagatgattctgatgtgctgacatacattcagctgaggaccactaaccatgcctggaaagttctgggaaggcagggactgccttactcatccttgaacacctaggaaagaccctgcacaggagacagatgcccagaatctacttgttggcaggtgaatgtggcatgtggacagtagtggattagtcactgtgtgctcagcaccatgcaaagccctttacgaatacgtgcatttaagttttcccataagactctcaggagggctacagaatctccattttacagataagaaaataaggttgcaaagatgtggaaccagcccaaaggcccatcaatcagcaagtggataaagaaactgtggtatatctatgatggaatactactcagtcataaaaaggaatgaattaatggcatccacagcaacctggatgggattggagactcttattctcagtgaagtaactcaggaatggaaaaccaaacatcatatgttctcactcataagtgggaactaagctttgaggatgcaaaggcgtaagaatgacataagggactctggggcctcggcagggaaagggtaggaagggggtgagggataaaagattacaaattgggttcagtgtacactgctcgggcgatgggtgcaccaaaatctcacaaatcacagctgaagaaattactcatgtatccgaataccacctgttccccaaaaacctatggaaatagaaaattaaacaagaaagttaggttcagggagatgaagtgacttttccaaggtagcctgactaggaaggggagggtagtggatggttagacagactggcacccaccggacaggcaggacctagcctcaccctgggggctgtccctgctcgtcagcacctgcccactggagccatgtgacagagggacacagcgtagccaagacatttacaaagcgaggatcctttgtgcctgagtgaagtgatcctttcaaaaatgatcaccagctccccttcaccacctccggagaccaagtcctggctgatttttccccgtctttatctcaagtacatttaaatgtcaattaaatttgaaatatctacatttgtcagcatttcattttgggccagcgtgacgtgctgctgatttgtccacgcgatgtgacacataaaaaaa

SEQ ID NO: 697549 - DNA, 1539 bp, Homo sapiens
ttatcgtcgttgcttttaagtagatattcacctgcaactgagtttacaggttcctatgtacagtagcttcctctgtctccattgcttcctccctgagaacagtcctagcccttatcctgggtcgcacagagaacagctccagtctaattccagagtttcttctatggggcgtgtgccactgtgtacccccagagaccctgcagtcttggttcagagccaccttcttttttttttttttatttttttaagatgaggtctagctgtgttgcccaggctggcctggaactcctgggctgaagcaatcctcccacctcagcctcttgagtagctggaacttcagagattcctttgctgtggaatctctggcaggagacgggggttcccagatgattctgatgtgctgacatacattcagctgaggaccactaaccatgcctggaaagttctgggaaggcagggactgccttactcatccttgaacacctaggaaagaccctgcacaggagacagatgcccagaatctacttgttggcaggtgaatgtggcatgtggacagtagtggattagtcactgtgtgctcagcaccatgcaaagccctttacgaatacgtgcatttaagttttcccataagactctcaggagggctacagaatctccattttacagataagaaaataaggttgcaaagatgtggaaccagcccaaaggcccatcaatcagcaagtggataaagaaactgtggtatatctatgatggaatactactcagtcataaaaaggaatgaattaatggcatccacagcaacctggatgggattggagactcttattctcagtgaagtaactcaggaatggaaaaccaaacatcatatgttctcactcataagtgggaactaagctttgaggatgcaaaggcgtaagaatgacataagggactctggggcctcggcagggaaagggtaggaagggggtgagggataaaagattacaaattgggttcagtgtacactgctcgggcgatgggtgcaccaaaatctcacaaatcacagctgaagaaattactcatgtatccgaataccacctgttccccaaaaacctatggaaatagaaaattaaacaagaaagttaggttcagggagatgaagtgacttttccaaggtagcctgactaggaaggggagggtagtggatggttagacagactggcacccaccggacaggcaggacctagcctcaccctgggggctgtccctgctcgtcagcacctgcccactggagccaygtgacagagggacacagcgtagccaagacatttacaaagcgaggatcctttgtgcctgagtgaagtgatcctttcaaaaatgatcaccagctccccttcaccacctccggagaccaagtcctggctgatttttccccgtctttatctcaagtacatttaaatgtcaattaaatttgaaatatctacatttgtcagcatttcattttgggccagcgtgacgtgctgctgatttgtccacgcgatgtgacacataaaaaaa

SEQ ID NO: 697550 - DNA, 1094 bp, Homo sapiens
tgacttgcaaagcrctttgtaaatgttgccgcagtgaggaggctattgtaggttagcctttcataatccaaaaagcacttcaaaatcataaatcactttggggaccgaagagctctttgtaggggctttctagactgttgagtgctgtgcaagtcagagacaagtggcctttcaaagacatgagcaagaagccgggggggagtggggagagaaagaaaccagccccagagaataaaaacagcagtcgttttcctctgctctcgtcacctcccgtgccagccagtgcagagaaattccagcagatctgcagattcctgcgattctgtgctgaggccagggaggcctccctgcatcgctgactcagccaaacgagagggtgtgagttaagcaggaatcagctccatcttccttgcttctgtgcctcttcttttttcttccttctgccacaaaggcaatgaacctgacaccatttaaagatttccctctttggcctcctgatgaccttgccctgaggcccagacttgggcctgctctggagacccagcctgggatgtctgccacccccatcatggaaggagtaatagggctgtgagggcagagggcaggtggggccaggcaaagaccctgggctccaatcccagttctgctatttctcatctatgacctcgggcaagttcatttacttctctgaggctgagtccctcagccataacatggggttgacaatgctcatcttgtgtgtcatcgttaggtggcctggtgtgcatgcaagttctgtcccttcctctaactgtaggcatgagggccttctgataagggagaaatagataccaaggcagcttctacagtgtaggggctttgagcatgagttttcaaatcataaaaacttgggttcaaatcctggctctggccaggcccggtggttcacgcctgtaatctcagcatttggggaggctgaggcagtcagatcagatcacttaagcccaggagttccagactagcctggacaacatggcaaaacctagtctctataaaaaatttaaaaattagttgggcatggtggcacactcctacagtcccagctactctggagg

SEQ ID NO: 697551 - DNA, 784 bp, Homo sapiens
tgtcatgtcctgaattttatatcctggaaaacacgtagtaagtcaaacttgctcagacatgatgacactacatagacatggctgattgtaagaggagacaaatggtttagtcttagatgtgagataaaaattggggttactggcaagcattaaatatttataaagcagccaatctttggtagtcatcagggagtgtttctgtatgaggcgtgtcaggctttataattagttatgggacttattattatttgagttttttgccatgctattttctgcctgtgaaggaccattattttaaatgtgtaataagaagagaaatattgtttgagaaagtggtcacttttcagtttttaaacttttgaataataatttatgtgacagactcaatctagtagtgactttgaatttttttaaattacattttcaaggatagtgttacaccaaaataaagatcatgaactttagtgtaagataaaaataattctaaaggtaggtatcttcatctgtcttaaarctttctccattaggaataataaaaacaaaataaaagacacaaagcaaacctcacattttcttctggaaaacactgtacttttgattcttagcagaaatggccttgtgaatacttacggcatttgtaaatataactaagaaagggcttttttttttttttttttttcctgaaagaaagttgctacattaccatcataagtttctaaaaactcttcagggagaggaaaagaaaaaaatcctccaaaccttaataaaagttcccagcaaaacc

SEQ ID NO: 697552 - DNA, 622 bp, Homo sapiens
atccatcagggaattacaaagtagggaagttaacttgagctcaaagtttgaaataagggcttttttttcttgtggtaccatttggcaacaggtcaagggacctttatttcttctatgtaggtcttagagacctataattctggaagaccccggttttgataatgttctactagcaacggtaagccagtaggcagtgccaactttagaaaacaattatcaggacatctatgcaaggtatcgcagcctcttagtaaccacaggaagttcccagcctctygccacaagcttgagtttccaaggctgacaggtccctgctactcccttcctactcctcccacttgaagaaaggccacaagttcagatttccccaccagctaatgactttgggtttgtctaactctggctgtaagctctttggcatagttcaaccttgcttctttcagaggacaaatcttatctttttattagcaaacaggatggcttagatatgtctttataggacatttgctggagcataatttaatatgactcatttccccttatatataaagacagtgactgaaacagacaaggggaaaaacaagcccaaaaatgttattagaaacttgcacttgaaaatgtg

SEQ ID NO: 697553 - DNA, 611 bp, Homo sapiens
gttctatagcactagttcactgctatggcaggaggatatagattaaagcaaaactacttgaaaaaattttttaaagatgtcatctattactctatgctgccaactatgtaaagtaagaaaaaatgaaatataggatttacctgcatcatgacaattatgaacatataatttttccttttttttttttcttaggtggattctcgctctgtcacccaggctggagtgcagtggcacaatcttggctcactgcaacctctgccttctgcattcaagcaattctcctgcctcagcctcccgagtaactgggcttacargtgcatgccaccacgcctagctaaatttttgtatttttagtagagacagggcttcatcatgttggccaggctggtctttaactcttgacctcaagtaatccatgcactgcagcctcccaaagtactgggattacaggtgtgagccactgtgcccggctcgaatgcataatttttcaaagctcagaagtctctgtctattctctttgggttcaggtaaaattgctagggggtctaacatgccaaataataaatgaaatatttgactccaaaaatgagtcagaaagcaaaaccatttaa

SEQ ID NO: 697554 - DNA, 661 bp, Homo sapiens
gacagaaaagaacccacatactgtagacgaattctgaggacccctccgccccaccgccccaccacaccagaacccagcagagggcaaggcagaagaggaatcggtgacagataaggttgtggtgacattatctgtcatggtgaaaaggggaaaacacccatgtccatccacaggagagctggtcacccacagtgcagctctctcccgaaagacccagatctgtgaaacagggtgcatcctggggtatgcttgcacactggccctctggggagaatgttccctatgggttgcttgtgcccgcttctgtagtgtaaatactaccaccatggccaatttcaggctagcatcgtgccatcgctgagcaggatgaggaagaggtgcccactttggctcttgcacaccaatgacggtgcacccacatgttcgtggaaagaactcgaagactcatcactggacagacaaagctattggcaaaatttacacagagtaaatggtatttatattttaaayaacaccccaccaccaccaaatgcagctctgttttatttagatgagaggacacatataggctgtgtggacagggtcacacagaactggccacagaggttcccctttttgggggaattggaggtgggaagcgggagggagagagaagagactt

SEQ ID NO: 697555 - DNA, 936 bp, Homo sapiens
tgtttactttttaaaatcaaatattatggctagcaaaaaatagctatcacccaatcttgtcatgcctactgcatgaaggtgacattctccaactgtctaacctttcttgggtcccagagatgccatagctcaaggtatagacagatgacttactttgggatcactaattacagctagtcctttgacagtattagtcagccaatcactcctggaggggtgggagtggaaggcactgaagccttgaattacttctctctgggtagaaattgtgcccatgtggccatatttaagcccaactccaattcatcactggggatgctgaaatctaaaaataaagcacacatgatctctaaacaaagaggtttgaagcatgaatttttcaaacattctgcctacctctccctagttgtatatatctgatttatgctctggaaaggggtgcatacttttttatgtgtctttttttaaacccaaacataataatcttggtctaatttccattaaaactaactctattccttgttatcaggtgagtcataaagaagatattcccaaggattccccatcataataagaaaagagttgctaataattagggctgatgaacaattagatccaccaggtttctcctggttcaaatattcaaatagtgactgtatagaaggcacctggcaccaggtaagggcttggactcgatgacctctaaactacaatcaaaagctgagagtctgtggttgtatttgcctaaatatctcccgtctcttctrttttcataggcactttttatcacaagctattgacagcacagatttttatctaatgcatataaatgaatgtttatgagaaattccagaatgttttataagacactactttttaataatacaaggctgtaagggtaaaagtctaaattttcaacaaaataaccaaatttgc

SEQ ID NO: 697556 - DNA, 1178 bp, Homo sapiens
cgtggctcacgtgtgtaatcccagcactttgggagaccaaggcaggcagatcacttgagttcagaagtttgagatctacctaggcaatataatgagacctcatcactactaaaataataataataataataataataaaacttagtcagatatggtggtgcctgcctgtagtcccagcttctcaggggactgaggtgggaggattgcttgagccycggaggttgagactgcagtgagtcctgactgtgccactgcactgcagcctgggcgacagagcaagatcctgtgccgcccacccccaaccccacccccagccacaaaaaagtggaacttttggctaactactaaatagttgagtgttgaaatcacaatttattcctaaccaagatggaacttaaataatatcataaagatttaagatatacaaatgaagttaaaacacttcataaggctgtgatataactattattttaaaataatagtatcaagttcctttttgttattattctgacattacagaaaactacttctcagtattatcacttgttaattccttctgaagatactgcattaaatatttgtagtactaaatgtatgctcacttttaattgtgattagtggaggggtaagatatgttttggtccagataaacctgaatagattacagtcaaggatcttgtcgccacaaattcttgctttcttttatctttaataataactatttaaagacagctcttctttaactcctagactaacagatttcacctatggtgatgttgtaatttcactgaagcaatcttagaaactgaagctttgtgcacagcttaaggaagatgctttctgagtatttgcagaagcagacttactgccctcactctaacttttatttctaatttttcatttacatttaggctatataacacaatcacttgaggaaacgcccttaaatctccagtctataaaagttgcgttgaatgtgtatgattgacttttctgataataaaattgcctccaaattcccaattgcatctcagttttattgcacatgtaccaacttgagcaattatttccaggaacaggacacagtcatcatgtaagaaacatctgaatgcaggagatatcagtttggttgtgtgattaatttttagtgaatgatttcttctttctaaagcaatcat

SEQ ID NO: 697557 - DNA, 1178 bp, Homo sapiens
cgtggctcacgtgtgtaatcccagcactttgggagaccaaggcaggcagatcacttgagttcagaagtttgagatctacctaggcaatataatgagacctcatcactactaaaataataataataataataataataaaacttagtcagatatggtggtgcctgcctgtagtcccagcttctcaggggactgaggtgggaggattgcttgagccccggaggttgagactgcagtgagtcctgactgtgccactgcactgcagcctgggcgacagagcaagatcctgtgccgsccacccccaaccccacccccagccacaaaaaagtggaacttttggctaactactaaatagttgagtgttgaaatcacaatttattcctaaccaagatggaacttaaataatatcataaagatttaagatatacaaatgaagttaaaacacttcataaggctgtgatataactattattttaaaataatagtatcaagttcctttttgttattattctgacattacagaaaactacttctcagtattatcacttgttaattccttctgaagatactgcattaaatatttgtagtactaaatgtatgctcacttttaattgtgattagtggaggggtaagatatgttttggtccagataaacctgaatagattacagtcaaggatcttgtcgccacaaattcttgctttcttttatctttaataataactatttaaagacagctcttctttaactcctagactaacagatttcacctatggtgatgttgtaatttcactgaagcaatcttagaaactgaagctttgtgcacagcttaaggaagatgctttctgagtatttgcagaagcagacttactgccctcactctaacttttatttctaatttttcatttacatttaggctatataacacaatcacttgaggaaacgcccttaaatctccagtctataaaagttgcgttgaatgtgtatgattgacttttctgataataaaattgcctccaaattcccaattgcatctcagttttattgcacatgtaccaacttgagcaattatttccaggaacaggacacagtcatcatgtaagaaacatctgaatgcaggagatatcagtttggttgtgtgattaatttttagtgaatgatttcttctttctaaagcaatcat

SEQ ID NO: 697558 - DNA, 1178 bp, Homo sapiens
cgtggctcacgtgtgtaatcccagcactttgggagaccaaggcaggcagatcacttgagttcagaagtttgagatctacctaggcaatataatgagacctcatcactactaaaataataataataataataataataaaacttagtcagatatggtggtgcctgcctgtagtcccagcttctcaggggactgaggtgggaggattgcttgagccccggaggttgagactgcagtgagtcctgactgtgccactgcactgcagcctgggcgacagagcaagatcctgtgccgcccacccccmaccccacccccagccacaaaaaagtggaacttttggctaactactaaatagttgagtgttgaaatcacaatttattcctaaccaagatggaacttaaataatatcataaagatttaagatatacaaatgaagttaaaacacttcataaggctgtgatataactattattttaaaataatagtatcaagttcctttttgttattattctgacattacagaaaactacttctcagtattatcacttgttaattccttctgaagatactgcattaaatatttgtagtactaaatgtatgctcacttttaattgtgattagtggaggggtaagatatgttttggtccagataaacctgaatagattacagtcaaggatcttgtcgccacaaattcttgctttcttttatctttaataataactatttaaagacagctcttctttaactcctagactaacagatttcacctatggtgatgttgtaatttcactgaagcaatcttagaaactgaagctttgtgcacagcttaaggaagatgctttctgagtatttgcagaagcagacttactgccctcactctaacttttatttctaatttttcatttacatttaggctatataacacaatcacttgaggaaacgcccttaaatctccagtctataaaagttgcgttgaatgtgtatgattgacttttctgataataaaattgcctccaaattcccaattgcatctcagttttattgcacatgtaccaacttgagcaattatttccaggaacaggacacagtcatcatgtaagaaacatctgaatgcaggagatatcagtttggttgtgtgattaatttttagtgaatgatttcttctttctaaagcaatcat

SEQ ID NO: 697559 - DNA, 1871 bp, Homo sapiens
gtattctctggaagaaatgcgcccgatgtccggccgaaggcgcgggctgcggacgagggagagggtagtctttggtggctctttccagactcgtggaaactttccaaaagtcatggaaattttacatattcatcgctccatagtgattctatattaatggctgacagggggatgcttgttttaaaaagatagaaatggatattgaaatgttcagatgttccaggtaaaccatgcaccaggtgtacactaagcctcctgtcgcctgggtccagcccagtcccccaaagtgggtgagtgaccctcggactgagccggggctcggagcctgcaacgcccacccgggtggagccgggactatgggcgaccatcgctccagcctggcagggggttgcttcctgcccagacccccctcacccacgtccagccctgttgctggacacacgtgctctagtttatgtgccattttgatcctttgttgccctctgtgagaagaaaggagcctggacaagcgtctaaagcttctgggtgtgaatagatacccacgcacttcaggccttacctgagtccaggtcgcctcgctatgcacgccctggccctctcccaggatggcgcccgcgctgcaggcagagccaccgtctccatctgcgagagcgcacaggtgcgcagggagggcccaggctacacagctcaggagctgtcctcatccaggtggggtccagcctggggtccgcccagtcggggatgagctcatggactgcaggtggaggtcccagggcccctcctagagtcctccctccacggagggtctgcctgctgagggtcagaactgagggctgtggcctttatctggtgtagacaggctgtgttgctgcagagcaatcagtctgttttgatcttatggatactgaattgcacaactcagcatttctgtaatttgcattttcacacccactggggacagcgagagtgctggggatgggaagggtgtggaaaaatttcacttttgcagcttttgatgaaaaaggtaaaacaatcagcattaacaacagctttagcagcctaatgacaaaaccctgctatttcaatgctaatgcaccattaaaatagattgtcatagtccagaattttatattcttagcttgatgtgtttcaatgagtaggctgggacatgttcagggggtctttgtggatttgtgtctttaaaaatgaactctgttcagagaaacgcagaagagatcagggcttcccccttgtggctgctagaaaacagacaccttccatttctaaatgctgctctgaaacaggggggtctaatagtggggtcttgtgaccgctttgctctcttcaaatgtgttgaggatccacaaaagctttggtttatgcagcaggtacatatgtgcttatatgctgcagatagatagtgcttatacatatgtgcttrtatactgtagatattatattatgttggaaatcaaaacttaatttccagatatgtttgtattactcttcgaaaattaataatagacccattacattgctgatgagaatgcaaaatggtgcagtcccttggaaatagcgcagcagcaccttatacagccagacatgaattgattgccttatacagtcagacaggcatcgatcaccttttacagtcagacatgcactggtcacccacccagtgggtgatccagtgggatctacagctactgatatggaaggggggcagggcagtgctgggaatggaagggcatggtccctggctagagctccacccctgggtctgtgctcccagacctaggtgaggacgggcactcctgccttcacgctcaaatgttgcatttcccaaaatcaccctggcccattacaccccc

SEQ ID NO: 697560 - DNA, 1318 bp, Homo sapiens
gaaagcaggtatccagcatataccatactgtttgcataaagaagttgggtgcagtgagccagtcttagcagttaatggtggggactcttctgaaatccaagtccccaggtaccagccaaaggcctaccttgcaagcaggcctttttaagcacagccgtgtaggcctgctgtgttgacttttccacacggtgtgatagtctcctttcatgtatcattggattcaggtcattgtgtctcctttcatgtatcattggattcaggtcattgtgtctcctttcatatatcatcggattcagattattgtgtctgtggttctggtatctctgttgctaagtgagattcagccatcttgaaggtctgtgtcaggctttagtgcccatgttacgctgacctcatcaaacacggcaggaaacagtcctttttaattctctccaaaggcgtaggcaatattggcattatttcctcttgctgaacttggtaaacttcattagtgatgccacctggggctaggattttctttttagaaagagtgtaggagtattcacatttttcattctttttgagtccgttttaataacatatgtgtatttaaaaaaattgttcattatcaaagtgttcaagcttcttagcagaaagtttttcataatatgctctcatctttttaatatctgtatgataaaaatgttctaatttttattcctgatattggatatttgtgctttctctctctctgattgatgcctgatgtctgctacttctctaggttttaattcacaatattttggtttttaaaatgtgatttaatagatttttttctgactttttacctctgctacttatcactggtatgactgtgggtagattacataaatgctttgggcctttctgatcactgttataaaataagkgcagtgacttctacatgaggctcttgtgtcggatctatgagagaatgaatggaatgtacctaacgtgatgctgggtagaccttcaacaaaggcaagctgtaattgttttaaagctggctaaaggccgggcatggtggctcaagcctgtaatcccagcacttcgaaaggccgaggtgggtggatcacctgaggtcaggagtttgagaccagcctggccaacatgaaacgccatctctactaaaaatacaaaaattagccaggtgtggcagcgcatgcctgtagtcccagctactcagtggctgaggcagaattgtttgaacccgggaggcagaggttgcagtgagccaaggtcgcaccactgcactccagcctgggcaacaagagtgaaaccccgtctcaaaaaataaaaa

SEQ ID NO: 697561 - DNA, 1318 bp, Homo sapiens
gaaagcaggtatccagcatataccatactgtttgcataaagaagttgggtgcagtgagccagtcttagcagttaatggtggggactcttctgaaatccaagtccccaggtaccagccaaaggcctaccttgcaagcaggcctttttaagcacagccgtgtaggcctgctgtgttgacttttccacacggtgtgatagtctcctttcatgtatcattggattcaggtcattgtgtctcctttcatgtatcattggattcaggtcattgtgtctcctttcatatatcatcggattcagattattgtgtctgtggttctggtatctctgttgctaagtgagattcagccatcttgaaggtctgtgtcaggctttagtgcccatgttacgctgacctcatcaaacacggcaggaaacagtcctttttaattctctccaaaggcgtaggcaatattggcattatttcctcttgctgaacttggtaaacttcattagtgatgccacctggggctaggattttctttttagaaagagtgtaggagtattcacatttttcattctttttgagtccgttttaataacatatgtgtatttaaaaaaattgttcattatcaaagtgttcaagcttcttagcagaaagtttttcataatatgctctcatctttttaatatctgtatgataaaaatgttctaatttttattcctgatattggatatttgtgctttctctctctctgattgatgcctgatgtctgctacttctctaggttttaattcacaatattttggtttttaaaatgtgatttaatagatttttttctgactttttacctctgctacttatcactggtatgactgtgggtagattacataaatgctttgggcctttctgatcactgttataaaataagggcagtgacttctacatgaggctcttgtgtcggatctatgagagaatgaatggaatgtacctaacgtgatgctgggtagaccttcaacaaaggcaagctgtaattgttttaaagctggctaaaggccgggcatggtggctcaagcctgtaatcccagcacttcgaaaggccgaggtgggtggatcacctgaggtcaggagtttgagaccagcctggccaacatgaaacgccatctctactaaaaatacaaaaattagccaggtgtggcagcgcatgcctgtagtcccagctrctcagtggctgaggcagaattgtttgaacccgggaggcagaggttgcagtgagccaaggtcgcaccactgcactccagcctgggcaacaagagtgaaaccccgtctcaaaaaataaaaa

SEQ ID NO: 697562 - DNA, 992 bp, Homo sapiens
ccccaacccaggctaggctgtcaggagcaagagggatgcgtgtcttagctttagcacctgcaagcaccagaggccagtctggaagggaactgggaaaccagatcagagaggaagaggctgtgcccatttcacagagaggaagggtaaggtttaaggcccagacccagcactcttgacttggtgatttctttgactcctttcttccttttacattttgtctctattttttttaattttaatttttaattttattttttatttccataggtgtttgggaaacaggtggtatttgattacaagagtcatcctttagtggtacactcatcactgagtagtatacactaaacccaatttgtagtcttttatccctcacccccaccccacccttttctccaagtccccaaagtccattgtatcattcttatgcctttgcatcttcatagcttagctcccacatatgagtgagaacatacgaagttttttccatttcctgagttacttcacttggaataatagtctccagttccatccaggttgctgcgaatgccattagttcatttctttttatgactgcattatctctmttttcaaaacttcaggagagagaagaaggccccagcaacccatgatgggtggaagtcccacatgtagataggggccctggacggaggttgttgcctgttctgtgaaggagcatgaggaagggtgaggatgagggagttttagcagcaggagaggagatgaagtgacttgctcagggacacagaacttttctgcttccaggaagacagtatcactgtatcacttctcatctggcaagctgaaggctccttctttttgagacagagtcttactctgtctcccaggctgaagtgcagtggtacgataacagctcactgcagcctttacttcccaggctcaagtgatcctcctacctcagcctcccgagtagctgggaccacagctgtgcaccactgtgcccagctaatttt

SEQ ID NO: 697563 - DNA, 641 bp, Homo sapiens
ttttgtttttttgagatggagtctcactctgtcaccaggctagagtgcagtggtgmaatcttggctcactgcaatctccgcctcccaagttcaagcgattctcctgcctcagcctcctgagtaacttggattacaggcatgcgccaccacatccagctaatttttgtacttttactagagacggggtttcaccatgttggccaggatggtctcaatctcctgacctcgtgatctgcctgcctcagcctcccgaagttctgggattacatacctggccaatatgtattttatttttaatgatctttcacataacccaaattatctccattatttatttatcttctaaaaactttaaagtttaattaattaaaccacattagttattaaataattaaataataaaatgtagccttcatttaatagttaaattatttcatataatagttaaataatttaactattaaatgaaggctacttttactatcatttaattatttagttcaatgaagaccacagagaggaaatataatttaacaaagtctgttatctttcaatcagtatgtgcagttttcaaaagaacatgttacaaagcaagctactgccctatagtcttctaaaatgtcaaagtcacaagaagacag

SEQ ID NO: 697564 - DNA, 1446 bp, Homo sapiens
aaatgtgcacctgtgaaaggaaaaacatactccacagccacttctgtaaaaccagacacttggtccatgaagtttgccatcaaattctgtgggttgtgtgggatgaaactctctcaagtgggagaaaaaccctcttcaaatgtttcctctggggaattgctcaagaccacttagagaaggcaaaccaaaagtaccagtcaggaaaccaaaccactcttttagcccttaaggttcttaaagtaagaagagaaatgtttcacttttttatttttttgtttgtttatattatctcatgtggaaagaaaaaactcaccgaagctgtatgaaattctcccctattaaagaaacaagactcattagaaatttaacttaggtcttccaaaccatttctccttagcttttgcatatcaaaagtaataaaaatatttaaaagttctgcttgagatggagaggattcaatgctgttactcaaatgcaagagttatatataaagyttctgtcacgttaaatttttcttcattggaaaaaaatattgcaagaagtgcagtttcctttaagcaaattatataaaattactattggccaagatagtatgtgacctgagcatattaacataccttttatctcatgccacaatgcagactgcttgctttatatctgatgcacataggtaatcaaccatgacaagagtacaggtatgggacaaggccagaccaagtatgtggcacattcaagttaattcttcttttatggtagtgcctgactcacacccattatcacaaggatgaaaatacgctgcttcattcaccagatccccttgagggaagttatcttttcttggggtggagggggaaatgctcccagtttaaatgagcttccagttattcctaagtttggggataaaagtattctccaagggtttacttctgctttctctggcaattaatccaccggaccagctatggaccgttaaacagtaactgccttccctatgtcccatcaagttcaagcccctaaataactgagtgagatcatcttagattgctcatgatctaagtttcccaggagcaaagctatcctttctccatagggtacataccaagcaagatgacactgctcttcttaagcttttagaaaaatcagtgtcgaagtttcatgtagtcgcccccaaatctccccttctgcatgggatgtggatacttcacgtgagtctcctctttttgccattatatagctgcctcttgatcaagtccatgactatacccaaccaatgccattgaggcagacttgggaggacttcttaatgtttctcagaaaagataagatgagaagctgccgctttcactagagacacaagaagggagctctactgattttgagggcttgctgatcctacagaaatgtgcattttagatgttctactactgtcaaaattataaaatgata

SEQ ID NO: 697565 - DNA, 456 bp, Homo sapiens
  misc_feature 2, 3, 4, 5, 6, 7, 8, 9, 10, 11, 12, 13, 14, 15, 16, 17, 18,19, 20, 21, 22, 23, 24, 25, 26, 27, 28, 29, 30, 31, 32,33, 34, 35, 36, 37, 38, 39, 40, 41, 42, 43, 44, 45, 46,47, 48, 49, 50, 51, 52, 53, 54, 55, 56, 57, 58, 59, 60,61: n = A,T,C or G
  misc_feature 62, 63, 64, 65, 66, 67, 68, 69, 70, 71, 72, 73, 74, 75, 76,77, 78, 79, 80, 81, 82, 83, 84, 85, 86, 87, 88, 89, 90,91, 92, 93, 94, 95, 96, 97, 98, 99, 100, 101: n = A,T,C or G
annnnnnnnnnnnnnnnnnnnnnnnnnnnnnnnnnnnnnnnnnnnnnnnnnnnnnnnnnnnnnnnnnnnnnnnnnnnnnnnnnnnnnnnnnnnnnnnnnnngtctgtggaagttaatgtcctttcttataggtagtatctacatattcccttaagtgggaatgagaatttsctttgggaaatgactgcctatatcacaaaatcccagtgaactcagatgagacgtgattctagatattgtatcttaatgacccctcttcccactgtcttcaaagagcataaaatggctcttcctgctgtgagaagctgttagcttgagtcaactcctgctcagcaacatgctgacagtgggctctctattcatctgtgtatctctaggtgcagagcgggtgcttaaaattgcagattgtaccatcagacttctgaggtggctttcttcctgactcctgctcagtaa

SEQ ID NO: 697566 - DNA, 1186 bp, Homo sapiens
  misc_feature 610: n = A,T,C or G
gtacccacattgatatgctgctgataatttgtgattataaatgtttatgtcacttttgtaattaaggggttaggatgaggttagtagagagtgtttatatttttccaaaggagcaaaaattcacagatccattagaggccaaataaatgtatgcctctctgaaatatttgtatgctgataagctcatgggaagtttgctctttaaaaaaatattctgaaggaatttaagcagagcaatcatagtctgttgaatgcaatacattcatcataattttcattcactggctggccaccttgcattgcaatatcttaagtgagacaccccttaagactagtcagccctctggctttagattatcctggtgaagaaacaatgtcaagaagctaacactaaagcagattagattttcagaaattctgaaaattcaatgcattttgatttttagatctccatgatacactaacatgcatatttatgattttacatcaatgctaccataccatacattccaggattcttttttttttttttttttgagatggagtcttgctctggtacccagatgggagtgcagtggcacaatctcaggtcactgcaacctctgccccncaggttcaagtgatccttctgcctcagcctccctagtagctgggattacaggcrtgtgccaccatgcccggctaaattttgtatttttagtagagatggagtttcaccatgttggccagactggtctcgaactcctggcctcaagtaatacacccgcctcggcctcccaaagtgctggaattacaggtgtgagccaccgcacacagcccattccaggattattatttaatgtagtgttttgttttctttttctcttttttttctgtttgctcccctctgttccttttctcaacccacattactcacccccaaccaagggaactagtattatagaaaatgtaatttttcatattttttgcagatgtgcatacatgtaggtgtatatatataacagagattttcatcattgttttatataaataggatcataatatgatcataatataaacacttaagcaacttgcttttctcaatacctttgcaggaatccctgcatatcaactagtatagctgtaatttattcttttcaatggctgcataatcctctatttgtgaatcacaataattacataacct

SEQ ID NO: 697567 - DNA, 1186 bp, Homo sapiens
  misc_feature 610: n = A,T,C or G
gtacccacattgatatgctgctgataatttgtgattataaatgtttatgtcacttttgtaattaaggggttaggatgaggttagtagagagtgtttatatttttccaaaggagcaaaaattcacagatccattagaggccaaataaatgtatgcctctctgaaatatttgtatgctgataagctcatgggaagtttgctctttaaaaaaatattctgaaggaatttaagcagagcaatcatagtctgttgaatgcaatacattcatcataattttcattcactggctggccaccttgcattgcaatatcttaagtgagacaccccttaagactagtcagccctctggctttagattatcctggtgaagaaacaatgtcaagaagctaacactaaagcagattagattttcagaaattctgaaaattcaatgcattttgatttttagatctccatgatacactaacatgcatatttatgattttacatcaatgctaccataccatacattccaggattcttttttttttttttttttgagatggagtcttgctctggtacccagatgggagtgcagtggcacaatctcaggtcactgcaacctctgccccncaggttcaagtgatccttctgcctcagcctccctagtagctgggattacaggcgtgtgccaccatgcccggctaaattttgtatttttagtagagatggagtttcaccatgttggccagactggtctcgaactcctggcctcaagtaatacacccgcctcggcctcccaaagtgctggaattacaggtgtgagccaccgcacacagcccattccaggattattatttaatgtagtgttttgttttctttttctcttttttttctgtttgctcccctctgttccttttctcaacccacattactcacccccaaccaagggaactagtattatagaaaatgtartttttcatattttttgcagatgtgcatacatgtaggtgtatatatataacagagattttcatcattgttttatataaataggatcataatatgatcataatataaacacttaagcaacttgcttttctcaatacctttgcaggaatccctgcatatcaactagtatagctgtaatttattcttttcaatggctgcataatcctctatttgtgaatcacaataattacataacct

SEQ ID NO: 697568 - DNA, 1818 bp, Homo sapiens
ctgtgtcctcacccaaatctcttcttgaattgtagctctcataatccccatgtgtcatgggatggatctggtgagaggtaattgaatcatgggttccagttttcccatgctgttctcctgatagagaataagtcttacaagatctgatggtttcataaagggcagttcctttgcacatgctttcttgcctgctgccatgtaagacatgcctttgctcctcctttgctgtatgctgtgattgtgaggccttcccagccatgtggaaccatgagtccactaaacctctgttttttggaaattacccagtcttaggtattttcttcatagcagtatgaaaattgaccaatacaagtactcgccaagaagatactactaacacgccaatccctgtgcaaggcaggacaaggcaggtggttagggaccaaagtgaagggcacttgaggtctagctaagacctggagtgtaaggtcgagtaagttctatgactcttgttaaggtttgtgaccaacacaaagtgccctaatagacacagtaaggatcccaatacaaacccagtcatgcaggatcatcagggggtagcagcagtgtgcatctattcagctaggattcagaatggaaacacatccctgtgaagatacctcggcacctagaaatctgccagaataaaatctggaaactaaaaacctccaggcataacaccaataacatagatctagtcgcagtgaagcagtcgtggtaatccattctaacacacaccctgctatcaaaattggaagacaatataaacttggaaaggtaggacagtaatttagaaaataataatgatactaaacacttattatgtgtgtggcactattatacacacttgatacatattaaatcctcataacaacttgataagggaaatagaaagtgagcttctctcacacttttatgtctcagaaccactatcaacagtctggagcatattcttcttatcctatttacaaataaggaacacagaatttaaggttttgcccaaggccatatagytaataagtggtagagcctggatccaaatcaaggaatccttgttcttgctacaagaagtcctatttgttcatttattcaacagacattattgggagtcttccaaatcccaggcatttggataggtgttttgcatacaaacaaaaataagaaagcctctgcattcacagtgtagtagaataagagaacaggggagcaaatatgtaaaacacatggtaaatgctaaaacagaggaactggccaaatactgcttagtaatatgagcaattttgccggatgaaatcaagaaagtttttaacaatataatttgaattgggctttaaaaaataaacagaatgaaggcatccaaaaagggtgggaaagggtatttcagatagtaagttaaatatgagcaaagatatggaagtacttacgtatgaaacacagtatgaaaagatgtcagttttctatgactgaagaatgaagtccatgagggaaactggcagaagaaggaaggagacaggaggccaatatttctcctgcaacatcagtggggccatcctcactgaaaccactaccctgaggagctgtatcttcccaaggtttctcagaagcacacataaaaatttagtcatttgtttcaacctccaacaaaattacatttttagcaaaagagcataaatgaagctttactcattagacaacttactttgagatagctttgttaagattcaggtgttatacttgtaatagaacattgttgccaaggtgatggggatttaaacaatgaaataaatataactgcaataa

SEQ ID NO: 697569 - DNA, 673 bp, Homo sapiens
atcacarccctgatacttactagccatgtgactgttctaagccttcattttctcatttatgaaatggggatgataatagtgacctaggttataaatcataagagtataaatgaaataatacacgaaaagtccttagcacagtgcctggcatatactcactgttttaaagatagcttcagctattattatttgtaaacataccacattattttaaactgattataatccatttaatcattattttaaaagcacttctagtctgtaaaatataatttctttggtcttattaattaccactgctactgctgtcactattaccactgctaccacagatatcttcaagcaagcagatgtaggaattaatagaaatttggtttaagggcaaattaatggcatacaatttggagacttttacttaggatacaaaatcaatatgcaaaaatcacaagcattcgaataaaccaacaatagacaagcagagagccaaatcatgaatgaactcccaatcacaattgctacaaagacaataaaatacctaggaatacagctaacaaggaatgtgaaggacctcttcaaggagaactacaaaccacggctcaaggaaataagagagtacacaaacaaatggaaaaatttccatcctcatggataagaagaatcaatatcgtgaaaa

SEQ ID NO: 697570 - DNA, 266 bp, Homo sapiens
catgktattattgttcatcccttctactctgactggtaaaatagctccattacgtccctgtccgagacactctgggaaagaggctgccaatgagagggaatacgctataggcttctgcatcccacaggacccacccggagctctgcacagggaaagtgccccaaaaatatggactgaaatgaatgtacccagggctgtgacatgggcagaccaatgatcccaaagcaaatatgaaaactatttcttttactatatttacacaaaaa

SEQ ID NO: 697571 - DNA, 266 bp, Homo sapiens
catggtattattgttcatcccttctactctgactggtaaaatagctccattaygtccctgtccgagacactctgggaaagaggctgccaatgagagggaatacgctataggcttctgcatcccacaggacccacccggagctctgcacagggaaagtgccccaaaaatatggactgaaatgaatgtacccagggctgtgacatgggcagaccaatgatcccaaagcaaatatgaaaactatttcttttactatatttacacaaaaa

SEQ ID NO: 697572 - DNA, 1124 bp, Homo sapiens
ctttcaacaagcacttattgaacaccgacagtgctagagttttcagaacgctgatgatcaggcccttccctgagagatgattttagactaaggatgcatggtttgggaagcctatgagcaatggttctcatatctgctatacattagcatcacctggaaagcttttgcaaaggccagggctcaggatgcacccagaccaggtgattgactgtttctgaggatgggrcttaggcatgtagctttcaaagctccccaagtgattttaatgtgcagccagggttgagaaccagtgccagaaaacaatgattctcatcaaattggctgcatatgagaatcagccagggagatttttttaataaataaaactacctgggccccaccccagaacaaatgagtcagaatctttggaagagggatctgggcaactgtatgttttccaaagctccttcatataatctgatacatggcaagtactgagaatcattgctacaggcaatctagtgaatgagaacatctagagttgaacccatttctggctctttggctttgcaagccacgcataactgtaggatgaagagtcacctctgagcggccatgttgggtaatgaacagcagggctgagaacctgaaggcatgggtcaagtcttggctttgccatataacatttgctctgcaatgtcacacaaatcacgtaacttctctgggttaggagtcctgtccacctgcctaaaaatccagtgctctttctaccatacctctgtttttagactttttttctaccttaattgatattttactgttttgtttttgtttttgtttaatgatcagtacatagacctaatgattcatttctatatagttcttttattttttttcccaaacctccaggtagtatttatcccagattccaaactttcctgtggcctaaaagctatttagtctattggaaacattcagcaagctctttacaaaaatgactgcagtgtcttcaacgcgtttgagttgcactcatagtttgccccagtcacgtgcgagtttaacgtacaactctacatcacgtaatgggacatctttaacaacaaaaccttcccgtgcccaaggtcatgcacaggagaagaagggag

SEQ ID NO: 697573 - DNA, 1124 bp, Homo sapiens
ctttcaacaagcacttattgaacaccgacagtgctagagttttcagaacgctgatgatcaggcccttccctgagagatgattttagactaaggatgcatggtttgggaagcctatgagcaatggttctcatatctgctatacattagcatcacctggaaagcttttgcaaaggccagggctcaggatgcacccagaccaggtgattgactgtttctgaggatgggacttaggcatgtagctttcaaagctccccaagtgattttaatgtgcagccagggttgagaaccagtgccagaaaacaatgattctcatcaaattggctgcatatgagaatcagccagggagayttttttaataaataaaactacctgggccccaccccagaacaaatgagtcagaatctttggaagagggatctgggcaactgtatgttttccaaagctccttcatataatctgatacatggcaagtactgagaatcattgctacaggcaatctagtgaatgagaacatctagagttgaacccatttctggctctttggctttgcaagccacgcataactgtaggatgaagagtcacctctgagcggccatgttgggtaatgaacagcagggctgagaacctgaaggcatgggtcaagtcttggctttgccatataacatttgctctgcaatgtcacacaaatcacgtaacttctctgggttaggagtcctgtccacctgcctaaaaatccagtgctctttctaccatacctctgtttttagactttttttctaccttaattgatattttactgttttgtttttgtttttgtttaatgatcagtacatagacctaatgattcatttctatatagttcttttattttttttcccaaacctccaggtagtatttatcccagattccaaactttcctgtggcctaaaagctatttagtctattggaaacattcagcaagctctttacaaaaatgactgcagtgtcttcaacgcgtttgagttgcactcatagtttgccccagtcacgtgcgagtttaacgtacaactctacatcacgtaatgggacatctttaacaacaaaaccttcccgtgcccaaggtcatgcacaggagaagaagggag

SEQ ID NO: 697574 - DNA, 604 bp, Homo sapiens
tgatgcaaatgaggctccggaagagggagagacaagttgagaaatgaaaaagagaaagctgaccaaaaaatcaggttggattcttgaaaaggggatgatttgaacatcaaaagatgcagagagaccctcgggagaactcataaagcaaattttttttgttgctgttaaaatgaccgtgctgtaaaaagtaaaggcaatgatcttacacaatcataaaattttaccagaaatattaccttcttttgaaaaagtctgatttacttcttgttcattttgaaaattagtatatggttgaaattataacaaaaattttgttagatataggattaaaacacatttaatttcatgtcccccataaaatttcaaccaaaactcttttttgattatttcaacccaaaactctttttaaaaattatttgttatgaaaacattttaccccttttaatggagctcactctaagccatctttccttggtaccgagtatacttggataatgaggactgttttccataatgttggtgtagaaaaaaaccttcttataagcaagacacaaaatgccagaggaaaagactgtgagaattgatyagtaaaatgttaatactt

SEQ ID NO: 697575 - DNA, 668 bp, Homo sapiens
ggactcctgtaaaatttagtgcctatattatttagggtaatattaatagctataaccaagaaactctgaaagttccaatggcttaacaaaatagaagttaatttctcattaatgttaatagtcaaatgcagttttttcctggtcagcatgtagctttctctcacgtggtgattcaggaacctagtttcctttgtaaggccttgaaatcctttgcatccggctggcagacagaggaactaagcagcgaaagcacaccaactttatcaagataaattattgccarggtgacatgcatcatttctgcccacattttattagtgaaaactagtcacatggtcacaatagaatgcaaaggttactatagggagatgtcaccattggctggacagctatctttaggtgacaactccacactatggaaatggaggagcataagtgtttgctgaatggtaagtcatctctgtcagtgtctttaaccatgcttctaaagtgattaaaggtctggatggagtgggatattataattaacattttatttttttctttaccaccttctagccatgacatactataatattcatcatctgaaattcatactttgacattcgaccatcctgtttcatgcatgaattgtttcatgtgcagattttttgtctctccaaacagat

SEQ ID NO: 697576 - DNA, 623 bp, Homo sapiens
ccaaagggtcattgtaggggtcaagtggtacctggaagggaaagaaccttacctagagggcagcctgatcacgggccatgcttgtggcccttctgcaacactcgggttcgcacacagcaatgtggaagtctctttctctaacctctgccccatgacattctttatcctccagactctcagctaagaaaccaagaccccatgttcccatattctcaggatggttaagcaatgggtactaatccaattttaacagactattggaagaccttcagcattgtcagttgcatcaactacactacagtgtaaagcccgaaactcagtttatgtctgccagacctgcagaaagagtatacgaatgcattgtttagagactcaagcaggtggttggtgayggtttcattaacagcgtggaggaagaatgtaagagttaattgagggcccctctgggaaacattgcctaatgaagacattggcagtggttctctaccaggggtaatatgccctcagaggacatttgggaatgtgtggggacgtttttggtcacataactagggaagctactggcatctagtggcactggcatctagtgggtgaggccaaggacaccactagcaactggcaca

SEQ ID NO: 697577 - DNA, 623 bp, Homo sapiens
ccaaagggtcattgtaggggtcaagtggtacctggaagggaaagaaccttacctagagggcagcctgatcacgggccatgcttgtggcccttctgcaacactcgggttcgcacacagcaatgtggaagtctctttctctaacctctgccccatgacattctttatcctccagactctcagctaagaaaccaagaccccatgttcccatattctcaggatggttaagcaatgggtactaatccaattttaacagactattggaagaccttcagcattgtcagttgcatcaactacactacagtgtaaagcccgaaactcagtttatgtctgccagacctgcagaaagagtatacgaatgcattgtttagagactcaagcaggtggttggtgacggtttcattaacagcgtggaggaagaatgtaagagttaattgagggcccctctgggaaacattgcctaatgaagacattggcagtggttctctaccaggggtaatatgccctcagaggacatttgggaatgtgtggggacgtttttggtcacataactagggaagctactggcatctagtggcactggcatctagtgggtgaggccaaggrcaccactagcaactggcaca

SEQ ID NO: 697578 - DNA, 1658 bp, Homo sapiens
tttttaatttttggcccggtgtggtggccatgcctataatcccagcactttgggaggccaaggtgggcagatcacctaaggtcaggagttcgagcccagcctggccaacatggtgaaaccccatctctactaataatacaaaaatcagctgggcatggcagtgtgtgcctgtaatcccagtggctcaggaggctgaggcaggagaatcacctgaacctgggaggcagaggttgcagtgagccaagattgtgccactgtactctggcctgggcgacagaacaagactatctcaaaaaaaaaaaatgtaatttttatggttacatagtaagtgtatgtatttatggagtacatgagatattttgatacaggcatataatgcataataatcacatcagggtaaatggggtatccatcacctcaaacatttattccaattatactctwttagttatttttaagtatacaattaaattattcttcattgtagtcaccctgttgtgctatcaaatactagatcttattcattttttctaattattttttgtacccattaaccatccccatttcccccccactgcaatgctttgtttttaaaagctgtattttagagtgttttgatcttgattgcttttattccagacgtgctgcgtgtggagcttggggaagcagcagttatttcaaaccccacaggcagtaggatgggagtcttaccatggtgtcagggttcactcagaaaacgggtggagtagaagaaaccagatgggcctcagttcttactagatgcaggcccatcctttcctcaagaagcctacatgtggattttcctgtaatgctgctgcgaagtatgaaaatcataacatttctatagaaagtaaattttagttgtccattataccaggatggctttgttcagctcaaccaggcagacaagctggagactgaggatggagactgagattcaaaaccatgaggcaggaggtggtgaatctcccaggcactgggggtgctcagaaggaagctggaccaccacttagttggaatggagacaggaggagagaatattcctgagttaaggagagagttgactcattaaccattgacagccttgatattctaggagggcgcctcccaaggggagggaagtgaacatgtaggggcaacttattggagaattggagaatcagaattgcaagttctttttgtcattgactttgtgccatttttataaaatgcctctggaactgaatgtgcttcctcactctcttttgcatatagcaacagagaggaatattattccatttacaggctttgtacctttgccaaattaagaggaagcttgcctttgtaatcagggtatggtagaaagcacaaagcatctactgcttatgatggtttcttctagatgaacttgtccatttcctgaacaattcagaaaactgaatttagagttgagatatattaagaggcctctgcctaagagtgcttttatgctggttggtttcaaaaaagagactagaaaagtaaaaccatttcttgttcaaagagtattccctagccaacatgcagcatgtcaccaaggctgtctagacactcaagggacttcacctatgccttgttcaagattctccagaaggtctaagtaggcccctttgaatgca

SEQ ID NO: 697579 - DNA, 1001 bp, Homo sapiens
tcttcagtaaccttctaaacaaatctattatacactttattcttgaaagataccctagactcacaagggcaacagaagaaaaaaaattacccttggcatttcctaaaagatgtgattcagaagatactgttggcttttttctatagacatatgtcgcccagtgggatgtgacactcctcagaggtctgaatcagaaggaaaaatgtggagaggataaggtcagagttgttatgtactagcctcgtatggtaaaacacattcgcaaaatcaaggcaaaatactctggctccagcatctatagtttagtttctgawcatacacctacaccaagggctctaagtgagtgcgtagccaggaacatctcaagtctgaaatcatttagctctcagggaaaatagacacaaacactgcacacattcaaacaactctgacttatgctaaaaacagaattaccttcagaaagcacttgttagtgttcaacattgcacagaatgaaacaaacaaaccaggttctaaatacaactatggacaaaatgatgactctcgtgctaaaggttatcattattaccaatgaaaaggattaaattacatttcatttacaattccaaaatttaaggttgttttctacaaaaccaaactttgaaataccagtttaaaatattttgatagttacccctaaaatcatatggcagataattctactacatcttggtacataaagataaattagaaccgatttggggaacttctagattactatttcaaggcacaagtaagcaggcaagtttagaaacgaaaaaaaacagttactaatacatctctctctatggctatacctcactgctggcctgatgtggtttggctgtgtccccacccaagtctcatctttgaactgtagctcccacaattcccacgtgtcatgggatgaacctggtaggaggtaactgaattatgggggctggtcttttccgtgctgttctcatgatagtcagtaagtttca

SEQ ID NO: 697580 - DNA, 601 bp, Homo sapiens
agttatagcaacttattttaagctgtttacaacttaacttcagtggtatataaaactctatttctttacatatttcacctcctccccacaaactttatgtcttttgatattgtatatccttaacatagatttatagttactttttatgcttttcttctttaaattctgtttaaattttgtttttgaaatttagattttcaagttatttatataccttcattacaatactataggattttataatattctaaatattgacctttaccatagagtttcatattttgtggttttgtgttgctatttatcatccttttgtttctccttttagcctttcttgtagggccggtctagtggtgataagctgtatcagcttttgtttgtcagggacagtcttaatttctccttttttgaagggcagttttgcccatacagtatttttgtttgrcagtttttttaagtttcaaaacatagaatataacattccatttccttctaacctgcaagatttccattgagaaatgcactcaatggattttttaatccattgagataattttttaatcctgtaggatttaaaatttttagtcttacaggattaaaa

SEQ ID NO: 697581 - DNA, 1144 bp, Homo sapiens
gaacttcttgttcacagttactcattccagcaggcagggactgccagagcctgcctccttccacaaactgtgtgtggctgagataagtttccagccaacctaggagcctctttcatgccaagtttgcagacctctgggaacggtgcacacagcactgtatgcccaactctgtgctttcaaaccagaaccagagcccaaggacagtcaccatcattgagttataatgtacaaaagatgaaatatacaaaaatccaaattcacccaaggagtctcaagggagctgattgcttatccattgtgtttttaatgggatctccatgtgatgcacaaagcctggatttttatccgcagtagcagcttaactgatgcactggtccaaacataatgctgtagcttgctcacataaaagccagggagcccctcacagggataggaatgaggttcccctttatcagcagtgccttggatcagaagtgtagtgccccagactatgtgactcttacgcaggagaattgggggattaaattacggcaagctttttattccaatactatatcacagcatgaaataaagtctcaaaaatgacaacaggctttgatttttaatgaaaatctcagacagttgttttccagacatacatctgctgccgaaggaaaaaacacatctcctcagttatttactcccattctgagagtaacattgaattcctaggagccaatgaccagaagcgaggaggaactcaagccttcccyactccggcagcacatacaccagctcacctgggatgctgcagagacagaaacagccgactcggagacctcagggagcccagagctcctggcaacagctggacctttaagccacaggccttcatagagattgcccagcctgcactgaatgcctgcagggtggagaacccactccccatgatgctgagtggaggacaggcaggcttcactcgccaccacattctcaggcccagccttgctctaagtgggtgtcaaggtggtatctcatacacgcctgtcctttggaaccacacgacaaggctaaacttcacaggaacactgcaatcttagaaaacagcaaaggttaatgactttcttcacagaattggaaaaaactactttaaagttcatatgga

SEQ ID NO: 697582 - DNA, 593 bp, Homo sapiens
acacacaatttatttggagagctgcattttaaaactacatttgcataggtatttttccataaataaacctactctaccagcaaacttttcacaactcggcctactttctttaggaaatacaagaaagcatgcacctctggaagcagaatgcttgctgaccatcaaaatctgtttccccctccccacatggcatatgcccagctacaccacttcctcagcttcctccatagtgaggggcagcctatgactagttctctccagtggaatgtaaacagacatgttgggggccactcccaggcttgggccatatatctcactttgcatcctcctccaggccttccacttcccatgagctaggagggctatgaccaagtccagagtgacactgtaagctagacaccaaaatggcagaactgtcaggcagrttcctaagtaattacaaaggacacaaggtacctccaaccccagtgtctctaccactgtcaaacccttagcagccacactggattgttagagagctatgaagccctaattacaccttacgtctatgacttgcagcacagactacacacactaataccttaagtgtcacc

SEQ ID NO: 697583 - DNA, 1856 bp, Homo sapiens
gagtcagatttttccgtattgctaaatttttgaaaatgaaattctgactcatattaatcctgtttcactagagctttttgtgccagaccctcaggtaggctgctagtagtacattggatggcttcccatccttcagttggccatcctgcccagtcaactttgaaccaggaacaaaaaggacagagttatctggaacaaagaatgggtatttgagcttgttccctcagcaggaatgttccctcaggccagcctccctcagagtagtcagtgcttgcagcaggcaccatggtttatgcatttatccagtgtggccattaacctgaaactattgctaattgggaaagcaaagctaacataaaacaaacaatcatgtacgttatattttcataacatatttcttgttacagaagcagcatttactagttgtaagaacatttgaaaatgcagagaaccaaaaagaagaaaataaaaccttcccaatgccctagcagccacaattttctgtgccttgttcattaagtgctcagtgtgtagtaagaaccaaaagtgctgcagaaatttagaaaaccaaaggaaactatgagtaggagagaagtgggtgataaatatggggaacaaagaatttgagtcaagccatgaagtatacttaggattttatctatagagagcaggacattctaataggggtgtaacagaaaaagacatataggagagagtctgggctgtagataaagctttgagaggcttttgactagggtttgcaaaaatgcatgcctagtattggctgtggtataaagaaataggcactctttcctattgatagggacataaattggcaaaattgtttagatagggcaatttggcaagttatgttaaaatttagagcatgctgacactttgatctagaaattttatttctaggaattaattacacagatacagtcatgtaaatatgcaaagatatagatgtacagagatcttttgtaaattgcaattattcttttcttgaaagtttcataaaacttaccagcagtggcatctgggactggagtttcctttatgagaagaattttkaggattgatttgatttctttcatggttattgggctggttagaagttttatttttctatgaatttatccaggattttcagctggaaagttaatccaggtacctggcctgccatttattatttcatattacaacagtgttgaattcaaatctgcatctttgagttcaaatttgtatttttaaaaatgcctccataattttaaatctgaatgatcaaggcttaaatgaaacaaatttctcatttcttactaacattatacactttattttccagttacaacttcaacgactaccaccgccactttcaccaccaacactactaccacaatcaccagtggctttactgtgaaccaaaaccaactgttatcaagagggtttgaaaaccttgtaccttatacttcaactgttaggtaagcctatttatttaaaaacttgcatgtgtttcattttatttatcatgtacaagacatttgcttggataactttagaataatatttgaaagttagctaaatgactgagttgagggaacagtcaagagaaagatttctgtagcttaggaagttgaataaacagcagcacacctttaccttctgaatatcattataatagaatcattactattactaataatagctaccacttattgtgcaattactgtgtatgtaatctgtgtatgtttagcaagatgacaatgcattacaagcatcatgtcatttatcctcacagtaaccctatgaggtaggcagtattttcattttcattttataggtgagaaaacaagagc

SEQ ID NO: 697584 - DNA, 1198 bp, Homo sapiens
taaaatccctgtgacataagtttctttcttccagtttcacagatgaggaaatttaggctcagaggggtagattacttgtccctgttcacatggctaggaagtgcagagctgggatttaagaggcatgcatcacaatccattgcctacactggtcagcagtatccccacattttacacagtcttggaaagaaatccctgtgtctctgaaagccactaatataaattttaaaatttcatactgctgttacgtcatccctctattttagaggttgactcatgacaaatgctatttttcttttcctgtgaaatatttagtttacaacattatatttgagggtggcagatttgaaaaggtatatatatgaataagttaagtaatgttgatttacccctttttgtgtgctgaaaagtatgctattcactgtgtagaggcccatggacaaatgaatctgctttctagtcctgcgacacctaccagcttctagaagactttgcatggctcttgatacacaaaagccactttcctatgtggaaagcaaccagtgtactgcctccaatttggaagtgggtgtttttgctatcagtgtttcagtatgaaatgtattcattcagtaaaccttctgcaatgcctatatgtttatgtagtgtaactgattgatagagcatatgtaaagaccaagtaaaaactggttcttagccaggcgccgtggctcatgcctgtaatcccagcactttgggaggccgaggtgggcagatcacaatgtcagaagttygagaccagcctggccaacatggtgaaaccccgtctctaccaaaaatacaaaatacaaaaattggccagctgtggtggcgagtgcctatagtcccagctactggggaggctgaggcaggagaattgcttgaaactggaaagtggaggttgcaggagccgagatcatgctactgcactccagcctgggcaacaagagctaaactccatctcaaaaaaaaaaattggttcttattcataaccaactcctaggaaaacaaaacaaacaaaaagaatgtaaattcttagctatactctgcacagggcgtatttccagtgaaagaggggaaaagagggagaggagataaaaaatttgatggagcaagagtagaggaaataggagcaggactcacatctggaggaatgaatccttgtgactatgaacatgca

SEQ ID NO: 697585 - DNA, 1198 bp, Homo sapiens
taaaatccctgtgacataagtttctttcttccagtttcacagatgaggaaatttaggctcagaggggtagattacttgtccctgttcacatggctaggaagtgcagagctgggatttaagaggcatgcatcacaatccattgcctacactggtcagcagtatccccacattttacacagtcttggaaagaaatccctgtgtctctgaaagccactaatataaattttaaaatttcatactgctgttacgtcatccctctattttagaggttgactcatgacaaatgctatttttcttttcctgtgaaatatttagtttacaacattatatttgagggtggcagatttgaaaaggtatatatatgaataagttaagtaatgttgatttacccctttttgtgtgctgaaaagtatgctattcactgtgtagaggcccatggacaaatgaatctgctttctagtcctgcgacacctaccagcttctagaagactttgcatggctcttgatacacaaaagccactttcctatgtggaaagcaaccagtgtactgcctccaatttggaagtgggtgtttttgctatcagtgtttcagtatgaaatgtattcattcagtaaaccttctgcaatgcctatatgtttatgtagtgtaactgattgatagagcatatgtaaagaccaagtaaaaactggttcttagccaggcgccgtggctcatgcctgtaatcccagcactttgggaggccgaggtgggcagatcacaatgtcagaagttcgagaccagcctggccaacatggtgaaaccccgtctctaccaaaaatacaaaatacaaaaattggccagctgtggtggcragtgcctatagtcccagctactggggaggctgaggcaggagaattgcttgaaactggaaagtggaggttgcaggagccgagatcatgctactgcactccagcctgggcaacaagagctaaactccatctcaaaaaaaaaaattggttcttattcataaccaactcctaggaaaacaaaacaaacaaaaagaatgtaaattcttagctatactctgcacagggcgtatttccagtgaaagaggggaaaagagggagaggagataaaaaatttgatggagcaagagtagaggaaataggagcaggactcacatctggaggaatgaatccttgtgactatgaacatgca

SEQ ID NO: 697586 - DNA, 640 bp, Homo sapiens
gtatgtgtcgaggaatttatccatttcttctatttatttttgttcttctgactgcgtaactgcaaatgacttgtcttcaagttcattgattgtttcttcagtttgattaaatctgctgttgaagctctttattgaatttttcagttcagtcattgtgttcttcatctccagaatttctgtttgtttctttttaatgatgtctatcattttgatgaacttctaattttgttcaggcatttttttaatttcattttgttgtctatctttattwccttgcagctcaatgagcttccttaaggtgactattttgaattacttgttgggtagtttgtagatctctatttctttagggctgttttcagaactttattttgtttcttttgtcatgtcatttttctctcattcttcataatccatgtggacttgcattgggatctgtttatttgaagaagtcatcatccttcccagtctttacagactaacttatttatggaaagctcttcaccagtcatcttagttaagggttttggacaagactgcctgctgccaagtggacctgataccaggattggtggctagcaggccaggtgccagtgtccacaattgaaagttgaatactcaattcactctcactttcctg

SEQ ID NO: 697587 - DNA, 640 bp, Homo sapiens
gtatgtgtcgaggaatttatccatttcttctatttatttttgttcttctgactgcgtaactgcaaatgacttgtcttcaagttcattgattgtttcttcagtttgattaaatctgctgttgaagctctttattgaatttttcagttcagtcattgtgttcttcatctccagaatttctgtttgtttctttttaatgatgtctatcattttgatgaacttctaattttgttcaggcatttttttaatttcattttgttgtctatctttatttccttgcagctcaatgagcttccttaaggtgactattttgaattacttgttgggtagtttgtagatctctatttctttagggctgttttcagaactttattttgtttctttygtcatgtcatttttctctcattcttcataatccatgtggacttgcattgggatctgtttatttgaagaagtcatcatccttcccagtctttacagactaacttatttatggaaagctcttcaccagtcatcttagttaagggttttggacaagactgcctgctgccaagtggacctgataccaggattggtggctagcaggccaggtgccagtgtccacaattgaaagttgaatactcaattcactctcactttcctg

SEQ ID NO: 697588 - DNA, 655 bp, Homo sapiens
catcactgcatttatgaacatttatctatacccactctagtttaatgctgggaaactaagggagcacctcatttgacaaagatcatcatttctcctggtgttctgattctgagtagaaatcagagccacagagggacactccttgccatgggtatatgtgtgtgtttgcacacaaacataagtgtatctatatctgttgctattttccctctcattgttggttcaaattcagctcacaaagcccagcactggagaggaagttctgttctgctcatttaggaacgaaaataatgcaaggacatctttgcccagaactcctaaatttaaagattcacagctgcttgggactcctctggctctctgcttatccactaggctgctacttcttccttcattggttgtttctccctgggccttgaggtaaacagatgggggaggggtgggggtggagagaggagggagagggaagggaagggcagggaagggaagggcagggcaaggcagggcaggcaaggcagagggagagagagagaagctatttctttctcctatacmaaagcctgatcaaccttctggttcagtctcatgactagctgtgtagcctttctaaacctcagtttccctgactgtaaaatgggaatgctagtagtaccca

SEQ ID NO: 697589 - DNA, 647 bp, Homo sapiens
gaggaattagaatgagactcatgtaccctccttccccactccaggggaaggagagactgtttgggaatgccctcccactacttccagggcagaggctgtgcagaggagccttggagaatctgcagcccactgatgactctgcttcagtcagtgtttctgactttctgatggagaggcctcccattgataagatttttgtcactgcagctaaatgggggcttcaaatacaaataagtttcagttacagaaaaaaaaattcttgcacgtttaagcttatcccttctacggtattatctgtgagaattatagaccaaccataaggcactcaacatttagttgtacatgagaattttcacttcactcaaagcttgtgaggttttatcattaacgttwtaatttggtggctatagtggaaaagaacaaagctaacgagaaccaatgaacactgcctttcctgggattgtcacttcagtaggttgtgagttcctctagggcaagggcagggtccatacatttcctttgaatccctcacgtagtcactagcatgcacagtacttgtatctagcacatgctcaataaatgtggaatgaacgcatcatgaacaaaatatagactaatgactttgagtgctgattctttttgtcaat

SEQ ID NO: 697590 - DNA, 627 bp, Homo sapiens
cctgcgccggcccagattgtcttctgtatgggagaaaagggctcagcacatcttcttccaagtcaatttatatgacaaaatttttattccctatgtccttaagaatcttatttttcattattcaatagttacgtatggggagttcaaaacatcccacctccctcctttttttttcctcccaaaatgttgaatttggaaattctatattaagaacacagaagctaaactttggtttctgttgttttctccttgcatctctacattctgggtagtgagcaaagaatatctcactattctctgagttggagaggaaaggaggtggtgggaagatttaccaaggaagatggctgaggataatacttcaaactattctcttatgttacagttttgttcctatcattaaagaagagacagaacaaacccagagagagtggaaataagagtgtcccctttctcaagaattagccactcagtaagargaaaaaatgggaaaagagctcaagtcagcagaggagaaagaggagaaagtaaagagccattaaaacatgctgggtcttttagcaggtattattttttttttatagccatacaatcataaacataactcaataataaatggcttcctgg

SEQ ID NO: 697591 - DNA, 1853 bp, Homo sapiens
caagaatgtcaaagtcatggaaaaaaaggtaatcctgagctgccatcatagattggaggagactataagacatgataattaaatgcagtgtagagtcctaaataggaccctagaacagacaaaaggatgttaaatacattctgagctttatttaatagtactacactaaggttagttttatagattttataaacatttaatatattaacattaggggaagctgggtgaagggtatatgagaattttccatactatattttgcaattctattgtaaatctaaaatattattttcaattaaaacataactatcmaaaaactatatgtgagttgaattttactttatcactgattaccattagaatatcagaaatctgttgtttaattctgattgttctttaaggtacagacaataacatgttagttttccatagctctatcactctggcaattatgtcattatctgtaaacaaacacataattttactagtacaacatgtttgaaagagtcttgcattggtatttttcaaataaatgatatctttcacaaacttgagtctcttccaatgtatacattttgtaaatttaattatttcatatcagatcacgagttaatgagtagctaccaaactgaacatactatgcatgctcacacctctgtatgaaggtgtgaatcacctttgtctttgctccttcttctgctgaaatgttcttgccccttctctattagttctcattattcgagatgcagcttaaatggtctacttttttcattttgtacatccagagtgtgatgtctttaatagctgtaattttcacaatattgaaaagctggtgcatcataggcatttactctgaggactgacatttgccaaaaacacccagtttgaccatattggtacacacttgaatatcagcccttctttttcaatttcacattccatttgctctttcaaagtgtatagtgctttaaagcatgtatatctttattggcttgtaagatctttagtagtttcctcatctttgtggatcctcaagtgtttagcagtgtcttttacctaacccttgctcaaagggtccacagaggctgaatgatggagctggaagttgaacacccatttttaagagaatgcatagtatgttcctatgactgcaaatcccataccgtttgtactatgtctctcctctatcttgtgccagttaggatgtgttttactccaaggtcaacagtggctttgacaataaaggactgtgtggtctaacatcacaataattctggatatggttaataccaggtttattgttgaagatcaacatatcatcaagaacccaggctcatctctctctcatctctaccatcctcaacgtgttggcttttttttttttttttttttttgagacagagtcttgctctgtcacccaggctggagtgcagtggcactatctcagctcactacaacctccatcttttgggtttgaggtattctcataactcagcttcctgagtagctgggatcacaggcgtgcaccaccactctgactaatttttgtatttttttttaagtagagacagggtttctccaatgttggccaggctggtcttgaactcctggcccacctcagccccccaaagtgctaggattacaggtctgagccagcacgcccagcctggctttttgtccttaggtttattgctgaatagttgcaaaatgggtccaaagcaccacagttatccataatagcttcttgcacggaaacaaaggtacatagaagagaatctttgcaacccatgagactttcctttatgttttactgtctagaaggggctcacgtgcccaaccctagaccaatcact

SEQ ID NO: 697592 - DNA, 1853 bp, Homo sapiens
caagaatgtcaaagtcatggaaaaaaaggtaatcctgagctgccatcatagattggaggagactataagacatgataattaaatgcagtgtagagtcctaaataggaccctagaacagacaaaaggatgttaaatacattctgagctttatttaatagtactacactaaggttagttttatagattttataaacatttaatatattaacattaggggaagctgggtgaagggtatatgagaattttccatactatattttgcaattctattgtaaatctaaaatattattttcaattaaaacataactatcaaaaaactatatgtgagttgaattttactttatcactgattaccattagaatatcagaaatctgttrtttaattctgattgttctttaaggtacagacaataacatgttagttttccatagctctatcactctggcaattatgtcattatctgtaaacaaacacataattttactagtacaacatgtttgaaagagtcttgcattggtatttttcaaataaatgatatctttcacaaacttgagtctcttccaatgtatacattttgtaaatttaattatttcatatcagatcacgagttaatgagtagctaccaaactgaacatactatgcatgctcacacctctgtatgaaggtgtgaatcacctttgtctttgctccttcttctgctgaaatgttcttgccccttctctattagttctcattattcgagatgcagcttaaatggtctacttttttcattttgtacatccagagtgtgatgtctttaatagctgtaattttcacaatattgaaaagctggtgcatcataggcatttactctgaggactgacatttgccaaaaacacccagtttgaccatattggtacacacttgaatatcagcccttctttttcaatttcacattccatttgctctttcaaagtgtatagtgctttaaagcatgtatatctttattggcttgtaagatctttagtagtttcctcatctttgtggatcctcaagtgtttagcagtgtcttttacctaacccttgctcaaagggtccacagaggctgaatgatggagctggaagttgaacacccatttttaagagaatgcatagtatgttcctatgactgcaaatcccataccgtttgtactatgtctctcctctatcttgtgccagttaggatgtgttttactccaaggtcaacagtggctttgacaataaaggactgtgtggtctaacatcacaataattctggatatggttaataccaggtttattgttgaagatcaacatatcatcaagaacccaggctcatctctctctcatctctaccatcctcaacgtgttggcttttttttttttttttttttttgagacagagtcttgctctgtcacccaggctggagtgcagtggcactatctcagctcactacaacctccatcttttgggtttgaggtattctcataactcagcttcctgagtagctgggatcacaggcgtgcaccaccactctgactaatttttgtatttttttttaagtagagacagggtttctccaatgttggccaggctggtcttgaactcctggcccacctcagccccccaaagtgctaggattacaggtctgagccagcacgcccagcctggctttttgtccttaggtttattgctgaatagttgcaaaatgggtccaaagcaccacagttatccataatagcttcttgcacggaaacaaaggtacatagaagagaatctttgcaacccatgagactttcctttatgttttactgtctagaaggggctcacgtgcccaaccctagaccaatcact

SEQ ID NO: 697593 - DNA, 1853 bp, Homo sapiens
caagaatgtcaaagtcatggaaaaaaaggtaatcctgagctgccatcatagattggaggagactataagacatgataattaaatgcagtgtagagtcctaaataggaccctagaacagacaaaaggatgttaaatacattctgagctttatttaatagtactacactaaggttagttttatagattttataaacatttaatatattaacattaggggaagctgggtgaagggtatatgagaattttccatactatattttgcaattctattgtaaatctaaaatattattttcaattaaaacataactatcaaaaaactatatgtgagttgaattttactttatcactgattaccattagaatatcagaaatctgttgtttaattctgattgttctttaaggtacagacaataacatgttagttttccatagctctatcactctggcaattatgtcattatctgtaaacaaacacataattttactagtacaacatgtttgaaagagtcttgcattggtatttttcaaataaatgatatctttcacaaacttgagtctcttccaatgtatacattttgtaaatttaattatttcatatcagatcacgagttaatgagtagctaccaaactgaacatactatgcatgctcacacctctgtatgaaggtgtgaatcacctttgtctttgctccttcttctgctgaaatgttcttgccccttctctattagttctcattattcgagatgcagcttaaatggtctacttttttcattttgtacatccagagtgtgatgtctttaatagctgtaattttcacaatattgaaaagctggtgcatcataggcatttactctgaggactgacatttgccaaaaacacccagtttgaccatattggtacacacttgaatatcagcccttctttttcaatttcacattccatttgctctttcaaagtgtatagtgctttaaagcatgtatatctttattggcttgtaagatctttagtagtttcctcatctttgtggatcctcaagtgtttagcagtgtcttttacctaacccttgctcaaagggtccacagaggctgaatgatggagctggaagttgaacacccatttttaagagaatgcatagtatgttcctatgactgcaaatcccataccgtttgtactatgtctctcctctatcttgtgccagttaggatgtgttttactccaaggtcaacagtggctttgacaataaaggactgtgtggtctaacatcacaataattctggatatggttaataccaggtttattgttgaagatcaacatatcatcaagaacccaggctcatctctctctcatctctaccatcctcaacgtgttggcttttttttttttttttttttttgagacagagtcttgctctgtcacccaggctggagtgcagtggcactatctcagctcactacaacctccatcttttgggtttgaggtattctcataactcagcttcctgagtagctgggatcacaggcgtgcaccaccactctgactaatttttgtatttttttttaagtagagacagggtttctccaatgttggccaggctggtcttgaactcctggcccacctcarccccccaaagtgctaggattacaggtctgagccagcacgcccagcctggctttttgtccttaggtttattgctgaatagttgcaaaatgggtccaaagcaccacagttatccataatagcttcttgcacggaaacaaaggtacatagaagagaatctttgcaacccatgagactttcctttatgttttactgtctagaaggggctcacgtgcccaaccctagaccaatcact

SEQ ID NO: 697594 - DNA, 1853 bp, Homo sapiens
caagaatgtcaaagtcatggaaaaaaaggtaatcctgagctgccatcatagattggaggagactataagacatgataattaaatgcagtgtagagtcctaaataggaccctagaacagacaaaaggatgttaaatacattctgagctttatttaatagtactacactaaggttagttttatagattttataaacatttaatatattaacattaggggaagctgggtgaagggtatatgagaattttccatactatattttgcaattctattgtaaatctaaaatattattttcaattaaaacataactatcaaaaaactatatgtgagttgaattttactttatcactgattaccattagaatatcagaaatctgttgtttaattctgattgttctttaaggtacagacaataacatgttagttttccatagctctatcactctggcaattatgtcattatctgtaaacaaacacataattttactagtacaacatgtttgaaagagtcttgcattggtatttttcaaataaatgatatctttcacaaacttgagtctcttccaatgtatacattttgtaaatttaattatttcatatcagatcacgagttaatgagtagctaccaaactgaacatactatgcatgctcacacctctgtatgaaggtgtgaatcacctttgtctttgctccttcttctgctgaaatgttcttgccccttctctattagttctcattattcgagatgcagcttaaatggtctacttttttcattttgtacatccagagtgtgatgtctttaatagctgtaattttcacaatattgaaaagctggtgcatcataggcatttactctgaggactgacatttgccaaaaacacccagtttgaccatattggtacacacttgaatatcagcccttctttttcaatttcacattccatttgctctttcaaagtgtatagtgctttaaagcatgtatatctttattggcttgtaagatctttagtagtttcctcatctttgtggatcctcaagtgtttagcagtgtcttttacctaacccttgctcaaagggtccacagaggctgaatgatggagctggaagttgaacacccatttttaagagaatgcatagtatgttcctatgactgcaaatcccataccgtttgtactatgtctctcctctatcttgtgccagttaggatgtgttttactccaaggtcaacagtggctttgacaataaaggactgtgtggtctaacatcacaataattctggatatggttaataccaggtttattgttgaagatcaacatatcatcaagaacccaggctcatctctctctcatctctaccatcctcaacgtgttggcttttttttttttttttttttttgagacagagtcttgctctgtcacccaggctggagtgcagtggcactatctcagctcactacaacctccatcttttgggtttgaggtattctcataactcagcttcctgagtagctgggatcacaggcgtgcaccaccactctgactaatttttgtatttttttttaagtagagacagggtttctccaatgttggccaggctggtcttgaactcctggcccacctcagccccccaaagtgctaggattacaggtctgagccagcacgcccagcctggctttttgtccttaggtttattgctgaatagttgcaaaatgggtccaaagcaccacagttatccataatagcwtcttgcacggaaacaaaggtacatagaagagaatctttgcaacccatgagactttcctttatgttttactgtctagaaggggctcacgtgcccaaccctagaccaatcact

SEQ ID NO: 697595 - DNA, 1286 bp, Homo sapiens
  misc_feature 687, 688, 689, 690, 691, 692, 693, 694, 695, 696, 697, 698,699, 700, 701, 702, 703, 704, 705, 706, 707, 708, 709, 710,711, 712, 713, 714, 715, 716, 717, 718, 719, 720, 721, 722,723, 724, 725, 726, 727, 728, 729, 730, 731, 732, 733: n = A,T,C or G
  misc_feature 734, 735, 736, 737, 738, 739, 740, 741, 742, 743, 744, 745,746, 747, 748, 749, 750, 751, 752, 753, 754, 755, 756, 757,758, 759, 760, 761, 762, 763, 764, 765, 766, 767, 768, 769,770, 771, 772, 773, 774, 775, 776, 777, 778, 779, 780: n = A,T,C or G
  misc_feature 781, 782, 783, 784, 785, 786: n = A,T,C or G
atttccatgccagccttagatgggtccctttggtgcacttgcagaggatgccaagttggaagatgggcaccaggaattgtgtgtggcaatattcagttcattggctgggcatgcacatgtgccaaattatacamcaggcaggcattgggacacctgctttgacaaagcatgtctattacgggatttgaatactactaatgccagtggcagagttctccacattcatcatgctgtgtctcatctccatatttttgctcatgtgacctccttttcctggaatacctttccctctcccaccactttttcacctggttaaacctgcttataatttaaaaccctcctaaagagtctttcttctcagattcttcccagcaggctgggtttagggcttcctcttctgtggttctgggtggatatcctaatgattatacttaataatattatatttcatccatgaggagactttaataagttcatggaaaatgtaattacaaggtaaaaataataaatacaaactttatttctcagcataagctccaccaaggttaagacatttttgtaagcaatgagaccagctatttagttcatccctaaagaagtgagggtcctaggaatttaaccacatcaatgaaggctttttttacattattaactgaagaaaaataaatgctctttaaagattatttnnnnnnnnnnnnnnnnnnnnnnnnnnnnnnnnnnnnnnnnnnnnnnnnnnnnnnnnnnnnnnnnnnnnnnnnnnnnnnnnnnnnnnnnnnnnnnnnnnnnttcaccatgttggccaggctggtctcgaactcctgacctcagtgatctgcccacctcagcctcccaaaatgttggcattacaggcatgagccaccatgcccagccaatttttaagacaaaatttatttgtatgttctgaagatttaaaaaagaaacaggggtgtgtgtgtgtgtctgtgtgtgtgtgtgtaagatatctgtgagaacagaggacagttttctgctctaccaagacctgagtttgcttatcacagttgcacaacagtttatttgaggccttacttcccttgctatgtagttcatgaagtgctgaggacctctgatggtaggactgttgtatttgacattatgtatgccacacggagaaacaaactatcagatgcatttattttgattgtctttttatctggcaccactgccttctgtgcagtttataaacatgagcatagatctctccaagcatgaaggccacttgcaggctgcccagtgcttatttctca

SEQ ID NO: 697596 - DNA, 1286 bp, Homo sapiens
  misc_feature 687, 688, 689, 690, 691, 692, 693, 694, 695, 696, 697, 698,699, 700, 701, 702, 703, 704, 705, 706, 707, 708, 709, 710,711, 712, 713, 714, 715, 716, 717, 718, 719, 720, 721, 722,723, 724, 725, 726, 727, 728, 729, 730, 731, 732, 733: n = A,T,C or G
  misc_feature 734, 735, 736, 737, 738, 739, 740, 741, 742, 743, 744, 745,746, 747, 748, 749, 750, 751, 752, 753, 754, 755, 756, 757,758, 759, 760, 761, 762, 763, 764, 765, 766, 767, 768, 769,770, 771, 772, 773, 774, 775, 776, 777, 778, 779, 780: n = A,T,C or G
  misc_feature 781, 782, 783, 784, 785, 786: n = A,T,C or G
atttccatgccagccttagatgggtccctttggtgcacttgcagaggatgccaagttggaagatgggcaccaggaattgtgtgtggcaatattcagttcattggctgggcatgcacatgtgccaaattatacaacaggcaggcattgggacacctgctttgacaaagcatgtctattaygggatttgaatactactaatgccagtggcagagttctccacattcatcatgctgtgtctcatctccatatttttgctcatgtgacctccttttcctggaatacctttccctctcccaccactttttcacctggttaaacctgcttataatttaaaaccctcctaaagagtctttcttctcagattcttcccagcaggctgggtttagggcttcctcttctgtggttctgggtggatatcctaatgattatacttaataatattatatttcatccatgaggagactttaataagttcatggaaaatgtaattacaaggtaaaaataataaatacaaactttatttctcagcataagctccaccaaggttaagacatttttgtaagcaatgagaccagctatttagttcatccctaaagaagtgagggtcctaggaatttaaccacatcaatgaaggctttttttacattattaactgaagaaaaataaatgctctttaaagattatttnnnnnnnnnnnnnnnnnnnnnnnnnnnnnnnnnnnnnnnnnnnnnnnnnnnnnnnnnnnnnnnnnnnnnnnnnnnnnnnnnnnnnnnnnnnnnnnnnnnnttcaccatgttggccaggctggtctcgaactcctgacctcagtgatctgcccacctcagcctcccaaaatgttggcattacaggcatgagccaccatgcccagccaatttttaagacaaaatttatttgtatgttctgaagatttaaaaaagaaacaggggtgtgtgtgtgtgtctgtgtgtgtgtgtgtaagatatctgtgagaacagaggacagttttctgctctaccaagacctgagtttgcttatcacagttgcacaacagtttatttgaggccttacttcccttgctatgtagttcatgaagtgctgaggacctctgatggtaggactgttgtatttgacattatgtatgccacacggagaaacaaactatcagatgcatttattttgattgtctttttatctggcaccactgccttctgtgcagtttataaacatgagcatagatctctccaagcatgaaggccacttgcaggctgcccagtgcttatttctca

SEQ ID NO: 697597 - DNA, 1286 bp, Homo sapiens
  misc_feature 687, 688, 689, 690, 691, 692, 693, 694, 695, 696, 697, 698,699, 700, 701, 702, 703, 704, 705, 706, 707, 708, 709, 710,711, 712, 713, 714, 715, 716, 717, 718, 719, 720, 721, 722,723, 724, 725, 726, 727, 728, 729, 730, 731, 732, 733: n = A,T,C or G
  misc_feature 734, 735, 736, 737, 738, 739, 740, 741, 742, 743, 744, 745,746, 747, 748, 749, 750, 751, 752, 753, 754, 755, 756, 757,758, 759, 760, 761, 762, 763, 764, 765, 766, 767, 768, 769,770, 771, 772, 773, 774, 775, 776, 777, 778, 779, 780: n = A,T,C or G
  misc_feature 781, 782, 783, 784, 785, 786: n = A,T,C or G
atttccatgccagccttagatgggtccctttggtgcacttgcagaggatgccaagttggaagatgggcaccaggaattgtgtgtggcaatattcagttcattggctgggcatgcacatgtgccaaattatacaacaggcaggcattgggacacctgctttgacaaagcatgtctattacgggatttgaatactactaatgccagtggcagagttctccacattcatcatgctgtgtctcatctccatatttttgctcatgtgacctccttttcctggaatacctttccctctcccaccactttttcacctggttaaacctkcttataatttaaaaccctcctaaagagtctttcttctcagattcttcccagcaggctgggtttagggcttcctcttctgtggttctgggtggatatcctaatgattatacttaataatattatatttcatccatgaggagactttaataagttcatggaaaatgtaattacaaggtaaaaataataaatacaaactttatttctcagcataagctccaccaaggttaagacatttttgtaagcaatgagaccagctatttagttcatccctaaagaagtgagggtcctaggaatttaaccacatcaatgaaggctttttttacattattaactgaagaaaaataaatgctctttaaagattatttnnnnnnnnnnnnnnnnnnnnnnnnnnnnnnnnnnnnnnnnnnnnnnnnnnnnnnnnnnnnnnnnnnnnnnnnnnnnnnnnnnnnnnnnnnnnnnnnnnnnttcaccatgttggccaggctggtctcgaactcctgacctcagtgatctgcccacctcagcctcccaaaatgttggcattacaggcatgagccaccatgcccagccaatttttaagacaaaatttatttgtatgttctgaagatttaaaaaagaaacaggggtgtgtgtgtgtgtctgtgtgtgtgtgtgtaagatatctgtgagaacagaggacagttttctgctctaccaagacctgagtttgcttatcacagttgcacaacagtttatttgaggccttacttcccttgctatgtagttcatgaagtgctgaggacctctgatggtaggactgttgtatttgacattatgtatgccacacggagaaacaaactatcagatgcatttattttgattgtctttttatctggcaccactgccttctgtgcagtttataaacatgagcatagatctctccaagcatgaaggccacttgcaggctgcccagtgcttatttctca

SEQ ID NO: 697598 - DNA, 1286 bp, Homo sapiens
  misc_feature 687, 688, 689, 690, 691, 692, 693, 694, 695, 696, 697, 698,699, 700, 701, 702, 703, 704, 705, 706, 707, 708, 709, 710,711, 712, 713, 714, 715, 716, 717, 718, 719, 720, 721, 722,723, 724, 725, 726, 727, 728, 729, 730, 731, 732, 733: n = A,T,C or G
  misc_feature 734, 735, 736, 737, 738, 739, 740, 741, 742, 743, 744, 745,746, 747, 748, 749, 750, 751, 752, 753, 754, 755, 756, 757,758, 759, 760, 761, 762, 763, 764, 765, 766, 767, 768, 769,770, 771, 772, 773, 774, 775, 776, 777, 778, 779, 780: n = A,T,C or G
  misc_feature 781, 782, 783, 784, 785, 786: n = A,T,C or G
atttccatgccagccttagatgggtccctttggtgcacttgcagaggatgccaagttggaagatgggcaccaggaattgtgtgtggcaatattcagttcattggctgggcatgcacatgtgccaaattatacaacaggcaggcattgggacacctgctttgacaaagcatgtctattacgggatttgaatactactaatgccagtggcagagttctccacattcatcatgctgtgtctcatctccatatttttgctcatgtgacctccttttcctggaatacctttccctctcccaccactttttcacctggttaaacctgyttataatttaaaaccctcctaaagagtctttcttctcagattcttcccagcaggctgggtttagggcttcctcttctgtggttctgggtggatatcctaatgattatacttaataatattatatttcatccatgaggagactttaataagttcatggaaaatgtaattacaaggtaaaaataataaatacaaactttatttctcagcataagctccaccaaggttaagacatttttgtaagcaatgagaccagctatttagttcatccctaaagaagtgagggtcctaggaatttaaccacatcaatgaaggctttttttacattattaactgaagaaaaataaatgctctttaaagattatttnnnnnnnnnnnnnnnnnnnnnnnnnnnnnnnnnnnnnnnnnnnnnnnnnnnnnnnnnnnnnnnnnnnnnnnnnnnnnnnnnnnnnnnnnnnnnnnnnnnnttcaccatgttggccaggctggtctcgaactcctgacctcagtgatctgcccacctcagcctcccaaaatgttggcattacaggcatgagccaccatgcccagccaatttttaagacaaaatttatttgtatgttctgaagatttaaaaaagaaacaggggtgtgtgtgtgtgtctgtgtgtgtgtgtgtaagatatctgtgagaacagaggacagttttctgctctaccaagacctgagtttgcttatcacagttgcacaacagtttatttgaggccttacttcccttgctatgtagttcatgaagtgctgaggacctctgatggtaggactgttgtatttgacattatgtatgccacacggagaaacaaactatcagatgcatttattttgattgtctttttatctggcaccactgccttctgtgcagtttataaacatgagcatagatctctccaagcatgaaggccacttgcaggctgcccagtgcttatttctca

SEQ ID NO: 697599 - DNA, 626 bp, Homo sapiens
gcatgcttatatataaatataactcactgcctttcctgtggcttgggactttgtgggggggaaagaaaaatatatgcttctatgctgtctacatacaggaaaaaaaacctcttgtgaaatgatgagattgaaggaaaatagcctttggagtcaagaaatctgggccctaaatctgatgcatagaactttgacacataaaactttgaataaattgcctaacttctcatggccccagatttttccatctgcaaaacaaggaaaataaaacataatgccctggcctgggagggttgaatgataaaatgttaaagagcaagtatttctttgaactagaagtgagcattttaaaawtttttttcagtaaagggccagtttgtaggtattttaggctttgcagaccacacagactctgtcccaattattcagcttcaacgttgtagtgagtgcaaaagcaggcacagagaatgtgtaactaaatgggcatagctgggtctcacttttatttacaaaaatatgtgttggaccagaattaactgcagacaggcagtagtgtatgacccctgtgctagaccaaacctgcctgggggcacttccaaggcataatcagattgccctgttacttccta

SEQ ID NO: 697600 - DNA, 578 bp, Homo sapiens
tgttaaattctgcacaatgaactattttttttgatacagagtttctgctcttgttggccaggctggagagcagtggctcactgcaacctctgcctcccaggttcaagcaattctctggcctcagcctcccgagtagctgggattacaggcacatgccaccacgcctggctaatttttgtatttttagtagagacgggttttcaccacgttggccaggctgtctcaaattcctgacctygggtgatccgcccgcctcagcctcccaaagtgctgggattacaggcatgagccaccgtgcctggcccagaactctgttaaccatctttacagcaaactgcagatttaaatggtagttccttaaaagcccaaactttgaggtccaaaatatttgggaattccagtatattcaggcatcattcccttttccaaacctgcccttgcaatcatattcatctatgtggcatgcccagattagggaatccactaattttatgattttatcctttgctaattaagctgagatttgtcctcttggcaaatctgttaaagccaatgaatagtcagaactctcgggagtt

SEQ ID NO: 697601 - DNA, 578 bp, Homo sapiens
tgttaaattctgcacaatgaactattttttttgatacagagtttctgctcttgttggccaggctggagagcagtggctcactgcaacctctgcctcccaggttcaagcaattctctggcctcagcctcccgagtagctgggattacaggcacatgccaccacgcctggctaatttttgtatttttagtagagacgggttttcaccacgttggccaggctgtctcaaattcctgacctcgggtgatccgcccgcctcagcctcccaaagtgctgggattacaggcatgagccaccgtgcctggcccagaactctgttaaccatctttacagcaaactgcagatttaaatggtagttccttaaaagcccaaactttgaggtccaaaatatttgggaattccagtatattcaggcatcattcccttttccaaacctgcccttgcaatcatattcatctatgtggcatgcccagattagggaatccactaatttyatgattttatcctttgctaattaagctgagatttgtcctcttggcaaatctgttaaagccaatgaatagtcagaactctcgggagtt

SEQ ID NO: 697602 - DNA, 643 bp, Homo sapiens
atataactgtggtgcccactttctaggagagtgcgaaatccatggcatcacttatgcaggcgattatgcgcacaataagaggaatggcttgccaccaagagatcagggaatattaggctttatggatccctggggtgctgttcagttgtttaaaaatatataacaaccagtgattgatttattkgtgggaagacagaaagcatcctttttgcagggaataagcatttgacctcttttgtgcaattttctgtgttttgcgttctcatgcattaaatataaggcatgcattattcaccctttatagctatttcaagatctgtgtgtggcttccccttataaccttggaaatttcccacataattcattagagacagataatgatctagtggttaggaccaggacagagagtcagtccagatttttctccttcattctgctgctgtgtactccatggcactgcagttactcagcatttacttggattccctaaatgtccatttgtgttcatgatcactcattgaatgattgcaatgtgtacatgttttgtgtgaggtcctaggggccataatcaggaaacgaggaaacgtaagatatgtaacagggtaccttagaagagcactggagaattaagatttgtatttat

SEQ ID NO: 697603 - DNA, 487 bp, Homo sapiens
  misc_feature 338, 387, 388, 389, 390, 391, 392, 393, 394, 395, 396, 397,398, 399, 400, 401, 402, 403, 404, 405, 406, 407, 408, 409,410, 411, 412, 413, 414, 415, 416, 417, 418, 419, 420, 421,422, 423, 424, 425, 426, 427, 428, 429, 430, 431, 432: n = A,T,C or G
  misc_feature 433, 434, 435, 436, 437, 438, 439, 440, 441, 442, 443, 444,445, 446, 447, 448, 449, 450, 451, 452, 453, 454, 455, 456,457, 458, 459, 460, 461, 462, 463, 464, 465, 466, 467, 468,469, 470, 471, 472, 473, 474, 475, 476, 477, 478, 479: n = A,T,C or G
  misc_feature 480, 481, 482, 483, 484, 485, 486: n = A,T,C or G
tataaataacagatggaaaggtgacttgggtccagagaactgaagcaaaagaagatgacacatgccactcttagcaatccaaacaagagtacccaaagtctggggatcagtgccctgggaaaactggcacttctcagtcaagaaggggcatccagtcaagaaggggcattcaggcaaaacctggagccatcccgagaagctgttgagccagtcctatgaatgctgcctgctgcgtagarccatctgttcttagagccatttggaggcaagtaggtgaccccagtccgtgactgggacagggctggacccctaaggaccctcacatggagaagaacttnggttaatgtgcaggtgacagtcatttctatgactgagtgggcatctctnnnnnnnnnnnnnnnnnnnnnnnnnnnnnnnnnnnnnnnnnnnnnnnnnnnnnnnnnnnnnnnnnnnnnnnnnnnnnnnnnnnnnnnnnnnnnnnnnnnna

SEQ ID NO: 697604 - DNA, 673 bp, Homo sapiens
cttttgtgaggtatttaatacctttttttttcatttttgtggttttttsttagtgatttcattaattaaaatgatcccaaagtgtagtgctgaagtatagtctactgttgctaggcacaagaaggctgtgatgtaccttatagaggaaatacatatgttagatcagatttgttcagttataagttatagtgccattggccatgagtttaatgttgatgaatcaataatatatgctaaataaggtgtctttaaacataaaaacacatgaaacaaggttataaactgactgatgaaaatatggtaccagaagctttcccaaacctaaccctatatttttcctagagtcacagactcaatatttgtgaattcactgttcacagtgaccttaaagaacataggtactgtgaataatgataatcacctatatatcaaaacccacatcatctatggctaatagcaggtttggaagtacaatataaaaatattcaagtgaaaatagcaacacagatatactaatatagcaatgaatttaaaatcattttgatgttattaaatactttgttcttttctttctttagaatttacatggcctgaggacagataatatcagatttattgctacaaccccagatcctgaagagtgtctggcacatataaggaacccaattagtgg

SEQ ID NO: 697605 - DNA, 673 bp, Homo sapiens
cttttgtgaggtatttaatacctttttttttcatttttgtggttttttgttagtgatttcattaattaaaatgatcccaaagtgtagtgctgaagtatagtctactgttgctaggcacaagaaggctgtgatgtaccttatagaggaaatacatatgttagatcagatttgttcagktataagttatagtgccattggccatgagtttaatgttgatgaatcaataatatatgctaaataaggtgtctttaaacataaaaacacatgaaacaaggttataaactgactgatgaaaatatggtaccagaagctttcccaaacctaaccctatatttttcctagagtcacagactcaatatttgtgaattcactgttcacagtgaccttaaagaacataggtactgtgaataatgataatcacctatatatcaaaacccacatcatctatggctaatagcaggtttggaagtacaatataaaaatattcaagtgaaaatagcaacacagatatactaatatagcaatgaatttaaaatcattttgatgttattaaatactttgttcttttctttctttagaatttacatggcctgaggacagataatatcagatttattgctacaaccccagatcctgaagagtgtctggcacatataaggaacccaattagtgg

SEQ ID NO: 697606 - DNA, 673 bp, Homo sapiens
cttttgtgaggtatttaatacctttttttttcatttttgtggttttttgttagtgatttcattaattaaaatgatcccaaagtgtagtgctgaagtatagtctactgttgctaggcacaagaaggctgtgatgtaccttatagaggaaatacatatgttagatcagatttgttcagttataagttatagtgccattggccrtgagtttaatgttgatgaatcaataatatatgctaaataaggtgtctttaaacataaaaacacatgaaacaaggttataaactgactgatgaaaatatggtaccagaagctttcccaaacctaaccctatatttttcctagagtcacagactcaatatttgtgaattcactgttcacagtgaccttaaagaacataggtactgtgaataatgataatcacctatatatcaaaacccacatcatctatggctaatagcaggtttggaagtacaatataaaaatattcaagtgaaaatagcaacacagatatactaatatagcaatgaatttaaaatcattttgatgttattaaatactttgttcttttctttctttagaatttacatggcctgaggacagataatatcagatttattgctacaaccccagatcctgaagagtgtctggcacatataaggaacccaattagtgg

SEQ ID NO: 697607 - DNA, 673 bp, Homo sapiens
cttttgtgaggtatttaatacctttttttttcatttttgtggttttttgttagtgatttcattaattaaaatgatcccaaagtgtagtgctgaagtatagtctactgttgctaggcacaagaaggctgtgatgtaccttatagaggaaatacatatgttagatcagatttgttcagttataagttatagtgccattggccatgagtttaatgttgatgaatcaataatatatgctaaataaggtgtctttaaacataaaaacacatgaaacaaggttataaactgactgatgaaaatatggtaccagaagytttcccaaacctaaccctatatttttcctagagtcacagactcaatatttgtgaattcactgttcacagtgaccttaaagaacataggtactgtgaataatgataatcacctatatatcaaaacccacatcatctatggctaatagcaggtttggaagtacaatataaaaatattcaagtgaaaatagcaacacagatatactaatatagcaatgaatttaaaatcattttgatgttattaaatactttgttcttttctttctttagaatttacatggcctgaggacagataatatcagatttattgctacaaccccagatcctgaagagtgtctggcacatataaggaacccaattagtgg

SEQ ID NO: 697608 - DNA, 607 bp, Homo sapiens
cattggccattggccattggccatcaaattaatttacttcagcctctctcccctcctgggaagtcaggggcagggctgaaagttagcaaacctctaatcatgccttcatttttccagttatcagccctcattttgaagctacctagggactgccagccatcagtcaatcaatagcacacaaaaagatarcactttggggattctaaggatttttggtgttgtatgccataaacaaggcaaagaccaaatatatattttacaatatcacaggtcccatctccaaataccatcatattggaatagggcttcaatatgtgaatttttggggaaacacaaattccataacaaataatacttgatagcaaccacaaaaccttaatggcatacagcaataaacatttatttttgccttacaattctacaatcaggtgatgtagctagcttggctagattttctctgggtctcagcaggatttacccatgtgtctggcagttagctggttctctgctgggacaacagggccataggccatttgttttttattttattttaggatatatttggatgattctcctaatgatggcacagaagcaggaacaagaaaac

SEQ ID NO: 697609 - DNA, 640 bp, Homo sapiens
aggttgcatgttcataaatacaacacatcaagaaacaacagcaaagcatattgcatggtctaccccatgtgatgctcaccaaaaccctatatggtaaggaaactaagggtcagagggactgctttatccgaggccatgcaagccttaagcatgttttgagaatggcagcccagtcatccttacctggcacctgcacccctgactgtcaccatttggccccaaaagttaagagcaagcatgccagaaagcgtttttcttttttcttttccttttctttgggggatgcttggggagaggggttgggaagagkaaggatgatctcatctcttattttaataatgaatcactggggcccttgctagtgggaagtccagactctgcacccctcaagcctcccactcctgaattgtgtaatcaccctgggggcttacccagtccaaagggagaatcagcctggaatccagaaaccaggaagagagaaagctgggagcagaaaacacaggtcagaagctggcctgcagatgtgcttcaggtgacagacaccatgttgccccacacaggttaaacatcaatgaattgttatcaacttttgggtatcaggagcattttgaatttctggcttcttttgaaaagtgaattg

SEQ ID NO: 697610 - DNA, 1187 bp, Homo sapiens
cctgccatgacctacaaatctcctcccatactcctccctcccattgcccctttactaagcttcagccacacctggcttcaaaatggcgcaagataaattcctcccacctcagggccttggcaattattgttgcctctgcctggaagcccccctctatgaccttcgctaggtctcagtttaagtgtcatcttccctgaaatatcccatcaatatgacatttccctatccccactgttttgtcactgcacccgcttattccctccataatccttactgcagtgcatagatttacatttgtttatttgcatgtcacctgtctctcacatcagactctgtcctccagaaaggcagggattttgtctgttttgtcattgatgtattacccaatacctagcatagagcttggcacatggcattcctcaaaaagatttgctgaataaataaataatgacataaatatttcctttaatatgcagtactcaaccygaaaaagaaagtattactcatttaataactggagtatgctctcttccactttaatcaggggtcagcaaataagggcccttgggccaagcctagcagttttgtttttgtaaataaagttttattggaaaacaaccatgcctgtttgtttatggctgcttttgtagagagaaagtataaccccaaacatttactatctgacattttacaaagtttgctgaaccctgatttaaagaaatgcgagttctaccactagacagctttccctttgggtcttggccgccagaaagctgagatcaatgagatacatcaagctaggcagtttggtatatttgctgcttctaccctctgcagaatttctaattttctgttttactgtaggcttccttacatgattttgggaattaggtagatgataaattaggaaagaaaaataaaaagaaataatgcatcctgatatgatgtactgaggatgtaaaatatcaacagatagtactcttggcaaaaatagttaccctgaatttactcatgaggaacatgacagatccaaattgtgagattcaaattgcagggcattctacaaaacacctagcctagcctccagaaaaacatcaacaccataaaagacaaaaaaagatgggaggactgtatttttagtaaaggacatggcaacgaaatgcagtgtgtgactcttaattggatcc

SEQ ID NO: 697611 - DNA, 642 bp, Homo sapiens
tggcacttttcatgtgatagataggcagggataagttactttagtagcatcacaggggagaatctcagcacttcggtgcagcctgcctaccctgatgctccagctgctgtcacttttgctgccaagaaagcagctgcctcccctgcttcccggctggctctggtgcacatttgtgggtggttcatcatgggacacactcattgtttgtgtgctcaaatgaggaacactgatttcaatttttgaaattcattaatgttttcacatatgtaaagtcattgaaagtaattgtgacagctgttttatagcattatgacatcagtaataaaatgataattttttggtgttagagagagctgggcaagtataagaaattcaagggtttttatgtggtcaaatgagttagacatttctgtagccaaaaatgaagtgaaaatagacttgtaaaaatgtatccaaaacatggaacctrtgatgtttgactaacaagctatactcctcttcaaatcaaagctcgtgtttaatatggatgtttcaatagtatcataccctttaaattgaaatcatctgttgttggattaaagaattacatttgtgttcactgttgccattttttgcaaagtaattatggaatacttattatgc

SEQ ID NO: 697612 - DNA, 2467 bp, Homo sapiens
gaatacatttttgctgcccccatcatccccactgagatgcatggtggagagaaggtggctggacaaatagactgtttgtgggttacaggaaggaccgaggctggccaagcacagggcagcaggtgggagcatgagggctgccaagacccctcagcaggaaggctgaaaagaggcggtggtatgactgcagctagagggagtcacagctacagaagaaggctcctaaagcacagacactgtgctagacctggccgctgctggaactaacatccggctccctctcctcccatgctagacccttctcccatttgcacagctgcacttctggggcttcccactggctgagctcaatggaagttgttatctcacttggcaatggccatgctcccagtgacacagggcaggacacgatggtcactctgccaggacacaaggcaggactccatgatcatcgtccgtggacacaggataggacaccatggtcatcctctgaggacacagggcaggaggtgatggtcatcctccctcgacacagggcaggacgccacggtcattgtccccagacaagagtaggaggccatggtcattgtcccaggacacagggtaggaggccatggtcatcgtcctgggacacagggtaggaggccatggtcatggtctcgggacacaggataggacgtcatggtcataaccccaggatgcagggcaggagacgatggtcatcatcccaggatgccatggtcctcctcctgggacacagggcaggatgtcatggttatcatccatggacacagggcaggaggtggtggtcatcctccgggactcagggaagggtgcaaaggtctccgtctggggcacagggcaggagggaaggtcatgaggaatccaagtgggtgagtgctgcaggatctgaggctaactaatgagggagtcagacaaaaggcacatttcagagacagaaaagaaattggcaactgcacagatcacacgtgcgtcccacaggtgagggaagggaagactccagccctgataacacagcacagccctggtgagccttgtgaccaaagtcgatgccttcccaacctgtgctgggcaggacagcrtggaggagagagaagacaaggcagaggaaggtaggtggctgggaagatcaaagaatgtgcctcggggcttcaaaggagagaagaactctccaaacactttgattagcagcaaggggtcctgttctccttccctaacagctcgaagcctcaggctgggagtactgtgcagatgctgagtgacaggcaatgataacttggcctccagaaaatagtcacacagcagggaccccagaatagagaaagggcagtgcccttgagccccatctccttcacccatgagggaagtgcagcacctatgtcctgatgtcctggtggccctccaggatggcccctgggttgtgccccaggcctgttctttatgcatcaggaccctcactctcctcctctgcttcatagtgagacagcagctaccaggcaaggctgtatgagactcaggaagtgcaggcagagcctgctgaatgcacccggtgtcggcatgtgaccattcactattcaggctgataggaggacatgcatcccccaaatatcatttttttaaatttggcacaaaaccttgtcagtctcaccagttgagtaacccctccttccaatcatttaagaagtgctgcggggaaaagatgaaatttagctacatggctaccttgcattcatgtcatgttaaaaacacaagccttaattaatggcaaataatggaatacctccacccacggcaattaaacagccactgcaggtgcagcgatacctccagaaatacgtctgctaagaaatgagaaaagggctgggctggcttaagggtgagcctgcagcctgggatggaacttggccttcctgggaggtgtgtgcccccaagagccttgccccagaacattccacacatcaacagctcaaggaattcctccaacactcaccaataaagaccacttctcaccgagaaagtgggtgccacacacagagggctgcagggagcatggtgggtgctgggttaagcactgctgcctggaacctctgcatgaaagctgtacttggcatcggcctgagtctgtgttgcgtgttgctaaaacagaatatcacagactggataattacgaagaaaagacatttatttctcacagttctgggaagtgcaatatcaaggtgctggcatcttacaagggcctttttcctgtgccatcccagggcaccagctgagagaaggggagagagagacacatgagagagagagaatgcaacaggagctcaactctctgttataacaaacccaccctcatgataaagaacacactctatgatgacaacactaatccattcacaaggacagaatgtacctcattccttagtcatcttttactcggccccaccgccca

SEQ ID NO: 697613 - DNA, 2467 bp, Homo sapiens
gaatacatttttgctgcccccatcatccccactgagatgcatggtggagagaaggtggctggacaaatagactgtttgtgggttacaggaaggaccgaggctggccaagcacagggcagcaggtgggagcatgagggctgccaagacccctcagcaggaaggctgaaaagaggcggtggtatgactgcagctagagggagtcacagctacagaagaaggctcctaaagcacagacactgtgctagacctggccgctgctggaactaacatccggctccctctcctcccatgctagacccttctcccatttgcacagctgcacttctggggcttcccactggctgagctcaatggaagttgttatctcacttggcaatggccatgctcccagtgacacagggcaggacacgatggtcactctgccaggacacaaggcaggactccatgatcatcgtccgtggacacaggataggacaccatggtcatcctctgaggacacagggcaggaggtgatggtcatcctccctcgacacagggcaggacgccacggtcattgtccccagacaagagtaggaggccatggtcattgtcccaggacacagggtaggaggccatggtcatcgtcctgggacacagggtaggaggccatggtcatggtctcgggacacaggataggacgtcatggtcataaccccaggatgcagggcaggagacgatggtcatcatcccaggatgccatggtcctcctcctgggacacagggcaggatgtcatggttatcatccatggacacagggcaggaggtggtggtcatcctccgggactcagggaagggtgcaaaggtctccgtctggggcacagggcaggagggaaggtcatgaggaatccaagtgggtgagtgctgcaggatctgaggctaactaatgagggagtcagacaaaaggcacatttcagagacagaaaagaaattggcaactgcacagatcacacgtgcgtcccacaggtgagggaagggaagactccagccctgataacacagcacagccctggtgagccttgtgaccaaagtcgatgccttcccaacctgtgctgggcaggacagcatggaggagagagaagacaaggcagaggaaggtaggtggctgggaagatcaaagaatgtgcctcggggcttcaaaggagagaagaactctccaaacactttgattagcagcaaggggtcctgttctccttccctaacagctcgaagcctcaggctgggagtactgtgcagatgctgagtgacaggcaatgataacttggcctccagaaaatagtcacacagcagggaccccagaatagagaaagggcagtgcccttgagccccatctccttcacccatgagggaagtgcagcacctatgtcctgatgtcctggtggccctccaggatggcccctgggttgtgccccaggcctgttctttatgcatcaggaccctcactctcctcctctgcttcatagtgagacagcagctaccaggcaaggctgtatgagactcaggaagtgcaggcagagcctgctgaatgcacccggtgtcggcatgtgaccattcactattcaggctgataggaggacatgcatcccccaaatatcatttttttaaatttggcacaaaaccttgtcagtctcaccagttgagtaacccctccttccaatcatttaagaagtgctgcggggaaaagatgaaatttagctacatggctaccttgcattcatgtcatgttaaaaacacaagccttaattaatggcaaataatggaatacctccacccacggcaattaaacagccactgcaggtgcagcgatacctccagaaatacgtctgctaagaaatgagaaaagggctgggctggcttaagggtgagcctgcagcctgggatggaacttggccttcctgggaggtgtgtgcccccaagagccttgccccagaacattccacacatcaacagctcaaggaattyctccaacactcaccaataaagaccacttctcaccgagaaagtgggtgccacacacagagggctgcagggagcatggtgggtgctgggttaagcactgctgcctggaacctctgcatgaaagctgtacttggcatcggcctgagtctgtgttgcgtgttgctaaaacagaatatcacagactggataattacgaagaaaagacatttatttctcacagttctgggaagtgcaatatcaaggtgctggcatcttacaagggcctttttcctgtgccatcccagggcaccagctgagagaaggggagagagagacacatgagagagagagaatgcaacaggagctcaactctctgttataacaaacccaccctcatgataaagaacacactctatgatgacaacactaatccattcacaaggacagaatgtacctcattccttagtcatcttttactcggccccaccgccca

SEQ ID NO: 697614 - DNA, 2467 bp, Homo sapiens
gaatacatttttgctgcccccatcatccccactgagatgcatggtggagagaaggtggctggacaaatagactgtttgtgggttacaggaaggaccgaggctggccaagcacagggcagcaggtgggagcatgagggctgccaagacccctcagcaggaaggctgaaaagaggcggtggtatgactgcagctagagggagtcacagctacagaagaaggctcctaaagcacagacactgtgctagacctggccgctgctggaactaacatccggctccctctcctcccatgctagacccttctcccatttgcacagctgcacttctggggcttcccactggctgagctcaatggaagttgttatctcacttggcaatggccatgctcccagtgacacagggcaggacacgatggtcactctgccaggacacaaggcaggactccatgatcatcgtccgtggacacaggataggacaccatggtcatcctctgaggacacagggcaggaggtgatggtcatcctccctcgacacagggcaggacgccacggtcattgtccccagacaagagtaggaggccatggtcattgtcccaggacacagggtaggaggccatggtcatcgtcctgggacacagggtaggaggccatggtcatggtctcgggacacaggataggacgtcatggtcataaccccaggatgcagggcaggagacgatggtcatcatcccaggatgccatggtcctcctcctgggacacagggcaggatgtcatggttatcatccatggacacagggcaggaggtggtggtcatcctccgggactcagggaagggtgcaaaggtctccgtctggggcacagggcaggagggaaggtcatgaggaatccaagtgggtgagtgctgcaggatctgaggctaactaatgagggagtcagacaaaaggcacatttcagagacagaaaagaaattggcaactgcacagatcacacgtgcgtcccacaggtgagggaagggaagactccagccctgataacacagcacagccctggtgagccttgtgaccaaagtcgatgccttcccaacctgtgctgggcaggacagcatggaggagagagaagacaaggcagaggaaggtaggtggctgggaagatcaaagaatgtgcctcggggcttcaaaggagagaagaactctccaaacactttgattagcagcaaggggtcctgttctccttccctaacagctcgaagcctcaggctgggagtactgtgcagatgctgagtgacaggcaatgataacttggcctccagaaaatagtcacacagcagggaccccagaatagagaaagggcagtgcccttgagccccatctccttcacccatgagggaagtgcagcacctatgtcctgatgtcctggtggccctccaggatggcccctgggttgtgccccaggcctgttctttatgcatcaggaccctcactctcctcctctgcttcatagtgagacagcagctaccaggcaaggctgtatgagactcaggaagtgcaggcagagcctgctgaatgcacccggtgtcggcatgtgaccattcactattcaggctgataggaggacatgcatcccccaaatatcatttttttaaatttggcacaaaaccttgtcagtctcaccagttgagtaacccctccttccaatcatttaagaagtgctgcggggaaaagatgaaatttagctacatggctaccttgcattcatgtcatgttaaaaacacaagccttaattaatggcaaataatggaatacctccacccacggcaattaaacagccactgcaggtgcagcgatacctccagaaatacgtctgctaagaaatgagaaaagggctgggctggcttaagggtgagcctgcagcctgggatggaacttggccttcctgggaggtgtgtgcccccaagagccttgccccagaacattccacacatcaacagctcaaggaattcctccaacactcaccaataaagaccacttctcaccgagaaagtgggtgccacacacagagggctgcagggagcatggtgggtgctgggttaagcactgctgcctggaacctctgcatgaargctgtacttggcatcggcctgagtctgtgttgcgtgttgctaaaacagaatatcacagactggataattacgaagaaaagacatttatttctcacagttctgggaagtgcaatatcaaggtgctggcatcttacaagggcctttttcctgtgccatcccagggcaccagctgagagaaggggagagagagacacatgagagagagagaatgcaacaggagctcaactctctgttataacaaacccaccctcatgataaagaacacactctatgatgacaacactaatccattcacaaggacagaatgtacctcattccttagtcatcttttactcggccccaccgccca

SEQ ID NO: 697615 - DNA, 1198 bp, Homo sapiens
tttaaacaaaagaatggacataaaggtaatttttcattttaaagtcccatataaatgaaattagtgcttgtatgcactacctactctgggccaaaggctaatctttcagtttggagagaatataagaggaatataaggcatattctctttccacaacaaacttaatatccatttggggaagaggaaataattagaaaaagagttgagattgcagaaaactaagttgtgtgacccaggttatgtgtgcagtaacaattctaagaaggaagagtttaaaatgggctggaaattatgaccattttctttccaaatggaacaggctaagctttgcctgaacaaagaagcaaagatatctaacagctgcttgccactctctgttgcttaaaatatcagaggagtatgaggtttaggcagctctgagtcatcttcctcctaacttggtatttattcaggacatagctctaaccctgatgacaacagcattcctgacctatgagctgctcaaaatgctaagatggtcctgaaggtgaaatagacaccttctccccrtgcggtcagctgccattcccacttgtgcttctgcagcctcctcattttgtcacagtgtttttctaaatgaaagaggtctggacagctgaagaagaggaactgaagccaaatgagaaatatcctagattctcttcttatgacaatgctcaagactcacagctgaggcaattgtagaaagaactggagcttgggcttagaccatgtgactttggaagcttgtatatcatgaatgaagcccaataaattcaattcagttgttcaaactctatgcaggcctattttgatcaaagtcctgtaactgttagatatgcaaaacttattaagggagaataatgaaagatatggagggataagacaatttaacatatattttatgtgttctcatctcatccagtggtatctgtaaatgggctctgtaatcaatatttttgcagatgaggaggatgaggcccagatgggttggataacttgtccaaggtcacacaatttataagctgcagagggaaaatccagtcccacaaaatcctggctctaaagcctgtgctctttacacttacattgtcagagggagaaatacaaacacacagagaagctttttttaagaggagggctcagggaacagaatattttcacaattctagatgatggg

SEQ ID NO: 697616 - DNA, 629 bp, Homo sapiens
cactcaaaaaacatctgttaggttataagctatataaagttaatgtaagttaacttcagggctcagcaaggaacaccatacatttagtggcactgctaatacccatttccaagctctcattctcccaggaaaccttcccctatccataaaatttatggggtaattgagcaagagtaaagtgagtatgctgtgcacacacatattatggaatgtagcagatttataagaattctaccttagaagtctyaggaagtcaaagaagggagatgtaatgtctataaatgtctttggagcctctggttaattgggcttacggtcctctcctttcaaactgccaagtcaagagatgaatacattctaaccttttagttgatatgtcttttttctgctttgccctagtgacctcacagtactcagaggcacaacactctggagaggatgtcctaatgcaataaagaattttcagagagcaagtgactgctacaattccatgggtagagagggcaagagaggctgcttgttaatgccaaacaggaaagtcatcaaaattctttctcttctgccctccagggaaacagcccactgctaaccaccaagttttgcaagatattcttttgtttcttgaaaat

SEQ ID NO: 697617 - DNA, 1878 bp, Homo sapiens
ttctcccctgtgggggccactcagggcagttccagcccactcctggcccaggtgtctgcatcaggactttatataattaccttcacaatggggcctaatgactggaaagcgttttcatctcaacccacacaattccagatttacagccaccaaggcctccgggttacagctggatgcataccccaccaggtccctctctagagtatcttttggaagatgtaccttacagctctttaagaaagaggatcacttgctaacagcttttctgtctagtacttttaaacataagcacttagcttcgttccttagttctctgcgccccaactctgtagtgaggatcgcattcatcatactccaccaggcacgtaagatgctctaagctgatcttctttcatgtgaggaccctcagggatgaacatattcattctgtcattcgctcacacatttactgagctcccactaccactgcccatggggatgggggcagaggataccgacaaggggtcacagatgagtatgtccccctctaagacccaaaggaactcacggtctggtgaggaagacaaatctgaaaaccactttgctaaaataagaaggccttggtggaggtaaatatcaggtactatgaaaacatagaggggtcactgaagcgtgcttaggtaggaggaaggtttttgattttttttgtttttttgtgtttgtttgttagcttgcttgttttttggttttttagaaggaatttttcctcttctctctctctctctctctttttttttttttttttgagacagaatttcgctcttgttgcccaggctggagtgcgatggcgcgatctccgctcaccgcaacctctgcctcctaggttcaagcaattctcctgcctcagcctcccaagtagctgggattacaggcatgtgccaccatgcctggctaattttgtatttttagtagagacagggtttctccatgttggtcaggctggtctcgaactcctgacctcaggtgatccccccacctcagcctcccaaagtgctgggattacaygcatgagccaccgcgcccagcccggaatttttcccttgttgtccaggctggagtacaatggcacgatctcgactcactgcaacctccacctcccgggttcaagtgattctcctgcctcagcctcccaagtagctgggattacaggtgtgtacctccacgcctggctaattttgtgtttttagtagagacggggtttcaccatgttggtcaggctggtcttgaactcctgacctcaggtgatccacctgccttggcctcccaaagtgctgggattacaggcgtgagccactgtgcccagcctggagggaggttttacaggagttcattcgaggagtgaataggaattgatgaggcagacagggacagtggagttgacacttgtcatgtttttgattgtccagtactgagcaactttcctattttggagggaattcctcattataggagtcttagttggggaagcattctacctttgaccacatgctgatgagggcagggtttgtgtctccctgctccccccgaaccccgccacaaatgtggcatgggcagagtgagggtggggtgaggatgggccctggaagctgagctcagccaatctggtgctcccattgggatctttgggacctgggcaggagcagtcattcgtagcagtggtggtcattttggactccttcaggaacagtatctagtgttgggggtggtgtggatggtgagggggcagaaccagcagcagtgccctaacaaggtgctccctgtctcgtgatcttggagtgttctctgccaccagcatcccttggttcccgacaaaaggcccggtgctgcccatcaactctt

SEQ ID NO: 697618 - DNA, 617 bp, Homo sapiens
tttccctgacaatcttagaacctaaaacagcttctctctacttagcctctcctcagtttgttactattaaaatgtattttaattatccatatataatattttaaactttaaaatattactataattctaaactctttaaaatattactataattgttttatacagtgaatattgaatttattcttacccacatatttacattgtccaatgtttttcttttcttcctgcatttctttgcttccttatgagataatttttttctgcctttactgtttcttttggtgtagatcttgtgacgcatactttcagacttctttcatttttttctgaaatgcctttattttgccttcttttagaatttgttggctgggtgcggtggctcaagcctgtaatcccagcactttgggaggccgaggtgggcggatcacaaggtcaggagatcgagaccatgctggctaacatggtgaaaccccatctctactaaaaatacaaaaaattagctgggcgtggtggcgggtgcctgtagtcccagctacttgggagactgaggcaggagaatggygtgaacccgggaggtggagcttgcagagagccgagatcacgcaactgcactccag

SEQ ID NO: 697619 - DNA, 1264 bp, Homo sapiens
ctggggtactagagggaaactccatctcgaaaaaaaagaaagaaagaaagaaagaaaaaaacagatggaggaagatgccacaagtcaaaaaacatgggcagcttctagtcgattgtcccctagagcctctaaaaaagaatgtagctctgttgataccttgcttgcccaatgagacctgtgtaggacttttgacctacataactgtaaggtaatacatttatgttgtttcaagccactgaatttgtgagattctgttaaaacagccccaggaagctaatataggtggtcagcttaggaaggtttcatagaaaatgttaattttgataaacttttgaagggacattattggtggagaaaaagatggggagattgatgttggaatttgagtccatcagaatttttttttaacatttcaaggatgtgtgatacctacctagaatatttataagccaaagctagaggaataaaacagtattatgtaattggtgctaaattccccagtgaagtcagaggcaaggcattctctagaatttttctcagtaatgttacttgaattgtgtgcaacttcacagatttaaaggctgacaaaatacttgctttacctggttggttttaaattacttaagtcagtacagaaagcagacagaatctccagcttccacaaagcccacccctgaatgtcacctggagcttaatattcttatcactctcctttaatcagatctgtggaccctgctgatttgttttcattggatccttctgaataaaaaataattggatcatgagacacacatatacacacagagacagacaagaaaacagacacacattgagacaggagaaatagagcaaaaaaaaaaaamacccttccatatgtaccttttttcattaaaacatatttattgaggacctgtatatgacatgaacatacatcatgttagggttccatcagtgaatgagacaggcaaggtccctgtctttacagagctcacagcctggtggaggacatagacaaataattatgcaatttatagcagagtggaaaatgtaagttgctatgagggaatacagaaggggcaaccaactcagtctggggatgggaagggaaaagtgtgttggggaggctttctggagaaagagaacttctacgccactcactgtcaaagtgtggtttttggatcagcagcatcggcaaaccctgggagattgtatacatggacattctcaggcccattaagccacacctattagggctaaaattcta

SEQ ID NO: 697620 - DNA, 644 bp, Homo sapiens
ctctatgaatataacccttgtgagagtgtggacctggtctatcttgttgcccacacaacatgtactggtcatagtggacaatcaatcgcatttgctgaattgacgaatgagcaccatttctccccaaatctccttggtcacgctcagacagtattaagggtggacggggcttggggagtgagcaggtctgtagacctcttggagttataggcatgcttctatatttgcatgttttttttttttttttttttttttttaagatggagtcttgctctgtcaccaggctggcatgcagtggtgcgatctcggctcaccgcagtctctgcctcccgggttcaagcaattctcctgcttcagcctcctgagtagctgggactataggcacatgccgccacacccagctaatttttgtacttttagtagagatggggtttcaccatgttggccaggatggtctcgatctcttgacatcatgatctgcctgcctcggtctcccaaagtgctgggattataggcataagccactgcgcctggcctctatttgcattattttccctaggaagtagattggtggtaatcattaygtttttcaccaaatgcttctggctctccatcttctgggcaaaggatagaattgtacatcc

SEQ ID NO: 697621 - DNA, 3504 bp, Homo sapiens
tggcttgtcttcagaactatacatgttacattccagagtcaaaagaagctcagtgatgggggtggggcaagagtcagtaccctccgaaatgggagcatgttggagacactgtggcaatgctagggagggggatctcttattagcagtcatcaaaggttcttgcccacttgcactggcctgctgttctgccctactgaaacctgtgcaggagagaaccatcaacagctttagttggtgggaaggggaggcagagcactaggagaataaactgccacggtatagttgtaaaaggctactggaaagtaaacacaccaaaatgtcaattaggtaatttcatcatggactgatgctttctctcctagtttttttatattttgaggatggattacttttataatggcaaaaaaaaaattacttcaaaattttttgcagtgtttctattctgccccaatttaataccatccttacaaagctcacatcatgtgtgaaacttattgaaaagtataaccaggataatctgctaaattcgttaggaagacagaagatgtagctgacttcagtgagagtttgaagtgaatgcaacccaagtcatgtatagttcacttgaaggacatttgttcagtcaacgaggatttcccatcccccacacccaagtccagccctttccagtgggcccttgtgcgttttattcttgtaaacacacttcaatatcactttctctaagaaggggctgttcatttgtatgagcttctgtaggtctcccttctaagagatgccttagcgaagcttcatgtgctctggaggtctcgggccctcctccctgtctaggaggctcctccaaagtgaattagcttcatttcccattttcattctaccttaaacctgtgaggtgtttgtttcctggggccagggcttgctggggcgttcagcagcctgcacaccagctgctgctctgctccccagtgtgcatcttgtaacaacgcagctcctttgctggttgttgaataggtagaggggcagctgtgaagggcagaagaaagctgattatttcactttctttcttttcggaattctgctttgtgatcttgttccctcttagaatgtttcccgagaagcccgttctatttagctcttctcttgctagggagcattttctgacagttttccaaaatgtgtatattccaggcagttagttggaggtttcgcacatattctagttaggaaagctcagcctggcttttgtggcccagaagcccagaatttcagcaactcacaaagaactcaaatatccttatgtgtgatatttgaaggatagggctttgcaagtcagcctagaaaacgaggataatatctcttggctgtagaacaaactgaaaactcattccattctggcttggagaacaaggatttctctctcagaacaagttttcagggatgatagctaatgacctgtcatgtttttcttatgatttcaaaaaactaaattaaaattgctacttatttttataaattatatgtgaaatgtatttaataatttaaacttacttcttaaattgcttttcttcagagaccttttgtctcctctcacttgtttgacctcagtcttcagaagcaaaccaaaataccatttcaggtagatcagttagcaattgctaataaagtgtgagttgcagattttgagtgtatagagtaagtgtagctagctatgagcactgtgtacatgagaagtatctatcactgtgtctttctccattccacagctcttgcaaaccacagaactcaacatccatgcaactccttaactgatgtgcctgtttggatattcaaatactttctaaaaaaccaaaaattatgcattagcttgcagcacctacactctagaaaaatcaaccctcagggtcttttggtaccatggtctggagttgcttttattttcstagcttttgtcagcatactgctaactcggttgataagtgttctttctgtttaatgatttatgcttcagagggatttgtataggcaaaatagataaagccatatatttccttataggacatattttagatgacattactttgaattcagaacctgtgctctcactgtgggtatcaatgacttcctcaaaacaattcaataatttcaagggcactgtctcatttgtgaaggtcttttacagttaatatgactacctcagataattacaatactgcttctggtatgctacagtatataatagaatccagtgttattaactgaaatgaaatagtcgaatttttggtaaatgtaacaatttgataattagccacacatgctattatccattccatattcacataattggtaaatgttatgcagttttatcttcagtgaaaacatttaagtatcttgttgacttttgtttcagagaaaacatttttaaaattctatgaatgtcttagggcactagaattgaagtgaaatacatcttttgagcatacagagctgacatcattgtaggggtatgttgaatatatgttatgtattttatgtattttagtagaaaggtgctgtatgaatgtgaaagctcctaattagcttttgtaaatcctctagctatgaattgctttttaaacaaggatgaaatgatagcagaacacacacacacaaacacacacacacacacacacacatgcgctaatataatactgactcatcaggcagttgacatgatgtggtcattcaatatctagcctctacttttaaaaaattattgttggaatagtagataggaatatagatttagcaaagtgctttgagatttaggaagcatctctacagaatgccaagaaagtgttaaagaatttaaatgagacctaaaggagttttctactggtgaggcagtaattatattagaagccaaaccatcacatattaaggactgttttgtgctcaccatttgtaggtgaaaaggcaatcttttggaagacaaaaagaacaaacagcccatcatcatgtagaaatgtagaaacattgtgctgttcacaatcttgttaccaataattagctaattattcttttttactaaaagcgaaaggatacatgagcactgcacatcatgggaaaggagaggtgtcatcagaacaggctgcagacacacatacagggtaaagttagctggattattgtgggtcctggttggtcaaaccatggttgccaggaaaaccaggaagatttaagttatcaatctagttctagtagacctatgactgagggtatttatctgtctagaaggaagaatttttagtcaatggaggcaataattttaggcaaatatggtttccatcagaaaagtccaaaggaaaagtgttgctttgggaaatatgcgaagaatgacaaagggacaagactttagcccaaagattggtgcaacctaacctgagttgactcataagtccatgattcaatggaggacagtagttcatttttagtaggctagtcaaatatctaaaatggaaaaatgcaaat

SEQ ID NO: 697622 - DNA, 3504 bp, Homo sapiens
tggcttgtcttcagaactatacatgttacattccagagtcaaaagaagctcagtgatgggggtggggcaagagtcagtaccctccgaaatgggagcatgttggagacactgtggcaatgctagggagggggatctcttattagcagtcatcaaaggttcttgcccacttgcactggcctgctgttctgccctactgaaacctgtgcaggagagaaccatcaacagctttagttggtgggaaggggaggcagagcactaggagaataaactgccacggtatagttgtaaaaggctactggaaagtaaacacaccaaaatgtcaattaggtaatttcatcatggactgatgctttctctcctagtttttttatattttgaggatggattacttttataatggcaaaaaaaaaattacttcaaaattttttgcagtgtttctattctgccccaatttaataccatccttacaaagctcacatcatgtgtgaaacttattgaaaagtataaccaggataatctgctaaattcgttaggaagacagaagatgtagctgacttcagtgagagtttgaagtgaatgcaacccaagtcatgtatagttcacttgaaggacatttgttcagtcaacgaggatttcccatcccccacacccaagtccagccctttccagtgggcccttgtgcgttttattcttgtaaacacacttcaatatcactttctctaagaaggggctgttcatttgtatgagcttctgtaggtctcccttctaagagatgccttagcgaagcttcatgtgctctggaggtctcgggccctcctccctgtctaggaggctcctccaaagtgaattagcttcatttcccattttcattctaccttaaacctgtgaggtgtttgtttcctggggccagggcttgctggggcgttcagcagcctgcacaccagctgctgctctgctccccagtgtgcatcttgtaacaacgcagctcctttgctggttgttgaataggtagaggggcagctgtgaagggcagaagaaagctgattatttcactttctttcttttcggaattctgctttgtgatcttgttccctcttagaatgtttcccgagaagcccgttctatttagctcttctcttgctagggagcattttctgacagttttccaaaatgtgtatattccaggcagttagttggaggtttcgcacatattctagttaggaaagctcagcctggcttttgtggcccagaagcccagaatttcagcaactcacaaagaactcaaatatccttatgtgtgatatttgaaggatagggctttgcaagtcagcctagaaaacgaggataatatctcttggctgtagaacaaactgaaaactcattccattctggcttggagaacaaggatttctctctcagaacaagttttcagggatgatagctaatgacctgtcatgtttttcttatgatttcaaaaaactaaattaaaattgctacttatttttataaattatatgtgaaatgtatttaataatttaaacttacttcttaaattgcttttcttcagagaccttttgtctcctctcacttgtttgacctcagtcttcagaagcaaaccaaaataccatttcaggtagatcagttagcaattgctaataaagtgtgagttgcagattttgagtgtatagagtaagtgtagctagctatgagcactgtgtacatgagaagtatctatcactgtgtctttctccattccacagctcttgcaaaccacagaactcaacatccatgcaactccttaactgatgtgcctgtttggatattcaaatactttctaaaaaaccaaaaattatgcattagcttgcagcacctacactctagaaaaatcaaccctcagggtcttttggtaccatggtctggagttgcttttattttcgtagcttttgtcagcatactgctaactyggttgataagtgttctttctgtttaatgatttatgcttcagagggatttgtataggcaaaatagataaagccatatatttccttataggacatattttagatgacattactttgaattcagaacctgtgctctcactgtgggtatcaatgacttcctcaaaacaattcaataatttcaagggcactgtctcatttgtgaaggtcttttacagttaatatgactacctcagataattacaatactgcttctggtatgctacagtatataatagaatccagtgttattaactgaaatgaaatagtcgaatttttggtaaatgtaacaatttgataattagccacacatgctattatccattccatattcacataattggtaaatgttatgcagttttatcttcagtgaaaacatttaagtatcttgttgacttttgtttcagagaaaacatttttaaaattctatgaatgtcttagggcactagaattgaagtgaaatacatcttttgagcatacagagctgacatcattgtaggggtatgttgaatatatgttatgtattttatgtattttagtagaaaggtgctgtatgaatgtgaaagctcctaattagcttttgtaaatcctctagctatgaattgctttttaaacaaggatgaaatgatagcagaacacacacacacaaacacacacacacacacacacacatgcgctaatataatactgactcatcaggcagttgacatgatgtggtcattcaatatctagcctctacttttaaaaaattattgttggaatagtagataggaatatagatttagcaaagtgctttgagatttaggaagcatctctacagaatgccaagaaagtgttaaagaatttaaatgagacctaaaggagttttctactggtgaggcagtaattatattagaagccaaaccatcacatattaaggactgttttgtgctcaccatttgtaggtgaaaaggcaatcttttggaagacaaaaagaacaaacagcccatcatcatgtagaaatgtagaaacattgtgctgttcacaatcttgttaccaataattagctaattattcttttttactaaaagcgaaaggatacatgagcactgcacatcatgggaaaggagaggtgtcatcagaacaggctgcagacacacatacagggtaaagttagctggattattgtgggtcctggttggtcaaaccatggttgccaggaaaaccaggaagatttaagttatcaatctagttctagtagacctatgactgagggtatttatctgtctagaaggaagaatttttagtcaatggaggcaataattttaggcaaatatggtttccatcagaaaagtccaaaggaaaagtgttgctttgggaaatatgcgaagaatgacaaagggacaagactttagcccaaagattggtgcaacctaacctgagttgactcataagtccatgattcaatggaggacagtagttcatttttagtaggctagtcaaatatctaaaatggaaaaatgcaaat

SEQ ID NO: 697623 - DNA, 830 bp, Homo sapiens
tgggaaagagatatattttataggaatatcaattcacttaaaagattcaggagaaaaaagtatgattttatatatgggayaatttatatatggaacaatgatttatatatgggacaataagataaacttattgaactattcttagtaatcattacaagctaaggatgttaaaataaaactacaaatttactgcggcaattaaatttgatcttcccgcctccatacctgcttccattccaattaggaatataaactcattaagagagaaaaggcaactgctattcattttttgtttccctcacactttcagacttgattaccaccttcaaggcagtggagttacagcttaccttaaatcccttcctgccagcaactgactggaagcataaaaattgcagaagaaaaatctcttctattcctccagtgctatttatcaacttttctaacacctactaaatgctataataagcaaagcaccatgtgaggcactgtgaggaatacaatgctgacataacatatatctgttgcacactaactatgtgctaggcactgtcttgaagatagagtatcatgcaagacaaagtccctgtgctcttgaaacttatattttgcaggggttggagtggggagtacatgataaacaaacaaggaaatgcaaaaaatattatggacaagccctgtgtggcaaaacaggaaagcataatacagagtgggtggttaaattaccctaaattgtttgatcagagaaaggtctttatgaggcagcatttaaatagatatctgaaggaaaaagaatcagtcctgcaaagatcagcagaacaatccatgca

SEQ ID NO: 697624 - DNA, 830 bp, Homo sapiens
tgggaaagagatatattttataggaatatcaattcacttaaaagattcaggagaaaaaagtatgattttatatatgggataatttatatatggaacaatgatttatatatgggacaataagataaacttattgaactattcttagtaatcattacaagctaaggatgttaaaataaaactacaaatttactgcggcaattaaatttgatcttcccgcctccatacctgcttccattccaattaggaatataaactcattaagagagaaaaggcaactgctattcattttttgtttccctcacactttcagacttgattaccacyttcaaggcagtggagttacagcttaccttaaatcccttcctgccagcaactgactggaagcataaaaattgcagaagaaaaatctcttctattcctccagtgctatttatcaacttttctaacacctactaaatgctataataagcaaagcaccatgtgaggcactgtgaggaatacaatgctgacataacatatatctgttgcacactaactatgtgctaggcactgtcttgaagatagagtatcatgcaagacaaagtccctgtgctcttgaaacttatattttgcaggggttggagtggggagtacatgataaacaaacaaggaaatgcaaaaaatattatggacaagccctgtgtggcaaaacaggaaagcataatacagagtgggtggttaaattaccctaaattgtttgatcagagaaaggtctttatgaggcagcatttaaatagatatctgaaggaaaaagaatcagtcctgcaaagatcagcagaacaatccatgca

SEQ ID NO: 697625 - DNA, 596 bp, Homo sapiens
taggtggcctccaacccagttggaataaaggtcctgcctcacatgtgcaaatgctgcctgcccatgtaagggagggaaaaagctgtttctctattttttgttaaaaacgaccctttcagcccatctctgttcttatatttgtgtgcctcttttaaacaatgtataattgagtcttatttttttcatcctgtctgacaatctttaccttttaattgggtatttagtccatttaaatatcaacaattatgtagttgggttgaagtcaatcatcttgctatttattttttctgtttatcctatccttggtttcttttttcttccttttcttatttcttttggattaatcaaatatttwaaaaattgttgttttatgtcctctgctctttaaatggtatcttttgtattattcttttagtgattaccttagagattatatgtattcttgacctagtgctgcttcctgtacaagaatcttacatccctcccatgtttatgttattattatatattttatttctacatatgttatgtcttcctataagacattgtcattattatttctttcagcagtcaatttccttttatggttactcaca

SEQ ID NO: 697626 - DNA, 596 bp, Homo sapiens
taggtggcctccaacccagttggaataaaggtcctgcctcacatgtgcaaatgctgcctgcccatgtaagggagggaaaaagctgtttctctattttttgttaaaaacgaccctttcagcccatctctgttcttatatttgtgtgcctcttttaaacaatgtataattgagtcttatttttttcatcctgtctgacaatctttaccttttaattgggtatttagtccatttaaatatcaacaattatgtagttgggttgaagtcaatcatcttgctatttattttttctgtttatcctatccttggtttcttttttcttccttttcttatttcttttggattaatcaaatatttaaaaaattgttgttttatgtcctctgctctttaaatrgtatcttttgtattattcttttagtgattaccttagagattatatgtattcttgacctagtgctgcttcctgtacaagaatcttacatccctcccatgtttatgttattattatatattttatttctacatatgttatgtcttcctataagacattgtcattattatttctttcagcagtcaatttccttttatggttactcaca

SEQ ID NO: 697627 - DNA, 1684 bp, Homo sapiens
ctgggcccgggcagaggatgctgcagggagaagccctgggatggactgggaggaccagagcccgagaggcgggatggactgggagggccagagcccgagaggcaggagccctggcctgggtccctgcctgtgcctgtctctcaccagatgcatcactggcacccgggtcccccgtttgacccagtgtcctcacctgaccaacaaggtgaacaactgctctgagtcatggagagaacatgtcaacagtgaaatccctgaggatgggaatagggatggacaaggctaaatcaaggggtccctgggctgagctcttcctgggagtcaggcacattggagtcataggagtagatggctcacctaacacagaccacaacatcctttccttggctacagtgaagaccccaaaatgtgggtccacctcttcattgacgtgtcttttgtttcctacatatttcctttattcgtatctttgaagacttacctggtgcattggggaggttgggatgcagatttggatccaagccatgccaggcacaggagacagaatcagagaagaaactgccaggaggtggcatcagcmcagtgaacaggggcgattcctacctgtgcatttggaagtgggggcacaggagcaatgcagccagaagtgtccatgtggggctgagccctgctaggaccaaagagggacagggtggggacctccaaatcgggtcctccaaatccccaaagctgccactgaaacttctctgcacccctaaactgatgctcaatatttcagttttccctgtatctttaggggtctgacaggagaaaggaaggaatattggggaccaggtttgcttaataggtctgtaattcttgcccctgcacccacattattagaggggttaccaagccacagtgtgatgagcccacaggagcaagaactgggtctgtcctatccactgctactcttccagggccccatgcagcacttggcacagaactgatgttcagtgaatgtttgctgattgaatgaatgggcattatgggctactccttaggtctcacagcaggcagtagacactgatgtggccaatcctgcccaggcctttccaggtggagctggaatctgacaagtaatgtctccaccttcacgcatcagggaaaccgggagatttcagctttctgtctgggtttctactgacaccctgctcagtatcccagctttagcactggagtagggtgaggatgctgccctgtgggatctgggaactttgactctgaggaggctgggcccagacagactgataacattgcagattggcctgtgtttctgagcccagggcaactggggctgggaactgccaaaagaagcactcttttatgcacatccactttggctcttatttagtcatgctggccttgttttgcagaacaaaggatccagtacctctgtccctggctctcaggagctcagtgtaatgatggattatagttcaagacccttgatccacagtatggaaaggtatgttccctgggggctggctgctcctgtgtgcttcaacttaatattcaccacattctgtgcacacagcacataatgtctcttttatatatgtgcagtctgaggttcagaaaattggtgacttgacctacctggaaccaactgcaagatttaggcctttttgccttgctttgaaat

SEQ ID NO: 697628 - DNA, 1726 bp, Homo sapiens
tttataaaccgcaggacttcttagagcaatgcctgggtccctggttggtgacaatgcaaagcagcctagccaggatgcacacagtggaagaaaaaaaccttccttaccttaaactgctgagaatgggggttgtgacagccacataactcagtctactccgacgtatgtatcatttatatggagtattttcgctgttggaaaatctatagaaataggaagccataaggtttctaggaccccgtgaagaacacatccattaggagaactgaagaggtgggtggctgggtgagctgcacttgttcattcatgacagtcaggggatatgagtcattctgctctacacatgaccagggagacagaactatatatagcagacaaaatatgatgggtagtaacttagactttcaaatgagaagaggtttaatcattgattaattaatacattaaataaacatttattgagcacctactacatgataaaccctattaggtactgggaacacaytggtgaacaagggttcatacataggttttcagggctcacagtccagagtggggaggcatacaagtaatgagttaatttcagtctagagttttaagagctaaaaggcacccaacacagagaaaaggcactcaacacaagtgagggattgggggagcttcctagaagaggtgacatctgagctgtgatccagaggatagttaaaagtagcccggggccatgcgcggtggttcacgcctgtaatctcggcactttgggaggccaaggcgggtggatcacctgaggtcaggagtttgagaccagcctggtcaacatggcgaaaccccgtctctactaaaaatacaaaaattagccgggtgtggtggtgcatgcctgtagtcccagctactcgggaggctgaggcaggagaatcgcttcaacccgggaggcggaggttgcagtgagccaagaccatgccgctgcactccagcgtgggcgacagagcaagactttgtctcaaaaaaaaaaaaaaaaaaaagtagcctggttaagaaaaggtaagaaggaagggtattttgagcaaaaggaacaactttctgtagctgaagaatctgttccagaccacagaagggatccagcagcagactgagagctccagggagcgcagggttatctgcagggcacaaggcagaggccagagcagacacaaatatcagctggggcctgaagtcaagctctcccagaaaactcacttggaactctggacaggaggtgtgcttcgggtgacaggatataacagggcagcgagaaatggcttcagggtgagagcagggcctcttcttctaaggataaagagtgaaccaggaggctaagcctgctgataccttgtctctgcttcctcaccaggagacacaggctcgggggcttggcagctctgaggtggaggggtgcgcagctgcccggaggacagatacacggaggtgggggtggcatacagctaagaaggaggtctggggaaaaagaacaggagctccccaagcccagccatggtgccagcccgaatctgccatgcttgattcgctcagggttgaggtgagagattgaaatggaaggctggcccataagccttggcaatcaagctggttggtgattcagctgttagtatgttggggttatgagtccaggcactgaaagtgtagctttgtcgttctcctttaattttgtaattaagattaaaaaattcca

SEQ ID NO: 697629 - DNA, 634 bp, Homo sapiens
atgtatctttgccataaaaagctttataattaawaactttacaattaaaaaatgatataaaatggaataaaacaactttttaatttcttggaacatagataaaatgttagagaaaagaaggcaattagaaaagtcattaagaacaaattatattcattaaatcccctggcattattccaaatggaaattcttttgataagagaaatcaatgtgattattatccaagaatgaagaatattgggatttatccaagggtagtattaagtatcacaatgagtttgtgtataaagagctttaagatgaagaaatattttttatgcccactagctgcatccatttagatatccaaatttaccaatgtcttttgttctgtaaattaactaagatcctaccaggcaccaacgtcatgggctgatgcataagagtctatgggacagggagcttggaaaggctctcagttttcagtagaaactctgacaggatcatgacagaagcagttaaatgcatgaaagtagaaaatgacccatactcacctcagagctatttcaagcttcccaagtatacatccaaaattacatctattgatctttattttcagggattgaagacactggtattcaggaactctttaaaa

SEQ ID NO: 697630 - DNA, 1417 bp, Homo sapiens
tggagaatatatgaaaaccgacaaaattaaaatgacataatgagagttatgagtatagagtaataaggatattttggccttgatttgagaatggttctgtagaaaaaagccatttaggaaatgatgtacagtgggtgctgggagaaatagtctttcatagtctctcccatgaacaaaggaaaaatagattttatctatgatactgtaatgaaaacagagaatttgacatgcaaaggaggaaattctcaggaggacagaactaaataaacatctgagaagttcaaggaattaggctatgtaccaaacacgtctattcttggtgaaagtaatctgtcaggatccaggtgtgtagttgcgggagtgaagtgaaaatggaactaaaaaatgtatttgcaaatgcccaccagaacacatggcttcatttttaataattaaaaaatactcaggtctttttaaactatcacacacacacataagccaataattattctattttggggaggggtgctatttctatagaatacaatagaatatgttaggaatctgttgatgccatcagatgtrtgcagttaagtatgatccttaggagccatattgaatgaattcactggcgaaaatacaaaacaaaagagagaaatgcatgaaatgaaaggaaataaaaccatcaatgaaataacttacatttctctcacctgaaagaagatcagatgttgcaaaactcaactccaatgattggtggtacacaactgggtagcttatctagaaggcagtggaacagatgaaaggaatgaaaactgagagagaacaaaaatggggacagttctggtggacatgtaatggtgtctcagactacaaaatgtgtgtgtttccaaaggaaaaataagagaaaatggagtgtaaacaattatcatttatacaatttaaaaaggggggaagcgctctcttaaactgaaataattcaagtttacaagataaaagatttttatatataaaagcaaaacaaacaacaaaaatagctgggcatagaggtgcatgactacaatcccagctacttgggaggctgaggctggaagatcccttgagcccaggagctggagaccagcatgggggaaaaaaaaaaaaaaaagtaacctgttaaaatacggccttgcatagagacatcaaaatcaatagcaacaaagcaaaaaatggcaaatgggatctaattaaacttaagagcttctgcatagcaaaagaaactatcaacagagtaaacagacaaactacagactgggcaaaatttttcgcaaactattcatctgacaaaggtctaatatccagcttctataaggaacttaaatttacaagaaaaaaaacctcattaaaaagtgggcaaaggacatgaacagacactttttcaaaagacatacatgcagcc

SEQ ID NO: 697631 - DNA, 1368 bp, Homo sapiens
gctaattgagtaatgacctcaaaaataagaaatgtattttaaaataaaacattgatattttcttattgwgatcactctcatttataagaatcttctcaacattgagaaatttgaaagcagaatttttattctaatttaattgtaaatttattctgaaatataggatcatttcactttattgctttcaatttactttagtagtctttcatttatagttgcatataccatgctttatctattgtgtaggacattgtaaaacaaagacatattatataaatgtgggaagtcattatcatgcacttactatgcaagactgtacaatgcccatagcagtaaagaaaaggaaattctctgtatagagatttttttttttgcatgttgctgatacatttctcaaatcacaattatttccatggtaacagactatgatatcaaaaagacagcccactgtctgttctaagatatagcagaaaaataatttgtctctgaatgcaaaagcctcttagtccatcacaaatattgtcaataattagcaataacagcaaggggaattcaattacaggcaaagcaaattgctttttatttaaatgttctgtttttaatgcatcccagtgtgaaagtccctctttaaattagtgaaagcatgtgtaatctcaatacctccattgggggttgtaggaatatatgtagtctcactgtttggttgagtgtttagaagcgtaggataaaattatactgctgtaggtactttggaatgacagatatcaataacaatttagataatgaagtgtattccagctttatttcaattttctccagctgtaaaattcttgtatgctagcttaatatattcatgtttatgtaaatttaaatacaaccattactgttttatagtaattataaaacaggttgggtcatctttatttcattttttgatgcttttcaatcttatggaaaggttgaactaatgttctcctagaaaagagcaaagagggattatctcattttggttcctgtcagttgggtttaatttttgcagtagttgtcatttttgtagaaatagtagataagaaatgtgaaaaatttatgaagaagaaccatggcatctggagtaagaacccaagatgtccacccttcagtgacctcattacagagatgagaataaaataatttaatttggacatcctgggtaaacatgccttgaggtcaaagtttatcaactagtaagaactcctcattatatacccctttgcttctcttgtctaaagagaagtcatattcctaaaatcatctattctgcccactgatttgtaacttggcaaagaaacataggccatgcaaattagatcactagcagagctgagaaat

SEQ ID NO: 697632 - DNA, 634 bp, Homo sapiens
tgcagaagggtctacacaccagaggaatatgattaaggaaccctggttggtgccgcatggaataataaaatctgccacttgacccctgaccaaattactaaaccacaaaatctctatgtataatgaaatagttgatgttccaaggctctgaattttggagtggctgggttgtacagcaatagataaactaagatgaaaaaacaatgtgtgaatattttttgagatggcaaaatgttctactgaccagctagaaatctatatatctgttccttttttgctattgtatataaaggtaaattttatctttctaatratttcccacttttttcccttttcagtactgtagctatcattgacattctatagtcttttttaaagtcatattcagataaagttagcaatattttttcttgaacaaatgaaaatgttttgaaagcacacaaaggtaccctacttatatctttgaaagtcttatcaaatactagaattacatatcatattataaatttgtttaaagaatttatggaaatgaatctttttatagttgtatagcaggctcagttttgttgagaccacacattattataaattatcagaaacataaaaatgtgctataatttacaattgaaatcaa

SEQ ID NO: 697633 - DNA, 634 bp, Homo sapiens
tgcagaagggtctacacaccagaggaatatgattaaggaaccctggttggtgccgcatggaataataaaatctgccacttgacccctgaccaaattactaaaccacaaaatctctatgtataatgaaatagttgatgttccaaggctctgaattttggagtggctgggttgtacagcaatagataaactaagatgaaaaaacaatgtgtgaatattttttgagatggcaaaatgttctactgaccagctagaaatctatatatctgttccttttttgctattgtatataaaggtaaattttatctttctaataatttcccacttttttcccttttcagyactgtagctatcattgacattctatagtcttttttaaagtcatattcagataaagttagcaatattttttcttgaacaaatgaaaatgttttgaaagcacacaaaggtaccctacttatatctttgaaagtcttatcaaatactagaattacatatcatattataaatttgtttaaagaatttatggaaatgaatctttttatagttgtatagcaggctcagttttgttgagaccacacattattataaattatcagaaacataaaaatgtgctataatttacaattgaaatcaa

SEQ ID NO: 697634 - DNA, 638 bp, Homo sapiens
tcctcagaataacaagtataaatatgatgcatttgtaagttctgtttaaggaaattttatgcgtacttcacttcagaaattgtgatgctgggacttttaaaacattgcaaatatatttccaaataaaaatcaggtacacatgtgttacgacaaagaggcactatgactttcccttcctctcagaaattaaagtggtgactgcattttaaagatacagagggtatgtggcaataaaatgtttattaactcaactagaaatatcagacacaggtaatttttcctttataaacaactgatctatttggataggaaaatgtcacattgaaacacagaagcacctggagtggggatagagagaagattggttgcaggaattccagatgaatttcaaagtaacamatcagcccctgacaagaacagcactgaagagtttgataacataaatatgtagaggttatgctccagcctggagaaggtgtagaaaccaacactatctaaatctaatgtgatttcaatataaaccatatctttgccttctgtatatctctatggaattacggaatttaaaacggcaaattccatctacactaacctgatcattttttccccagacgcttgcaaatgatacttcttcagaa

SEQ ID NO: 697635 - DNA, 600 bp, Homo sapiens
tatacatacaaatagtgaaaaagagttttaaatgatataccattttcacactaaaagaaggctggagaaactatattaatattaaataatgtagatttcataggaaatattgatataaatatataaacatcgmataaagataaagatattgaaatagaaacacaaataagaaaatatcaatgaaaccaaaggctgactatcaaaaaggtcaataaaactgataaattctcgcaaaagatttggaaaagcaagaaggtgaaacaaagtagatgtcacaaattatcaggataagaaatgagaagagtgattgtatcacagattttacaaataccaaaggggaaataagggtatcagtatcttcacaacaattttatgctaaatatttgtcaacttagatgaaatggacacaatatcaaagctcatggcttttcttcatccttggcaacatttgctaaggccaggctttttaaagaattacagatttgttggtgagggtgtagaagagtcagaactctcatatactgctggtaagaaggcaaaatcgtacaaccactttggaaaacagtttgacagtttcataagatgttaaaaataaccttc

SEQ ID NO: 697636 - DNA, 600 bp, Homo sapiens
tatacatacaaatagtgaaaaagagttttaaatgatataccattttcacactaaaagaaggctggagaaactatattaatattaaataatgtagatttcataggaaatattgatataaatatataaacatcgcataaagataaagatattgaaatagaaacacaaataagaaaatatcaatgaaaccaaaggctgactatcaaaaaggtcaataaaactgataaattctcgcaaaagatttggaaaagcaagaaggtgaaacaaagtagatgtcacaaattatcaggataagaaatgagaagagtgattgtatcacagattttacaaataccaaaggggaaataagggtatcagtatcttcacaacaattttatkctaaatatttgtcaacttagatgaaatggacacaatatcaaagctcatggcttttcttcatccttggcaacatttgctaaggccaggctttttaaagaattacagatttgttggtgagggtgtagaagagtcagaactctcatatactgctggtaagaaggcaaaatcgtacaaccactttggaaaacagtttgacagtttcataagatgttaaaaataaccttc

SEQ ID NO: 697637 - DNA, 1898 bp, Homo sapiens
agcatactacccacatatactctaaatcactgaaatcttacaggctttgccttgtttgggtacactaaaatacatgatagaatcttcctgaagataagcacaaattttatagctttcttggaccatattatggcatttcttacttacaatgttattttctataacctttctgtcaataaaagtgggtttggttaagatgtaatgtatgtacagtttcatagttcaaatttccattaagagaaaactgaagagacaacaatcaaatgggcaaataaatgaatgtaaaaaactaatgattcaacckgaatgaaaaagagtagacatttttgaaaataaaataattgctattttattaatatagttaatacattaggttgataaagtaaaaaaaaaaaactcctctaaaattcttatcattaaccagtggctcgctaaaaagaaaaaaaaaaaacctcagactattttaattgtcttagagttctcatatttgtacctatctaagaaacagtttatcacaatgtaaatactaaggaaatgtttaggtggttttgtacttttaatttcaaaatctatagaaaattctctttttcccagagataccattcttagccacttaaacaaaatataaaatactatttagcaatattccctgctgaatacttttaaacaagatagggctaggctgatttaaattataagttgaagtctaggaaaaacaaagtctatataatacaaaacgttggaatcaagtaatattacttgtttaagccaaatatattcatatttaaataacaattaaatagcaagagattaaataccaaccattcttaatcacagtttaagtctgataacaaaatcaaaactttaatgccatacaaaatacatctcacaaactaaccaatgcaaagctctaagctttaaactttttgacagtgtcaataaaaaccccaggaagggagaatattgcaactctccttggaacacaggtatcttaaatcatggttaaacagacagaatgttaagaatggtatggtttttattttctatagcaggtttattgatactttttttctagtaaagtttgaaaatctgacactacctgtccacatagaaggggaaacaaaacttggtcaaagtctgtagaacttcctgtggagagaaagagagataatttatacatctaatgggaccagtaaatctaacattaaccacagcacacaatctagcaactttaccctaaagaaagaggagacagatgaagaaatatgggctttatcaattacatgggaggagtaccaggcagtcaatcatgagaaataataaacatgatcaaacttcattaaaaatgaaaaattaatcaagaatcacacatgggcaagcagcaggagccatgcaggaaagctctgaagggagggaggcggttgggttgctgagtgttaacacccctccagggaacatctccagcctgaccatatggatcagagtgaataacaccgagccacatgggtttggcctggcagggccgctgttgctggcaccgtttttgcctgttacctaggaacagagggggccaggattagacaacgcttcccaacatcaataggccaaatcacagcagaatcgaaagccaacttgaagataattgtccctgaacactgtcagctacattttttagagtttaaaacttcatttacttactttacaaagaagttgccattttgggcatatatttattttggaaccaaactgtaacagttttaagtatatactattcttattgaaatatcaccatatttgaacatactcacctaattttaatgtattaaaatctaaagcaaactaccagtttaaatgtctttctaaaaaaatacatatataggtacataaagccaagcaca

SEQ ID NO: 697638 - DNA, 1898 bp, Homo sapiens
agcatactacccacatatactctaaatcactgaaatcttacaggctttgccttgtttgggtacactaaaatacatgatagaatcttcctgaagataagcacaaattttatagctttcttggaccatattatggcatttcttacttacaatgttattttctataacctttctgtcaataaaagtgggtttggttaagatgtaatgtatgtacagtttcatagttcaaatttccattaagagaaaactgaagagacaacaatcaaatgggcaaataaatgaatgtaaaaaactaatgattcaacctkaatgaaaaagagtagacatttttgaaaataaaataattgctattttattaatatagttaatacattaggttgataaagtaaaaaaaaaaaactcctctaaaattcttatcattaaccagtggctcgctaaaaagaaaaaaaaaaaacctcagactattttaattgtcttagagttctcatatttgtacctatctaagaaacagtttatcacaatgtaaatactaaggaaatgtttaggtggttttgtacttttaatttcaaaatctatagaaaattctctttttcccagagataccattcttagccacttaaacaaaatataaaatactatttagcaatattccctgctgaatacttttaaacaagatagggctaggctgatttaaattataagttgaagtctaggaaaaacaaagtctatataatacaaaacgttggaatcaagtaatattacttgtttaagccaaatatattcatatttaaataacaattaaatagcaagagattaaataccaaccattcttaatcacagtttaagtctgataacaaaatcaaaactttaatgccatacaaaatacatctcacaaactaaccaatgcaaagctctaagctttaaactttttgacagtgtcaataaaaaccccaggaagggagaatattgcaactctccttggaacacaggtatcttaaatcatggttaaacagacagaatgttaagaatggtatggtttttattttctatagcaggtttattgatactttttttctagtaaagtttgaaaatctgacactacctgtccacatagaaggggaaacaaaacttggtcaaagtctgtagaacttcctgtggagagaaagagagataatttatacatctaatgggaccagtaaatctaacattaaccacagcacacaatctagcaactttaccctaaagaaagaggagacagatgaagaaatatgggctttatcaattacatgggaggagtaccaggcagtcaatcatgagaaataataaacatgatcaaacttcattaaaaatgaaaaattaatcaagaatcacacatgggcaagcagcaggagccatgcaggaaagctctgaagggagggaggcggttgggttgctgagtgttaacacccctccagggaacatctccagcctgaccatatggatcagagtgaataacaccgagccacatgggtttggcctggcagggccgctgttgctggcaccgtttttgcctgttacctaggaacagagggggccaggattagacaacgcttcccaacatcaataggccaaatcacagcagaatcgaaagccaacttgaagataattgtccctgaacactgtcagctacattttttagagtttaaaacttcatttacttactttacaaagaagttgccattttgggcatatatttattttggaaccaaactgtaacagttttaagtatatactattcttattgaaatatcaccatatttgaacatactcacctaattttaatgtattaaaatctaaagcaaactaccagtttaaatgtctttctaaaaaaatacatatataggtacataaagccaagcaca

SEQ ID NO: 697639 - DNA, 1898 bp, Homo sapiens
agcatactacccacatatactctaaatcactgaaatcttacaggctttgccttgtttgggtacactaaaatacatgatagaatcttcctgaagataagcacaaattttatagctttcttggaccatattatggcatttcttacttacaatgttattttctataacctttctgtcaataaaagtgggtttggttaagatgtaatgtatgtacagtttcatagttcaaatttccattaagagaaaactgaagagacaacaatcaaatgggcaaataaatgaatgtaaaaaactaatgattcaacctgaatgaaaaagagtagacatttttgaaaatraaataattgctattttattaatatagttaatacattaggttgataaagtaaaaaaaaaaaactcctctaaaattcttatcattaaccagtggctcgctaaaaagaaaaaaaaaaaacctcagactattttaattgtcttagagttctcatatttgtacctatctaagaaacagtttatcacaatgtaaatactaaggaaatgtttaggtggttttgtacttttaatttcaaaatctatagaaaattctctttttcccagagataccattcttagccacttaaacaaaatataaaatactatttagcaatattccctgctgaatacttttaaacaagatagggctaggctgatttaaattataagttgaagtctaggaaaaacaaagtctatataatacaaaacgttggaatcaagtaatattacttgtttaagccaaatatattcatatttaaataacaattaaatagcaagagattaaataccaaccattcttaatcacagtttaagtctgataacaaaatcaaaactttaatgccatacaaaatacatctcacaaactaaccaatgcaaagctctaagctttaaactttttgacagtgtcaataaaaaccccaggaagggagaatattgcaactctccttggaacacaggtatcttaaatcatggttaaacagacagaatgttaagaatggtatggtttttattttctatagcaggtttattgatactttttttctagtaaagtttgaaaatctgacactacctgtccacatagaaggggaaacaaaacttggtcaaagtctgtagaacttcctgtggagagaaagagagataatttatacatctaatgggaccagtaaatctaacattaaccacagcacacaatctagcaactttaccctaaagaaagaggagacagatgaagaaatatgggctttatcaattacatgggaggagtaccaggcagtcaatcatgagaaataataaacatgatcaaacttcattaaaaatgaaaaattaatcaagaatcacacatgggcaagcagcaggagccatgcaggaaagctctgaagggagggaggcggttgggttgctgagtgttaacacccctccagggaacatctccagcctgaccatatggatcagagtgaataacaccgagccacatgggtttggcctggcagggccgctgttgctggcaccgtttttgcctgttacctaggaacagagggggccaggattagacaacgcttcccaacatcaataggccaaatcacagcagaatcgaaagccaacttgaagataattgtccctgaacactgtcagctacattttttagagtttaaaacttcatttacttactttacaaagaagttgccattttgggcatatatttattttggaaccaaactgtaacagttttaagtatatactattcttattgaaatatcaccatatttgaacatactcacctaattttaatgtattaaaatctaaagcaaactaccagtttaaatgtctttctaaaaaaatacatatataggtacataaagccaagcaca

SEQ ID NO: 697640 - DNA, 1898 bp, Homo sapiens
agcatactacccacatatactctaaatcactgaaatcttacaggctttgccttgtttgggtacactaaaatacatgatagaatcttcctgaagataagcacaaattttatagctttcttggaccatattatggcatttcttacttacaatgttattttctataacctttctgtcaataaaagtgggtttggttaagatgtaatgtatgtacagtttcatagttcaaatttccattaagagaaaactgaagagacaacaatcaaatgggcaaataaatgaatgtaaaaaactaatgattcaacctgaatgaaaaagagtagacatttttgaaaataaaataattgctattttattaatatagttaatacaytaggttgataaagtaaaaaaaaaaaactcctctaaaattcttatcattaaccagtggctcgctaaaaagaaaaaaaaaaaacctcagactattttaattgtcttagagttctcatatttgtacctatctaagaaacagtttatcacaatgtaaatactaaggaaatgtttaggtggttttgtacttttaatttcaaaatctatagaaaattctctttttcccagagataccattcttagccacttaaacaaaatataaaatactatttagcaatattccctgctgaatacttttaaacaagatagggctaggctgatttaaattataagttgaagtctaggaaaaacaaagtctatataatacaaaacgttggaatcaagtaatattacttgtttaagccaaatatattcatatttaaataacaattaaatagcaagagattaaataccaaccattcttaatcacagtttaagtctgataacaaaatcaaaactttaatgccatacaaaatacatctcacaaactaaccaatgcaaagctctaagctttaaactttttgacagtgtcaataaaaaccccaggaagggagaatattgcaactctccttggaacacaggtatcttaaatcatggttaaacagacagaatgttaagaatggtatggtttttattttctatagcaggtttattgatactttttttctagtaaagtttgaaaatctgacactacctgtccacatagaaggggaaacaaaacttggtcaaagtctgtagaacttcctgtggagagaaagagagataatttatacatctaatgggaccagtaaatctaacattaaccacagcacacaatctagcaactttaccctaaagaaagaggagacagatgaagaaatatgggctttatcaattacatgggaggagtaccaggcagtcaatcatgagaaataataaacatgatcaaacttcattaaaaatgaaaaattaatcaagaatcacacatgggcaagcagcaggagccatgcaggaaagctctgaagggagggaggcggttgggttgctgagtgttaacacccctccagggaacatctccagcctgaccatatggatcagagtgaataacaccgagccacatgggtttggcctggcagggccgctgttgctggcaccgtttttgcctgttacctaggaacagagggggccaggattagacaacgcttcccaacatcaataggccaaatcacagcagaatcgaaagccaacttgaagataattgtccctgaacactgtcagctacattttttagagtttaaaacttcatttacttactttacaaagaagttgccattttgggcatatatttattttggaaccaaactgtaacagttttaagtatatactattcttattgaaatatcaccatatttgaacatactcacctaattttaatgtattaaaatctaaagcaaactaccagtttaaatgtctttctaaaaaaatacatatataggtacataaagccaagcaca

SEQ ID NO: 697641 - DNA, 1898 bp, Homo sapiens
agcatactacccacatatactctaaatcactgaaatcttacaggctttgccttgtttgggtacactaaaatacatgatagaatcttcctgaagataagcacaaattttatagctttcttggaccatattatggcatttcttacttacaatgttattttctataacctttctgtcaataaaagtgggtttggttaagatgtaatgtatgtacagtttcatagttcaaatttccattaagagaaaactgaagagacaacaatcaaatgggcaaataaatgaatgtaaaaaactaatgattcaacctgaatgaaaaagagtagacatttttgaaaataaaataattgctattttattaatatagttaatacattaggttgataaagtaaaaaaaaaaarctcctctaaaattcttatcattaaccagtggctcgctaaaaagaaaaaaaaaaaacctcagactattttaattgtcttagagttctcatatttgtacctatctaagaaacagtttatcacaatgtaaatactaaggaaatgtttaggtggttttgtacttttaatttcaaaatctatagaaaattctctttttcccagagataccattcttagccacttaaacaaaatataaaatactatttagcaatattccctgctgaatacttttaaacaagatagggctaggctgatttaaattataagttgaagtctaggaaaaacaaagtctatataatacaaaacgttggaatcaagtaatattacttgtttaagccaaatatattcatatttaaataacaattaaatagcaagagattaaataccaaccattcttaatcacagtttaagtctgataacaaaatcaaaactttaatgccatacaaaatacatctcacaaactaaccaatgcaaagctctaagctttaaactttttgacagtgtcaataaaaaccccaggaagggagaatattgcaactctccttggaacacaggtatcttaaatcatggttaaacagacagaatgttaagaatggtatggtttttattttctatagcaggtttattgatactttttttctagtaaagtttgaaaatctgacactacctgtccacatagaaggggaaacaaaacttggtcaaagtctgtagaacttcctgtggagagaaagagagataatttatacatctaatgggaccagtaaatctaacattaaccacagcacacaatctagcaactttaccctaaagaaagaggagacagatgaagaaatatgggctttatcaattacatgggaggagtaccaggcagtcaatcatgagaaataataaacatgatcaaacttcattaaaaatgaaaaattaatcaagaatcacacatgggcaagcagcaggagccatgcaggaaagctctgaagggagggaggcggttgggttgctgagtgttaacacccctccagggaacatctccagcctgaccatatggatcagagtgaataacaccgagccacatgggtttggcctggcagggccgctgttgctggcaccgtttttgcctgttacctaggaacagagggggccaggattagacaacgcttcccaacatcaataggccaaatcacagcagaatcgaaagccaacttgaagataattgtccctgaacactgtcagctacattttttagagtttaaaacttcatttacttactttacaaagaagttgccattttgggcatatatttattttggaaccaaactgtaacagttttaagtatatactattcttattgaaatatcaccatatttgaacatactcacctaattttaatgtattaaaatctaaagcaaactaccagtttaaatgtctttctaaaaaaatacatatataggtacataaagccaagcaca

SEQ ID NO: 697642 - DNA, 1898 bp, Homo sapiens
agcatactacccacatatactctaaatcactgaaatcttacaggctttgccttgtttgggtacactaaaatacatgatagaatcttcctgaagataagcacaaattttatagctttcttggaccatattatggcatttcttacttacaatgttattttctataacctttctgtcaataaaagtgggtttggttaagatgtaatgtatgtacagtttcatagttcaaatttccattaagagaaaactgaagagacaacaatcaaatgggcaaataaatgaatgtaaaaaactaatgattcaacctgaatgaaaaagagtagacatttttgaaaataaaataattgctattttattaatatagttaatacattaggttgataaagtaaaaaaaaaaaactcctctaaaattcttatcattaaccagtggctcgytaaaaagaaaaaaaaaaaacctcagactattttaattgtcttagagttctcatatttgtacctatctaagaaacagtttatcacaatgtaaatactaaggaaatgtttaggtggttttgtacttttaatttcaaaatctatagaaaattctctttttcccagagataccattcttagccacttaaacaaaatataaaatactatttagcaatattccctgctgaatacttttaaacaagatagggctaggctgatttaaattataagttgaagtctaggaaaaacaaagtctatataatacaaaacgttggaatcaagtaatattacttgtttaagccaaatatattcatatttaaataacaattaaatagcaagagattaaataccaaccattcttaatcacagtttaagtctgataacaaaatcaaaactttaatgccatacaaaatacatctcacaaactaaccaatgcaaagctctaagctttaaactttttgacagtgtcaataaaaaccccaggaagggagaatattgcaactctccttggaacacaggtatcttaaatcatggttaaacagacagaatgttaagaatggtatggtttttattttctatagcaggtttattgatactttttttctagtaaagtttgaaaatctgacactacctgtccacatagaaggggaaacaaaacttggtcaaagtctgtagaacttcctgtggagagaaagagagataatttatacatctaatgggaccagtaaatctaacattaaccacagcacacaatctagcaactttaccctaaagaaagaggagacagatgaagaaatatgggctttatcaattacatgggaggagtaccaggcagtcaatcatgagaaataataaacatgatcaaacttcattaaaaatgaaaaattaatcaagaatcacacatgggcaagcagcaggagccatgcaggaaagctctgaagggagggaggcggttgggttgctgagtgttaacacccctccagggaacatctccagcctgaccatatggatcagagtgaataacaccgagccacatgggtttggcctggcagggccgctgttgctggcaccgtttttgcctgttacctaggaacagagggggccaggattagacaacgcttcccaacatcaataggccaaatcacagcagaatcgaaagccaacttgaagataattgtccctgaacactgtcagctacattttttagagtttaaaacttcatttacttactttacaaagaagttgccattttgggcatatatttattttggaaccaaactgtaacagttttaagtatatactattcttattgaaatatcaccatatttgaacatactcacctaattttaatgtattaaaatctaaagcaaactaccagtttaaatgtctttctaaaaaaatacatatataggtacataaagccaagcaca

SEQ ID NO: 697643 - DNA, 405 bp, Homo sapiens
aaaatctgtgccaaaactattttatggaagcatttcatatctaacagtcaaaatgtttttgggggccggacatggtggcacacacctataatcccrgcactttggaaggacaaagcgggtggatcacttgaggtcaggagttcaagaccagcccggccaacatgatgaaaccccatctctactaaaaatacaaaacttagccaggcatggtcgtgggtgcctgtaatcccagctactcggtaggctgaggcacaagaatcgcttgaacctgggaggcagaagctgcagtgagccaaaatcgtgccactgcaatccagcctaggtgacagagcaaaacgccatctcaaaaaaaaatggttttcagagcaaggtaaaattcagtaaaaggaaagtatatatgtaata

SEQ ID NO: 697644 - DNA, 2059 bp, Homo sapiens
  misc_feature 1552, 1553, 1554, 1555, 1556, 1557, 1558, 1559, 1560, 1561,1562, 1563, 1564, 1565, 1566, 1567, 1568, 1569, 1570, 1571,1572, 1573, 1574, 1575, 1576, 1577, 1578, 1579, 1580, 1581,1582, 1583, 1584, 1585, 1586, 1587, 1588, 1589, 1590: n = A,T,C or G
  misc_feature 1591, 1592, 1593, 1594, 1595, 1596, 1597, 1598, 1599, 1600,1601, 1602, 1603, 1604, 1605, 1606, 1607, 1608, 1609, 1610,1611, 1612, 1613, 1614, 1615, 1616, 1617, 1618, 1619, 1620,1621, 1622, 1623, 1624, 1625, 1626, 1627, 1628, 1629: n = A,T,C or G
  misc_feature 1630, 1631, 1632, 1633, 1634, 1635, 1636, 1637, 1638, 1639,1640, 1641, 1642, 1643, 1644, 1645, 1646, 1647, 1648, 1649,1650, 1651: n = A,T,C or G
agtcaaccacccaactgagcctttcctgcacttgcttcctggattgcctgtaaatgaaaattgcataaagaccagaaatattataatagtacaggacagagaatcatctgagcctcccctccagctttaatatctaccaccttgttacaaaaccattatatacaatcacacactcactacaaaagtctgccctgcacttctggtgagatcctttattattatggtgtgtaatgatgtaatctttttctctattgtgtagccacagtctctttactgttgacatatgaaatactgcatctggagccaacactaaatatccctgactataccttcaaatgtgcggtcatctccagaaaatattgcctctaagttatcaatagaaggtattttctatttagttggcattcccagtgaatctgtttactgttaatttgcaggtagcatgcatcttgtcagrgtgatatggtttggctatgtccccacccaaatatcatcttgaattgcatctcccataattctcatgtgtcttgaaagggacctgatgggaggcaattgaatcatgggggtgggtctgtcccatgctgttctcgtgatagtgaataagtctcacacgatctgaggttttttttttataaagagcagttcccctacacaagctctctcttgcacactgtcatgtaagaagtctctttgctcttccttcatcttccaccacaattgtgagacctcagccctgtgcaactgtgggtccgttaaacctgtttcctttataaactacccagtcttgggtatgtctttattagcagcatgagaacagactaataaacaagggtacctttgacattccagcttgagagcaaagagaggcagccctgccttagccatctcttcctggaatggtgtggatgtcagggagcagctcaacatgtgggctgtttcttgatcttttaagtcagacttcatagcatggctttgtcattttgtttgaagtaaatccttgaaacattagatgtttctatattgaaatgacatgcattccatagcccaaaagacataatttctgtgttatttacttgtagcctttcctctatgagtgaggacaagtgcaaggtgattttagaggtagatttatgtgcatattatgtaatcgtttatccctcacattatatcttcgttttcctgtgatgtcatggcagagggtggattaatcagtaaaatgtctaggattggattgagaatgagcagacacctatctcaggcacaacctgtgagccatgtgactttatttttctattgttcaatgaagtatacccttttagccctttctgtactgagtagcagaaaattaatctcctaccactctgggtaatctcagacaatggtgggtaatcacaaaaaattccacactttctctgtcacttcaggtctctcactttcctctcccttactcaggttgcatttgcctttctgggaaatagtggagagtgtgctgcaagttcaataaagtgccacagtgtggccttggtggtaatttctgtatgctggtggctgnnnnnnnnnnnnnnnnnnnnnnnnnnnnnnnnnnnnnnnnnnnnnnnnnnnnnnnnnnnnnnnnnnnnnnnnnnnnnnnnnnnnnnnnnnnnnnnnnnnntttttttaagtacaattaattgcaatggcaaagcttattaaagtaagagggcaaaatcaatgtattaatgacacaacattacagctgcttaaccaggccaacaataaattgcacatagagtctgtcataggagaagctccaaattctatttaggttgtgctaagaggaaaaatataaggctgttctcaaatattacccccaaatcagagaataccactggagaaattcaaaaaaaagatccctattagtcttcataaagcacgtgcaacataaaaatgcatgcccttccacagcaacatggatacacagaacactactgaactgtaagatggtacattttaggttatgtattttttttttaccacagctaaaaaaatgcacgacttcttttgactgtgccttttacca

SEQ ID NO: 697645 - DNA, 592 bp, Homo sapiens
tgcaagccttgtctgagaatccgtcttcccttttgcggctcggaatctgtttttccgcagtcatttaaaagagaacggggaaaatacaccgcagtgcctgacacttccgagggctctggtgcccccgcgcggggagagagcgcccggcacgctccggagcaccagcccatggcccsggtcgcggcgggcacagcgctgggggcgcgctctggcgccagatgcgcaaccagcggcgcccgacgcctgcgcgtccctgcccggccggtgcgcggctctcctggcctcgccgagctcctgcccgggggaaaaaggcgggcaatccttctctctcgagagagcaatgggttggagtctcgttcaaaatatagtaatagtcactgatctacccgcagagtttggggatgggaaggatcaagaaaccgaacgttagagtgaatgctcggatctaggccaagcgttaaatattacgaagggaacgtaaaacatctattggggcttttttgtacagatcctgggcgctgagtgtaaccgcgggaattcttggacagcacccaaaaatcttgctgcaggtcccgaaagcaaggccagcagg

SEQ ID NO: 697646 - DNA, 592 bp, Homo sapiens
tgcaagccttgtctgagaatccgtcttcccttttgcggctcggaatctgtttttccgcagtcatttaaaagagaacggggaaaatacaccgcagtgcctgacacttccgagggctctggtgcccccgcgcggggagagagcgcccggcacgctccggagcaccagcccatggcccgggtcgcggcgggcacagcgctgggggcgcgctctggcgccagatgcgcaaccagcggcgcccgacgcctgcgcgtccctgcccggccggtgsgcggctctcctggcctcgccgagctcctgcccgggggaaaaaggcgggcaatccttctctctcgagagagcaatgggttggagtctcgttcaaaatatagtaatagtcactgatctacccgcagagtttggggatgggaaggatcaagaaaccgaacgttagagtgaatgctcggatctaggccaagcgttaaatattacgaagggaacgtaaaacatctattggggcttttttgtacagatcctgggcgctgagtgtaaccgcgggaattcttggacagcacccaaaaatcttgctgcaggtcccgaaagcaaggccagcagg

SEQ ID NO: 697647 - DNA, 676 bp, Homo sapiens
tggtcttagtgttgggggtcayggcaggtctgaaagtgtcagcagtggaggcacctagggcagaggccaacagcaaagacctggcagcaggacaaagtaggtttcagtagatgcaggaaagctgccaccacccctcaggaggtcctcccacttccctctgtctttggagagaacagatagatccctgaacttgcctatgcttgcagtcggaatataatcccagttttgaccaattcacctggaaacgactacatgaagctctctgtcgtggacagagctgagagctcaaggtagacattaatttggggggtggagggcacagggggaattaagacagtagatgtttccaagtcccaggctagggaggagtttcagtatttttcccagtcacagctttgatgagattgtgcttctgtctaccatttcattttactgagatgttatcttcttaccaaatatagagaggtggaaacacataaaggtgagatttctgtgatttctttttagatcaagacatggagaaaaaaattccaacctacttagcattaggttcaacctctgtcctagactcccaaagtccctttatatgcaagaatttcccctcctttgactatatgcccctctaccataattataaagctctgtgtgtgacagaggaaagacaataaaaagggag

SEQ ID NO: 697648 - DNA, 676 bp, Homo sapiens
tggtcttagtgttgggggtcacggcaggtctgaaagtgtcagcagtggaggcacctagggcagaggccaacagcaaagacctggcagcaggacaaagtaggtttcagtagatgcaggaaagctgccaccacccctcaggaggtcctcccacttccctctgtytttggagagaacagatagatccctgaacttgcctatgcttgcagtcggaatataatcccagttttgaccaattcacctggaaacgactacatgaagctctctgtcgtggacagagctgagagctcaaggtagacattaatttggggggtggagggcacagggggaattaagacagtagatgtttccaagtcccaggctagggaggagtttcagtatttttcccagtcacagctttgatgagattgtgcttctgtctaccatttcattttactgagatgttatcttcttaccaaatatagagaggtggaaacacataaaggtgagatttctgtgatttctttttagatcaagacatggagaaaaaaattccaacctacttagcattaggttcaacctctgtcctagactcccaaagtccctttatatgcaagaatttcccctcctttgactatatgcccctctaccataattataaagctctgtgtgtgacagaggaaagacaataaaaagggag

SEQ ID NO: 697649 - DNA, 1496 bp, Homo sapiens
tttttttcccttgaggttaatattttcctcttgacgacttcctcttttacccattgcaggccacatgagtccaggcagcatggctgaggtctgaatggcggtggctttccacccacagtggtctaacgcagctcaatctgcagctcagttgccttgccctcagaatagcttgctctgtgtgtgtgtgtgtgtgtgtgtgtgtgtgtgtgtgtgtgtgtgaacaaggtctacagcttcctttcaggttctctctctcacctttactccagctatcttgaatcaatgaaactgactgtgattgtataatgcagaaagctaggggtgccagccttctggcattcacaatttagtcttagctttgtacttacagtctcattttaaattgagatgaaattgttctgccccctgctgaagtttgagcttaraaagtggtaacacttgagcctttagcctggtcagaaataagtatgttagcattcctgaaaacttcttgttggcatccttttaataactctataataaccatgataaatttgtcatggcaccttattttccccatgttatgagatgttcttttctatcctatattttggctatttctgtctctatcttgtttcccctgttattctgtaaggtcttctatcattctccagtgctgtctgcatataggagatgctccgtaagtatcagataaatgaaggaataataagtactgtcatgctatgaaagtggtatgacttccaagcattgctggctagaaagaattcataatgttgtagtattttacaagcactaatgtagctaaaatggaaaaaggaacttgatctgttgtcatttttgttccctgtaggatcctggtgggcaatccatttacatgctcctgtgacattatgtggatcaagactctccaagaggctaaatccagtccagacactcaggatttgtactgcctgaatgaaagcagcaagaatattcccctggcaaacctgcagatacccaattgtggtaatttatttttaaatcaatgtgttctagttgctattaattattctcattgccttggtgcggtagtctgggaaaattaccactacctggattgtatatagtattctgttgatgtctccagtgactcagacaacatttatgtgcagtgtggagtaatctttgcaagtagaatattaattcagagtggatggctgtaaagtgcatagagaaaaagtacactgcttattctttttgtttgtttgttcatttgcttatttgttcatatttgtttttccatctatccatccatccatttatccacccatccatctgtgcaaaaactatctgctaaaagtgtggcacttctctggccacatatacccttggatggcacccaggccaaggatctcagggtgatgaaagtgtcctggcagcacaagcaaatccaattcaatccagcacattcccttaaacttgtcttactgccagaggtctgtgtctcttgatggggt

SEQ ID NO: 697650 - DNA, 600 bp, Homo sapiens
tgagtaacttacagctggatttgtggaccagacaagtgacagggagaatgggattcctttgagccaaaaaaacagtcagatcaacgtctcctggggcgtgaggcctcttatgaaggatgggtggacacctgaaagaaatgtggagtactgctggaaatatatgagctttgcatatattaacatgttatttatatattttataaattatatatgaatatatattaatkgttaatatatagtcaattaattgtattataatcaatatacttaattataattaacattatatattttgtatattatatattagtaacaatataaatttacataatatacagaaaatatacataaataataaatgttaatgtatgtaacatattaacttacataattaacatgtaatatattcatatgacatatatgtaatatattaatatatattacatatcacacatattacatgtatgtaatatattaacatcacatatattacatataagtaatatattaacatatattaactcaaatgaattaatatttgagttaatatatgcaataatatatgttaatagtataatatatatttaaagctcatatgtt

SEQ ID NO: 697651 - DNA, 600 bp, Homo sapiens
tgagtaacttacagctggatttgtggaccagacaagtgacagggagaatgggattcctttgagccaaaaaaacagtcagatcaacgtctcctggggcgtgaggcctcttatgaaggatgggtggacacctgaaagaaatgtggagtactgctggaaatatatgagctttgcatatattaacatgttatttatatattttataaattatatatgaatatatattaatggttaatatatagtcaattaattgtattataatcaatatacttaattataattaacattatatattttgtatattatatattagtaacaatataaatttacataatatacagaaaatatacataaataataaatgttaatgtatgtaacatatyaacttacataattaacatgtaatatattcatatgacatatatgtaatatattaatatatattacatatcacacatattacatgtatgtaatatattaacatcacatatattacatataagtaatatattaacatatattaactcaaatgaattaatatttgagttaatatatgcaataatatatgttaatagtataatatatatttaaagctcatatgtt

SEQ ID NO: 697652 - DNA, 651 bp, Homo sapiens
gggaatataagaggatttctccagggcaccagtacaggaagcagaagtcatggagctgccaaggtggctatgtagtgagagttgcctcatctggaaagggggttggaagtatggaactgtggtgggagacaaatgtagatacagttatccttcagcaatgaagaagtagagtgaagttcaccaccatcctctaaaaccaatagagaatatccatgtacagaagtcaccagtggcagacagagccaggcgaagacagagtgagtccaaagacacctctgtagacagccagcgagacacctcatcctctcccttgttcccctcccagctcctcttcccaaaggatacagagacccacaagtggataggggtggggagaggacatagcccagagtcaggcttaagagagggaagaggggccaggcgcagtggcttaagcctgtaatctcagcactttgggaggctgaggtgggtggatcacttgaggtcaggagttcaagaccagcctggccaatgtggcaaaaccccgtctctattaaaaatagaaaaattacctgggcatggtggtgcgcacctgtagtcycagctactcgggggactgaggcaggagaatcgcttgaacccaggaggtgggtattgcagtgaaccgagatc

SEQ ID NO: 697653 - DNA, 604 bp, Homo sapiens
tggaatccacaagcacaaattggaacctggtctgtttctccctgaatctaaccctgtgacacaggtatcctgacaacctggtagccttctcctggagaatctggtggagccacacacacccctggctcacgagtcagagaagctagaggaggagagccctggccccagaccatcagtgtgagctagcacagtagagacactgaataagcaggtgcctggcaccgtgcatcaaccttcagagcaccttggctgctgcttctcttctaccacccaatctctgcacaaagttctcctgggaacatccccaacctggatttacactgggaaggatattctgggacttgtagcttcagcttagctaaacaaacatggtataaagccagtacastgggtgtgtctataatccacctgaactccatttcctcatctgtagtgcaagtttattataggggaaaaagcatccttagcatttggttggtgttccataaattgtaattattattattattattatatagatgtagcatactcagattgactttcttgatactcatcacctgaaaggaaatacaaatttaatccttagtagttccaaaacagtcca

SEQ ID NO: 697654 - DNA, 604 bp, Homo sapiens
tggaatccacaagcacaaattggaacctggtctgtttctccctgaatctaaccctgtgacacaggtatcctgacaacctggtagccttctcctggagaatctggtggagccacacacacccctggctcacgagtcagagaagctagaggaggagagccctggccccagaccatcagtgtgagctagcacagtagagacactgaataagcaggtgcctggcaccgtgcatcaaccttcagagcaccttggctgctgcttctcttctaccacccaatctctgcacaaagttctcctgggaacatccccaacctggatttacactgggaaggatattctgggacttgtagcttcagcttagctaaacaaacatggtataaagccagtacagtgggtgtgtctataatccacctgaactccatttcctcatctgtagtgcaagtttattataggggmaaaagcatccttagcatttggttggtgttccataaattgtaattattattattattattatatagatgtagcatactcagattgactttcttgatactcatcacctgaaaggaaatacaaatttaatccttagtagttccaaaacagtcca

SEQ ID NO: 697655 - DNA, 663 bp, Homo sapiens
aaacctccaccttccaggttcaagcgattctcatgcctcagctcctgagtagctgggattacaggcacgcaccaccatrcccagctaatttttatatttttagtagaaacggggttttaccatattggccaggctggtcttgaactcctgacctcaagcgatctgcccgcctcagcctcccaaagtgctgggattacaggagtgagccaccacacctggctcatttctctttttcttatgaatatacagctaacctacatttcctagttcaccttgcagttaagtgcagccataactgagttttggccaatggaaggaagatgtaagtgtacaccatttccaagtctggcccataaaatactcctacaaaggtttccctctcctctttcccatctgctgccttagtggaaaggactctaaggactacagaaagcaaagccaaaagacgaaaggagcaaggcccattcatgactacatggaacaactatggcctcaccaccaccacccagacctccaagttaacccaaatgaagcaatgatgtaatactaacatagatggccagtgtaaataggtgggtggcttggtcatcaatcagacatggttaccagacttcagtttctggagaatacattatagaatatttgcaatactaagatgaaatt

SEQ ID NO: 697656 - DNA, 663 bp, Homo sapiens
aaacctccaccttccaggttcaagcgattctcatgcctcagctcctgagtagctgggattacaggcacgcaccaccatgcccagctaatttttatatttttagtagaaacggggttttaccatattggccaggctggtcttgaactcctgacctcaagcgatctgcccgcctcagcctcccaaagtgctgggattacaggagtgagccaccacacctggctcatttctctttttcttatgaatatacagctaacctacatttcctagttcaccttgcagttaagtgcagccataactgagttttggccaatggaaggaagatgtaagtgtacaccatttccaagtctggcccataaaatactcctacaaaggtttccctctcctctttcccatctgctgccttagtggaaaggactctaaggactacagaaagcaaagccaaaagacgaaaggagcaaggcccattcatgactacatggaacaactatggcctcaccaccaccacccagacctccaagttaacccaaatgaagcaatratgtaatactaacatagatggccagtgtaaataggtgggtggcttggtcatcaatcagacatggttaccagacttcagtttctggagaatacattatagaatatttgcaatactaagatgaaatt

SEQ ID NO: 697657 - DNA, 661 bp, Homo sapiens
gtggcaacagccccccagggtcctgtagtgactgagacgaaccacaggacaccaacgagtctggccgtcacggcctccggagcagacggaccagacggccaggcggccgccatcttggagaccgacactttctcgccacttccgcttccgcctccgcccaggagcgggagggagaagggcaacagggcgaggttcttaaagggacctcgcataggatagaggccagttccgtctcttcgcgtgttcttctgcccgtgagcccgtggaatcacattgggagacccttttaaaatatgcatgtacccagtccctcgaggcgaattttcccccacgaacccttggaaggagctaaggttaatctttgagtgctggaggaaggaaacgagtggtttaggcaatcaggtgcttcacccgcttctcattcccgcgcccttagctgaggcttctcggtcctctgaaagtgccagcggcgtcagaggttggaatcaatgctttcctgacatcatcgcagttagccctgataggttttgggtttacagataaggaacaaggctcaaagacgctgaaacacactgaccttaatcactaagtgactyagtcggaatgaaattgatgtttgccagatttcagatctatgctcttactaattgacataatgtcc

SEQ ID NO: 697658 - DNA, 825 bp, Homo sapiens
aaaaaaaaaaaaaaaaaacagccagggaaataaattttctttcaacatgtattaatacatagaaggagttaagatgaagggagttgcccaataaggaagctctgtcctttaagcccagggcaagaagggtctggacagagcatttctggcttgattccatgggaccctcccctggccgtctctgctggctcacacagcatccagttgctcaaggttccctctgtctgaacacttctccctgcagtcccagtgactgaagcactcggatcttcttttgggcggtcttgaagttgatgataatctccatctgcctgagttaggaaaacattttctgatgaaggacttggcaggaacgtgcttgtgcctgtcaaagctagtgagccctgagctgatgaggaaaataagtgctgatatgtgactgaggactgttctcacatcccagacagttcgtgtggactcccagaaataactgattacatttattcttgctttaggacaaagaacatgggaaatattctttttttaatttgccaagtggctgatatatttttcctcaccccrgctttattgaggtataattaacaaatagaaatatattgaaatcagcatgttgaagagatgtgggcactccaatgttcattgcggcattattcacaatcgataagatatggaagcagcccaggtgtccaccatcagatggatggataaggaatgtgtgatctatatactcaagggagtactgtttagcctttaaaaagatggaaatcttgttatttgagacaacatgataaacctggagtacattatgcagcatgaaataagcca

SEQ ID NO: 697659 - DNA, 631 bp, Homo sapiens
tttgaaaaactaaacactcgcctacaactcaaccgcaaatatccaatacagcatcccaggtgtcccacttatttgcttcctggggctgccacaacaaagaaccacacaagggggcgctaaaacaacagaaatctcttatcccacagttctggaggctggaaccccatgagcaaggtgtcagcagggttggttctgctaaggactgtgaggaaaaatgggctcaggcctcactccttgccttgcaggtggcagtcttctccctgtgccctcacatggtcatccttccatgcatgtgtcctcatcccctcttcttgacaaggacaccagtcatattgcgttagggtccaccctgacagtctcattttaatcacctctttatcctatctccaactccagtcatattctgaggtactggggttaggtgtccaacaaatgaatttgtggggaagtcacaattcacccatarcccccggcccctgcgtagagcatccccctccaactctgaagctgatgaggtgttcactcccaacccatcacttgcacaggacgcttctaaggccataggtgggacccccaacaacgtgtttgcgtgttcttgcttctgtgagatttgaaaagagcagtgttgtca

SEQ ID NO: 697660 - DNA, 2838 bp, Homo sapiens
gccatggtacgactacacgccctagtcttccttagtgtccagccctttggctaagcctgaaacactgcgtgaagtttaggcctggaaaaccctttgcaggtcttatccccttcactgtcctccctgggcagccagaggggaagccaaagaggagaggtattcttttttttttgagacagagtcttgttttgttgcccaggctggagtgcaatggtgtgatctcagctcactgcaacctctgcctctcgggttcaagcgattctcctgcctcagcctccagagtagctgggattacagatgcctgccaccacacctggtatttttagtagagacggggtttcaccgtgttggccaggctggtctcaaactcctgacctcaggtgatccacctgccttggcctcccaaagtgttgagaatacaggcatgagccaccacgcctggcttcaatgagtagagatattcttctgatgccctttccccaggcattcacaaactggcatttttagatatggcaggggcctttagaaataagatgagtcatgctgtcactggcctatgggacactggactgctgctggttctgtgtctgccagccccattggggaatgccatcttccttcacaaattgggaaacttgtgggatccaggagtcacttcaactaaatgagatagggctaggggtgaatgagggtgaagctttggagagagtactggtccctttaagaaaccctgcccaggaagtgagctgggatactttgagaagtgagtctcctctcattctctactactcttgactgtaggtggcctttcaaaggacttcactacaccagagaggatgggcaaggcatctgtgtttccctgggtcccaccccaggacctcccaggcctctctttctcagggagccacccctgcccgggattctgtctgccagcagccagtcctcaatgcttctggctccaggaggcctttattcttaaggtgattgtagggatgagtactatttcctcctactttccaatcttattggaaaaaaaaaaaatgccaaccctagcctgaggctggaagacggtgcctgctaatgaggaattcaccttgcacaagatccacccctcccatcctgtgttacttgaaactcctcctcctgggaatcctcccatccactcctcactactgtttttgtgcccaattcttactcatcctttcagacccatctgggcgtccctgaactacaagcctgggtcgacagcaccggctcagtgccttctgttaccctattccatcaccctaattgccacctgttactgaataatctttgtttctttttctttttttttttgatacggagtcttgctctgtcacccaggctggagtgcagtggcgcgatctcggctcactgcaagctcygcctcccaggttcacgccattctcctgcctcagcctcccgagtagctgggactacaggcgcccgccactgtgccaggctaattttttatatttttagtagagacgggtttcaccatgttagctgggatggtcttgatctcctgacctcatgatccgcccgcctcagcctcccaaaatgctgggattacaggcgtgagccaccgcgcccggccaatctttgtttctttcaatagactgtaggccgttgagaatttgttaaatctacagccccagcatctggcacaatgcctggcacacaggcatgtaaatgcttattaaactaactgcagaacccattcagtgccatagtaagagcacagactcaatcatcactatctgtgtcaccttgggccagtgttttaactaactctttgggccttacactgcttctctctaaaatcagagtaatactagcacttacctgtatacaaagcacaaatggtaaggattcaatgaatgttagttcttaatctttcaagaccatttactgaggcctgggatgaagatgtgctctttccctcccttgctctccgtgggcctccaggccttccatccttcttactgggaggtcacagaagccccactggccatgctgccctgggggattctgcactagagtttctctctagttactttcattggtcagatccaggctcctgaaggcagggaacagatcttccgcctctttccttccctcctggagcctggcactgtgctggggacagagcaggtgctcaagaaatactggttcccaatctatagtagacttgacatgcagctagtatggtttagcaaaagagggagggaggaagaggagacggagggaaggttgcatcccactgcaagcctgtgctgctcaggtgtgtctgaacttggtgtctcctaattcccattgaaccatctcccacaaaaccctttgtgttttagcaaaagagctttcggagctctaggttctgggctgtactaggcgtgaaaagaatgaaatgggggctttgagaaaggaaaatgagaatcacaaaaccatgtagtgaggacatgcatgccctgaggacttagtgaaacgcggccagacatgaaccctcaggaacattctggtctccactgagcgtctctgagattgggaggcagaggggcaggttgaaggtggaagaggcccctggaatcaggtcccaaagccctctcagtggggcctggtgacgctacaaggatggagtgagcattgtcaggaccccaaataggtgtctgggggtggtggcacctgcaaggcaaggcaggtttcaggggctggggtgtggcggcgggaggtgcaggcattttgctgaacgcatggggtctgcagaaatatggcactaaactccacagcccacagcaaatgcctgttggtttccatctg

SEQ ID NO: 697661 - DNA, 2838 bp, Homo sapiens
gccatggtacgactacacgccctagtcttccttagtgtccagccctttggctaagcctgaaacactgcgtgaagtttaggcctggaaaaccctttgcaggtcttatccccttcactgtcctccctgggcagccagaggggaagccaaagaggagaggtattcttttttttttgagacagagtcttgttttgttgcccaggctggagtgcaatggtgtgatctcagctcactgcaacctctgcctctcgggttcaagcgattctcctgcctcagcctccagagtagctgggattacagatgcctgccaccacacctggtatttttagtagagacggggtttcaccgtgttggccaggctggtctcaaactcctgacctcaggtgatccacctgccttggcctcccaaagtgttgagaatacaggcatgagccaccacgcctggcttcaatgagtagagatattcttctgatgccctttccccaggcattcacaaactggcatttttagatatggcaggggcctttagaaataagatgagtcatgctgtcactggcctatgggacactggactgctgctggttctgtgtctgccagccccattggggaatgccatcttccttcacaaattgggaaacttgtgggatccaggagtcacttcaactaaatgagatagggctaggggtgaatgagggtgaagctttggagagagtactggtccctttaagaaaccctgcccaggaagtgagctgggatactttgagaagtgagtctcctctcattctctactactcttgactgtaggtggcctttcaaaggacttcactacaccagagaggatgggcaaggcatctgtgtttccctgggtcccaccccaggacctcccaggcctctctttctcagggagccacccctgcccgggattctgtctgccagcagccagtcctcaatgcttctggctccaggaggcctttattcttaaggtgattgtagggatgagtactatttcctcctactttccaatcttattggaaaaaaaaaaaatgccaaccctagcctgaggctggaagacggtgcctgctaatgaggaattcaccttgcacaagatccacccctcccatcctgtgttacttgaaactcctcctcctgggaatcctcccatccactcctcactactgtttttgtgcccaattcttactcatcctttcagacccatctgggcgtccctgaactacaagcctgggtcgacagcaccggctcagtgccttctgttaccctattccatcaccctaattgccacctgttactgaataatctttgtttctttttctttttttttttgatacggagtcttgctctgtcacccaggctggagtgcagtggcgcgatctcggctcactgcaagctctgcctcccaggttcacgccattctcctgcctcagcctcccgagtagctgggactacaggcgcccgccactgygccaggctaattttttatatttttagtagagacgggtttcaccatgttagctgggatggtcttgatctcctgacctcatgatccgcccgcctcagcctcccaaaatgctgggattacaggcgtgagccaccgcgcccggccaatctttgtttctttcaatagactgtaggccgttgagaatttgttaaatctacagccccagcatctggcacaatgcctggcacacaggcatgtaaatgcttattaaactaactgcagaacccattcagtgccatagtaagagcacagactcaatcatcactatctgtgtcaccttgggccagtgttttaactaactctttgggccttacactgcttctctctaaaatcagagtaatactagcacttacctgtatacaaagcacaaatggtaaggattcaatgaatgttagttcttaatctttcaagaccatttactgaggcctgggatgaagatgtgctctttccctcccttgctctccgtgggcctccaggccttccatccttcttactgggaggtcacagaagccccactggccatgctgccctgggggattctgcactagagtttctctctagttactttcattggtcagatccaggctcctgaaggcagggaacagatcttccgcctctttccttccctcctggagcctggcactgtgctggggacagagcaggtgctcaagaaatactggttcccaatctatagtagacttgacatgcagctagtatggtttagcaaaagagggagggaggaagaggagacggagggaaggttgcatcccactgcaagcctgtgctgctcaggtgtgtctgaacttggtgtctcctaattcccattgaaccatctcccacaaaaccctttgtgttttagcaaaagagctttcggagctctaggttctgggctgtactaggcgtgaaaagaatgaaatgggggctttgagaaaggaaaatgagaatcacaaaaccatgtagtgaggacatgcatgccctgaggacttagtgaaacgcggccagacatgaaccctcaggaacattctggtctccactgagcgtctctgagattgggaggcagaggggcaggttgaaggtggaagaggcccctggaatcaggtcccaaagccctctcagtggggcctggtgacgctacaaggatggagtgagcattgtcaggaccccaaataggtgtctgggggtggtggcacctgcaaggcaaggcaggtttcaggggctggggtgtggcggcgggaggtgcaggcattttgctgaacgcatggggtctgcagaaatatggcactaaactccacagcccacagcaaatgcctgttggtttccatctg

SEQ ID NO: 697662 - DNA, 2838 bp, Homo sapiens
gccatggtacgactacacgccctagtcttccttagtgtccagccctttggctaagcctgaaacactgcgtgaagtttaggcctggaaaaccctttgcaggtcttatccccttcactgtcctccctgggcagccagaggggaagccaaagaggagaggtattcttttttttttgagacagagtcttgttttgttgcccaggctggagtgcaatggtgtgatctcagctcactgcaacctctgcctctcgggttcaagcgattctcctgcctcagcctccagagtagctgggattacagatgcctgccaccacacctggtatttttagtagagacggggtttcaccgtgttggccaggctggtctcaaactcctgacctcaggtgatccacctgccttggcctcccaaagtgttgagaatacaggcatgagccaccacgcctggcttcaatgagtagagatattcttctgatgccctttccccaggcattcacaaactggcatttttagatatggcaggggcctttagaaataagatgagtcatgctgtcactggcctatgggacactggactgctgctggttctgtgtctgccagccccattggggaatgccatcttccttcacaaattgggaaacttgtgggatccaggagtcacttcaactaaatgagatagggctaggggtgaatgagggtgaagctttggagagagtactggtccctttaagaaaccctgcccaggaagtgagctgggatactttgagaagtgagtctcctctcattctctactactcttgactgtaggtggcctttcaaaggacttcactacaccagagaggatgggcaaggcatctgtgtttccctgggtcccaccccaggacctcccaggcctctctttctcagggagccacccctgcccgggattctgtctgccagcagccagtcctcaatgcttctggctccaggaggcctttattcttaaggtgattgtagggatgagtactatttcctcctactttccaatcttattggaaaaaaaaaaaatgccaaccctagcctgaggctggaagacggtgcctgctaatgaggaattcaccttgcacaagatccacccctcccatcctgtgttacttgaaactcctcctcctgggaatcctcccatccactcctcactactgtttttgtgcccaattcttactcatcctttcagacccatctgggcgtccctgaactacaagcctgggtcgacagcaccggctcagtgccttctgttaccctattccatcaccctaattgccacctgttactgaataatctttgtttctttttctttttttttttgatacggagtcttgctctgtcacccaggctggagtgcagtggcgcgatctcggctcactgcaagctctgcctcccaggttcacgccattctcctgcctcagcctcccgagtagctgggactacaggcgcccgccactgtgccaggctaattttttatatttttagtagagacgggtttcaccatgttagctgggatggtcttgatctcctgacctcatgatccgcccgcctcagcctcccaaaatgctgggattacaggcgtgagccaccgcgcccggccaatctttgtttctttcaatagactgtaggccgttgagaatttgtkaaatctacagccccagcatctggcacaatgcctggcacacaggcatgtaaatgcttattaaactaactgcagaacccattcagtgccatagtaagagcacagactcaatcatcactatctgtgtcaccttgggccagtgttttaactaactctttgggccttacactgcttctctctaaaatcagagtaatactagcacttacctgtatacaaagcacaaatggtaaggattcaatgaatgttagttcttaatctttcaagaccatttactgaggcctgggatgaagatgtgctctttccctcccttgctctccgtgggcctccaggccttccatccttcttactgggaggtcacagaagccccactggccatgctgccctgggggattctgcactagagtttctctctagttactttcattggtcagatccaggctcctgaaggcagggaacagatcttccgcctctttccttccctcctggagcctggcactgtgctggggacagagcaggtgctcaagaaatactggttcccaatctatagtagacttgacatgcagctagtatggtttagcaaaagagggagggaggaagaggagacggagggaaggttgcatcccactgcaagcctgtgctgctcaggtgtgtctgaacttggtgtctcctaattcccattgaaccatctcccacaaaaccctttgtgttttagcaaaagagctttcggagctctaggttctgggctgtactaggcgtgaaaagaatgaaatgggggctttgagaaaggaaaatgagaatcacaaaaccatgtagtgaggacatgcatgccctgaggacttagtgaaacgcggccagacatgaaccctcaggaacattctggtctccactgagcgtctctgagattgggaggcagaggggcaggttgaaggtggaagaggcccctggaatcaggtcccaaagccctctcagtggggcctggtgacgctacaaggatggagtgagcattgtcaggaccccaaataggtgtctgggggtggtggcacctgcaaggcaaggcaggtttcaggggctggggtgtggcggcgggaggtgcaggcattttgctgaacgcatggggtctgcagaaatatggcactaaactccacagcccacagcaaatgcctgttggtttccatctg

SEQ ID NO: 697663 - DNA, 646 bp, Homo sapiens
tctaacccacccttaacatctagaattctgattgctttccttggagttaaawatattcatgagtaaaggctggaaacaagtgttgtactctgatgagtgacttttcaatggtgtcaagggtcagagcttcttgagcatcaatccttgacactagtaagatggaaaagaatgggacagaatgcccaatcacgttgctgccaacctcacttacctgcagcaggtttgcagacctgtgaaagatacaccccattgttcctttacttttctttccttttgtcactgacttttttctcttgcaaccccaggcagcatctctggcaagaatatctaacagctgtgtcaaagccacagggaataaagtgcccacaggggaaaaagtgtcatttctctccatctccctaattcctcacctgtcacttgtgaagatattcaggttgttaaagaaccaaatcaaacttctaaataaaggggaagtttctgaccaaaaacttcagtttacccataatcactacatgaagatgtagtcactatcttcattctccctccccctctgccccccacccacaaaaaaaaaaactataaagttttataactaggttttacatgtctaagcacataattttatacctaggactaagtagcagct

SEQ ID NO: 697664 - DNA, 1309 bp, Homo sapiens
tacttgtccaaggtcacacagttagcacatggcagaacaggagcctacacctgggtcttggagacataaagcgtgtgcatgttctttttggacttcctgctgcttctatggctttttgctgggaggtgttccagacatagctggtgggagggctgcaggcctgcagagggccttggagcatccctcattctgcccccttctttgagctcagtcccaacttttgcacaatgagcaccagggtctgtgtccaccttgtcctctgttcccctcctcccctgcctcattagaacaattcctcaagatcattgcactaactgccgggaaaggagaggtgggytttttttgttgctgttttttgtttttgtttttttctgtctcttaagggcaaataactatgttgcctataagaggaaaggaactggaactgcgatactggctcctgacctgggactggctgccctcatgcctgggatgtttctgtctctggctgcaggacctagtggaggtcatgattctcttgcaggtctccaacattgtggacccccaccagactgtgggtctgagcacccaggaacctggcgacgtcttcacctactccgagtttgatgggatcctggggctggcctatccctctcttgcctctgagtagtcagtgccagtgtttgacaacacgatgcagaggcacctggtggcccaagacctgttctcagtctacatgagtaggtaagagctgtgcccagccggggcctaagtttgatgtccttgtaaggactgtccactccttggggacactcaagggtagtcaccagcatccaagcaaaccttctcctttccaggcacatccaacctcttgtccaaaggcccatgatacagtcatttgtacagccagagttcactggatcaaaatttgactttcctttctggcactcaaaaaacaaagcccgattccacctctgcacaggggctttcaagttctttttcccaaagtggcagggcctcaataaccgtttgctaatgtcactgagatgcacagacttttagagctgactccaaaggagtccaacctactcctttcactagggaggaagctgaggcttggggagggaccaacaccctgagtggtggcggctgagccaggcctggagcctggggctcctgctcccaggcctgtgcttcctactctacctccctgcaccccgtgatgatgcagcttggctcagaaagaggggaggatggcagggaggagagaaagagaccctccccaggagaagttgctggatggccgaggcaggagaatgcagttaggggg

SEQ ID NO: 697665 - DNA, 632 bp, Homo sapiens
acatgactgatgctcaataattacttgttgagtgaaagaaagtgaagacagtccggtcaataagaaagagctgatgtagcaaccttcccctgggcagcaccttgatgggccgtgaccttctgtcagttaccagcggaggaatggggcaggggaaagggactgaattgctaatgctatgaatctgcaaagtaccaggaactatttcccagggttgtcactgcgctcacccctgcaccctcatcagaggttggctttcttcttcatgtgcacacatatgcatgcacacacacacacaaacacacacattctctcctgtaagggcctgaatggcttctgccattcctgatattgtcatcttcagtgctctrtgtcacctcccctccctctttgaagaccttagcacctggatctcagtctacatcctagaggacctgtgtcagggctgatggtctgtccaatcccctggaatctcaggtggccttagctgcagtagactggaaaatagcctctcttccttatggcttctcccatcaagatgaggagtctagttctcttccccttgattttggacaggactccatgctccctttggccaatggaaagaggcagaagtgatgttgcacacattctca

SEQ ID NO: 697666 - DNA, 651 bp, Homo sapiens
catacttactatmtggagctaatggttattgttttgctacagtgtcactaaacaaaaatcaacatacaaaggtgaaagggtggcacatgtctgctgattacatttaagggcccccaaagtctctctttttgtccttgcaagtggtaggattgtttcactgcgatataaataaaacgccttagtaattacatcctgagaacaccatggctcagtactattcatgccaacttaactgaactgaaacatggcactggtgtcagtggcttttacttattgatggatttgtaaggtggcaggctctttcatgtccaaaagcggtagtttcccagggtctcaagaagatttaaaaatattttccttccatcacaacacaaagcctactgactttaagtaatgctgctgagggttaacatttgaaactgacaagcagcacatgtgtattacagagataaggcctggcacatgttgctgcagcctcctgagattttgaaatgctagcagctccagctggtggctatgctccattcctaatgtgcactttttagggaaacttgagcccctccttctgactgtgatagggacatgtctgattggaatagggttatttttaaagatattcagaacaacgaacatatttattctaagaataaa

SEQ ID NO: 697667 - DNA, 651 bp, Homo sapiens
catacttactatctggagctaatggttattgttttgctacagtgtcactaaacaaaaatcaacatacaaaggtgaaagggtggcacatgtctgctgattacatttaagggcccccaaagtctctctttttgtccttgcaagtggtaggattgtttcactgsgatataaataaaacgccttagtaattacatcctgagaacaccatggctcagtactattcatgccaacttaactgaactgaaacatggcactggtgtcagtggcttttacttattgatggatttgtaaggtggcaggctctttcatgtccaaaagcggtagtttcccagggtctcaagaagatttaaaaatattttccttccatcacaacacaaagcctactgactttaagtaatgctgctgagggttaacatttgaaactgacaagcagcacatgtgtattacagagataaggcctggcacatgttgctgcagcctcctgagattttgaaatgctagcagctccagctggtggctatgctccattcctaatgtgcactttttagggaaacttgagcccctccttctgactgtgatagggacatgtctgattggaatagggttatttttaaagatattcagaacaacgaacatatttattctaagaataaa

SEQ ID NO: 697668 - DNA, 651 bp, Homo sapiens
catacttactatctggagctaatggttattgttttgctacagtgtcactaaacaaaaatcaacatacaaaggtgaaagggtggcacatgtctgctgattacatttaagggcccccaaagtctctctttttgtccttgcaagtggtaggattgtttcactgcgatataaataaaacgccttagtaaytacatcctgagaacaccatggctcagtactattcatgccaacttaactgaactgaaacatggcactggtgtcagtggcttttacttattgatggatttgtaaggtggcaggctctttcatgtccaaaagcggtagtttcccagggtctcaagaagatttaaaaatattttccttccatcacaacacaaagcctactgactttaagtaatgctgctgagggttaacatttgaaactgacaagcagcacatgtgtattacagagataaggcctggcacatgttgctgcagcctcctgagattttgaaatgctagcagctccagctggtggctatgctccattcctaatgtgcactttttagggaaacttgagcccctccttctgactgtgatagggacatgtctgattggaatagggttatttttaaagatattcagaacaacgaacatatttattctaagaataaa

SEQ ID NO: 697669 - DNA, 651 bp, Homo sapiens
catacttactatctggagctaatggttattgttttgctacagtgtcactaaacaaaaatcaacatacaaaggtgaaagggtggcacatgtctgctgattacatttaagggcccccaaagtctctctttttgtccttgcaagtggtaggattgtttcactgcgatataaataaaacgccttagtaattacatcctgagaacaccatggctcagtactattcatgccaacttaactgaactgaaacatggcactggtgtcagtggcttttacttattgatggatttgtaaggtggcaggctctttcatgtccaaaagcggtagtttcccagggtctcaagaagatttaaaaatattttccttccatcacaacacaaagcctactgactttaagtaatgctgctgagggttaacatttgaaactgacaagcagcacatgtgtattacrgagataaggcctggcacatgttgctgcagcctcctgagattttgaaatgctagcagctccagctggtggctatgctccattcctaatgtgcactttttagggaaacttgagcccctccttctgactgtgatagggacatgtctgattggaatagggttatttttaaagatattcagaacaacgaacatatttattctaagaataaa

SEQ ID NO: 697670 - DNA, 610 bp, Homo sapiens
ttttccttttgcatttttagtagagacagggtttccccatgttgcccaggctggtctcaaacttctgacctcaagtgatctgcccacctaagcctcccaaagtgctsggattacaaacatgagacactatgtccagcctgaaaaacttgattaacatcttaggaaggtgatataattcttttgtcatagaattttgtcagagaaaggcagagcaatgggtgtagaacagaaaagttttctaccaagttatcacagaatcaatctcttcagtctctcccagattccagacagctggccaaatattaccaaattaattgtgctaacacactggttttcatcttattgctcccctactcaagaattcccaggggtccctaattatccatgtggaatgctccagttccacagcctggcctttaagtgtcttactttaccataccccgccactccccttctctgcctgggccctgcctctctctgtaatgtgcattatccactccaccccagctttattgtctcctgatcagtgtgcacttctctcctaccacaaacatttgctcacctgtttgttttttcctctactgtttcacctattttattcctacatacc

SEQ ID NO: 697671 - DNA, 630 bp, Homo sapiens
tgagagggttggaaagtttytcacacaagtactgaagaaatacgagattttttactcgaaaaagtgaaaattagggagacaaaggatgtttctaatatatgtagagctgccacgtggaagatacaccagggttgcattttgttcctctaaaggcaagaactaggattggacagaagttataaggagctaggatttagcccagagtttccccacaatggaatgagagctgcaagatagggagtatacagcctctggaggtgttcaacaagaggccaattgaccagctaccttgtcccaggagaggggagtttgtactagagaatatctgatattatcttcagtgttaatacacaatgagtttatctacaatgactatgtatattacctctaggctctaaacaaacgctgctgaaagaagctgaagatcaagcagaccgtaaaatagatattcctccttatctctagaagactccaagtggtccagcaagagaggagtcatgaaatacctcagatcctctctcatctacatttgtctctggggctgttgagacaatgcctctgtcaggggaatgatgtcgtgggacctcctcttattgagattagcctctcagaagggtgtctgctcattgc

SEQ ID NO: 697672 - DNA, 630 bp, Homo sapiens
tgagagggttggaaagtttctcacacaagtactgaagaaatacgagattttttactcgaaaaagtgaaaattagggagacaaaggatgtttctaatatatgtagagctgccacgtggaagatacaccagggttgcattttgttcctctaaaggcaagaactaggattggacagaagttataaggagctaggatttagcccagagtttcccmacaatggaatgagagctgcaagatagggagtatacagcctctggaggtgttcaacaagaggccaattgaccagctaccttgtcccaggagaggggagtttgtactagagaatatctgatattatcttcagtgttaatacacaatgagtttatctacaatgactatgtatattacctctaggctctaaacaaacgctgctgaaagaagctgaagatcaagcagaccgtaaaatagatattcctccttatctctagaagactccaagtggtccagcaagagaggagtcatgaaatacctcagatcctctctcatctacatttgtctctggggctgttgagacaatgcctctgtcaggggaatgatgtcgtgggacctcctcttattgagattagcctctcagaagggtgtctgctcattgc

SEQ ID NO: 697673 - DNA, 597 bp, Homo sapiens
gaggataggtaatttataaggaaaagaggtttatttggctcatggttctgcaggctataccagaagcatggtaccagcatctgcttctgatgagggcctcaggctgtttctactcatggtggaaggtgaaggggaagyggcatgcagagatcacagggtaagggtggaagcaagaggaagaagggaacgatgccaggctctttttaacaaacagttctcaaggaaactaacacagtgagaactcagtcattaccctgaggatgccaccaagccattcatgagggatctgcccccaggacccaaatgcctcccactaggccctacctccaatgctgagaatcacatttcaatatgagatttgggggagtcaagcaaaccaaactagagcacccctgaattctattcccaaaagccataggggtctgtagacatcaggataagaaccttgctctaggattagtctcagggtacacccaagggggaagaggatcaaaattaactacaccttcactatcacagaagcagaaggaaaaaaagagacaacaaagaaaaacaaaacaaaatgatttttttccaaattcctttaactaaaggcaa

SEQ ID NO: 697674 - DNA, 597 bp, Homo sapiens
gaggataggtaatttataaggaaaagaggtttatttggctcatggttctgcaggctataccagaagcatggtaccagcatctgcttctgatgagggcctcaggctgtttctactcatggtggaaggtgaaggggaagtggcatgcagagatcacagggtaagggtggaagcaagaggaagaagggaacgatgccaggctctttttaacaracagttctcaaggaaactaacacagtgagaactcagtcattaccctgaggatgccaccaagccattcatgagggatctgcccccaggacccaaatgcctcccactaggccctacctccaatgctgagaatcacatttcaatatgagatttgggggagtcaagcaaaccaaactagagcacccctgaattctattcccaaaagccataggggtctgtagacatcaggataagaaccttgctctaggattagtctcagggtacacccaagggggaagaggatcaaaattaactacaccttcactatcacagaagcagaaggaaaaaaagagacaacaaagaaaaacaaaacaaaatgatttttttccaaattcctttaactaaaggcaa

SEQ ID NO: 697675 - DNA, 597 bp, Homo sapiens
gaggataggtaatttataaggaaaagaggtttatttggctcatggttctgcaggctataccagaagcatggtaccagcatctgcttctgatgagggcctcaggctgtttctactcatggtggaaggtgaaggggaagtggcatgcagagatcacagggtaagggtggaagcaagaggaagaagggaacgatgccaggctctttttaacaaacagttctcaaggaaactaacacagtgagaactcagtcattaccctgaggatgccaccaagccattcatgagggatctgcccccaggacccaaatgcctcccactaggccctacctccaaygctgagaatcacatttcaatatgagatttgggggagtcaagcaaaccaaactagagcacccctgaattctattcccaaaagccataggggtctgtagacatcaggataagaaccttgctctaggattagtctcagggtacacccaagggggaagaggatcaaaattaactacaccttcactatcacagaagcagaaggaaaaaaagagacaacaaagaaaaacaaaacaaaatgatttttttccaaattcctttaactaaaggcaa

SEQ ID NO: 697676 - DNA, 591 bp, Homo sapiens
taaataccactgtttgctttattaccattctgggaatattaaataaatagcagtggaaatagaacaggacagaaggccttttaagcagcctggactttattcagcctgtactattgacatttatgctcaagtaactaaataccaatttataaaagatctgcacatgtggatgtcacatttaatgcttaaaaaatctgctttaaaaaacccattaagttacatgctaatttcttcctggaaatacagaactttcgtttgtctgctcagcggccctaacttttcttctgggccctgtatcttaccccactccattgccctagagatgccattttactacacaatagttgattagtttataactggacaaattacagtatcccactcttttggcctcagatcaattggtctagttattggcacgtggcccagattggttgacrcattctttctctagtattttcttcttattgtatgtatttattgtggctaaagttttaatatttagagttgagcatttgtgagcagatcctaggcttgctggaggtgggagtagggagacagaaagaataagagagagagagagagagagag

SEQ ID NO: 697677 - DNA, 1050 bp, Homo sapiens
gcaagcaggytgctactgagaatagctagattttgttctcgcagaggaaatctggctgtgcttcaaaaatacccccaaggtggggagagcaagctgggacgttcacacagcaaactcccttaagtcattggttgagggatgttctcaaggggtggtaattctcagacatttctaggattcagtggctttggtagccagagaaaaacacatacgcaacaaaatgcaggtgtagccagttggaaatccagagaacaggcattaaagtaagtgtgaggggtttgagtggggcagcaacagtgataatatcccacttcaaaatcttactccaagaacagcaagtatatgaatggaaactcgaaaatggtgaagtttagccaccatgttattttacaatgatatgtacacaagtcttttttagcctaattttagtatttttactaccataagatcataatttttatttcttctgtgtgtctatttcttgtttcttatccttgtgatacatactaccttatttggtctcctgggcatctagttttctattaaaacaaaaacaaacaaaacatcttttcattttgtttggtgattttatatcagttcatttaccatcatcttgatttgggcagttacattaatctgattttctgaaaagaatgatggagtgtacatttagatcctaaagaggaggaagggaacatagaaattatgttgtgcctccgattcctctggtcagtgcagatattgcaaatggattacatgattgccttcaagactcacttcaccctgagcttcaagcacacttttgtcagttttgcaaacattcacattctattgcccatagtttgtatttctttacaattaaaaccataatttttaatcagttcaatagcctaccttctcttcatccatctctgcgctactaaaggctttttcagaaattcatacacctggcagatgagcatttttaccatttacttccccaaacctcacttggatgccataatggttttggggaatgcttgggtacctccctagtgagcactgttgtta

SEQ ID NO: 697678 - DNA, 1050 bp, Homo sapiens
gcaagcaggttgctactgagaatagctagattttgttctcgcagaggaaatctggctgtgcttcaaaaatacccccaaggtggggagagcaagctgggacgttcacacagcaaactcccttaagtcattggttgagggatgttctcaaggggtggtaattctcagacatttctaggattcagtggctttggtagccagagaaaaacacatacgcaacaaaatgcaggtgtagccagttggaaatccagagaacaggcattaaagtaagtgtgaggggtttgagtggggcagcaacagtgataatatcccacttcaaaatcttactccaagaacagcaagtatatgaatggaaactcgaaaatggtgaagtttagccaccatgttattttayaatgatatgtacacaagtcttttttagcctaattttagtatttttactaccataagatcataatttttatttcttctgtgtgtctatttcttgtttcttatccttgtgatacatactaccttatttggtctcctgggcatctagttttctattaaaacaaaaacaaacaaaacatcttttcattttgtttggtgattttatatcagttcatttaccatcatcttgatttgggcagttacattaatctgattttctgaaaagaatgatggagtgtacatttagatcctaaagaggaggaagggaacatagaaattatgttgtgcctccgattcctctggtcagtgcagatattgcaaatggattacatgattgccttcaagactcacttcaccctgagcttcaagcacacttttgtcagttttgcaaacattcacattctattgcccatagtttgtatttctttacaattaaaaccataatttttaatcagttcaatagcctaccttctcttcatccatctctgcgctactaaaggctttttcagaaattcatacacctggcagatgagcatttttaccatttacttccccaaacctcacttggatgccataatggttttggggaatgcttgggtacctccctagtgagcactgttgtta

SEQ ID NO: 697679 - DNA, 1050 bp, Homo sapiens
gcaagcaggttgctactgagaatagctagattttgttctcgcagaggaaatctggctgtgcttcaaaaatacccccaaggtggggagagcaagctgggacgttcacacagcaaactcccttaagtcattggttgagggatgttctcaaggggtggtaattctcagacatttctaggattcagtggctttggtagccagagaaaaacacatacgcaacaaaatgcaggtgtagccagttggaaatccagagaacaggcattaaagtaagtgtgaggggtttgagtggggcagcaacagtgataatatcccacttcaaaatcttactccaagaacagcaagtatatgaatggaaactcgaaaatggtgaagtttagccaccatgttattttacaatgatatgtacacaagtcttttttagcctaattttagtatttttactaccataagatcataatttttatttcttctgtgtgtctatttcttgtttcttatccttgtgatacatactaccttatttggtctcctgggcrtctagttttctattaaaacaaaaacaaacaaaacatcttttcattttgtttggtgattttatatcagttcatttaccatcatcttgatttgggcagttacattaatctgattttctgaaaagaatgatggagtgtacatttagatcctaaagaggaggaagggaacatagaaattatgttgtgcctccgattcctctggtcagtgcagatattgcaaatggattacatgattgccttcaagactcacttcaccctgagcttcaagcacacttttgtcagttttgcaaacattcacattctattgcccatagtttgtatttctttacaattaaaaccataatttttaatcagttcaatagcctaccttctcttcatccatctctgcgctactaaaggctttttcagaaattcatacacctggcagatgagcatttttaccatttacttccccaaacctcacttggatgccataatggttttggggaatgcttgggtacctccctagtgagcactgttgtta

SEQ ID NO: 697680 - DNA, 1050 bp, Homo sapiens
gcaagcaggttgctactgagaatagctagattttgttctcgcagaggaaatctggctgtgcttcaaaaatacccccaaggtggggagagcaagctgggacgttcacacagcaaactcccttaagtcattggttgagggatgttctcaaggggtggtaattctcagacatttctaggattcagtggctttggtagccagagaaaaacacatacgcaacaaaatgcaggtgtagccagttggaaatccagagaacaggcattaaagtaagtgtgaggggtttgagtggggcagcaacagtgataatatcccacttcaaaatcttactccaagaacagcaagtatatgaatggaaactcgaaaatggtgaagtttagccaccatgttattttacaatgatatgtacacaagtcttttttagcctaattttagtatttttactaccataagatcataatttttatttcttctgtgtgtctatttcttgtttcttatccttgtgatacatactaccttatttggtctcctgggcatctagttttctattaaaacaaaaacaaacaaaacrtcttttcattttgtttggtgattttatatcagttcatttaccatcatcttgatttgggcagttacattaatctgattttctgaaaagaatgatggagtgtacatttagatcctaaagaggaggaagggaacatagaaattatgttgtgcctccgattcctctggtcagtgcagatattgcaaatggattacatgattgccttcaagactcacttcaccctgagcttcaagcacacttttgtcagttttgcaaacattcacattctattgcccatagtttgtatttctttacaattaaaaccataatttttaatcagttcaatagcctaccttctcttcatccatctctgcgctactaaaggctttttcagaaattcatacacctggcagatgagcatttttaccatttacttccccaaacctcacttggatgccataatggttttggggaatgcttgggtacctccctagtgagcactgttgtta

SEQ ID NO: 697681 - DNA, 1050 bp, Homo sapiens
gcaagcaggttgctactgagaatagctagattttgttctcgcagaggaaatctggctgtgcttcaaaaatacccccaaggtggggagagcaagctgggacgttcacacagcaaactcccttaagtcattggttgagggatgttctcaaggggtggtaattctcagacatttctaggattcagtggctttggtagccagagaaaaacacatacgcaacaaaatgcaggtgtagccagttggaaatccagagaacaggcattaaagtaagtgtgaggggtttgagtggggcagcaacagtgataatatcccacttcaaaatcttactccaagaacagcaagtatatgaatggaaactcgaaaatggtgaagtttagccaccatgttattttacaatgatatgtacacaagtcttttttagcctaattttagtatttttactaccataagatcataatttttatttcttctgtgtgtctatttcttgtttcttatccttgtgatacatactaccttatttggtctcctgggcatctagttttctattaaaacaaaaacaaacaaaacatctttkcattttgtttggtgattttatatcagttcatttaccatcatcttgatttgggcagttacattaatctgattttctgaaaagaatgatggagtgtacatttagatcctaaagaggaggaagggaacatagaaattatgttgtgcctccgattcctctggtcagtgcagatattgcaaatggattacatgattgccttcaagactcacttcaccctgagcttcaagcacacttttgtcagttttgcaaacattcacattctattgcccatagtttgtatttctttacaattaaaaccataatttttaatcagttcaatagcctaccttctcttcatccatctctgcgctactaaaggctttttcagaaattcatacacctggcagatgagcatttttaccatttacttccccaaacctcacttggatgccataatggttttggggaatgcttgggtacctccctagtgagcactgttgtta

SEQ ID NO: 697682 - DNA, 848 bp, Homo sapiens
tctgttctgaagccttggcacaggctgacatccttcttacatattttactgaattgcaggtaggagcttggtctttctcatccttgtatcttcttcagcttcagcaattgtacttcatctacacttgaattgccaagtggcatggagctatcattgccccaacacatatgagtaatacacaaaactagagaaacaaaactagagaactatggagcacattaaacttttagctctgcgttttatacttgtatgtattctagcaattatggtcgtacccctctatgaatttacaccagcgtgttctcttctctgtgaggtagagaaaagtgaaagagaattagatgtgatataaattagatcaatagcttgtatggagaaacatattaggggaatacatttatattcataagtaattttattatctcattttctggtttcacatacctatagttaaatgtcttcactgtgaagacaatatccgtgtcttgaaataattttcatgaattctcttatttcccaagtgtgagaagaattaattcttcatgatgtcaaaattagaaaatggttccaatggttaggattacaaaactcwtccatgtcctaattaagaacattgttctcttatgactgaattaatttcaccatgaatgcagcattaagattaatctagtggagggaatcttaagtttctaataatttaatattacttacattttacccatagaacactatttaaaataaaatcatttgaaaaacatagaagttgacaaaatattaacctaaagcattaaatgtagaatttcctcctttatcactccaaatttcaatggattacatgaaataagttg

SEQ ID NO: 697683 - DNA, 1032 bp, Homo sapiens
tataatctatgctggagaagcggctctgctccaggaggttatttaggaacgcaggttcctttcatcccgtagctcttttgtctcccagggaattgtccgggtctttgtagttgaagttggtatttcagtatcattgctgtctttggaaagggccacaagttcaggacaaatctatctttctttctttcttttctttcttttctctctttctttctttctttcctttctctctctctctttctctctttcctttctttctctttcttctctctctccccttgctgctccccaccacctttctcccttccttcctttccttccttttccttttctccttccctccttcactcatttctttctcctctttatcttctttctcctctttctctctttctttctttcctttttttttttttttgtgacaggatctcactcttattgcccaggctggaatgcagtagtgtgatcatagctcactgcagcctcaatctccagggctcaagcaatctcctgcctcagcctcctgagtatcagggactacagatgtgtggcatcatgcccagctaaattttttatttttattttttgcagagacaaagtctatctatgttgcccagacttgtcttgaactcctgtggctcaagtgatcctcctgccttggcctttgaaaaggctggggttatagrcatgagccactatgcctggcccaggacaaatttcttttaagcaagtgtcatgaagttgcagccaacaattctgctcacagaacttaatcatgtgtcatatttagttgcaaggaaggctaggaaatattaactttatttttattttattaggattttattttaataggattggttctcaaacatggtagggagggatcaaactctcttgaggaacttttttttttttttttttttttttgagctggagtctcgctcctttgctcaggcgggagtgcaatggcatgatctcagctcactgcacctccgcctcccaggttcaagcgattctactgcctcagcctcctga

SEQ ID NO: 697684 - DNA, 584 bp, Homo sapiens
ctgttcttataaagacaccagtcatactgaaataaggcccaatcttatgaccttgttttaatttaattacctgtgttaagatcctatctccaaatacagtcacattctgaggttctggggattaggacttcaacatgtggattttaaggggacataatttagttcatgagagatgtcaagaaaatctaagaggattcttagaaatccaggaattcctgccactgtctggacatttccagcggccacagcatgcagaattgttccactgtatttaagagagagtggacaagcagtaggtgctgataatccacagcccggacttagataggtttggattttgtggctggagcctcggaacgacagataactgagtggctgaattccccattcaccagctgctttgttacataacttcacattttacaaagtccaaatgtggttgtgcagtaatgtttgctttatttctttcctaaagacctcgtaggttttagattatctcagtactaagacatttgagaacacatcttytttccttggagagtaatacagttcttggatcgtatctttctcctcacaacttagtg
